United States Patent Application Publication US 2026/0191920 A1 - sequence listing, part 8

SEQ ID NO: 34512 - protein, 238 aa, Streptococcus australis
  REGION 1..238: note = tr|A0A4V0BUK0|A0A4V0BUK0_9STRE 7-carboxy-7-deazaguanine synthase OS=Streptococcus australis OX=113107 GN=queE PE=3 SV=1
MTRERVLKLPVLEIFGPTFQGEGRAIGQKTMFVRTAGCDYHCDWCDSAFTWDGSEKPTRMTADEVITELDKLGSYDYVTLSGGNPAILAANMAELVTKLKERGVTLAVETQGSRWQNWLKDIDQVTLSPKPPSSKMEVNFETLDFIVSQLDRDKVTFKIPVFDDADLAFAKDIQERYQPDVLFLSAGNPEPKATGNIVQDQLDRLKELWERIATDDSWGNVRVLPQLHTLLYDNQRGV

SEQ ID NO: 34513 - protein, 242 aa, Streptococcus criceti
  REGION 1..242: note = tr|G5JPD6|G5JPD6_STRCG 7-carboxy-7-deazaguanine synthase OS=Streptococcus criceti HS-6 OX=873449 GN=queE; PE = 3 SV=1
MGPDMRKKRDLKLPILEIFGPTFQGEGRAIGQKTMFIRTGGCDYHCDWCDSAFTWDGSEKATPMTTDQVIAELDKLGTYDYVTLSGGNPCLQAANMAELVHKLKERDVTLAVETQGSRWQDWLLDIDQVTLSPKPPSSKMDVNMETLDFIVGRLDPEKVTYKIPIFNDEDLAFAKKIQARYQPDVLYLSVGNPEPKAQGDIVRHQLDRLHALWDKVAKDDNWGNVRVLPQLHTLVYDNQRGV

SEQ ID NO: 34514 - protein, 238 aa, Streptococcus downei
  REGION 1..238: note = tr|A0A380JEF9|A0A380JEF9_STRDO 7-carboxy-7-deazaguanine synthase OS=Streptococcus downei MFe28 OX=764290 GN=queE PE=3 SV=1
MRKKRELKLPILEIFGPTFQGEGRAIGQKTMFIRTGGCDYHCDWCDSAFAWDGSEKATPMTSDQVIAELDKLGTYDYVTLSGGNPCLQAANMEELVHKLKSRGVILAVETQGSRWQDWLLDIDQVTLSPKPPSSKMEVNMETLDFIVGKLDSSKVTYKIPIFNDDDLAFAKMIQARYNPDVLYLSVGNPEPKAEGDIVRHQLDRLQALWDKVAKDDSWGNVRVLPQLHTLVYDNQRGV

SEQ ID NO: 34515 - protein, 237 aa, Streptococcus dysgalactiae
  REGION 1..237: note = tr|A0A4V0BSH5|A0A4V0BSH5_STREQ 7-carboxy-7-deazaguanine synthase OS=Streptococcus dysgalactiae subsp. equisimilis OX=119602 GN=queE PE=3 SV=1
MAKIPVLEIFGPTIQGEGRVIGRKTMFVRTAGCDYRCSWCDSAFTWDGSAKGDIKLMTAEEIYDELKRIGGDLFNHVTISGGNPALIKGIQELVDLFQDKGIFSALETQGSKFQPWMTQIDDLTISPKPPSSTMTPDLKKLDEVITQCVPSSLNLKVVVFDDKDYDFAKMIHHRYPDIPFYLQVGNPYLSDSVDNHTEKLLERYEQLVDLVMQSNDMNHVYVLPQLHTLLWSNKKGV

SEQ ID NO: 34516 - protein, 242 aa, Streptococcus dysgalactiae
  REGION 1..242: note = tr|A0A4U9XUP9|A0A4U9XUP9_STREQ 7-carboxy-7-deazaguanine synthase OS=Streptococcus dysgalactiae subsp. equisimilis OX=119602 GN=queE PE=3 SV=1
MWALPRRFSYLPQRRRTTCSVVTPVADMQQTLRITEIFYSLQGETRTAGLPTVFVRLTGCPLRCHYCDTAYAFSGGEIVSLDAILERVAAYKPRYICVTGGEPLAQPNCIPLLERLCDAGYEVSLETSGALDVSRVDPRVSKVLDLKTPGSGEVGRNRYENIPLLTANDQVKFVVCSREDYDWAVSKLIEYRLEQRTGEVLFSPSHRQVDARELADWIVADNLPVRLQLQLHKILWNDEPGH

SEQ ID NO: 34517 - protein, 237 aa, Streptococcus equinus
  REGION 1..237: note = tr|A0A1H9C304|A0A1H9C304_STREI 7-carboxy-7-deazaguanine synthase OS=Streptococcus equinus; OX = 1335 GN=queE PE=3 SV=1
MTKRPLMIPVLEIFGPTFQGEGRAIGQKTMFVRTAGCDYHCAWCDSAFTWDGSEKPKRMTADEIIAELDKLGAYDYVTLSGGNPCLLGANMGELVAKLKTRGVTLGIETQGSRWQTWLKDIDQVTLSPKPPSSQMSVNFETLDFIVSQLDKGQVTFKIPVFNDEDLTFAKMIQKRYQPDVLYLSAGNPEPHASGNIVEAQLNRLRQLWETVAADSEWKSVRVLPQLHTLLYDNKRGV

SEQ ID NO: 34518 - protein, 237 aa, Streptococcus equinus
  REGION 1..237: note = tr|A0A091BW37|A0A091BW37_STREI 7-carboxy-7-deazaguanine synthase OS=Streptococcus equinus JB1 OX=1294274 GN=queE PE=3 SV=1
MTKRPLMIPVLEIFGPTFQGEGRAIGQKTMFVRTAGCDYHCAWCDSAFTWDGSEKPKRMTADEIIAELDKLGAYDYVTLSGGNPCLLGANMGELVAKLKARGVTLGIETQGSRWQTWLKDIDQVTLSPKPPSSQMSVNFETLDFIVSQLDKDQVTFKIPVFNDEDLTFAKMIQKRYQPDVLYLSAGNPEPHASGNIVEAQLNRLRQLWETVAADSEWKSVRVLPQLHTLLYDNKRGV

SEQ ID NO: 34519 - protein, 237 aa, Streptococcus gallolyticus
  REGION 1..237: note = tr|F5X1J1|F5X1J1_STRG1 7-carboxy-7-deazaguanine synthase OS=Streptococcus gallolyticus (strain ATCC 43143 / F-1867) OX=981539 GN=queE PE=3 SV=1
MTKRQLTLPILEIFGPTFQGEGRAIGQKTMFVRTGGCDYHCDWCDSAFTWDGSEKPKRMTVDEVIEQLDQLGTYDYVTLSGGNPCLLANNMAELVAKLKARGVTLAIETQGSRWQTWLKDIDQVTLSPKPPSSKMTVNFETLDFIVSKLKKDQITFKIPVFDDADLTFAKMIQKRYQPDVLYLSAGNPEPHANGNIVEHQLDRLRQLWETVAADPEWQSVRVLPQLHTLLYDNQRGV

SEQ ID NO: 34520 - protein, 237 aa, Streptococcus gallolyticus
  REGION 1..237: note = tr|A0A0E1XHG2|A0A0E1XHG2_STRGY 7-carboxy-7-deazaguanine synthase OS=Streptococcus gallolyticus subsp. gallolyticus TX20005 OX=545774 GN=queE; PE = 3 SV=1
MTKRQLTLPILEIFGPTFQGEGRAIGQKTMFVRTGGCDYHCDWCDSAFTWDGSEKPKRMTVDEVIEQLDQLGTYDYVTLSGGNPCLLANNMAELVAKLKARGVTLAIETQGSRWQTWLKDIDQVTLSPKPPSSKMTVNFETLDFIVSQLKKDQITFKIPVFDDADLAFAKMIQKRYQPDVLYLSAGNPEPHASGNIVEHQLDRLRQLWETVAADPEWQSVRVLPQLHTLLYDNQRGV

SEQ ID NO: 34521 - protein, 238 aa, unidentified
  source 1..238: note = Streptococcus halitosis
  REGION 1..238: note = tr|A0A426FXH7|A0A426FXH7_9STRE 7-carboxy-7-deazaguanine synthase OS=Streptococcus halitosis OX=2172545 GN=queE PE=3 SV=1
MTRERVLKLPVLEIFGPTFQGEGRAIGQKTMFVRTAGCDYHCDWCDSAFTWDGSEKPTRMTADEVIAALDKLGSYDYVTLSGGNPAILAANMAELVTKLKERGVTLAVETQGSRWQNWLKDIDQVTLSPKPPSSKMEVNFETLDFIVSQLDPDKVTFKIPVFDDADLAFAKGIQERYQPDVLFLSAGNPEPKATGNIVQDQLDRLKELWERVAADDSWGNVRVLPQLHTLLYDNQRGV

SEQ ID NO: 34522 - protein, 238 aa, Streptococcus henryi
  REGION 1..238: note = tr|A0A1G6A9H7|A0A1G6A9H7_9STRE 7-carboxy-7-deazaguanine synthase OS=Streptococcus henryi; OX = 439219 GN=queE PE=3 SV=1
MASKRQLKLPVLEIFGPTFQGEGRAIGQKTMFVRTAGCDYHCDWCDSAFTWDGSEKPKPMTVDEVISELDKLGSYDYVTLSGGNPCLLASNMAELVNKLKNRGVTLAVETQGSRWQEWLKDIDQVTLSPKPPSSKMTVNFETLDFIVSNLRDDQITFKIPVFNDEDLAFAKGIQERYQPDVLYLSAGNPEPQAQGDIVSAQLNRLRELWERVAADDTWGNVRVLPQLHTLLYDNQRGV

SEQ ID NO: 34523 - protein, 238 aa, Streptococcus infantis
  REGION 1..238: note = tr|E8K2R2|E8K2R2_9STRE 7-carboxy-7-deazaguanine synthase OS=Streptococcus infantis ATCC 700779 OX=889204; GN = queE PE=3 SV=1
MTKERVLKLPVLEIFGPTFQGEGRAIGQKTMFVRTAGCDYHCDWCDSAFTWDGSEKPTRMTADEVIAELDKLGSYDYVTLSGGNPAILAANMAQLVTKLKERGITLAVETQGSRWQNWLKDIDQVTLSPKPPSSKMEVNFETLDFIVSQLDPDKVTFKIPVFDDADLAFAKNIQERYKPDVLFLSAGNPEPKATGNIVQDQLDRLKELWERVAADDSWGNVRVLPQLHTLLYDNQRGV

SEQ ID NO: 34524 - protein, 238 aa, Streptococcus infantis
  REGION 1..238: note = tr|A0A139RE92|A0A139RE92_9STRE 7-carboxy-7-deazaguanine synthase OS=Streptococcus infantis OX=68892 GN=queE PE=3 SV=1
MTSERVLKLPVLEIFGPTFQGEGRAIGQKTMFVRTAGCDYHCDWCDSAFTWDGSEKPTRMTADEVIAELDKLGSYDYVTLSGGNPAILAANMAELVTKLKQRGVTLAVETQGSRWQNWLKDIDQVTLSPKPPSSKMEVNFETLDFIVSQLDSDKVTFKIPVFDDADLAFAKGIQERYQPDVLFLSAGNPEPKATGNIVQDQLDRLKELWERVAADDSWGNVRVLPQLHTLLYDNQRGV

SEQ ID NO: 34525 - protein, 99 aa, Streptococcus lutetiensis
  REGION 1..99: note = tr|A0A2X3WAG5|A0A2X3WAG5_9STRE Radical SAM domain-containing protein OS=Streptococcus lutetiensis; OX = 150055 GN=queE_2 PE=4 SV=1
MTKRPLMIPVLEIFGPTFQGEGRAIGQKTMFVRTAVCDYHCAWCDSVFTWDGSEKPKRMTADEIIAELDKLGSYDYVTLSGGNPCLLGAKANMGNWLLS

SEQ ID NO: 34526 - protein, 103 aa, Streptococcus lutetiensis
  REGION 1..103: note = tr|A0A4V0E5J1|A0A4V0E5J1_9STRE Radical SAM domain-containing protein OS=Streptococcus lutetiensis; OX = 150055 GN=queE_1 PE=4 SV=1
MTVNFEILDFIVSQLDKDQVTFKIPVFNDEDLTFAKMIQKRYQPDVLYLSAGNPEPHACGNIVEAQLNHLRQLWETVAADTEWKSVRVLPQLHTLLYDNKRGV

SEQ ID NO: 34527 - protein, 238 aa, unidentified
  source 1..238: note = Streptococcus macedonicus
  REGION 1..238: note = tr|A0A2G3NYA5|A0A2G3NYA5_STRMC 7-carboxy-7-deazaguanine synthase OS=Streptococcus macedonicus OX=59310 GN=queE PE=3 SV=1
MMTKRQLTLPILEIFGPTFQGEGREIGQKTMFVRTGGCDYHCDWCDSAFTWDGSEKPKRMTVDEVIEQLDQLGTYNHVTLSGGNPCLLANNMAELVAKLKALGVTLAIETQGSRWQTWLKDIDQVTLSPKPPSSKMTVNFETLDFIVSQLKKDQMTFKIPVFDDADLAFAKMIQKRYQPDVLYLSAGNPEPHANGNIVEHQLDRLRQLWETVAADPEWQSVRVLPQLHTLLYDNQRGV

SEQ ID NO: 34528 - protein, 237 aa, unidentified
  source 1..237: note = Streptococcus macedonicus
  REGION 1..237: note = tr|A0A1C3SPA7|A0A1C3SPA7_STRMC 7-carboxy-7-deazaguanine synthase OS=Streptococcus macedonicus OX=59310 GN=queE PE=3 SV=1
MTKRQLTLPILEIFGPTFQGEGREIGQKTMFVRTGGCDYHCDWCDSAFTWDGSEKPKRMTVDEVIEQLDQLGTYNHVTLSGGNPCLLANNMAELVAKLKALGVTLAIETQGSRWQTWLKDIDQVTLSPKPPSSKMTVNFETLDFIVSQLKKDQMTFKIPVFDDADLAFAKMIQKRYRPDVLYLSAGNPEPHANGNIVEHQLDRLRQLWETVAADPEWQSVRVLPQLHTLLYDNQRGV

SEQ ID NO: 34529 - protein, 238 aa, Streptococcus mitis
  REGION 1..238: note = tr|S7XJ79|S7XJ79_STRMT 7-carboxy-7-deazaguanine synthase OS=Streptococcus mitis 29/42 OX=1340486 GN=queE; PE = 3 SV=1
MTRERVLKLPVLEIFGPTFQGEGRAIGQKTMFVRTAGCDYHCDWCDSAFTWDGSEKPTRMTADEVIAELDKLGSYDYVTLSGGNPAILAANMAELVTKLKERGVTLAVETQGSRWQNWLKDIDQVTLSPKPPSSKMEVNFETLDFIVSQLDPDKVTFKIPVFDDADLAFAKGIQERYQPDVLFLSAGNPEPKATGNIIQDQLDRLKELWERVAADDSWGNVRVLPQLHTLLYDNQRGV

SEQ ID NO: 34530 - protein, 238 aa, Streptococcus mitis
  REGION 1..238: note = tr|A0A4U9YZC0|A0A4U9YZC0_STRMT 7-carboxy-7-deazaguanine synthase OS=Streptococcus mitis; OX = 28037 GN=queE PE=3 SV=1
MTRERVLKLPVLEIFGPTFQGEGRAIGQKTMFVRTAGCDYHCDWCDSAFTWDGSEKPTRMTADEVIAALDKLGSYDYVTLSGGNPAILAANMAELVTKLKERGITLAVETQGSRWQNWLKDIDQVTLSPKPPSSKMEVNFETLDFIVSQLDPNKVTFKIPVFDDADLAFAKGIQERYQPDVLFLSAGNPEPKARGNIVQDQLDRLKELWERVAADDSWGNVRVLPQLHTLLYDNQRGV

SEQ ID NO: 34531 - protein, 238 aa, Streptococcus mutans
  REGION 1..238: note = tr|A0A3S4WL38|A0A3S4WL38_STRMG 7-carboxy-7-deazaguanine synthase OS=Streptococcus mutans; OX = 1309 GN=queE PE=3 SV=1
MKKQHLLKLPILEIFGPTFQGEGRSIGQKTMFVRTGGCDYHCDWCDSAFTWDGSEKPTMMTSDQVIDELDKLGHYDYVTLSGGNPCLLAANMEELVTKLKDRQVTLAVETQGSRWQSWLKDIDQVTLSPKPPSSKMDVHFETLDFIVSQLDPQKVAYKIPIFDEADLDFAKMIQERYQPDVLYLSAGNPEPKASGDIVQHQLTRLKNLWMRVAQDNSWGNVRVLPQLHTLVYDNKRGV

SEQ ID NO: 34532 - protein, 243 aa, Streptococcus mutans
  REGION 1..243: note = tr|A0A2J9QEP0|A0A2J9QEP0_STRMG 7-carboxy-7-deazaguanine synthase OS=Streptococcus mutans; OX = 1309 GN=queE PE=3 SV=1
MGFTSMKKQRLLKLPVLEIFGPTFQGEGRAIGQKTMFVRTGGCDYHCDWCDSAFTWDGSEKPTMMTSDQIIEALDKLGTYDYVTLSGGNPCLLAANMAQLVRKLKKRQVTLAVETQGSRWQEWLKAIDQVTLSPKPPSSKMKVNLQTLDFIVSNLDPQKVTYKIPIFDEDDLKFAQMIQGRYQPDVLYLSVGNPEPKASGDIVQNQLKRLKELWEYIAQDDSWGNVRVLPQLHTLVYDNKRGV

SEQ ID NO: 34533 - protein, 238 aa, Streptococcus oralis
  REGION 1..238: note = tr|A0A428IKC0|A0A428IKC0_STROR 7-carboxy-7-deazaguanine synthase OS=Streptococcus oralis; OX = 1303 GN=queE PE=3 SV=1
MTRERVLKLPVLEIFGPTFQGEGRAIGQKTMFVRTAGCDYHCDWCDSAFTWDGSEKPTRMTADEVIAALDKLGSYDYVTLSGGNPAILAANMAQLVTKLKERGVTLAVETQGSRWQNWLKDIDQVTLSPKPPSSKMEVNFETLDFIVSQLDPDKVTFKIPVFDDADLAFAKEVQERYQPDVLFLSAGNPEPKATGNIVQDQLDRLKELWEHVAADDSWGNVRVLPQLHTLLYDNQRGV

SEQ ID NO: 34534 - protein, 238 aa, Streptococcus oralis
  REGION 1..238: note = tr|A0A1X1J3L0|A0A1X1J3L0_STROR 7-carboxy-7-deazaguanine synthase OS=Streptococcus oralis subsp. dentisani OX=1458253 GN=queE PE=3 SV=1
MTRERVLKLPVLEIFGPTFQGEGRAIGQKTMFVRTAGCDYHCDWCDSAFTWDGSEKPTRMTADEVIAALDKLGSYDYVTLSGGNPAILAANMAQLVTKLKERGVTLAVETQGSRWQNWLKDIDQVTLSPKPPSSKMEVNFETLDFIVSQLDPDKVTFKIPVFDDADLAFAKGIQERYQPDVLFLSAGNPEPKATGNIVQDQLDRLKELWERVAADDSWGNVRVLPQLHTLLYDNQRGV

SEQ ID NO: 34535 - protein, 237 aa, unidentified
  source 1..237: note = Streptococcus pasteurianus
  REGION 1..237: note = tr|F5X766|F5X766_STRPX 7-carboxy-7-deazaguanine synthase OS=Streptococcus pasteurianus (strain ATCC 43144 / JCM 5346 / CDC 1723-81) OX=981540 GN=queE PE=3 SV=1
MTKRQLTLPILEIFGPTFQGEGRAIGQKTMFVRTGGCDYHCDWCDSAFTWDGSEKPKRMTTDEVIEQLDQLGTYDYVTLSGGNPCLLANNMAELVAKLKARGVTLAIETQGSRWQTWLKDIDQVTLSPKPPSSKMTVNFETLDFIVSQLKKDQITFKVPVFDDADLVFAKMIQKRYQPDVLYLSAGNPEPHANGNIVEHQLERLRQLWETVATDPEWQSVRVLPQLHTLLYDNQRGV

SEQ ID NO: 34536 - protein, 237 aa, unidentified; identical to SEQ ID NO: 34535
  source 1..237: note = Streptococcus pasteurianus
  REGION 1..237: note = tr|A0A135YN06|A0A135YN06_9STRE 7-carboxy-7-deazaguanine synthase OS=Streptococcus pasteurianus OX=197614 GN=queE PE=3 SV=1

SEQ ID NO: 34537 - protein, 238 aa, Streptococcus peroris
  REGION 1..238: note = tr|E8KDG7|E8KDG7_9STRE 7-carboxy-7-deazaguanine synthase OS=Streptococcus peroris ATCC 700780 OX=888746; GN = queE PE=3 SV=1
MTKERVLKLPVLEIFGPTFQGEGRAIGQKTMFVRTAGCDYHCDWCDSAFTWDGSEKPTRMTADEVIAALDKLGTYDYVTLSGGNPALLAANMAELVTKLKERGVTLAVETQGSRWQTWLKDIDQVTLSPKPPSSKMEVNFETLDFIVSHLDPDKVTFKIPVFNEEDLEFAKDIQKRYKPDVLYLSAGNPEPKATGNIVQDQLDRLKELWERIAADDSWGNVRVLPQLHTLLYDNQRGV

SEQ ID NO: 34538 - protein, 223 aa, Streptococcus pneumoniae
  REGION 1..223: note = tr|A0A4U9LPS1|A0A4U9LPS1_STREE 7-carboxy-7-deazaguanine synthase OS=Streptococcus pneumoniae OX=1313 GN=queE PE=3 SV=1
MQYPINEMFQTLQGEGYFTGVPAIFIRLQGCPVGCAWCDTKQTWEKLEDREVSLFSILAKTKESDKWGAASSEDLLAVISRQGYTARHVVITGGEPCIHDLLPLTDLLEKNGFSCQIETSGTHEVRCTPNTWVTVSPKLNMRGGYDVLSQALERANEIKHPVGRVRDIEALDELLATLTDDKPRVIALQPISQKDDATRLCIETCIARNWRLSMQTHKYLNIA

SEQ ID NO: 34539 - protein, 238 aa, Streptococcus pneumoniae
  REGION 1..238: note = tr|A0A0T8TL07|A0A0T8TL07_STREE 7-carboxy-7-deazaguanine synthase OS=Streptococcus pneumoniae OX=1313 GN=queE PE=3 SV=1
MTRERVLKLPVLEIFGPTFQGEGRAIGQKTMFVRTAGCDYHCDWCDSAFTWDGSEKPTRMTADEVIAALDKLGSYDYVTLSGGNPAILAANMAELVTKLKERGVTLAVETQGSRWQNWLKDIDQVTLSPKPPSSKMEVNFETLDFIVSQLDPDKVTFKIPVFDDADLAFARGIQERYQPDVLFLSAGNPEPKATGNIVQDQLDRLKELWERIAADDSWGNVRVLPQLHTLLYDNQRGV

SEQ ID NO: 34540 - protein, 238 aa, Streptococcus pseudopneumoniae
  REGION 1..238: note = tr|G0I719|G0I719_STRES 7-carboxy-7-deazaguanine synthase OS=Streptococcus pseudopneumoniae (strain IS7493); OX = 1054460 GN=queE PE=3 SV=1
MTRERVLKLPVLEIFGPTFQGEGRAIGQKTMFVRTAGCDYHCDWCDSAFTWDGSEKPTRMTADEVIAALDKLGSYDYVTLSGGNPAILAANMAELVTKLKERGVTLAVETQGSRWQNWLKDIDQVTLSPKPPSSKMEVNFETLDFIVSQLDPDKVTFKIPVFDDDDLAFARGIQERYQPDVLFLSAGNPEPKARGNIVQDQLDRLKELWERIAADDSWGNVRVLPQLHTLLYDNKRGV

SEQ ID NO: 34541 - protein, 238 aa, Streptococcus pseudopneumoniae
  REGION 1..238: note = tr|A0A3A4N138|A0A3A4N138_9STRE 7-carboxy-7-deazaguanine synthase OS=Streptococcus pseudopneumoniae OX=257758 GN=queE PE=3 SV=1
MTRERVLKLPVLEIFGPTFQGEGRAIGQKTMFVRTAGCDYHCDWCDSAFTWDGSEKPTRMTADEVIAALDKLGSYDYVTLSGGNPAILAANMAELVTKLKERGVTLAVETQGSRWQNWLKDIDQVTLSPKPPSSKMEVNFETLDFIVSQLEPDKVTFKIPVFDDADLAFAKGIQERYQPDVLFLSAGNPEPKATGNIVQDQLDRLKELWERVAADDSWGNVRVLPQLHTLLYDNQRGV

SEQ ID NO: 34542 - protein, 238 aa, Streptococcus ratti; identical to SEQ ID NO: 34531
  REGION 1..238: note = tr|J3JP79|J3JP79_STRRT 7-carboxy-7-deazaguanine synthase OS=Streptococcus ratti FA-1 = DSM 20564 OX=699248; GN = queE PE=3 SV=1

SEQ ID NO: 34543 - protein, 243 aa, Streptococcus ratti
  REGION 1..243: note = tr|A0A5J6NMV4|A0A5J6NMV4_STRRT 7-carboxy-7-deazaguanine synthase QueE OS=Streptococcus ratti OX=1341 GN=queE PE=4 SV=1
MGFASMKKQHLLKLPILEIFGPTFQGEGRSIGQKTMFVRTGGCDYHCDWCDSAFTWDGSEKPTMMTSDQVIDELDKLGHYDYVTLSGGNPCLLAANMEELVTKLKDRQVTLAVETQGSRWQSWLKDIDQVTLSPKPPSSKMDVHFETLDFIVSQLDPQKVAYKIPIFDEADLDFAKMIQERYQPDVLYLSAGNPEPKASGDIVQHQLTRLKNLWMRVAQDNSWGNVRVLPQLHTLVYDNKRGV

SEQ ID NO: 34544 - protein, 247 aa, Streptococcus salivarius
  REGION 1..247: note = tr|J7SIR4|J7SIR4_STRSL 7-carboxy-7-deazaguanine synthase OS=Streptococcus salivarius K12 OX=1200793; GN = queE PE=3 SV=1
MQSLDGSGWMTRERVLKLPVLEIFGPTFQGEGRAIGQKTMFVRTAGCDYHCDWCDSAFTWDGSEKPTRMTADEVIEALDALGTYDYVTLSGGNPALLAANMAELVSKLKARGVTLAVETQGSRWQEWLKDIDQVTLSPKPPSSKMEVNMETLDFIVSQLDPDKVTFKVPVFDDADLAFAKMIQKRYQPDVMFLSAGNPEPKAEGNIVQHQLDRLKELWETVAADNSWGNVRVLPQLHTLLYDNERGV

SEQ ID NO: 34545 - protein, 238 aa, Streptococcus salivarius
  REGION 1..238: note = tr|A0A0A1DXJ9|A0A0A1DXJ9_STRSL 7-carboxy-7-deazaguanine synthase OS=Streptococcus salivarius OX=1304 GN=queE PE=3 SV=1
MTRERVLKLPVLEIFGPTFQGEGRAIGQKTMFVRTAGCDYHCDWCDSAFTWDGSEKPTRMTADEVIEALDALGTYDYVTLSGGNPALLAANMAELVSKLKARGVTLAVETQGSRWQEWLKDIDQVTLSPKPPSSKMEVNMETLDFIVSQLDPDKVTFKVPVFDDDDLAFAKMIQERYQPDVMFLSAGNPEPKAEGNIVQHQLDRLKELWETVAADDSWGNVRVLPQLHTLLYDNERGV

SEQ ID NO: 34546 - protein, 238 aa, Streptococcus sobrinus
  REGION 1..238: note = tr|U2KHJ7|U2KHJ7_9STRE 7-carboxy-7-deazaguanine synthase OS=Streptococcus sobrinus W1703 OX=1227275; GN = queE PE=3 SV=1
MRKQRQLKLPILEIFGPTFQGEGRAIGQKTMFIRTGGCDYHCDWCDSAFTWDDSEKATPMTSDQVIAELDKLGTYDYVTLSGGNPCLQAANMAELVNKLKERGVTLAVETQGSRWQDWLLDIDQVTLSPKPPSSKMEVNMETLDFIVSKLDPAKVTYKIPIFNDADLAFAKEIQARYKPDVLYLSVGNPEPTAEGDIVRHQLDRLHALWDKVALDDSWGNVRVLPQLHTLVYDNQRGV

SEQ ID NO: 34547 - protein, 238 aa, Streptococcus sp.
  REGION 1..238: note = tr|A0A1E9G826|A0A1E9G826_9STRE 7-carboxy-7-deazaguanine synthase OS=Streptococcus sp. HMSC076C08 OX=1739270 GN=queE PE=3 SV=1
MTRERVLKLPVLEIFGPTFQGEGRAIGQKTMFVRTAGCDYHCDWCDSAFTWDGSEKPTRMTADEVIAALDKLGSYDYVTLSGGNPAILAANMAELVTKLKERGVTLAVETQGSRWQNWLKDIDQVTLSPKPPSSKMEVNFETLDFIVSQLDPGKVTFKIPVFDDADLAFAKGIQERYQPDVLFLSAGNPEPKATGNIVQDQLDRLKELWKRVAADDSWGNVRVLPQLHTLLYDNQRGV

SEQ ID NO: 34548 - protein, 237 aa, Streptococcus sp.
  REGION 1..237: note = tr|A0A4R5G5Y3|A0A4R5G5Y3_9STRE 7-carboxy-7-deazaguanine synthase OS=Streptococcus sp. KCJ4950 OX=2545467 GN=queE PE=3 SV=1
MTKRQLKLPILEIFGPTFQGEGRAIGQKTMFVRTGGCDYHCAWCDSAFTWDGSEKAKPMTADEVIEQLDRLGDYDYVTLSGGNPCLLGANMADLVAKLKARGVTLAIETQGSRWQTWLKDIDQVTLSPKPPSSQMTVNFETLDFIVSQLDKNQITFKIPVFDDADLAFAKIIQRRYQPDVLYLSAGNPEPHVSGNIVEHQLDRLRHLWETVAADPEWKSVRVLPQLHTLLYDNQRGV

SEQ ID NO: 34549 - protein, 238 aa, Streptococcus thermophilus
  REGION 1..238: note = tr|A0A564RYV2|A0A564RYV2_STRTR 7-carboxy-7-deazaguanine synthase OS=Streptococcus thermophilus OX=1308 GN=queE_1 PE=3 SV=1
MTRERVLKLPVLEIFGPTFQGEGRAIGQKTMFVRTAGCDYHCDWCDSAFTWDGSEKPTRMTADEVIAALDALGTYDYVTLSGGNPALLAANMAELISKLKARGVTLAVETQGSRWQEWLRDIDQVTLSPKPPSSKMEVNLETLDFIVSQLDPDKVTFKVPVFDDADLDFAKMIQERYQPDVMFLSAGNPEPKAEGNIVQHQLERLKELWETVAADDSWGNVRVLPQLHTLLYDNKRGV

SEQ ID NO: 34550 - protein, 238 aa, Streptococcus thermophilus
  REGION 1..238: note = tr|A0A3G6JJI7|A0A3G6JJI7_STRTR 7-carboxy-7-deazaguanine synthase OS=Streptococcus thermophilus OX=1308 GN=queE PE=3 SV=1
MTRERVLKLPVLEIFGPTFQGEGRAIGQKTMFVRTAGCDYHCDWCDSAFTWDGSEKPTRMTADEVIEALDALGTYDYVTLSGGNPALLAANMAELVSKLKARDVTLAVETQGSRWQEWLREIDQVTLSPKPPSSKMEVNMETLDFIVSQLDPDKLTFKVPVFDDTDLAFAKMIQERYQPDVMFLSAGNPEPKAEGNIVQHQLDRLKELWETIAADDSWRNVRVLPQLHTLLYANERGV

SEQ ID NO: 34551 - protein, 243 aa, unidentified
  source 1..243: note = Streptococcus troglodytae
  REGION 1..243: note = tr|A0A1L7LJR9|A0A1L7LJR9_9STRE 7-carboxy-7-deazaguanine synthase OS=Streptococcus troglodytae OX=1111760 GN=exsD PE=3 SV=1
MGLKIMKKQHLLKLPILEIFGPTFQGEGRAIGQKTMFVRTGGCDYHCDWCDSAFTWDGSEKPTMMTSDQIIEALDKLGTYDYVTLSGGNPCLLAANMAQLVSKLKKRQVTLAVETQGSRWQEWLKAIDQVTLSPKPPSSKMKVNLQTLDFIVSNLDPQKVTYKIPIFDEADLAFAQMIQERYQPDVLYLSVGNPEPKASGDIVQNQLKRLKKLWEHIAQDDSWGNVRVLPQLHTLVYDNKRGV

SEQ ID NO: 34552 - protein, 238 aa, Streptococcus vestibularis
  REGION 1..238: note = tr|A0A3E4XH50|A0A3E4XH50_STRVE 7-carboxy-7-deazaguanine synthase OS=Streptococcus vestibularis OX=1343 GN=queE PE=3 SV=1
MTRERVLKLPVLEIFGPTFQGEGRAIGQKTMFVRTAGCDYHCDWCDSAFTWDGSEKPTRMTADEVIEALDALGIYDYVTLSGGNPALLAANMAELVSKLKERGVTLAVETQGSRWQEWLKDIDQVTLSPKPPSSKMEVNMETLDFIVSQLDPDKVTFKVPVFDDADLAFAKMIQERYQPDVMFLSAGNPEPKAEGNIVQHQLNRLKELWETVAADDSWGNVRVLPQLHTLLYDNERGV

SEQ ID NO: 34553 - protein, 238 aa, Streptococcus vestibularis
  REGION 1..238: note = tr|E3CQ04|E3CQ04_STRVE 7-carboxy-7-deazaguanine synthase OS=Streptococcus vestibularis F0396 OX=904306; GN = queE PE=3 SV=1
MTRERVLKLPVLEIFGPTFQGEGRAIGQKTMFVRTAGCDYHCDWCDSAFTWDGSEKPTRMTADEVIEALDALGTYDYVTLSGGNPALLAANMAQLVSKLKARGVTLAVETQGSRWQEWLKDIDQVTLSPKPPSSKMEVNMEILDFIVSQLDPDKLTFKVPVFDDADLAFAKMIQERYQPDVMFLSAGNPEPKAEGNIVQHQLDRLKELWETVAADDSWGNVRVLPQLHTLLYDNERGV

SEQ ID NO: 34554 - protein, 222 aa, Streptomyces acidiscabies
  REGION 1..222: note = tr|A0A0L0JIE8|A0A0L0JIE8_9ACTN 7-carboxy-7-deazaguanine synthase OS=Streptomyces acidiscabies OX=42234 GN=queE PE=3 SV=1
MQGEGPSLGRRCAFVRLGGCNLSCRWCDTPYTWDWKGVADSGVAYSPGAELHTVHWRDVLDRLTGYGVPMVVVSGGEPLGQQRRLVPLLRALAESGHAVEIETNGTVVPDPDVAERVRFNVSPKLAHSGDRSGRRIVPRALRAFSRLPGTAFKFVCRDSRDLDEVAEVAGMCDAESVWIMPEGRTADEIHRTLRILGDEVIERGWNLTTRLHVTLWDNRRGV

SEQ ID NO: 34555 - protein, 222 aa, Streptomyces acidiscabies
  REGION 1..222: note = tr|A0A100JEC3|A0A100JEC3_9ACTN 7-carboxy-7-deazaguanine synthase OS=Streptomyces acidiscabies OX=42234 GN=queE PE=3 SV=1
MQGEGPSLGRRCAFVRLGGCNLSCRWCDTPYTWDWKGVADSGVAYSPGAELHTVHWRDVLDRLTGYGVPMVVVSGGEPLGQQRRLVPLLRALAESGHAVEIETNGTVVPDPDVAERVRFNVSPKLAHSGDRSGRRIVPRALRAFSRLPGTAFKFVCRDSRDLDEVAEVAGMCDAGSVWIMPEGRTADEIHRTLRILGDEVIERGWNLTTRLHVTLWDNRRGV

SEQ ID NO: 34556 - protein, 209 aa, unidentified
  source 1..209: note = Streptomyces ahygroscopicus
  REGION 1..209: note = tr|K7SDP5|K7SDP5_9ACTN 7-carboxy-7-deazaguanine synthase OS=Streptomyces ahygroscopicus subsp. wuzhouensis; OX = 387850 GN=tymC PE=3 SV=1
MRLGGCNLSCRWCDTPYTWDWTGVGDSGVAYDPKRELRPMPWTDVLRALLAYEVPLIVVSGGEPLSQQRRLLPLLGALTEAGRKVEIETNGTVVPQDDLVALGVRFNVSPKLSHSGDPQARRIVPDALRAFAAVPGTAFKFVCRTTSDLDEVAQLVDRYGTRPVWIMPEGQVPAEVGQHLSALGDDVVARGWNLTTRLHVAVWGDRRGV

SEQ ID NO: 34557 - protein, 211 aa, Streptomyces albidoflavus
  REGION 1..211: note = tr|A0A2A2UNC9|A0A2A2UNC9_9ACTN 7-carboxy-7-deazaguanine synthase OS=Streptomyces albidoflavus OX=1886 GN=queE PE=3 SV=1
MTYLIKEIFYTLQGEGSHAGRPAVFCRFSRCNLWTGREQDRARAICQFCDTDFVGTDGEGGGRFRTPQDLADAVEAAWPTTDRAHRFVVCTGGEPLLQLDEETIEALHERGFEVAVETNGTRPAPRGIDWLCVSPKIGSTLVLTQGDELKLVYPQVGGDPAQFEELDFRHFRLQPLDDAHREAHTRATVEYCMKNPRWTLSLQTHKYLGIQ

SEQ ID NO: 34558 - protein, 242 aa, Streptomyces alboflavus
  REGION 1..242: note = tr|A0A291W4N4|A0A291W4N4_9ACTN 7-carboxy-7-deazaguanine synthase OS=Streptomyces alboflavus OX=67267 GN=queE PE=3 SV=1
MDETEQKHFDRERELIVSEVFGDTQPTFQGEGPSMGVPALFIRLAQCNLTCTWCDTKYTWDWSRYDIKKETRRRSVDELIAWVLGCDTELVVITGGEPLLQQGVIRLVSGLLAGGKRVEIETNGTIAPDPRLLVDGVRFNVSPKLANSGVAEGKRIVPNALAAFAASGHARFKFVTRSVAELDEIQQLVDRFQLSPVYVMPEGTTAEVQIQTTRALADAVAARKWHLTQRLHILAFADARGR

SEQ ID NO: 34559 - protein, 223 aa, Streptomyces albulus
  REGION 1..223: note = tr|A0A059WH18|A0A059WH18_STRA9 7-carboxy-7-deazaguanine synthase OS=Streptomyces albulus; OX = 68570 GN=queE_2 PE=3 SV=1
MQGEGPSAGQRCAFVRLGGCNLSCRWCDTPYTWDWTGVGDSGVAYDPKRELRPMPWTDVLRALLAYEVPLIVVSGGEPLSQQRRLLPLLRALTEAGRKVEIETNGTVVPQDDLVALGVRFNVSPKLSHSGDPQARRIVPDALRAFAAVPGTAFKFVCRTTSDLDEVAQLVDRYGTRPVWIMPEGQVPAEVGQHLSALGDDVVARGWNLTTRLHVAVWGDRRGV

SEQ ID NO: 34560 - protein, 370 aa, Streptomyces albulus
  REGION 1..370: note = tr|A0A401QQX5|A0A401QQX5_STRA9 7-carboxy-7-deazaguanine synthase OS=Streptomyces albulus; OX = 68570 GN=queE_1 PE=4 SV=1
MTFDRLHLVSKLYQPSGWPRILEAATGTRSSGPLVVDLDPTTFCDLACPECISGKLLNQGRFTPERLAELAGELVEMEVRGVVLIGGGEPLAHRGTRQVLRVLGEAGIAIGVVTNGTLIRQNLAELAAYASWVRVSVDAGTSETYRRFRPDRKGRSVFDKVIGNMRLLAEAKRGALGYSFLVMTRQEPDGTVVTNHHEVLQAAELAHDIGCDYFETKAMFDDGHHVIQVPDEILTSVDEQLDKAAVLAGDGFEVVNSSTLTSLRNRVGPVQEKDYHRCRVAELRTLVTPSGVYVCSYHRGNAGARIGDAVTESLPEIWRTSDRGIVDPSRDCRFHCARHRSNLELERIGIGTTAGTLAAPEPGTDYDPFI

SEQ ID NO: 34561 - protein, 244 aa, Streptomyces albus
  REGION 1..244: note = tr|A0A0X7JBM7|A0A0X7JBM7_9ACTN 7-carboxy-7-deazaguanine synthase OS=Streptomyces albus subsp. albus OX=67257 GN=queE PE=3 SV=1
MSRQETTRGRKIVVNEIFGPTIQGEGPSMGRICSFVRLGGCNLTCTWCDTPYTWDWTGQSNEGTAYDPKAELHAMHVVDVADRLRAMDVRLVVISGGEPLQQQQTVTPLCHMLKESGVSVEIETNGTIAPSPALTATQARFNVSPKLRHSGMGPERTVVPVALRALNATGGAAFKFVCRGPADLEEVDAIVARHGLESVWIMPEGQDQETLTRHMSSLADAVVARRWNMSTRIHVQAWGNRRGV

SEQ ID NO: 34562 - protein, 250 aa, Streptomyces atratus
  REGION 1..250: note = tr|A0A2Z5JQ07|A0A2Z5JQ07_STRAR 7-carboxy-7-deazaguanine synthase OS=Streptomyces atratus; OX = 1893 GN=queE PE=3 SV=1
MVGATPAKGSALAKALGRAPNNAREVISVEDAGEGEVVALTTSTGNYIAEGWLVHNCDTPYTWDASRFDLRKELTRRPVPELVDRLLDGAPGIVVITGGEPLLHQRRPGWTALLDALTTAGVEIEVEANGTLVPSPYTAEHVTRFNVSPKLDHAGDPEDKRIRPEALAVLVATGRAAFKFVCRTPADVDQVAAHASTLGLPAHTVWVMPEGTTTAELDDRLRTIADPAIAAGFNLTTRLHVHAWGDERAR

SEQ ID NO: 34563 - protein, 248 aa, Streptomyces avidinii
  REGION 1..248: note = tr|A0A329BSH6|A0A329BSH6_STRAV 7-carboxy-7-deazaguanine synthase OS=Streptomyces avidinii; OX = 1895 GN=queE PE=3 SV=1
MTASETITDEPAAAEGESRLIVAECFGVEVPTFQGEGPSCGHPALFIRLSRCNLTCSKCDTKYTWDWSRFDPRKESTKRSVADLVAWAESSPVELVVITGGEPLIQQARLVPLVRGLTAVGKRVEFETNGTIAPAPELMADGIRFNVSPKLASFGVEETKSIVPAALEAFVASGRSAFKFVASTVADLDRIAELADAHRLAPVWVMPEGTTPEAITATTRVLADAVAARHWHFTTRLHVLAFADARGR

SEQ ID NO: 34564 - protein, 170 aa, unidentified
  source 1..170: note = Streptomyces bingchenggensis
  REGION 1..170: note = tr|D7BPU8|D7BPU8_STRBB 7-carboxy-7-deazaguanine synthase OS=Streptomyces bingchenggensis (strain BCW-1); OX = 749414 GN=queE PE=3 SV=1
MDPADVVERLLAFGVGLIVISGGEPLNQQSRLEPVIRALREAGIAVEIETNGTVAPQAALAAAGIRFNVSPKLAHSGIAEKRRIVPEVLGEFTRLPGAAFKFVCATASDLEEVDALVARHSLKNIWIMPRGQSPEEIEEGIRTLADEVVGRKWNLSGRLHVTIWGSKRGV

SEQ ID NO: 34565 - protein, 247 aa, Streptomyces bungoensis
  REGION 1..247: note = tr|A0A117RGU1|A0A117RGU1_9ACTN 7-carboxy-7-deazaguanine synthase OS=Streptomyces bungoensis OX=285568 GN=queE PE=3 SV=1
MTTTKPLNLEPEAAEGESLIVAECFGTEVPTFQGEGPSCGHPALFIRLSRCNLTCTRCDTKYTWDWSRFDPHEESTRQSVAGLVAWASSSPVELVVITGGEPLIQQARLVPLVRGLITAGKRIEFETNGTIAPTPELVADGVRFNVSPKLASFGVKETKSIVPAALEAFVASGRAAFKFVASTVDDLDRIAELADAHRLAPVWVMPEGTTPEVITATTRVLADGVAARHWHFTIRLHVLAFADARGR

SEQ ID NO: 34566 - protein, 239 aa, Streptomyces caelestis
  REGION 1..239: note = tr|A0A0M8QPC3|A0A0M8QPC3_9ACTN 7-carboxy-7-deazaguanine synthase OS=Streptomyces caelestis OX=36816 GN=queE PE=3 SV=1
MQLDTDHEFELIIAYTFGDTQPTFQGEGPSAGTPALFIRLSRCNLTCLWCDTKETWDWVNYDIKKESHKRTVDDLAAWALGQNVELVVITGGEPLLQQKKLVPLVQRLLAGGKRIEFETNGTIAPLPELLIDGVRFSVSPKLANSDVAEHKRIVPQALRAFAASGQAIFKFVTRTVGDLDEIASYAEQFGLAPVYVMPEGATAEGLVATTRLLADHVPARGWHFTQRMHIFAFGDKRAR

SEQ ID NO: 34567 - protein, 240 aa, Streptomyces caeruleatus
  REGION 1..240: note = tr|A0A101U5Y4|A0A101U5Y4_9ACTN 7-carboxy-7-deazaguanine synthase OS=Streptomyces caeruleatus OX=661399 GN=queE PE=3 SV=1
MRAALLEAPQRRSLRIAETFADTVQGEGPSTGTPALFIRFMLCNLICRGCDTPYTWDSSRFDLRAESKWRSIDDLLGWVLGRPEKLVVITGGEPLLQPELLTLVQELRAAGRDVEIETNGTIPPAKELVDAGPWFNASPKLSGFGSGMPQSRRIVPDALRALAASGRTRWKFVVTDPCELDEIAGLEATYGLAPISVMPEGTTPEAVLDGMRTLVEPVAGRGWRLGTRLHVLLWGDERGR

SEQ ID NO: 34568 - protein, 247 aa, Streptomyces capillispiralis
  REGION 1..247: note = tr|A0A561TQD1|A0A561TQD1_9ACTN 7-carboxy-7-deazaguanine synthase OS=Streptomyces capillispiralis OX=68182 GN=queE PE=3 SV=1
MTTTKPLNLEPEAAEGESLIVAECFGTEVPTFQGEGPSCGHPALFIRLSRCNLTCTRCDTKYTWDWSRFDPHEESTRESVAGLVAWATSSPVELVVITGGEPLIQQARLVPLVRGLIAAGKRIEFETNGTIAPTPELVADGVRFNVSPKLASFGVKETKSIVPAALEAFVASGRAAFKFVASTVDDLDRIAELADAHRLAPVWVMPEGTTPEVITATTRVLADGVAARHWHFTTRLHVLAFADARGR

SEQ ID NO: 34569 - protein, 235 aa, unidentified
  source 1..235: note = Streptomyces cattleya
  REGION 1..235: note = tr|F8JT13|F8JT13_STREN 7-carboxy-7-deazaguanine synthase OS=Streptomyces cattleya (strain ATCC 35852 / DSM 46488 / JCM 4925 / NBRC 14057 / NRRL 8057) OX=1003195 GN=q ueE PE=3 SV=1
MSGPTLVVAEVFGPTVQGEGPSTGRRAAFIRLGGCNLTCSWCDTPYTWDATRYDLRTQLTRQPTADIAARALEGAPAVVVITGGEPLLHQHQPGWLDLLDRLADAGVDIEIETNGTIAPTPLTTAWATRFNVSPKLASAGDRESRRIREDAIHALRDTGQATFKYVCASAEDVTETEKWVQALGIPPEQVWIMPRGTDAATIGRHLAVIADPAIRAGYNLTTRLHVLTWGNERAR

SEQ ID NO: 34570 - protein, 211 aa, Streptomyces chartreusis
  REGION 1..211: note = tr|A0A2N9B6U7|A0A2N9B6U7_STRCX 7-carboxy-7-deazaguanine synthase OS=Streptomyces chartreusis NRRL 3882 OX=1079985 GN=queE PE=3 SV=1
MTYLIKEIFYTLQGEGGHAGRPAVFCRFSRCNLWTGREQDRARAICQFCDTDFVGTDGEGGGRFRTAEELADAVEAAWPTTDRAHRFVVCTGGEPLLQLDEAAIEALHGRGFEIAVETNGTRPAPRGIDWLCVSPKIGSTLVLTSGDELKLVYPQAGGDPAQFEHLDFRHFRLQPLDDADREAHTRAAVEYCMKNPRWTLSLQTHKYLGIQ

SEQ ID NO: 34571 - protein, 209 aa, Streptomyces diastatochromogenes; identical to SEQ ID NO: 34556
  REGION 1..209: note = tr|A0A1L7B5N4|A0A1L7B5N4_9ACTN 7-carboxy-7-deazaguanine synthase OS=Streptomyces diastatochromogenes OX=42236 GN=toyC PE=3 SV=1

SEQ ID NO: 34572 - protein, 241 aa, Streptomyces filamentosus
  REGION 1..241: note = tr|W9FK61|W9FK61_STRFL 7-carboxy-7-deazaguanine synthase OS=Streptomyces filamentosus NRRL 11379 OX=457430; GN = queE PE=3 SV=1
MGRVPAVSIVVNEIFGPTVQGEGPSAGRQCVFLRLGGCNLSCHWCDTPYTWDWKGTSDEKTAFDPRKELHNRDAGEVVEELLALGTGLVVISGGEPLSQQRRLRPVLKGLLEAGVTVEFETNGTVVPDDEIITPGVRFNVSPKLAHAGDPASKRIVPAALTKLAQTTDVAFKFVCRTTDDLDEVGTLQADFGISPIWIMPEGKNVAHISQHLSSLADEVVRRGWNLSTRLHVLAWGDKRGI

SEQ ID NO: 34573 - protein, 241 aa, Streptomyces filamentosus; identical to SEQ ID NO: 34572
  REGION 1..241: note = tr|D6AIR3|D6AIR3_STRFL 7-carboxy-7-deazaguanine synthase OS=Streptomyces filamentosus NRRL 15998 OX=457431; GN = queE PE=3 SV=1

SEQ ID NO: 34574 - protein, 247 aa, Streptomyces griseoaurantiacus
  REGION 1..247: note = tr|F3NQA1|F3NQA1_9ACTN 7-carboxy-7-deazaguanine synthase OS=Streptomyces griseoaurantiacus M045 OX=996637; GN = queE PE=3 SV=1
MTTTKPLNLEPEADEGESLIVAECFGTEVPTFQGEGPSCGHPALFIRLSRCNLTCTRCDTKYTWDWSRFDPHEESTRQSVAGLVAWATSSPVELVVITGGEPLIQQARLVPLIRGLIAVGKRIEFETNGTIAPTPELAADGVRFNVSPKLASFGVKETKSIVPAALEAFVASGRAAFKFVASTVDDLDRIAELADAHRLTPVWVMPEGTTPEVITATTRVLADGVAARHWHFTTRLHVLAFADARGR

SEQ ID NO: 34575 - protein, 235 aa, Streptomyces griseocarneus
  REGION 1..235: note = tr|A0A3L8IGQ5|A0A3L8IGQ5_9ACTN 7-carboxy-7-deazaguanine synthase OS=Streptomyces griseocarneus OX=51201 GN=queE PE=3 SV=1
MSEPSLVVAEVFGPTVQGEGPSLGQRAGFIRTAGCNLTCSWCDTPYTWDGTRHDLRAELRRVPALDIARRALSGAPNLVVITGGEPLLHQRQPGWDALLEHLARAGVDIEIETNGTVPPSPRTAQTVTRFNVSPKLQHAGDPERRRIRPAALSALHATGKAAFKFVCRTPGDVTAVARYTAAWGVPPSAVWVMPEGTNSARITAHLTAIADAAIDAQFNLTTRLHVHVWGEERER

SEQ ID NO: 34576 - protein, 238 aa, Streptomyces griseochromogenes
  REGION 1..238: note = tr|A0A1B1BDN1|A0A1B1BDN1_9ACTN 7-carboxy-7-deazaguanine synthase OS=Streptomyces griseochromogenes OX=68214 GN=queE PE=3 SV=1
MASTRLVVNEIFGPTVQGEGPSAGRRCAFLRLGGCNLSCRWCDTPYTWDWQGVSDTGRAFDPRTELRLRMAEDVLDELLAMTVPLIVISGGEPLNQQNRLVPVVRGLRDRGVSIEIETNGTVAPSDELVGLGVRFNVSPKLAHSGDPEHRRISPTALKRLQNTPDVAFKFVCKTSDDLTEVGRLQERFGLEPVWIMPEGKVQQDVTDNLQALADEVVRRGWNLTTRLHVLAWGDQRGV

SEQ ID NO: 34577 - protein, 211 aa, Streptomyces griseochromogenes
  REGION 1..211: note = tr|A0A1B1B455|A0A1B1B455_9ACTN 7-carboxy-7-deazaguanine synthase OS=Streptomyces griseochromogenes OX=68214 GN=queE PE=3 SV=1
MTYLVKEIFYTLQGEGSHAGRPAVFCRFSRCNLWTGLEKDRHRAICQFCDTDFVGTDGEGGGKFQTPDDLAQAVENAWPSSSREHRFVVCTGGEPLLQLDEAAIDALHARGFEVAVETNGTRVSPKGIDWLCVSPKIGSELVVTSGDELKLVYPQLGGDPRQFEQLDFRYFRLQPMDNPDVEANTRATVEYCMKNPRWILSLQTHKYLGIQ

SEQ ID NO: 34578 - protein, 213 aa, Streptomyces griseoflavus
  REGION 1..213: note = tr|D9XKX5|D9XKX5_9ACTN 7-carboxy-7-deazaguanine synthase OS=Streptomyces griseoflavus Tu4000 OX=467200; GN = queE PE=3 SV=1
MNMTYLIKEIFYTLQGEGSHAGRPAVFCRFSRCNLWTGREADRSRAICQFCDTDFVGTDGEGGGRFRTAEDLADAVEAAWPSTDRAHRFVVCTGGEPLLQLDEDAIAALHARGFEVAVETNGTRPAPHGIDWLCVSPKIGSQLVLTSGDELKLVYPQAGGDPAQFEGLDFQHLRLQPLDDANREDHTRAAVEYCMKNPRWTLSLQTHKYLGIQ

SEQ ID NO: 34579 - protein, 244 aa, Streptomyces griseoflavus; identical to SEQ ID NO: 30859
  REGION 1..244: note = tr|A0A0L8NN75|A0A0L8NN75_9ACTN 7-carboxy-7-deazaguanine synthase OS=Streptomyces griseoflavus OX=35619 GN=queE PE=3 SV=1

SEQ ID NO: 34580 - protein, 211 aa, Streptomyces griseoruber
  REGION 1..211: note = tr|A0A101SQR9|A0A101SQR9_9ACTN 7-carboxy-7-deazaguanine synthase OS=Streptomyces griseoruber OX=1943 GN=queE PE=3 SV=1
MTYLIKEIFYTLQGEGGHAGRPAVFCRFSRCNLWTGRERDRSRAICQFCDTDFVGTDGEGGGRFRTAQELAEAVEAAWPTADQAHRFVVCTGGEPLLQLDEAAIDALHDRGFEIAVETNGTRPAPRGIDWLCVSPKIGSTLVLTSGDELKLVYPQAGGDPAQFEGLDFRHFRLQPLDDADREAHTRAVVEYCMKNPRWTLSLQTHKYLGIQ

SEQ ID NO: 34581 - protein, 238 aa, Streptomyces griseus
  REGION 1..238: note = tr|A0A2X2MB72|A0A2X2MB72_STRGR 7-carboxy-7-deazaguanine synthase OS=Streptomyces griseus; OX = 1911 GN=queE PE=3 SV=1
MSALQDAGLRIRVSEKFGSTVQGEGPSTGVPACFIRLALCNLICSPCDTPYSWDHKRFDLRKEAHYESVEGLLAWAVDQPEDLVVITGGEPLIQMAGVTELVKGLRAAGREVEIETNGTIAPAEALVAAGVYFNVSPKLSRFGAAMPETRRLVPDVLRAFVATGRARFKFVVSEPSEVAEIAALEEAYALTCISVMPEGTDPEVILQGMRTLEGPVRERGYRLSTRLHVLLWGDERGR

SEQ ID NO: 34582 - protein, 211 aa, Streptomyces hainanensis
  REGION 1..211: note = tr|A0A4R4TUC9|A0A4R4TUC9_9ACTN 7-carboxy-7-deazaguanine synthase OS=Streptomyces hainanensis OX=402648 GN=queE PE=3 SV=1
MTYLVKEIFYTLQGEGSHAGRPAVFCRFSRCNLWTGLEKHRHRAVCQFCDTDFVGTDGEGGGRFRTPDDLAQAVEQAWPSSAMDHRFVVCTGGEPLLQLDDAAINALHARGFEVAVETNGTRVPPKGIDWICVSPKIGSELVVTSGDELKLVYPQLGGDPRQFEHLDFRYFRLQPMDGPDVDANTRATVEYCMKNPRWILSLQTHKYLGIQ

SEQ ID NO: 34583 - protein, 237 aa, Streptomyces iranensis
  REGION 1..237: note = tr|A0A060ZZI9|A0A060ZZI9_9ACTN 7-carboxy-7-deazaguanine synthase OS=Streptomyces iranensis OX=576784 GN=queE PE=3 SV=1
MEQDLVVNEIFGPTVQGEGRSLGRRCAFLRLGGCNLSCTWCDTPYTWDWTGAAESGIAHDPRKELHRRPVGDVLAELLAFDTELIVISGGEPLGQQERLIPLVAALTGHGKEIEIETNGTHAAHPELIAAGVRFNVSPKLSHSGDPLQRRIVPDALTSLSALPESTFKFVCQNTGDLEEVAQLVATFDLSSVWIMPIGRSADDVTKHMSELADAVVERGWNLTTRLHTLLWDDKRGV

SEQ ID NO: 34584 - protein, 247 aa, Streptomyces jietaisiensis
  REGION 1..247: note = tr|A0A1G7J5N1|A0A1G7J5N1_9ACTN 7-carboxy-7-deazaguanine synthase OS=Streptomyces jietaisiensis OX=235987 GN=queE PE=3 SV=1
MTTTKPLNLEPKAAEGESLIVAECFGTEVPTFQGEGPSCGHPALFIRLSRCNLTCTRCDTKYTWDWSRFDPHEESTRQSVAGLVAWATSSPVELVVITGGEPLIQQARLVPLVRGLIAAGKRIEFETNGTIAPTPELVADGVRFNVSPKLASFGVKETKSIVPAALEAFVASGRAAFKFVASTVDDLDRIAELADAHRLAPVWVMPEGTTPEVITATTRVLADGVAARHWHFTTRLHVLAFADARGR

SEQ ID NO: 34585 - protein, 243 aa, unidentified
  source 1..243: note = Streptomyces kanasensis
  REGION 1..243: note = tr|A0A124EC51|A0A124EC51_9ACTN 7-carboxy-7-deazaguanine synthase OS=Streptomyces kanasensis OX=936756 GN=queE PE=3 SV=1
MTGTAATAREPLGQLIVAERFGVEVPTFQGEGPSCGHPAIFIRLSRCNLTCESCDTKETWDWSRFKPQEVSTRESVQDLVAWVRPSPVELVVITGGEPLLQQRNLVPLVRRLLDEGRRVEFETNGTVMPAPALLVDGVRFNVSPKLASFGMDEAKSIVPSVLRAFAASGRSVFKFVASSVADIDRIAELVDRHGLAPVWVMPEGTTVEAITSTTRVLADAVASRHWHLTTRLHVAAFADPKGR

SEQ ID NO: 34586 - protein, 104 aa, unidentified
  source 1..104: note = Streptomyces klenkii
  REGION 1..104: note = tr|A0A3B0A2R6|A0A3B0A2R6_9ACTN 7-carboxy-7-deazaguanine synthase QueE (Fragment); OS = Streptomyces klenkii OX=1420899 GN=D7231_34815 PE=4 SV=1
MVAEPRLIVAERFGVDRPTFQGEGPSMGEPAVFIRLSRCNLSCGWCDTPWTWDWERYDPRAESAGHSVEDLAAWALGAPTGLVVVTGGEPLLQQRQLVPLVRRL

SEQ ID NO: 34587 - protein, 223 aa, Streptomyces laurentii
  REGION 1..223: note = tr|A0A160NUH8|A0A160NUH8_STRLU 7-carboxy-7-deazaguanine synthase OS=Streptomyces laurentii OX=39478 GN=queE PE=3 SV=1
MQGEGRSTGRSCSFLRLGGCNLTCRWCDTPYTWDWTGVSQGRTAYRPADELHAMTVTEVTRRLRELGTGLVVVSGGEPLSQQDRLLPVIEEIRARGADVEIETNGTVVPSAALVAAGVRFNVSPKLAHSAVAERRRVVPAALRALAAIDGTCFKFVCADPSDLKEVDELVERFALRDVWIMPCGQEPEEITDGLRRLADPVIQRKWNLTGRLHVTLWGNQRGV

SEQ ID NO: 34588 - protein, 237 aa, Streptomyces lydicus
  REGION 1..237: note = tr|A0A1D7VPH7|A0A1D7VPH7_9ACTN 7-carboxy-7-deazaguanine synthase OS=Streptomyces lydicus; OX = 47763 GN=queE PE=3 SV=1
MEQDLVVNEIFGPTVQGEGRSLGRRCAFLRLGGCNLSCSWCDTPYTWDWTGAAEGGVAHDPRKELHRRPVEEVVAELFGFDTELIVISGGEPLGQQERLIPLVAALTERGKEIEIETNGTHAAHPELIAAGVRFNVSPKLSHSGDPRQRRIVPAALANLSALPESTFKFVCQNTRDLDEVAELVAAFDLSSVWIMPIGRSADDVTKHMSELADAVVERGWNLTTRLHTLVWDDKRGV

SEQ ID NO: 34589 - protein, 237 aa, Streptomyces lydicus
  REGION 1..237: note = tr|A0A0D4DEQ4|A0A0D4DEQ4_9ACTN 7-carboxy-7-deazaguanine synthase OS=Streptomyces lydicus; OX = 47763 GN=queE PE=3 SV=1
MSASATMRPLLIAETFGDTFQGEGPSTGVPACFIRLSRCNLRCRGCDTPQTWDWARFDPREEARSEPVEGVLAWALDQPEDLVIITGGEPLLQMPGLTRLVQGLRKAGRTVEIETNGTVPPSGDLVAARPFFNVSPKLSGFGAEMEEPQRIVPAVLRAFAESGLARFKFVVTDAAELAEIAALEAAYGLTDIWVMPEGTTHEAVLAGMRELEEPARRHGYRLGTRLHILLWGDARGR

SEQ ID NO: 34590 - protein, 211 aa, unidentified
  source 1..211: note = Streptomyces mangrovisoli
  REGION 1..211: note = tr|A0A1J4NKG4|A0A1J4NKG4_9ACTN 7-carboxy-7-deazaguanine synthase OS=Streptomyces mangrovisoli OX=1428628 GN=queE PE=3 SV=1
MTYLIKEIFYTLQGEGAHAGRPAVFCRFSRCNLWTGREQDRARAICQFCDTDFVGTDGEGGGRFTSADDLADAVEAAWPSAERAHRFVVCTGGEPLLQLDEAALAALHARGFEIAVETNGTRPAPAGIDWLCVSPKIGSTLVLDRGDELKLVYPQAGGDPAQFEHLDFRHFRLQPLDDDRREDHTRAAVEYCMKNPRWMLSLQTHKYLGIQ

SEQ ID NO: 34591 - protein, 246 aa, Streptomyces melanosporofaciens
  REGION 1..246: note = tr|A0A1H4KRG7|A0A1H4KRG7_STRMJ 7-carboxy-7-deazaguanine synthase OS=Streptomyces melanosporofaciens OX=67327 GN=queE PE=3 SV=1
MSKGTAPAFTGSADELWLIIAECFGVEQPTFQGEGPSCGCPALFIRLSRCNLTCRRCDTKYTWDWSQFDPHEESTKQPVAHLLEWALSSPVELVVITGGEPLIQQRALISLVQGLLAAGKRVEFETNGTLVPDPALLMDGVQFNVSPKIASFGVSKEQRLVPAALEAFAACGRAAFKFVARTVPDLDEVAELVDAYGLAPVWVMPEGTTADALIATTRVLADAVVARHWHFSTRLHVLAFADARGR

SEQ ID NO: 34592 - protein, 248 aa, Streptomyces microflavus; identical to SEQ ID NO: 34563
  REGION 1..248: note = tr|A0A285DLB7|A0A285DLB7_STRMI 7-carboxy-7-deazaguanine synthase OS=Streptomyces microflavus OX=1919 GN=queE PE=3 SV=1

SEQ ID NO: 34593 - protein, 211 aa, unidentified
  source 1..211: note = Streptomyces oceani
  REGION 1..211: note = tr|A0A1E7JW47|A0A1E7JW47_9ACTN 7-carboxy-7-deazaguanine synthase OS=Streptomyces oceani; OX = 1075402 GN=queE PE=3 SV=1
MTYLIKEIFYTLQGEGSHAGRPAVFCRFSRCNLWTGLEKDRHRAICQFCDTDFVGTDGEGGGRFATPEDLAQAVENAWPSESADHRFVVCTGGEPLLQLDEAAVEALHARGFEVAVETNGTRVPPAGIDWLCVSPKIGSELVVTKGDELKLVYPQLGGIPSQFENLDFRFFRLQAMDGPDLEANTRAAVDYCMKNPRWILSLQTHKYLGIQ

SEQ ID NO: 34594 - protein, 237 aa, Streptomyces olivochromogenes
  REGION 1..237: note = tr|A0A250VL88|A0A250VL88_STROL 7-carboxy-7-deazaguanine synthase OS=Streptomyces olivochromogenes OX=1963 GN=queE PE=3 SV=1
MEQDLVVNEIFGPTVQGEGRSLGRRCAFLRLGGCNLSCSWCDTPYTWDWTGAGESGVAHDPRKELHRRPVDDVLAELLAFDTELIVISGGEPLGQQERLIPLVTALTGRGKEIEIETNGTHAAHPELIAAGVRFNVSPKLSHSGDALQRRIVPAALASLSALPGSTFKFVCQNTRDLDEVAQLVATFDLPSVWIMPIGRTADDVTKHMSELADAVVKRGWNLTTRLHTLLWDEKRGV

SEQ ID NO: 34595 - protein, 211 aa, unidentified
  source 1..211: note = Streptomyces pini
  REGION 1..211: note = tr|A0A1I4J1P4|A0A1I4J1P4_9ACTN 7-carboxy-7-deazaguanine synthase OS=Streptomyces pini; OX = 1520580 GN=queE PE=3 SV=1
MTYLIKEIFYTLQGEGSHAGRPAVFCRFSRCNLWTGRERDRARAICQFCDTDFVGTDGEGGGRFTTADDLAAAVEAAWPTAERAHRFVVCTGGEPLLQLDDDAVDALHDRGFEVAVETNGTRPAPRGIDWLCVSPKIGSTLVLTHGDELKLVYPQVGGDPAQFESLDFRHFRLQPLDDANREAHTRAVVEYCMKNPRWTLSLQTHKYLGIQ

SEQ ID NO: 34596 - protein, 237 aa, unidentified
  source 1..237: note = Streptomyces pluripotens
  REGION 1..237: note = tr|A0A221P7H7|A0A221P7H7_9ACTN 7-carboxy-7-deazaguanine synthase OS=Streptomyces pluripotens OX=1355015 GN=queE PE=3 SV=1
METELVVNEIFGPTVQGEGRSMGRRCAFLRLGGCNLSCTWCDTPYTWDWTGAGDSGVAYDPRKELHRRSVREVAEELLAFGVGLIVISGGEPLGQQNRLIPLVELLTARGLEIEIETNGTHAPDPALVAAKVRFNVSPKLAHSGDSVERRIVPSALRSLAVTEGTTFKFVCRNTDDLDEVGALVEEFTLGSVWIMPKGQTGAEISRHMAGLADAVIARGWNLTTRLHTLLWGDTRGV

SEQ ID NO: 34597 - protein, 237 aa, Streptomyces puniciscabiei
  REGION 1..237: note = tr|A0A1D7YJJ0|A0A1D7YJJ0_9ACTN 7-carboxy-7-deazaguanine synthase OS=Streptomyces puniciscabiei OX=164348 GN=queE PE=3 SV=1
MEQDLVVNEIFGPTVQGEGRSLGRRCAFLRLGGCNLSCSWCDTPYTWDWTGAGESGVAHDPRKELHRRPVEDVVAELLGFDTDLIVISGGEPLGQQERLIPLVAALTERGKEIEIETNGTHAAHPELIAAGVRFNVSPKLSHSGDALRRRIVPDALTSLSALPGSTFKFVCQSTRDLDEVAQLVATFDLSSVWIMPIGRSADDVTKHMGELADAVVERGWNLTTRLHTLLWDDKRGV

SEQ ID NO: 34598 - protein, 211 aa, Streptomyces qinglanensis
  REGION 1..211: note = tr|A0A0U1V668|A0A0U1V668_9ACTN 7-carboxy-7-deazaguanine synthase OS=Streptomyces qinglanensis OX=943816 GN=queE PE=3 SV=1
MTYLIKEIFYTLQGEGSHAGRPAVFCRFSRCNLWTGLEKDRHRAICQFCDTDFVGTDGEGGGRFATPEDLAQAVDNAWPSESAEHRFVVCTGGEPLLQLDEAAVEALHDRGFEVAVETNGTRVPPAGIDWLCVSPKIGSELVVTKGDELKLVYPQLGGVPAQFENLDFRFFRLQAMDGPDLEANTRAVVEYCMKNPRWILSLQTHKYLGIQ

SEQ ID NO: 34599 - protein, 237 aa, Streptomyces rapamycinicus
  REGION 1..237: note = tr|A0A0A0NW62|A0A0A0NW62_STRRN 7-carboxy-7-deazaguanine synthase OS=Streptomyces rapamycinicus (strain ATCC 29253 / DSM 41530 / NRRL 5491 / AYB-994) OX=1343740 GN=qu eE PE=3 SV=1
MEQDLVVNEIFGPTVQGEGRSLGRRCAFLRLGGCNLSCSWCDTPYTWDWTGASESGVAHDPRKELHRRPVGDVLTELLAFDTELIVISGGEPLGQQERLIPLVAALTGHGKEIEIETNGTHAAHPELIAAGVRFNVSPKLSHSGDTLQRRIVPEALTSLSALPGSTFKFVCQNTRDLDEVAQLVATFDLSSVWIMPIGRTADDVTKHMSELADAVVERGWNLTTRLHTLLWDEKRGV

SEQ ID NO: 34600 - protein, 244 aa, Streptomyces rimosus
  REGION 1..244: note = tr|A0A0M8QYF2|A0A0M8QYF2_STRRM 7-carboxy-7-deazaguanine synthase OS=Streptomyces rimosus subsp. rimosus OX=132474 GN=queE PE=3 SV=1
MSRQETTRGRKIVVNEIFGPTIQGEGPSMGRICSFVRLGGCNLTCTWCDTPYTWDWTGQSNEGTAYDPKAELHAMHVVDVADRLRAMDVRLVVISGGEPLQQQQTVTLLCHMLKESGVSVEIETNGTIAPSPALTATQARFNVSPKLRHSGMGPERTVVPVALRALNATGGAAFKFVCRGPTDLEEVDAIVARHGLESVWIMPEGQDQETLTRHMSSLADAVVARRWNMSTRIHVQAWGNRRGV

SEQ ID NO: 34601 - protein, 244 aa, Streptomyces rimosus; identical to SEQ ID NO: 30859
  REGION 1..244: note = tr|L8EV75|L8EV75_STRR1 7-carboxy-7-deazaguanine synthase OS=Streptomyces rimosus subsp. rimosus (strain ATCC 10970 / DSM 40260 / JCM 4667 / NRRL 2234) OX=1265868; GN = queE PE=3 SV=1

SEQ ID NO: 34602 - protein, 249 aa, unidentified
  source 1..249: note = Streptomyces roseochromogenus
  REGION 1..249: note = tr|V6K5K5|V6K5K5_STRRC 7-carboxy-7-deazaguanine synthase OS=Streptomyces roseochromogenus subsp. oscitans DS 12.976 OX=1352936 GN=queE PE=3 SV=1
MTHTALPLPAADGRNRETHLPINEVFWDVVQGEGPYMGRSCGFIRLGWCNLHCPPCDTAQTWDTSRYDLAVTCPETAVAAAVDRLPARVRMVVLSGGEPLLWQSAPAFITMLDLLGRRGIEVHVETNGTIAPPPSINPFIGHYTVSPKLTVMGGGDPLKRRIKPDAIAAFARLAAAERAAFKFVVADQAHIREVADFAAEHDLEPSWVWVMPEAPDTATLLDRQPVITAGAAAYGYNVSTRLHMIAQCR

SEQ ID NO: 34603 - protein, 248 aa, Streptomyces sedi
  REGION 1..248: note = tr|A0A5C4ULL5|A0A5C4ULL5_9ACTN 7-carboxy-7-deazaguanine synthase OS=Streptomyces sedi; OX = 555059 GN=queE PE=3 SV=1
MTTFEPTDIDPAADDAAFRLIVAECFGVEAPTFQGEGPSCGHPALFIRLSRCNLTCAKCDTKYTWDWARFDPRQESTKRTVADLVAWATSSPVELVVITGGEPLLQQKRLVPLVRQLLVAGKRVEFETNGTLVPLPELVVDGVHCNVSPKIASFGVDEAKSVVPAALEAFAASGRAVFKFVASSVADLDRIAELADAHRLAPVWVMPEGNTVEAITATTRVLADAVAARHWHFTTRLHVLAFAGARGR

SEQ ID NO: 34604 - protein, 211 aa, Streptomyces sp.
  REGION 1..211: note = tr|A0A1C4JR01|A0A1C4JR01_9ACTN 7-carboxy-7-deazaguanine synthase OS=Streptomyces sp. BvitLS-983 OX=1838282 GN=queE PE=3 SV=1
MTYLIKEIFYTLQGEGSHAGRPAVFCRFSRCNLWTGREQDRARAICQFCDTDFVGTDGEGGGRFRTPQDLADAVEAAWPTTDRAHRFVVCTGGEPLLQLDEEAIEALHERGFEVAVETNGTRPAPRGIDWLCVSPKIGSTLVLTQGDELKLVYPQVGGDPAQFEELDFRHFRLQPLDDAHREAHTRATVEYCMKNPRWTLSLQTHKYLGIQ

SEQ ID NO: 34605 - protein, 248 aa, Streptomyces sp.
  REGION 1..248: note = tr|V9Z0G4|V9Z0G4_9ACTN 7-carboxy-7-deazaguanine synthase OS=Streptomyces sp. FR1 OX=349971 GN=queE PE=3; SV = 1
MTTLVSIVDGPATDDAELWLIVAECFGVEVPTFQGEGPSCGHPALFIRLSRCNLTCVKCDTKYTWDWSQFDPRKESTRRSVADLVSWGTSSPVELVVITGGEPLIQQPRLVPLVRKLLAAGKRVEFETNGTIAPLPELIVEGVRFNVSPKLTSFGVTEAKSLVPAALEAFAASERAAFKFVASAVADLDRIAELADAHRLAPVWVMPEGTTAEEITATTRVLADAVAARHWHFTSRLHVLAFADARGR

SEQ ID NO: 34606 - protein, 211 aa, Streptomyces stelliscabiei
  REGION 1..211: note = tr|A0A0L0JS68|A0A0L0JS68_9ACTN 7-carboxy-7-deazaguanine synthase OS=Streptomyces stelliscabiei OX=146820 GN=queE PE=3 SV=1
MTYLVKEIFYTLQGEGSHAGRPAVFCRFSRCNLWTGLEKDRHRAICQFCDTDFVGTDGEGGGRFASPDDLAQAVERAWPSASREHRFVVCTGGEPLLQLDDAAIDALHARGFEVAVETNGTRVPPKGIDWLCVSPKIGSELVVTRGDELKLVYPQLGGDPSQFEHLDFRYFRLQPMDGPDVDANTRATVDYCMKNPRWILSLQTHKYLGIQ

SEQ ID NO: 34607 - protein, 238 aa, Streptomyces thermoautotrophicus
  REGION 1..238: note = tr|A0A132MK91|A0A132MK91_9ACTN 7-carboxy-7-deazaguanine synthase OS=Streptomyces thermoautotrophicus OX=1469144 GN=queE PE=3 SV=1
MLLSLAAEESRGLLVAEMFGPTFQGEGPSAGRQAVFVRLSRCNLACSWCDTPYTWDWRRFDPAAEARRIPVREVAAWALNRPSPLVVITGGEPLLQQPRLIDLVGELREAGRRVEIETNGTIPPDPALVGLVDQFNVSPKLASAGGHPTRRIDPGVLRVFVATGKAVFKFVLTNVAEAKEVVELQDTYGLDPIWVMPEGTSAEGVLAGMRELADEALTRGWNLTPRLHVLLWGDTRGR

SEQ ID NO: 34608 - protein, 240 aa, Streptomyces thermoautotrophicus
  REGION 1..240: note = tr|A0A132ML27|A0A132ML27_9ACTN 7-carboxy-7-deazaguanine synthase OS=Streptomyces thermoautotrophicus OX=1469144 GN=queE PE=3 SV=1
MSLLLSLAAEESRGLLVAEMFGPTFQGEGPSAGRQAVFVRLSRCNLACSWCDTPYTWDWRRFDPAAEARRIPVREVAAWALNRPSPLVVITGGEPLLQQPRLIDLVGELREAGRRVEIETNGTIPPDPALVGLVDQFNVSPKLASAGGHPTRRIDPGVLRVFVATGKAVFKFVLTNVAEAKEVVELQDTYGLDPIWVMPEGTSAEGVLAGMRELADEALTRGWNLTPRLHVLLWGDTRGR

SEQ ID NO: 34609 - protein, 239 aa, Streptomyces varsoviensis
  REGION 1..239: note = tr|A0A0L8QMJ0|A0A0L8QMJ0_9ACTN 7-carboxy-7-deazaguanine synthase OS=Streptomyces varsoviensis OX=67373 GN=queE PE=3 SV=1
MTSIANAARAPETSLVVSEIFGPTWQGEGPSLGRLAVFLRLGHCNLTCEWCDTPYTWDWTRHDAAAELSVVTVDYAVREVVRVGAPLLVITGGEPLMQQQALGVLLARLPRGVDVEIETNGTIIPGEEIRARVARFNVSPKLANAGVRDAKRLKPRALAALNATGKAAFKFVVSSADDLAEVRGLVEEHSLKPVYIMPEGTTPEAILHGLRELSPTILEYGWNITPRLHVLIWGDRRGV

SEQ ID NO: 34610 - protein, 211 aa, Streptomyces varsoviensis
  REGION 1..211: note = tr|A0A0L8QXA1|A0A0L8QXA1_9ACTN 7-carboxy-7-deazaguanine synthase OS=Streptomyces varsoviensis OX=67373 GN=queE PE=3 SV=1
MGYAVKEIFYTLQGEGQHAGRPAVFCRFALCNLWTGREADRARAICAFCDTDFLGTDGPDGGRFATAEELADAVEACWPAGFQDRRFVVCTGGEPLLQLDAAAVESLHGRGFEVAVETNGTRVPPQGIDWLCVSPKIGTELVVSQGDELKLVYPQEGGDPAQFEHLRFASFRLQPMDCPDVESHTRSALEYCLAHPNWSLSLQTHKQLGIR

SEQ ID NO: 34611 - protein, 238 aa, Streptomyces venezuelae
  REGION 1..238: note = tr|F2R9E8|F2R9E8_STRVP 7-carboxy-7-deazaguanine synthase OS=Streptomyces venezuelae (strain ATCC 10712 / CBS 650.69 / DSM 40230 / JCM 4526 / NBRC 13096 / PD 04745) O X=953739 GN=queE PE=3 SV=1
MSTLQHTGLRLRVSEKFGGTVQGEGPSTGVPACFIRLALCNLICSPCDTPYTWDTTRFDLRKEAHYENVEELLAWALDQPEDLVVVTGGEPLIQMAGLTELVKGLRAAGRTVEIETNGTIAPSEALVAAGPYFNVSPKLSRFGAAMPETRRLVPDVLRAFVTTGRSRFKFVVSEAAELAEIAALEAAYALTDISVMPEGTDPEVILAGMRTLEGPVRERGYRLGTRLHVLLWGDERGR

SEQ ID NO: 34612 - protein, 247 aa, Streptomyces violaceoruber
  REGION 1..247: note = tr|A0A1V0UFX3|A0A1V0UFX3_STRVN 7-carboxy-7-deazaguanine synthase OS=Streptomyces violaceoruber OX=1935 GN=queE PE=3 SV=1
MTLPARSQDPAAPLPDELPLAEAFGPTLQGEGPAAGRPAWFIRFGGCNLSCSWCDSAYTWDSSRYQLREEIRHTPVEKIDQAVPDGALVVLTGGEPLLQQDASAWSRLLDGLRRRGCTLHVETNGTIAPNDRTRELVETFIVSPKLTNAGPHRGRQDPALNPGWAAAARDGQAHLKVVCASAEDVETAVGLARDHGWPQRQVWVMPEGTTVDALNARWPAIADAAARHGINATHRLHVLAWGDKRGH

SEQ ID NO: 34613 - protein, 241 aa, Streptomyces viridochromogenes
  REGION 1..241: note = tr|A0A0J7ZH70|A0A0J7ZH70_STRVR 7-carboxy-7-deazaguanine synthase OS=Streptomyces viridochromogenes OX=1938 GN=queE PE=3 SV=1
MTAHDRNRETHLPINEVFWDVVQGEGPYMGRACGFIRLGWCNLHCPPCDTAQTWDTSRYDLAITCPDTAVAAAVDRLPARVRMVVISGGEPLLWQRTPAFITMLELLQGRGIEAHVETNGTIAPLPSADPYVRHYTVSPKLTAMGGGDPLKRRIKPDAIAAFAQLATAGRAVFKFVVADQAQLAEVAGFAAEHGLEPSWVWVMPEASDTATLLERQPVIASAAAQYSYNVSTRLHMIAQCR

SEQ ID NO: 34614 - protein, 233 aa, Streptomyces viridochromogenes
  REGION 1..233: note = tr|A0A0J7Z6E6|A0A0J7Z6E6_STRVR 7-carboxy-7-deazaguanine synthase OS=Streptomyces viridochromogenes OX=1938 GN=queE PE=3 SV=1
MVVNEIFGPTVQGEGPSAGQRCGFLRLGGCNLSCHWCDTPYTWDWKGVSDEGRAYDPRVELTSRGPADVLHDLLAMDVDLIVISGGEPLKQQRRILPLVRELRNRGISVEVETNGTVVPDDELIDLGVRFNVSPKLSHAGDPEHRRIKPAALRKLATTPAVAFKFVCRSHDDLDEVAELTRNLGIGPVWIMPEGKNVTDISRHLGDLSDEVVRRNWNLSTRLHVLAWGEKRGV

SEQ ID NO: 34615 - protein, 211 aa, unidentified
  source 1..211: note = Streptomyces zhaozhouensis
  REGION 1..211: note = tr|A0A286DY64|A0A286DY64_9ACTN 7-carboxy-7-deazaguanine synthase OS=Streptomyces zhaozhouensis OX=1300267 GN=queE PE=3 SV=1
MTYLVKEIFYTLQGEGSHAGRPAVFCRFSRCNLWTGLEKDRHRAICQFCDTDFVGTDGEGGGRFRTPDDLAQAIEQAWPSSSREHRFVVCTGGEPLLQLDEAAIDALHARGFEVAVETNGTRVPPNGIDWLCVSPKIGSELVVTSGDELKLVYPQLGGEPGQFEHLDFRYFRLQPMDGPDVEANTRATVDYCMKNPRWILSLQTHKYLGIH

SEQ ID NO: 34616 - protein, 243 aa, Streptomyces zinciresistens
  REGION 1..243: note = tr|G2G3Z3|G2G3Z3_9ACTN 7-carboxy-7-deazaguanine synthase OS=Streptomyces zinciresistens K42 OX=700597; GN = queE PE=3 SV=1
MTANLLLDTDHEFELIIAYTFGDTQPTFQGEGPSAGTPAVFIRLSRCNLTCGYCDTKETWDWANYDIKKESHKRTVDDLAAWALAQDVELVVITGGEPLLQQKKLVPLVQRLLAGGKRIEFETNGTIAPLSELLIDGVQFNVSPKLANSDVAEHKRIVPVALRAFAASGQAIFKFVTRTVDELDEIASYAEQFGLAPIYVMPEGTTAEGLVATTRLLADHVPARGWHFTQRMHIFAFGDKRAR

SEQ ID NO: 34617 - protein, 248 aa, Streptomyces zinciresistens
  REGION 1..248: note = tr|G2G774|G2G774_9ACTN 7-carboxy-7-deazaguanine synthase OS=Streptomyces zinciresistens K42 OX=700597; GN = queE PE=3 SV=1
MTTLESIVNGPTTDDAELWLIVAECFGVEVPTFQGEGPSCGHPALFIRLSRCNLTCAKCDTKYTWDWSQFDPRKESTRRSVADLVSWGTSSPVELVVITGGEPLIQQPRLVPLVRKLLAAGKRVEFETNGTIAPLPELIVEGVRFNVSPKLASFGVKEAKSLVPAALEAFAASERAAFKFVASTVADLDRIAELADAHRLAPVWVMPEGTTAEEITATTRVLADAVAARHWRFTTRLHVIAFADARGR

SEQ ID NO: 34618 - protein, 211 aa, unidentified
  source 1..211: note = Streptosporangiaceae bacterium
  REGION 1..211: note = tr|A0A3A4BW36|A0A3A4BW36_9ACTN 7-carboxy-7-deazaguanine synthase OS=Streptosporangiaceae bacterium YIM 75507 OX=2339229 GN=queE PE=3 SV=1
MTYLIKEIFYTLQGEGQHAGRPAVFCRFSRCNLWTGREKDRHRAVCAFCDTDFVGTDGPGGGRYATAAELAAAVEAAWGEGAFARRFVVCTGGEPLLQLDAEAVDALHARGFEVAVETNGSLPPPPGIDWLCVSPKIGADLVVETGDELKLVYPQPGGDPELFEHLDFRSFRLQPMDGPDLDANTRAAIAYCKDHPRWQLSLQTHKYLGIP

SEQ ID NO: 34619 - protein, 210 aa, Subsaximicrobium wynnwilliamsii
  REGION 1..210: note = tr|A0A5C6ZJT9|A0A5C6ZJT9_9FLAO 7-carboxy-7-deazaguanine synthase OS=Subsaximicrobium wynnwilliamsii OX=291179 GN=queE PE=3 SV=1
MTRSERQDLIDQGLLLPLMEEFYTIQGEGFHKGTAAYFIRIGGCDVGCHWCDVKESWNAELHPPTETAKIVENAVKYSETIVVTGGEPLTWDMTELTKQLKAKGLQTHIETSGAYELTGEWDWICLSPKKMKLPTQKVYDKAHELKCIIFNKDDFRFAEEQAAKVNGDCILYLQPEWSKRDKMVPLIVDYVMANPKWKVSLQTHKYLNIP

SEQ ID NO: 34620 - protein, 257 aa, Succinatimonas sp.
  REGION 1..257: note = tr|R5EI92|R5EI92_9GAMM 7-carboxy-7-deazaguanine synthase OS=Succinatimonas sp. CAG:777 OX=1262974 GN=queE; PE = 3 SV=1
MSAKLPVVEIFDSLQGEGPFLHPAIFLRTALCCFKCKGFNCSLMAPDGSTVTGCDTIRAVSPKFKESWTYYEDSLSLIKALEKHVKTYPHSNFKQDLVLTGGEPLLHFNNPVLIESLEHFYRLGHTLTVETNAALPIAFDKTVLTKARFSMSVKLSNSGESRDKRINYSTIRAIVDNTEQSYFKFVVSKDTWEHDKEEIFEILDNTGRSIPVYLMPLGGDFKSLQNNTQFVVEKCIEQGFFYTDRIHIRAWNTKEGV

SEQ ID NO: 34621 - protein, 257 aa, Succinivibrio sp.
  REGION 1..257: note = tr|A0A316SD01|A0A316SD01_9GAMM 7-carboxy-7-deazaguanine synthase OS=Succinivibrio sp.; OX = 2053619 GN=queE PE=3 SV=1
MSAKLPVVEIFDSLQGEGPYLHPAIFLRTALCCFKCKGFNCSLMAPDGSTVTGCDTIRAVSPKFKESWTYYEDSLSLIKALEEHVKTYPHSNFKQDLVLTGGEPLLHFNNPVLIETLEHFYRLGHTLTVETNASLPIAFDKTVLTKARFSMSVKLSNSGESRDKRINYSTIRAIADNTEQSYFKFVVSKDTWEHDKEEIFEILDNTSRSIPVYLMPLGGDFKTLQNNTQFVVEKCIEQGFFYTDRTHIRAWNTKEGV

SEQ ID NO: 34622 - protein, 236 aa, Sulfitobacter brevis
  REGION 1..236: note = tr|A0A1I1ULK2|A0A1I1ULK2_9RHOB 7-carboxy-7-deazaguanine synthase OS=Sulfitobacter brevis; OX = 74348 GN=queE PE=3 SV=1
MSKLRIAEIFGPTIQGEGALIGEPTVFVRSGGCDYRCTWCDSMHAVDPVHRHEWAAMTTDAVWGEVSRLSGGGPLIVTLSGGNPAIQDFGPLIRRGKRVGYRFACETQGSLAKLWFSELDTLVLSPKPPSSEETVDWVAFDACLEAAKGCGKVVMKIVIFDDLDYGWARVVAETYPDLPLFLQPGNPDVDPDVAVDPQQVADRLEWLVGKVIEDRWYTARVLPQLHVLLWGNKRGV

SEQ ID NO: 34623 - protein, 237 aa, Sulfitobacter donghicola
  REGION 1..237: note = tr|A0A410XX97|A0A410XX97_9RHOB 7-carboxy-7-deazaguanine synthase OS=Sulfitobacter donghicola OX=421000 GN=queE PE=3 SV=1
MAKIPVLEVFGPTIQGEGRVIGRKTMFVRTAGCDYRCSWCDSAFTWDGSAKEDIQLMSAEEIYDKLREVGGDNFNHVTISGGNPALIKGIQDLVNLFEEHHIQTALETQGSKFQPWMTQIDDLTISPKPPSSNMKPNLEILDSVIEQCVPESLNLKVVIFDEGDFEFAKMIHHRYPTIPFYLQVGNPYLDDEVDNHTAKLLQRYEQLVERVMTSSDMNNVYVLPQLHTLLWSNMKGV

SEQ ID NO: 34624 - protein, 236 aa, Sulfitobacter guttiformis
  REGION 1..236: note = tr|A0A420DJH3|A0A420DJH3_9RHOB 7-carboxy-7-deazaguanine synthase OS=Sulfitobacter guttiformis OX=74349 GN=queE PE=3 SV=1
MTQLRIAEIFGPTIQGEGALIGEPTVFVRTGGCDYRCSWCDSMHAVDPVYRHTWAAMDSGAVWAEVLRLSKRNPLTVSLSGGNPAIQDFTQLIALGHAAGYRFACETQGSIAKPWFGDLDTLVLSPKPPSSGELVDWDAFDDCLLKAKGACSTVMKIVIFDETDYAWARMAADKYPELPLFLQPGNVEVDPDVAVDPQVLADKLLWLVDKTMHDRWFAPRVLPQLHVLLWGNKRGV

SEQ ID NO: 34625 - protein, 235 aa, unidentified
  source 1..235: note = Sulfitobacter indolifex
  REGION 1..235: note = tr|A9E8J8|A9E8J8_9RHOB 7-carboxy-7-deazaguanine synthase OS=Sulfitobacter indolifex HEL-45 OX=391624; GN = queE PE=3 SV=1
MTLRIAEIFGPTIQGEGALIGEPTVFVRAGGCDYRCSWCDSLHAVESQYRHTWAPMSSEDVWRKVRKLSGGQPLTVSLSGGNPAIQDFGPLIKMGKAADYRFACETQGSIARPWFADLDTLVLSPKPPSSGEDVDWDAFDACRTIGAKARQQVMKIVIFDEIDYQWAREVHAHHLDIPLYLQPGNPEVDPATPVDPQALADRLGWLTEMAMADSWFAPRILPQLHVLIWGNKRGV

SEQ ID NO: 34626 - protein, 236 aa, Sulfitobacter litoralis
  REGION 1..236: note = tr|A0A1H0LHS3|A0A1H0LHS3_9RHOB 7-carboxy-7-deazaguanine synthase OS=Sulfitobacter litoralis OX=335975 GN=queE PE=3 SV=1
MSQLRIAEIFGPTIQGEGALIGEPTVFVRTGGCDYRCAWCDSMHAVDPAFRHDWAAMSSDAVWQEVQRLSGDAPLTVSLSGGNPAIQDFAPLIQLGQAAGYRFACETQGSIAKPWFAQLDCLVLSPKPPSSSETVDWAAFDRCVVAGETAGQVVMKIVIFDDADYQWARDAAARYPKMPLYLQPGNDEVDPNVAVDPQILADKLLWLVDKTMADRWFTPRLLPQLHVLLWGNKRGV

SEQ ID NO: 34627 - protein, 236 aa, Sulfitobacter pontiacus
  REGION 1..236: note = tr|A0A1H2T6K4|A0A1H2T6K4_9RHOB 7-carboxy-7-deazaguanine synthase OS=Sulfitobacter pontiacus OX=60137 GN=queE PE=3 SV=1
MSQLRIAEVFGPTIQGEGALIGEPTVFVRTGGCDYRCAWCDSMHAVDPAFRHDWASMSTDAVWQEVQRLSDNTPLTVSLSGGNPAIQDFAPLIQLGHAAGYRFACETQGSIAKPWFGQLDCLVLSPKPPSSGETVDWAAFDRCVAAGETAAQTVMKIVIFDDADYDWARDAATRYAELPLYLQPGNDEVDPSVAIDPQVLADKLLWLVDKTMADRWFTPRLLPQLHVLLWGNKRGV

SEQ ID NO: 34628 - protein, 236 aa, unidentified
  source 1..236: note = Sulfitobacter pseudonitzschiae
  REGION 1..236: note = tr|A0A073J2W8|A0A073J2W8_9RHOB 7-carboxy-7-deazaguanine synthase OS=Sulfitobacter pseudonitzschiae OX=1402135 GN=queE PE=3 SV=1
MTGLRIAEIFGPTIQGEGALIGEPTVFVRTGGCDYRCVWCDSLHAVDPVHRQSWARMTTDQVWAEITRLSRGNPLTVSLSGGNPAIQDFTALIARGQQAGYRFACETQGSVAKPWFGDLDTLVLSPKPPSSGETVDWDAFDACIMAGQGAVQTVLKIVIFDDADYAWAQQVAARFPTLPLYLQPGNPQVDPAQPVDPQDLSDRLLWLVEKVTADGWFAPRVLPQLHVLLWGNKRGV

SEQ ID NO: 34629 - protein, 236 aa, Sulfitobacter sp.
  REGION 1..236: note = tr|A0A085BV95|A0A085BV95_9RHOB 7-carboxy-7-deazaguanine synthase OS=Sulfitobacter sp. CB2047 OX=1525218 GN=queE PE=3 SV=1
MSQLRIAEVFGPTIQGEGALIGEPTVFVRTGGCDYRCAWCDSMHAVDPAFRHDWANMSTDAVWQEVQRLSDNTPLTVSLSGGNPAIQDFAPLIQLGHAAGYRFACETQGSIAKPWFGQLDCLVLSPKPPSSGETVDWAAFDRCVAAGETAAQTVMKIVIFDDADYDWARDAATRYAQLPLYLQPGNDEVDPTVAVDPQVLADKLLWLVDKTMADRWFTPRLLPQLHVLLWGNKRGV

SEQ ID NO: 34630 - protein, 236 aa, Sulfitobacter sp.; identical to SEQ ID NO: 33762
  REGION 1..236: note = tr|A0A2G2BZD5|A0A2G2BZD5_9RHOB 7-carboxy-7-deazaguanine synthase OS=Sulfitobacter sp.; OX = 1903071 GN=queE PE=3 SV=1

SEQ ID NO: 34631 - protein, 230 aa, unidentified
  source 1..230: note = Sulfuricaulis limicola
  REGION 1..230: note = tr|A0A1B4XIA8|A0A1B4XIA8_9GAMM 7-carboxy-7-deazaguanine synthase OS=Sulfuricaulis limicola OX=1620215 GN=queE PE=3 SV=1
MPRPVADAHDSRSTAHGLDRLRVTEIFYSLQGEARTVGYPTVFIRLTGCPLRCTYCDTEYAFYGGQWMELGEIMQRVAEHAPRYVTVTGGEPLAQRPCRELLTALCQRGYEVSLETGGALDIAGIDPRVSIVMDLKTPGSGEERRNLYANMPHLARKDQVKFVICDRADYEWSRAKLAEYQLDQRCEVLFSPCHGQLNPTELAEWILQDHLPVRMQIQLHKLLWNDARGH

SEQ ID NO: 34632 - protein, 222 aa, Sulfuricella denitrificans
  REGION 1..222: note = tr|S6AF71|S6AF71_SULDS 7-carboxy-7-deazaguanine synthase OS=Sulfuricella denitrificans (strain DSM 22764 / NBRC 105220 / skB26) OX=1163617 GN=queE PE=3 SV=1
MPVPNNVAPQLSLRINEIFHSLQGETSRVGLPTVFIRLTGCPLRCTYCDTSYAFNEGETLTLAEIFDKVTQFHARYVTVTGGEPLAQKNCLPLLQQLCDAGYSVSLETGGAMDISKVDTRVSRILDIKTPGSGEAEKNRWKNLELLTPQDEVKFVLCGEEDYQWAKQVLSEKRIADRCPVLFSASQGQLEPARLADWILRDNLPVRLQIQLHKFLWGEGRGK

SEQ ID NO: 34633 - protein, 222 aa, Sulfuricella sp.
  REGION 1..222: note = tr|A0A0E9MD69|A0A0E9MD69_9PROT 7-carboxy-7-deazaguanine synthase OS=Sulfuricella sp. T08; OX = 1632857 GN=queE PE=3 SV=1
MPVPNSAVPQLSLRINEIFHSLQGETSRAGLPTVFIRLTGCPLRCTYCDTSYAFHEGETLTLPEILDKVAQFHTRYVTVTGGEPLAQKNCLPLLQQLCDVGYSVSLETGGAMDISKVDARVSRILDIKTPDSGEAEKNRWKNLELLTPQDEVKFVLCGEEDYRWAKQVLSEKRVADRCPVLLSVSQGQLEPARLADWILRDNLPVRLQIQLHKHLWGEGRGK

SEQ ID NO: 34634 - protein, 252 aa, Sulfuricurvum kujiense
  REGION 1..252: note = tr|E4TXN3|E4TXN3_SULKY 7-carboxy-7-deazaguanine synthase OS=Sulfuricurvum kujiense (strain ATCC BAA-921 / DSM 16994 / JCM 11577 / YK-1) OX=709032 GN=queE PE=3 SV=1
MLYLVEHFYSVQGEGKYTGVPSLFFRFGGCNLKCEGFGCRESAPDGSEVLGCDTVYAVDRKGFGELWMEIEELQSLIWIMNGYRLPPHVDVVLTGGEPLIYANEPIFVEFIEYLIAHGHRVTFETNATIAPDFKRYPFYAQATYALSVKLSNSGEPLEKRVKPEAYGTIIAHAKESFFKFTVDEPSLVSHIESEIDEIIAPHPYTPVYCMPLGGDKAHIEANCEAVIEFCKRRGFIYSDRLHIRIWDQNHGV

SEQ ID NO: 34635 - protein, 252 aa, Sulfuricurvum sp.; identical to SEQ ID NO: 28772
  REGION 1..252: note = tr|A0A258Z360|A0A258Z360_9HELI 7-carboxy-7-deazaguanine synthase OS=Sulfuricurvum sp. 24-42-5 OX=1970440 GN=queE PE=3 SV=1

SEQ ID NO: 34636 - protein, 249 aa, Sulfuricurvum sp.
  REGION 1..249: note = tr|A0A0C2ZXH7|A0A0C2ZXH7_9HELI 7-carboxy-7-deazaguanine synthase OS=Sulfuricurvum sp. PC08-66 OX=1539066 GN=queE PE=3 SV=1
MIHLVEHFFSIQGEGRYVGVPSLFFRLGGCNMRCVGFGTHITAPDGTTIVGCDTAYAVDKEHFASQWRAIDETQTLIDILNSYAIPYSVDVVFTGGEPLLFASELAPFVEYLVARGHRVTFETNGSVALDFDAYPAYRECTFALAVKLSNSGEPHHRRINPKAIDSMATHAREAFFKFTLQASTIEDAQAEIAPIIALAPALGVYCMPISDSKAAIEAVCLEVIAFCKMHGYTYSDRLHIRIWDAIQGV

SEQ ID NO: 34637 - protein, 215 aa, unidentified
  source 1..215: note = Sulfuriferula multivorans
  REGION 1..215: note = tr|A0A401JFE8|A0A401JFE8_9PROT 7-carboxy-7-deazaguanine synthase OS=Sulfuriferula multivorans OX=1559896 GN=queE PE=3 SV=1
MFDATLRITEIFYSVQGETSRAGLPTVFIRLTGCPLRCGYCDTAYAFHGGNSMSIAAVLEQVAQYAPRYVTVTGGEPLAQKNAPLLLAALCDAGYDVSLETSGALDISGIDPRVSRIMDIKTPGSGEAAKNDWNNLKYLTPHDEIKFVIVDAADYDWARSLLQEHQLTQRCPVLFSPVHGQLQSGQLADWVLRDRLPVRMQVQLHKIFWGEVAGR

SEQ ID NO: 34638 - protein, 215 aa, unidentified
  source 1..215: note = Sulfuriferula plumbiphila
  REGION 1..215: note = tr|A0A512LAR2|A0A512LAR2_9PROT 7-carboxy-7-deazaguanine synthase OS=Sulfuriferula plumbiphila OX=171865 GN=queE PE=3 SV=1
MFDATLRITEIFYSVQGETSRAGLPTVFIRLTGCPLRCGYCDTAYAFHGGTGMTIAAILQQVAEYAPRYVTVTGGEPLAQKNAPPLLAALCDAGYDVSLETSGALDISGVDQRVSRIVDIKTPGSGEVAKNYWDNLNYLAPHDEIKFVIADAADYKWARAMLHEHKLAQRCPVLFSPVHGQLGAGQLADWVLRDRLPVRVQVQLHKIFWGEVAGR

SEQ ID NO: 34639 - protein, 214 aa, unidentified
  source 1..214: note = Sulfuriferula sp.
  REGION 1..214: note = tr|A0A1Y0G9V8|A0A1Y0G9V8_9PROT 7-carboxy-7-deazaguanine synthase OS=Sulfuriferula sp. AH1; OX = 1985873 GN=queE PE=3 SV=1
MDAATLRITEIFYSVQGETSRVGLPTVFVRLTGCPLRCGYCDTAYAFHGGESLTLSTILERVAAYHPRYVTVTGGEPLAQKHALTLLSALCDAGYDVSLETSGALDIGAVDPRVSRIVDIKTPGSGEVSKNRWENLAYLTAHDELKFVITDEADYQWARQTLAEHALAEQCPVLFSPVHGGAASELADWILRDRLPVRMQLQLHKILWNDAAGR

SEQ ID NO: 34640 - protein, 211 aa, unidentified
  source 1..211: note = Sulfurifustis variabilis
  REGION 1..211: note = tr|A0A1B4VGC1|A0A1B4VGC1_9GAMM 7-carboxy-7-deazaguanine synthase OS=Sulfurifustis variabilis OX=1675686 GN=queE PE=3 SV=1
MLRVTEVFYSLQGEARSVGCPTVFVRLTGCPLRCSYCDTAYAFHGGTRVSLDDVLERVAQYAPRYVCVTGGEPLAQPACRTLLARLADRGYAVSLETSGALDIADIDARVSIVMDLKTPSSGEEARNRYANVALLRPADQVKFVIRDRADYEWSRARLAEYGLADRCEILFSPVHGELDPTTLADWILAERLPVRLQIQLHKLLWHGAPGR

SEQ ID NO: 34641 - protein, 217 aa, Sulfurihydrogenibium azorense
  REGION 1..217: note = tr|C1DXS5|C1DXS5_SULAA 7-carboxy-7-deazaguanine synthase OS=Sulfurihydrogenibium azorense (strain Az-Fu1 / DSM 15241 / OCM 825) OX=204536 GN=queE PE=3 SV=1
MKKNLYKETFKVVEIFRTVEGEGRWVGLPVVFIRLEGCNLRCSWCDTTYSYDGKTYTVKTLEEILKEVSTYNLKRVCITGGEPFLTSNLDILVKSLLDEDYYVFIETNGTLWNERFKDLNLDRLYITCSPKPPFYFVNKDLIPYIKELKFVVDENLSLNHIIKPDFIDIIKSDIIVLQPESNKPEMVKKALNLQDQLLQLGIESRIIPQCHKVLGLP

SEQ ID NO: 34642 - protein, 220 aa, Sulfurihydrogenibium sp.
  REGION 1..220: note = tr|B2V8D4|B2V8D4_SULSY 7-carboxy-7-deazaguanine synthase OS=Sulfurihydrogenibium sp. (strain YO3AOP1); OX = 436114 GN=queE PE=3 SV=1
MKLLKKDLNKETFKVVEIFRSVEGEGRWVGLPVVFIRLEGCNLRCSWCDTPYSYTGENFKLLSISDILEEIKKYNLKRVCITGGEPFFTENLDILVGNLIENNYQVFIETNGTLWNQNFENLDKSKIYITCSPKPPFYFINKNLLPYISEFKFVVDETLDVKHIIRPDLTEYIKNDVIVLQPESNKPEMVNKALKLQDELLKFGIESRIIPQCHKVLGLP

SEQ ID NO: 34643 - protein, 217 aa, Sulfurihydrogenibium sp.
  REGION 1..217: note = tr|A0A2J6WZL9|A0A2J6WZL9_9AQUI 7-carboxy-7-deazaguanine synthase OS=Sulfurihydrogenibium sp. OX=2053621 GN=queE PE=3 SV=1
MKKDLLKEEFKVVEIFRTVEGEGRWVGLPVVFIRLEGCNLRCSWCDTTYSYDGKSYTVKNLYDILSQVKQYNLKRVCITGGEPFMTENLDVLVKVLLDEGFYVFIETNGTMWNEKFREIKKDNLYITCSPKPPFYFVNKNILPYISELKFVVDENLSVNHIIKPEFTEILKNDIIVLQPESNKPEMVEKALKIQDELLKLGIESRIIPQCHKVLGLP

SEQ ID NO: 34644 - protein, 217 aa, Sulfurihydrogenibium yellowstonense
  REGION 1..217: note = tr|C4FIF0|C4FIF0_9AQUI 7-carboxy-7-deazaguanine synthase OS=Sulfurihydrogenibium yellowstonense SS-5; OX = 432331 GN=queE PE=3 SV=1
MKKDLNKETFKVVEIFRSVEGEGRWVGLPVVFIRLEGCNLRCSWCDTPYSYTGENFKLLSITDILDEIKKYNLKRVCITGGEPFFTENLDVLVENLIENSYQVFIETNGTLWNQNFENLDKSKIYITCSPKPPFYFINKNLLPYVSEFKFVVDETLSIKHIIRSDLIEYIKNDTIVLQPESNKPEMVKKALELQDELLKFGIESRIIPQCHKVLGLP

SEQ ID NO: 34645 - protein, 252 aa, Sulfurimonas autotrophica
  REGION 1..252: note = tr|E0UR09|E0UR09_SULAO 7-carboxy-7-deazaguanine synthase OS=Sulfurimonas autotrophica (strain ATCC BAA-671 / DSM 16294 / JCM 11897 / OK10) OX=563040 GN=queE PE=3 SV= 1
MIYLVEHFYSIQGEGKYVGTPSLFFRFGGCNMKCEGFGCKETASDGAEVLGCDTVYAVNKEHFLQNWIPINKAQELLSILSLYDLPEAVDIVLTGGEPLIYANDEIFVDFLEVLVEQGHQITFETNGSLAVDFEKYPVYKECVFALSIKLSNSGEPLNKRLRGNVIYNIASNAKDAFFKFSIDKESINIALEEEIESVTIHSPQTKVYCMPVAGSKKELEENTEPLIEFCKAKGYNFSDRLHIRIWDANKGV

SEQ ID NO: 34646 - protein, 221 aa, Sulfurimonas denitrificans
  REGION 1..221: note = tr|Q30P93|Q30P93_SULDN 7-carboxy-7-deazaguanine synthase OS=Sulfurimonas denitrificans (strain ATCC 33889 / DSM 1251) OX=326298 GN=queE PE=3 SV=1
MRCEGFGCEESTPNGEKIVGCDTIYAVNREHFLQNWIPITSAHELLNILNFYDLPFAVDVVLTGGEPLIYANEPIFIEFLEKLYERGHKITFETNGTLSVDFERHVIYKKCIFALSVKLSNSNEAFAKRVKGEVISNIALNAKEVFFKFSIDADSINAALEDEILEITSFSPKTKVYCMPLGGTKEEVEANTEPLVEFCKAKGYNFSDRLHIRIWDQNRGV

SEQ ID NO: 34647 - protein, 253 aa, unidentified
  source 1..253: note = Sulfurimonas gotlandica
  REGION 1..253: note = tr|B6BHS5|B6BHS5_SULGG 7-carboxy-7-deazaguanine synthase OS=Sulfurimonas gotlandica (strain DSM 19862 / JCM 16533 / GD1) OX=929558 GN=queE PE=3 SV=1
MLYLVEHFYSIQGEGRYTGVPSLFFRFGGCNMKCEGFGCEEEASDGTKVLGCDTVYAVNKEHFSFNWSPIQKTQELLNVLDLYELPQRPVDIVLTGGEPLIYANEGIFVEFLEKLHEEGHKITFETNGSIAVDFEKYPIYKECIFALSVKLSNSKEPFRKRVNGDVIYSIASNAKEAFFKFSIDADSINLGLDEEIFNITLHSPRTQVYCMPLGGNKAEVEANTEPLIEFCKAKGYNFSDRLHIRIWDQNKGV

SEQ ID NO: 34648 - protein, 253 aa, unidentified
  source 1..253: note = Sulfurimonas hongkongensis
  REGION 1..253: note = tr|T0L1C2|T0L1C2_9HELI 7-carboxy-7-deazaguanine synthase OS=Sulfurimonas hongkongensis OX=1172190 GN=queE; PE = 3 SV=1
MIYLVEHFYSIQGEGRYIGTPSLFFRFGACNLKCEGFACSEVAPDGTVVVGCDTVYAVNKEHFSSQWGKITKARELLNILELYELPEKSVDIVLTGGEPLLYAQDEIFVEFLQVLHQRGHRICFETNATIAVNFFKYEIYKECIFALSVKLSNSNEPYKKRVRGEVINSIATNAKDAYFKFSVDAESINLGLEDEIFDITSHAPSADVFCMPVGGDKKTVEANTPMLVEFCKAKGYNFSDRLHIRIWDANKGV

SEQ ID NO: 34649 - protein, 252 aa, Sulfurimonas sp.
  REGION 1..252: note = tr|A0A2D3VPP6|A0A2D3VPP6_9HELI 7-carboxy-7-deazaguanine synthase OS=Sulfurimonas sp. UBA12504 OX=2015903 GN=queE PE=3 SV=1
MIYLVEHFYSIQGEGRYTGSPSLFFRFGGCNMKCEGFGCVEEAADGVKVLGCDTVYAVNKEHFAHAWISIKHEDELLNVLDLYELPEGVDVVLTGGEPLIYANDAVFVAFLEELDARGHTITFETNASLTVDFEKYEVYKKCIFALSVKLSNSGENESKRIRGDAINAIALNAREAFFKFSIDAESINLGLDDEIEDILSHAPFLKVYCMPLGGSRAEVEKNSEPLIEFCKEKGYNFSDRLHIRIWDKNKGV

SEQ ID NO: 34650 - protein, 252 aa, Sulfurimonas sp.
  REGION 1..252: note = tr|A0A2G2CUJ2|A0A2G2CUJ2_9HELI 7-carboxy-7-deazaguanine synthase OS=Sulfurimonas sp.; OX = 2022749 GN=queE PE=3 SV=1
MIYLVEHFYSIQGEGKYVGSPSLFFRFGGCNMKCEGFGCKETARDGTEVLGCDTVYAVNKEHFSHTWVPITKTQELLSVLDLYELPNAVDIVLTGGEPLIYANDTIFINFLETLIRNGHRITFETNGSLDVDFLRYPVYKECFFALSVKLTNSLEPLAKRVRGDIIYNISSNAKDAFFKFSIDKESITLGLEEELCEILVHSPSTAVYCMPVGGSKDEVEKNTEPLIEFCKAKGYNFSDRLHIRIWDINKGV

SEQ ID NO: 34651 - protein, 217 aa, unidentified
  source 1..217: note = Sulfurirhabdus autotrophica
  REGION 1..217: note = tr|A0A4R3XY17|A0A4R3XY17_9PROT 7-carboxy-7-deazaguanine synthase OS=Sulfurirhabdus autotrophica OX=1706046 GN=queE PE=3 SV=1
MTAPQPTLRINEIFYSLQGETSRIGLPTVFIRLTGCPLRCGYCDTEYAFHEGESMPLSAILEKTKAYGAHYVTVTGGEPLAQKGCIDLLKALCDADYSVSLETSGALDVSKVDVRVSKIVDVKTPGSGEVTKNRWENLQYLTPHDEIKFVLCDVNDYQWAKQQLTEHNLVERCPVIFSPVFSTLEPGDLAEWVLRDHVPVRMQIQLHKYLWGEGRGK

SEQ ID NO: 34652 - protein, 217 aa, unidentified
  source 1..217: note = Sulfurisoma sediminicola
  REGION 1..217: note = tr|A0A497XM41|A0A497XM41_9PROT 7-carboxy-7-deazaguanine synthase OS=Sulfurisoma sediminicola OX=1381557 GN=queE PE=3 SV=1
MGAADAKLRVSEIFHSIQGESTRVGLPTVFVRLTGCPLRCSWCDTEYAFAGGEAMTIPQALERVASHGCPTVCVTGGEPLAQKACPELLAALCDAGYSVSLETSGALDVCGLDARVSRIVDLKAPDSGECEKNRWENLACLNRHDELKLVLASTADYEWAKSLLTARRLDAICPVLFSPVADRLDPTQLAEWIVRDRLPVRFQLQLHKLLWCDTRGR

SEQ ID NO: 34653 - protein, 222 aa, Sulfuritalea hydrogenivorans
  REGION 1..222: note = tr|W0SK16|W0SK16_9PROT 7-carboxy-7-deazaguanine synthase OS=Sulfuritalea hydrogenivorans sk43H OX=1223802; GN = queE PE=3 SV=1
MSATSDAHLQNSLRVTEIFHSIQGESSRVGLPTVFVRLTGCPLRCVWCDTEYAFSGGESLSIADILQRVAGFDCKTVCVTGGEPLAQKNCLPLLSALCDAGHSVSLETSGALDIGGIDPRVARIVDLKAPGSGEEAKNCWENIGLLTAHDELKFVLASREDYDWAVSACRQRRLFERCPILFSPVQGQLDPTQLAQWILDDRLPVRFQLQLHKLLWDNAKGR

SEQ ID NO: 34654 - protein, 215 aa, unidentified
  source 1..215: note = Sulfuritortus calidifontis
  REGION 1..215: note = tr|A0A4R3JZ29|A0A4R3JZ29_9PROT 7-carboxy-7-deazaguanine synthase OS=Sulfuritortus calidifontis OX=1914471 GN=queE PE=3 SV=1
MSEPRLRVTEIFYSIQGETSRVGLPTVFVRLTGCPLRCGYCDTAYAFQGGEWMTLAQILAAVAAYALRQVTVTGGEPLAQRDCPALLTALCDAGYDVSLETSGALDIAPVDKRVARIVDIKTPGSGEVERNLWSNIEQLTPHDEVKFVIVDEADYRWAVELLRQHRLAERCEVLFSPVFGKLQPRQLAEWILRDRLPVRLQVQLHKVLWGEEPGR

SEQ ID NO: 34655 - protein, 210 aa, Sulfurivirga caldicuralii
  REGION 1..210: note = tr|A0A1N6ERW5|A0A1N6ERW5_9GAMM 7-carboxy-7-deazaguanine synthase OS=Sulfurivirga caldicuralii OX=364032 GN=queE PE=3 SV=1
MAYRIKEVFYSLQGEGAHSGRPAIFCRFSHCNLWTGKEEDRATAVCRFCDTDFVGTDGQNGGRFDTAEALVEHLIRFWPDISVPPFVVLTGGEPLLQVDTALLKALKRQRFEIAVETNGTIKAPGGIDWLTVSPKAGAPLIQTWGDELKLVYPQADLPPEKVAHLEFKLFYLQPMDGPNQQANLRKTLNYCLKHPQWRLSLQTHKLLGID

SEQ ID NO: 34656 - protein, 192 aa, Sulfurospirillum barnesii
  REGION 1..192: note = tr|I3XZ86|I3XZ86_SULBS 7-carboxy-7-deazaguanine synthase OS=Sulfurospirillum barnesii (strain ATCC 700032 / DSM 10660 / SES-3) OX=760154 GN=queE PE=3 SV=1
MLKVVEIFYSIQGEGTQVGVPSIFIRLHGCNLSCSFCDEELHKGAYEELSFEAVLERIQTYLSMNVIITGGEPTLYDLRDFIAFLQGHGYFVAVETNGFRFSHIANANWITYSPKEWNHIAQEGFHEVKFVVGKNAPLEKILEFKSDKPIFIQPQNESDKPNFENVAFCVEFVKKYPRFILSVQLHKFLGVE

SEQ ID NO: 34657 - protein, 192 aa, Sulfurospirillum cavolei
  REGION 1..192: note = tr|A0A2D3W734|A0A2D3W734_9PROT 7-carboxy-7-deazaguanine synthase OS=Sulfurospirillum cavolei OX=366522 GN=queE PE=3 SV=1
MLNVVEIFYSIQGEGAQVGVPCVFIRLHGCNLACSFCDEELHKGAYERLTFEAVLERIAAYPSKNVIITGGEPSLYDLRDFIAVLHSHMYRVGVETNGYNFAHIADADWITYSPKDWDAIALSGYDEIKFVVDKDASVEKIAAFQSDKAMFIQPQNKPHAPDMSNVRFCLEFVMQHPQFTFSAQLHKFLGVE

SEQ ID NO: 34658 - protein, 192 aa, Sulfurospirillum deleyianum
  REGION 1..192: note = tr|D1B473|D1B473_SULD5 7-carboxy-7-deazaguanine synthase OS=Sulfurospirillum deleyianum (strain ATCC 51133 / DSM 6946 / 5175) OX=525898 GN=queE PE=3 SV=1
MLKVVEMFYSIQGEGTQVGVPSIFIRLYGCNLSCSFCDEELHKGAYEELSFDAVLERIKAYPSMNVIITGGEPSIYDLNGFIDFLQAHMYAVSVETNGYNFSNIASANWITYSPKDWNHIAKHGYDEVKFIVSKDSDVSKLLDFKSYKPLFIQPQNNAHTPNQENLAFCIAFVKANPRFILSVQLHKFLGVE

SEQ ID NO: 34659 - protein, 192 aa, Sulfurospirillum halorespirans
  REGION 1..192: note = tr|A0A1D7TM90|A0A1D7TM90_9PROT 7-carboxy-7-deazaguanine synthase OS=Sulfurospirillum halorespirans DSM 13726 OX=1193502 GN=queE PE=3 SV=1
MLKIVEIFYSIQGEGTQVGVPSIFIRLHGCNLACNFCDELLHKGEYASLSFDEVLERIKVFPSMHVIITGGEPTIYNLNGFIEYLQAYMYSVAVETNGYNFSNISNANWVTYSPKAWDVIEKYGYDEVKFVVSKDSDVEKILAFKSYKPIFIQPQNEIDRPNKENVNFCVEFVKAHPQFILSVQLHKFLGVE

SEQ ID NO: 34660 - protein, 192 aa, Sulfurospirillum multivorans
  REGION 1..192: note = tr|A0A5B9TVI4|A0A5B9TVI4_SULMU 7-carboxy-7-deazaguanine synthase OS=Sulfurospirillum multivorans OX=66821 GN=queE PE=3 SV=1
MLKIVEIFYSIQGEGTQVGVPSIFIRLHGCNLACSFCDELLHKGEYASLSFDEVLERIKVYPSMHVIITGGEPTIYNLNGFIEYLQAYMYSVAVETNGYNFSNISNANWVTYSPKNWDLIEKYGYDEVKFVVSKESDVEKILAFKSYKPIFIQPQNETDRPNKENVNFCVEFVKAHPQFILSVQLHKFLGVE

SEQ ID NO: 34661 - protein, 192 aa, Sulfurospirillum sp.
  REGION 1..192: note = tr|A0A2D3WFU0|A0A2D3WFU0_9PROT 7-carboxy-7-deazaguanine synthase OS=Sulfurospirillum sp. UBA12182 OX=2015905 GN=queE PE=3 SV=1
MYKIVDIFYSLQGEGTYVGVPSIFVRFYGCNLGCYFCDDEKHKGNFEVLSQEELLEKIEGFTCKRVVITGGEPSIYNLNSLIEFLQERGYYVCAESNGYELSNIKQADWITYSPKDWNEIQSDGFSEYKFIVSTVSEVDKILALKTDKPIYIQPENHFASANVVNVKFCIDFVKANPHLKLSVQLHKYLGVE

SEQ ID NO: 34662 - protein, 192 aa, Sulfurospirillum sp.
  REGION 1..192: note = tr|A0A2D3W3Z7|A0A2D3W3Z7_9PROT 7-carboxy-7-deazaguanine synthase OS=Sulfurospirillum sp. UBA11407 OX=2015904 GN=queE PE=3 SV=1
MYKIVDIFYSLQGEGTYVGVPSIFVRFYGCNLGCYFCDDEKHKGNFEVLSQEELLEKIEGFTCKRVVITGGEPSIYNLNSLIEFLQERGYYVCVESNGYELSNIKQADWITYSPKDWNEIQSDGFSEYKFIVSTVSEVDKILALKTDKPIYIQPENHFASANVVNVKFCIDFVKANPHLKLSVQLHKYLGVE

SEQ ID NO: 34663 - protein, 252 aa, unidentified
  source 1..252: note = Sulfurovum riftiae
  REGION 1..252: note = tr|A0A151CGZ3|A0A151CGZ3_9PROT 7-carboxy-7-deazaguanine synthase OS=Sulfurovum riftiae; OX = 1630136 GN=queE PE=3 SV=1
MFYLTEQFFSIQGEGKYAGIPSYFLRTGGCNLSCPGFGARYEVDGEVRFGCDTYFAVDSVFAKQWQKVEQSSLLIAELQNEFKEIGYYPDVVITGGEPLMYHTDKIFYEVIDWLVKNKIRITFETNGTVEIDFEKYPAYKSCVFALSLKLANSGEPKEKRVIPQALKNIQTHTKESFLKFTIDAELVETTAIDEINEVRHILPELDVYCMPVGESRDTIWKNDKAVFEFCMKHNFRYSDRLHIRVFDTTQGV

SEQ ID NO: 34664 - protein, 252 aa, Sulfurovum sp.
  REGION 1..252: note = tr|A0A0C2Z5G0|A0A0C2Z5G0_9PROT 7-carboxy-7-deazaguanine synthase OS=Sulfurovum sp. FS06-10 OX=1539064 GN=queE PE=3 SV=1
  VARIANT 163: note = Xaa can be any naturally occurring amino acid
  VARIANT 248: note = Xaa can be any naturally occurring amino acid
MFYLTEQFFSIQGEGKYAGVPSYFLRTGGCNLSCPGFGASYDVDGMQKLGCDTFFAVDSHFSKRWQKVDDANVLIAHLKKEFETIGYLPQLVITGGEPLLYHKDEAFYAVISWLVKQGILITFETNGTVEIDFEAYPMYKQTIFALSIKLANSGEPKSKRIKXQAIANMVHHSYDRFFKFTIDRALVDSTALDEILEITKPFENATIYCMPVGESRDSIWKNDRAVFEFCMKHNFFYSDRLHIRVFDXTQGV

SEQ ID NO: 34665 - protein, 252 aa, Sulfurovum sp.
  REGION 1..252: note = tr|I2K580|I2K580_9PROT 7-carboxy-7-deazaguanine synthase OS=Sulfurovum sp. AR OX=1165841 GN=queE PE=3 SV=1
MFYLTEQFFSIQGEGKYAGVPSYFLRTGGCNLNCPGFGASYEVNGEVRYGCDTYFAVDSAYAKSWIKVDESKTLIDKLQNEFTHIGYKPHVVITGGEPLMYHSDKIFYAVIEWLVSEGIEVTFETNGTIMIDFETYPAYRSCVFALSLKLANSGEPEEKRIIPQALRSMRDHAKESFLKFTIDAELVKTSAEDEIASIRQILPELPVYCMPVGESRNTIWKNDKAVFEFCMRHNFRYSDRLHIRVFDTTQGV

SEQ ID NO: 34666 - protein, 223 aa, unidentified
  source 1..223: note = Superficieibacter electus
  REGION 1..223: note = tr|A0A2P5GTG6|A0A2P5GTG6_9ENTR 7-carboxy-7-deazaguanine synthase OS=Superficieibacter electus OX=2022662 GN=queE PE=3 SV=1
MQYPINEMFQTLQGEGYFTGVPAIFIRLQGCPVGCAWCDTKHTWDKLSDREVSLYSILAKTKESDKWGAASSEDLLAIIERQGYTARHIVITGGEPCIHDLLPLTMLLEKNGFSCQIETSGTHEIRCTPNTWVTVSPKVNMRGGYDVLEQALQRADEIKHPVGRVRDIEALDELLAVLKDDKPRVIALQPISQKDDATRLCIETCIARNWRLSMQTHKYLNIA

SEQ ID NO: 34667 - protein, 223 aa, unidentified
  source 1..223: note = Sutterella megalosphaeroides
  REGION 1..223: note = tr|A0A2Z6I9X8|A0A2Z6I9X8_9BURK 7-carboxy-7-deazaguanine synthase OS=Sutterella megalosphaeroides OX=2494234 GN=queE PE=3 SV=1
MASLLFVNEIFASLQGEGAWTGTPSVFVRLQGCLCRCPWCDTKNTWKLGEPNDCGLDFAASKADAPRHATCTGEELLAYIDAHYASIPHVIFTGGEPMLFDLTDVTAALLARGKTVAIETSGTEPVRVAEGVWVTVSPKYDMPGGREVLASALRRADEIKMPVSGPKDLEDLEHRTLPETKPGVLVYVQPVSRDDEATRLCVEAAMTKGWRVSFQVHKYVNMR

SEQ ID NO: 34668 - protein, 238 aa, Sutterella parvirubra
  REGION 1..238: note = tr|H3KD59|H3KD59_9BURK 7-carboxy-7-deazaguanine synthase OS=Sutterella parvirubra YIT 11816 OX=762967; GN = queE PE=3 SV=1
MTPIVPTARQNQIKGAEPLFFVNEIFASLQGEGAWTGTPSVFVRLQGCLCRCPYCDTKHTWKLGEPNGEKLDFAAAKADAPRHATATEDELFDFITTHFPKVPHVVFTGGEPFLFDLTGISERLLAAGRTVGVETSGTEPARVAGAVWVTVSPKIGMPGGRVVLPETLARADEIKMAVESEKDIEELKTDVLPFVSKKALIYVQPVSQGERATKFCWDAAMEEGWRVSFQVHKYVSIR

SEQ ID NO: 34669 - protein, 226 aa, Sutterella sp.
  REGION 1..226: note = tr|R7IHN4|R7IHN4_9BURK 7-carboxy-7-deazaguanine synthase OS=Sutterella sp. CAG:351 OX=1262975 GN=queE PE=3; SV = 1
MEEIRYSINEIFASVQGEGLLAGTPAVFVRLQGCPVHCPWCDTKYSWKEDGSGTTKIPLSEVLVKDSRPRSADASLDELVNLILERWPRIPLVVITGGEPAEQPIRPLTERLIAAGKRVSLETSGFLEIDVAPETFVTVSPKITVPGGRVLDSALERADEVKMVIGDESDLAALDAITDKIPASTPISLQPLSMEDSAASLCFRTAVERGGRYRVSVQLHKVLRVR

SEQ ID NO: 34670 - protein, 226 aa, Sutterella sp.
  REGION 1..226: note = tr|A0A414VVB0|A0A414VVB0_9BURK 7-carboxy-7-deazaguanine synthase OS=Sutterella sp. AM18-8-1 OX=2292076 GN=queE PE=3 SV=1
MEEIRYSINEIFASVQGEGLLAGTPAVFVRLQGCPLHCPWCDTKYSWKEDGSGTAKIPLSEVLVKDSRPRSADATLDELVNLILERWPRIPLVVITGGEPAEQPIRPLTERLIAAGKRVSLETSGFLEIDVAPETFVTVSPKITVPGGRVLDSALERADEVKMVIGDESDLAALDAITDKIPESTPISLQPLSMEESAASLCFRTAVERGGRYRVSVQLHKVLRVR

SEQ ID NO: 34671 - protein, 208 aa, unidentified
  source 1..208: note = Sutterellaceae bacterium
  REGION 1..208: note = tr|A0A2E2R6P7|A0A2E2R6P7_9BURK 7-carboxy-7-deazaguanine synthase OS=Sutterellaceae bacterium OX=2026794 GN=queE PE=3 SV=1
MFYTLQGEGAQAGRAAVFCRFAGCNLWTGREEDRATAVCKFCDTDFVGTDGVGGGKFKDAVALAQAIADTYQGGLGTARPYVVFTGGEPTLQLDSALIDAVHAQGFEIAIETNGTLPVPEGVDWICVSPKFGSELVQTRGHELKVVVPQLGQDLTALGQLQFDHYFVQAMDDSDPAKKAKNMQAAIQTCLNKPQWRLSVQTHKVIGMP

SEQ ID NO: 34672 - protein, 208 aa, unidentified
  source 1..208: note = Sutterellaceae bacterium
  REGION 1..208: note = tr|A0A2D6RQJ1|A0A2D6RQJ1_9BURK 7-carboxy-7-deazaguanine synthase OS=Sutterellaceae bacterium OX=2026794 GN=queE PE=3 SV=1
MFYTLQGEGAQAGRAAVFCRFAGCNLWTGREEDRATAVCKFCDTDFVGTDGVGGGKFKDAVALAQAIADTYQGGLGTAKPYVVFTGGEPTLQLDSALIDAVHAQGFEIAIETNGTLPVPEGVDWICVSPKFGSELVQTNGHELKVVVPQLGQDLNALGRLQFEHYFVQAMDDSDPVKKSRNLQVAIQTCLNKPQWRLSVQTHKVIGMP

SEQ ID NO: 34673 - protein, 206 aa, Swaminathania salitolerans
  REGION 1..206: note = tr|A0A511BQ89|A0A511BQ89_9PROT 7-carboxy-7-deazaguanine synthase OS=Swaminathania salitolerans OX=182838 GN=queE PE=3 SV=1
MFATLQGEGAHTGRASIFCRFTGCNLWSGREQDRHKAACTFCDTDFLGTDGPGGARFETPEALADALALRWYEAAGESEGRYVVFTGGEPLLQVDPPLIAAVHARGFEIAIESNGTLEAPEGIDWICVSPKPSSRIVQRSGHELKLVFPQESLPPSTFDSWDFSQFWLQPMDGPDRAANTAAAVAYCQKNPRWRLSLQTHKLIGIP

SEQ ID NO: 34674 - protein, 213 aa, unidentified
  source 1..213: note = Swingsia samuiensis
  REGION 1..213: note = tr|A0A4Y6UHQ2|A0A4Y6UHQ2_9PROT 7-carboxy-7-deazaguanine synthase OS=Swingsia samuiensis; OX = 1293412 GN=queE PE=3 SV=1
MSYAIKEMFITLQGEGAQTGRTSVFCRFTGCNLWSGREQDRDTAACRFCDTDFIGTNGEGGGRFKTAELLAEALEACWSRTVKNTGQRYVVFTGGEPLLQLDDALIQAVKAFGFEIAVETNGTIIAPHGVDWICVSPKPDSKLIQTQGSELKLVYPQKELSPEMFDTLDFKHFWLQPMDGPNRFENTQKAVAFCLANPRWRLSLQTHKMIGIP

SEQ ID NO: 34675 - protein, 253 aa, unidentified
  source 1..253: note = Swingsia sp.
  REGION 1..253: note = tr|A0A4Y6U7J9|A0A4Y6U7J9_9PROT 7-carboxy-7-deazaguanine synthase OS=Swingsia sp. F3b2; OX = 2558361 GN=queE PE=3 SV=1
MKAALTAFHGYSGLISLMEHAVVYSVKEIFPTLQGEGFHTGRAAVFCRFAGCNLWNGREGDRAHALCRFCDTDFIGTDGPGGGRFHKAADLAQSILQAWQAGTGDQGHASCSPLVRPYVVFTGGEPLLQLDQPLIQALKQLDFEVGVESNGTLKAPLGIDWLCISPKGRAPLVQASGDELKFIYPQTDASPELFTTLPFKHFWLQPLDIPAPSAEAGQPPLRSAENVQAAVRYCQTHPQWRLSLQTHKLIGIP

SEQ ID NO: 34676 - protein, 217 aa, unidentified
  source 1..217: note = Synechococcales bacterium
  REGION 1..217: note = tr|A0A354B255|A0A354B255_9CYAN 7-carboxy-7-deazaguanine synthase OS=Synechococcales bacterium UBA10510 OX=2055795 GN=queE PE=3 SV=1
MVETFHSLQGEGIHAGRSAFFIRLAGCQVGCSWCDTKHSWPLAAHPQRPLAELVAEAQAAAAAGAAFLVITGGEPLHHQLDPLCKALRQLSAPGGKALPLHLETSGVDPLSGRFDWIALSPKRHRPPRPELLAACHELKLVVHHREDLSFAAAMAAAARQHRRTAGQGRDQSSDQGPVLLLQPGANCAAGQQLAIDYVKANPDWRLSLQSHKLLGLR

SEQ ID NO: 34677 - protein, 50 aa, unidentified
  source 1..50: note = Synechococcales bacterium
  REGION 1..50: note = tr|A0A358BYX7|A0A358BYX7_9CYAN 7-carboxy-7-deazaguanine synthase QueE (Fragment); OS = Synechococcales bacterium UBA8138 OX=2055796; GN = DEB19_06330 PE=4 SV=1
MANPGLLPVVETFHSLQGEGIHGGRSAFFIRLAGCNVACSWCDTKHSWPS

SEQ ID NO: 34678 - protein, 206 aa, Synechococcus elongatus
  REGION 1..206: note = tr|A0A3G6X2B1|A0A3G6X2B1_SYNEL 7-carboxy-7-deazaguanine synthase OS=Synechococcus elongatus PCC 11801 OX=2219813 GN=queE PE=3 SV=1
MSAVIASTTATLPIVETFHSVQGEGAWMGCSAFFIRLAGCDVGCPWCDTKQSWPRDRHPEVAIADLVQAAIAAQPQFVVVTGGEPLLHDLTELTNALRSQGLRCHLETSGSAPPSGQFDWVTLSPKPFKPVVATNYNWANELKVVIQTEADLAFAEQQAIAVPETTLKLLQPEWNSPESRDRVVNYVRQHPRWRVSLQTHKFLGVR

SEQ ID NO: 34679 - protein, 206 aa, Synechococcus elongatus
  REGION 1..206: note = tr|Q31NK7|Q31NK7_SYNE7 7-carboxy-7-deazaguanine synthase OS=Synechococcus elongatus (strain PCC 7942); OX = 1140 GN=queE PE=3 SV=1
MSALTSIAAATLPIVETFHSVQGEGAWMGCSAFFIRLAGCDVGCPWCDTKQSWPRDRHPEVAIADLVEAAVAAQPQFVVITGGEPLLHDLTELTNALRSQGLRCHLETSGSASPSGSFDWVTLSPKPFKAVVAANYNWANELKVVIQTDADFDFAEQEAIAVPETTLKLLQPEWNSPESCDRVVNYVRQHPRWRVSLQTHKFLGVR

SEQ ID NO: 34680 - protein, 199 aa, unidentified
  source 1..199: note = Synechococcus lacustris
  REGION 1..199: note = tr|A0A2P7EFD1|A0A2P7EFD1_9SYNE 7-carboxy-7-deazaguanine synthase OS=Synechococcus lacustris OX=2116544 GN=queE PE=3 SV=1
MVETFHSLQGEGIHGGRSAFFIRLAGCNVACSWCDTKHSWPSEAHPQRPAEHLAAEAQSAAQAGAAFVVITGGEPLHHNLDCLCTSLKPVGLPIHLETSGVDQLSGCFDWICLSPKRHRPPSQALLTACNELKVVVHEAADLEFAVAMAAAANRGKNKPVLMLQPGADSKAGSSIAINYVMAHPAWRLSLQTHKWLGVR

SEQ ID NO: 34681 - protein, 261 aa, Synechococcus lividus
  REGION 1..261: note = tr|A0A2D2PZJ7|A0A2D2PZJ7_SYNLI 7-carboxy-7-deazaguanine synthase OS=Synechococcus lividus PCC 6715 OX=1917166 GN=queE PE=3 SV=1
MIGDLDLEGVSVPLVEIFSAIQGEGANVGTRQLFIRFAGCDLRCTYCDSAHTWSVPAIALLETIAGDRQFQRVANPLSGTQILAAVAQLHHPHLHDSISLTGGEPLLHALALATLLPALKAATQLPLYLETGGHHPRALERVLPYLDSVGMDIKLPSVSGECHWPAHQQFLTLCDRAGVEVFCKVIISALTTPTDLATMAELVATVNPRIPVFLQPVTPIGTGRLIQPPTPAQVLAWQAYLKNRLAHVRVIPQTHKFLGQR

SEQ ID NO: 34682 - protein, 202 aa, Synechococcus sp.
  REGION 1..202: note = tr|A0A1Z9JG94|A0A1Z9JG94_9SYNE 7-carboxy-7-deazaguanine synthase OS=Synechococcus sp. TMED169 OX=1986593 GN=queE PE=3 SV=1
  VARIANT 52: note = Xaa can be any naturally occurring amino acid
  VARIANT 71: note = Xaa can be any naturally occurring amino acid
  VARIANT 81: note = Xaa can be any naturally occurring amino acid
  VARIANT 87: note = Xaa can be any naturally occurring amino acid
  VARIANT 97: note = Xaa can be any naturally occurring amino acid
  VARIANT 102: note = Xaa can be any naturally occurring amino acid
  VARIANT 112: note = Xaa can be any naturally occurring amino acid
  VARIANT 116: note = Xaa can be any naturally occurring amino acid
MSTLPVVETFHSLQGEGLHAGRSAFFIRLGGCTVGCSWCDTKHSWPQTAHPXLELQTLAAEAAAAQQKGAXFVVITGGEPXHHDLDXFCQALAEATXSLPRXLETSGVDPLXGSFXWITLSPKSHKPPTQQLLQRCDELKAVVHGPEDLSFAEAMAAQAPQAQWLLQPGWDSPQGQKLAIDFVRSNPAWRLSLQSHKWLGVR

SEQ ID NO: 34683 - protein, 206 aa, Synechococcus sp.
  REGION 1..206: note = tr|A0A0H5PV66|A0A0H5PV66_SYNPZ 7-carboxy-7-deazaguanine synthase OS=Synechococcus sp. (strain WH8103) OX=29410 GN=queE PE=3 SV=1
MNQDAATLPVVETFHSLQGEGHHSGRSAFFIRLAGCNVGCPWCDTKHSWPVNTHPQRSLRALAADVEQAERNGAAFTVITGGEPLQHNLDGLASALREASSHPLHLETSGVDGLSGDPDWITLSPKPHRPPRQELLSHCDELKVVIHTADDLLFAESMAAAVSKQTVLLLQPGWDSSEGQRLAIDHVQNQPRWRLSLQTHKWLGVR

SEQ ID NO: 34684 - protein, 208 aa, Synechocystis sp.
  REGION 1..208: note = sp|P73667|QUEE_SYNY3 7-carboxy-7-deazaguanine synthase OS=Synechocystis sp. (strain PCC 6803 / Kazusa); OX = 1111708 GN=queE PE=3 SV=1
MSMGPISELLTVSYPIAETFHSLQGEGAWAGGNAFFIRLGGCDVHCPWCDQKETWPTQHHPRQTVTELVQQAVTAKPSFVVITGGEPLMHDLQPLCKTLKNQGLRLHLETSGAYPLTGQFDWITLSPKPYKLPQAAIYPLANELKVIISQDEDFDWAEMEARKISPGTPLYLQAEWETEAMNEKIFAYILTHSQWRLSLQTHKYLGVR

SEQ ID NO: 34685 - protein, 206 aa, Synechocystis sp.
  REGION 1..206: note = tr|A0A068MS08|A0A068MS08_SYNY4 7-carboxy-7-deazaguanine synthase OS=Synechocystis sp. (strain PCC 6714) OX=1147 GN=queE PE=3 SV=1
MATISEPLTFTYPIAETFHSLQGEGAWAGSNAFFIRLGGCDVHCPWCDQKETWPTQHHPRQTVIELVQRAVQAKPGFVVITGGEPLMHDLNPLCQALKNQGLRLHLETSGVYPLTGQFDWITLSPKPYRLPQAEIYPLANELKVIISQDKDFSWAEIEATKVSRGTRLYLQAEWETEAMNARIFAYVLTHPQWRLGLQTHKYLGVR

SEQ ID NO: 34686 - protein, 209 aa, unidentified
  source 1..209: note = Syntrophaceae bacterium
  REGION 1..209: note = tr|A0A354SG45|A0A354SG45_9DELT 7-carboxy-7-deazaguanine synthase OS=Syntrophaceae bacterium OX=2052184 GN=queE PE=3 SV=1
MYSVKEIFYSIQGEGYYSGRPAVFCRFSGCNLWSGREEDRDKALCKFCDTDFVGTDGIDGGLYKTASLLAKKISQHWPQANERRFLVCTGGEPLLQMDAALIAALHEENLEIAVETNGTIAAPAGIDWICVSPKAGVQLAQASGDELKLAYPQTGLDPQRYAKLNFRHFFLQPMDNVDREEATKQALKYVLAHPGWRISLQLHKILDVR

SEQ ID NO: 34687 - protein, 323 aa, unidentified
  source 1..323: note = Syntrophaceae bacterium
  REGION 1..323: note = tr|A0A1V5E249|A0A1V5E249_9DELT 7-carboxy-7-deazaguanine synthase OS=Syntrophaceae bacterium PtaU1.Bin231 OX=1811718 GN=queE PE=4 SV=1
MNAFDRKVRRVLPEGLVSGEVRVLQINLGRHCNLSCSHCHLECSPSRRERMTQAVMGEILSRIGGRTFDRVDITGGSPELHPHFRTFLEKLCAEGCPVQVRTNLTNLAGPPLSGLIPFFRDRRVSLVGSLPCYEEENVDLQRGPGVHERSIAALRLLNRAGYGVEEALPLDLVYNPGGPFLPPQQAELEGIYRGELGRRFGVRFSRLLVLTNMPIGRFGRQLEQGGEMAAYRKLLEDSFNPATLARLMCRHQISVDWDGRLYDCDFNLALGMPVNHGSPNTLAAARLDRLASRSIMTGSHCFGCTAGSGSSCAGALAPPSASS

SEQ ID NO: 34688 - protein, 215 aa, Syntrophobacter fumaroxidans
  REGION 1..215: note = tr|A0LJR6|A0LJR6_SYNFM 7-carboxy-7-deazaguanine synthase OS=Syntrophobacter fumaroxidans (strain DSM 10017 / MPOB) OX=335543 GN=queE PE=3 SV=1
MALRVNEIFHSIQGESGYAGWPCVFVRLTGCNLRCSYCDTRYAYDEGDFVTLREIIGRVRRFDCPLVEITGGEPLLQPETPELVAELLDLGHTVLVETNGSMDISVVDRRCVKIVDFKCPSSGESDANDMENLERLGSRDEIKCVIGTREDYEFAREIERLAAERAGTGSTVCFSPVFGKLEPRELAEWILADRLRVRLGLQLHKIIWEPDTRGV

SEQ ID NO: 34689 - protein, 212 aa, Syntrophobacter sp.
  REGION 1..212: note = tr|A0A2U3K566|A0A2U3K566_9DELT 7-carboxy-7-deazaguanine synthase OS=Syntrophobacter sp. SbD1 OX=2043167 GN=queE PE=3 SV=1
MAIEVTEIFHSIQGESSWAGEPCVFVRLTGCNLRCSYCDTSYAYEHGRLMEIHEILERVSGFRCNLVEVTGGEPLMQAETPLLISRLLDAGRRVLLETNGSIDIDAVDARCVRIVDIKCPSSGMSSHNYLRNLKKLRSHDELKFVIADRKDYEFARDLLATFPAGLCKINFSPVFGSIAPRSLAEWILEDHLPVRLNIQLHKIIWGPDTKSV

SEQ ID NO: 34690 - protein, 215 aa, unidentified
  source 1..215: note = Syntrophobacteraceae bacterium
  REGION 1..215: note = tr|A0A3D0H7H6|A0A3D0H7H6_9DELT 7-carboxy-7-deazaguanine synthase OS=Syntrophobacteraceae bacterium OX=2052185 GN=queE PE=3 SV=1
MALKVNEIFYSIQGESSYAGYPCVFVRMTGCNLRCSYCDTRYAYEKGEDLEIFEILDQVRTYGCPLVEVTGGEPLIQRETPALIQGLLDAGFKVLMETNGSLDIGYVDPRCIRIVDVKCPSSGEVERNDLDNLRRLAQRDEVKFILNDRGDYEYARGILRLMNRTHVRVGHVHFSPVYGKLAPTLLARWILDDCLKVRLNLQIHKIIWDPERRGV

SEQ ID NO: 34691 - protein, 214 aa, unidentified
  source 1..214: note = Syntrophobacteraceae bacterium
  REGION 1..214: note = tr|A0A352PYT4|A0A352PYT4_9DELT 7-carboxy-7-deazaguanine synthase OS=Syntrophobacteraceae bacterium OX=2052185 GN=queE PE=3 SV=1
MALKVNEIFYSIQGESSFSGTPCIFIRLTGCNLRCSYCDTRYACDEGTVLSLDEVLRRIALFPCSLVEVTGGEPLLQQNTPKLLRKLLRLGYKVLVETNGSMNIEAIDKRCIRIVDIKCPSSGEADMNDLGNLKRLTGKDELKFVIGCRSDYEFAKDLVLSPEIMNLKIKPPLFSPVMNKLKPKRLAAWILEDHLNVRLQVQLHKVIWGNRRGV

SEQ ID NO: 34692 - protein, 140 aa, unidentified
  source 1..140: note = Syntrophobacterales bacterium
  REGION 1..140: note = tr|A0A2M7BH96|A0A2M7BH96_9DELT 7-carboxy-7-deazaguanine synthase (Fragment); OS = Syntrophobacterales bacterium CG03_land_8_20_14_0_80_58_14 OX=1974100 GN=COS57_11630 P; E = 3 SV=1
MQVNEIFFSIQGESSHAGRPCAFIRLTGCNLRCSYCDTAYAYDEGSWLEIPEIERQIRSFDCRLVEITGGEPLLQAETPELIRTLLDRHYTVLLETNGSREIGVIDERCIRIVDVKCPSSGESEKNRLENLAIITPNDEV

SEQ ID NO: 34693 - protein, 190 aa, unidentified
  source 1..190: note = Syntrophobacterales bacterium
  REGION 1..190: note = tr|A0A2G9XLS8|A0A2G9XLS8_9DELT 7-carboxy-7-deazaguanine synthase OS=Syntrophobacterales bacterium CG23_combo_of_CG06-09_8_20_14_all_48_27; OX = 1974101 GN=queE PE=3 SV= 1
MKVNEIFYSVQGEGKNAGIPMVFVRLAGCNLRCNFCDTKYALEAGEEMTVGEILSARGKYPSEWVCITGGEPFIQPLDELVGRLKADGSLIQIETNGTIFQPVTCDWLAVSPKKERRPVESMLERADEIKIVVSSKAALDFAEEYGAWGTCHSVQPENNHGEATKLCLDFVAEHPQWRLSMQLHKLINIK

SEQ ID NO: 34694 - protein, 203 aa, Syntrophobotulus glycolicus
  REGION 1..203: note = tr|F0T104|F0T104_SYNGF 7-carboxy-7-deazaguanine synthase OS=Syntrophobotulus glycolicus (strain DSM 8271 / FlGlyR) OX=645991 GN=queE PE=3 SV=1
MKVILVSKEYPVHEIFDSIQGEGYWTGAAASFVRLQQCNLRCAWCDSKGTWEGKPEKMTADEILAAVHSERVILTGGEPLLHDLTALLESLKAAGKKVHIETNGTQPWKESYPQEAWITVSPKKESGYLVQPSIKSKANEYKFVVDEDFSADILAQLEFNSCPNIFLSPENVRSEMIKKALSIVAQYPFCRLTLQLHKLIGVR

SEQ ID NO: 34695 - protein, 225 aa, Syntrophomonas zehnderi
  REGION 1..225: note = tr|A0A0E4C9R0|A0A0E4C9R0_9FIRM 7-carboxy-7-deazaguanine synthase OS=Syntrophomonas zehnderi OL-4 OX=690567 GN=queE PE=3 SV=1
MYPVIEIFGPTIQGEGIWQGSRTMFVRLAGCDYRCRWCDTSYALETAAAKRLTPQEIVSQLKILASYCKTVTLTGGNPCVHMLEPLITTLRAEDYEIHLETQGSLWQDSLKMVDMINLSPKAPSSGMQQNQSTLAEFVSQARSLQLKIIILTDADYAYARELHQQYPDIPMVLQVCNEPGQDNYESLMSKYRALVNKLTLDSSISDNVRALPQLHVLAWGNRPGV

SEQ ID NO: 34696 - protein, 215 aa, Syntrophorhabdus aromaticivorans
  REGION 1..215: note = tr|A0A351U6U0|A0A351U6U0_9DELT 7-carboxy-7-deazaguanine synthase OS=Syntrophorhabdus aromaticivorans OX=328301 GN=queE PE=3 SV=1
MSDVLKVNEVFHSIQGESTFAGLPCTFIRLAGCNLRCSYCDTAYAYEEGKEWSIPALIDYAKAYRPLLVEVTGGEPLLQAGTQELVKGLLREGCEALVETNGSLDISVIDKRAVIIMDIKCPDSGMSDKNLFANIGCLKPHDEVKFVVASEGDYLWATSIIREHGLEQTCSILFSPVYGKLEPGRLAKWILRDGIKARLQLQLHKYIWGPEKRGV

SEQ ID NO: 34697 - protein, 215 aa, Syntrophorhabdus sp.
  REGION 1..215: note = tr|A0A1V5CGP5|A0A1V5CGP5_9DELT 7-carboxy-7-deazaguanine synthase OS=Syntrophorhabdus sp. PtaU1.Bin002 OX=1811702 GN=queE PE=3 SV=1
MNTILKVNEVFHSIQGESTFAGLPCTFIRLTGCNLRCSYCDTAYAYEEGKEWSIPDLIDCAKHYQSPLVEVTGGEPLLQAGTPELVRALLDEDREVLVETNGSLDISVIDKRAVIIMDMKCPDSGMSDKNLFANVGCLKSRDEVKFVIASEGDYSWAKSMIKEHRLERTCTILFSSVYGKLRPSRLAEWILRDRLKARLQLQLHKYIWEPEKRGV

SEQ ID NO: 34698 - protein, 215 aa, Syntrophorhabdus sp.
  REGION 1..215: note = tr|A0A1V4WLL5|A0A1V4WLL5_9DELT 7-carboxy-7-deazaguanine synthase OS=Syntrophorhabdus sp. PtaB.Bin006 OX=1811698 GN=queE PE=3 SV=1
MNTILKVNEVFHSIQGESTFAGLPCTFIRLTGCNLRCSYCDTAYAYEEGKEWSIPDLIDCAKHYQSPLVEVTGGEPLLQAGTPELVRALLDEGREVLVETNGSLDISVIDKRAVIIMDMKCPDSGMSDKNLFANVGCLKSRDEVKFVIASEGDYSWAKSMIKEHRLERTCTILFSSVYGKLRPSRLAEWILRDRLKARLQLQLHKYIWEPEKRGV

SEQ ID NO: 34699 - protein, 243 aa, Syntrophothermus lipocalidus
  REGION 1..243: note = tr|D7CMQ0|D7CMQ0_SYNLT 7-carboxy-7-deazaguanine synthase OS=Syntrophothermus lipocalidus (strain DSM 12680 / TGB-C1) OX=643648 GN=queE PE=3 SV=1
MKAYLSEITESIQGEGTLAGSRQIFLRFCGCNLRCPYCDTVGSLSKTPSCKIFLKPGSKNDFREYANPLSISDVVKATANFDTRWVSLTGGEPLLWADYLKRLAPILVSKGYRMLLETNGTLVENLVDILEFTAVISMDFKLPSAIGIDLFPVHKRFLELAACRPVYVKVVVTPSTEPWEIGEVARIIAGVDATIPLVLQPVSLVTSQVAVQAEKLFDLQLDALKHLEDVRVIPQIHKYLRVT

SEQ ID NO: 34700 - protein, 215 aa, Syntrophus aciditrophicus
  REGION 1..215: note = tr|Q2LVK5|Q2LVK5_SYNAS 7-carboxy-7-deazaguanine synthase OS=Syntrophus aciditrophicus (strain SB) OX=56780; GN = queE PE=3 SV=1
MPLKVNEIFYSIQGESSFIGIPCVFVRLTGCNLRCSYCDTRYAYEEGTLWDIPDILDRISSYHCPLVEITGGEPLIQKETPLLIRDLLDRGCHVLLETNGSRPIRTIDERCVRIVDIKCPSSGESRSNDYRNLDDLTGQDEIKFVLGERKDYEFAKEILISRNLANRISHPPIFSPVTNSLDPKKLVRWILEDHLPVRFQLQLHKILWGNDVRGV

SEQ ID NO: 34701 - protein, 215 aa, Syntrophus gentianae
  REGION 1..215: note = tr|A0A1H7WB19|A0A1H7WB19_9DELT 7-carboxy-7-deazaguanine synthase OS=Syntrophus gentianae; OX = 43775 GN=queE PE=3 SV=1
MPLKVNEIFYSIQGESSFIGMPCVLVRLTGCNLRCSYCDTRYAYEEGTHWDLSGILDRISSYQCRLVEITGGEPLLQEETPALIRNLLDKGYDVLLETNGSLPIRTIDSRCVRIVDIKCPSSGESHRNDYSILDDLTERDEIKFVLGERNDYEFAREILLSRSLAARTLHPPLLSPVPERLDPKLLVQWILDDHLSVRLQLQLHKILWGRDARGV

SEQ ID NO: 34702 - protein, 230 aa, Syntrophus sp.
  REGION 1..230: note = tr|A0A351Z782|A0A351Z782_9DELT 7-carboxy-7-deazaguanine synthase OS=Syntrophus sp. (in: Bacteria) OX=48412 GN=queE PE=3 SV=1
MRISETFYSIQGEGTLAGLPSVFIRTAGCNLRCRWCDSPYASRHARGSERTIDSLVEEAIRHPTRFCVITGGEPMLTKGIHDLAKRLVDGGRHVTIETAATILPHGISCSLASLSPKLKNSTPGTSTPVAVRRRHEARRLRPDVIREWIDHYDYQLKFVVCSGSDVAEAIALLDALDRSIAPEKVLLMPEGVDAAAFANVADHIVEACKEHGFRYCDRLHIRLYGHTPGR

SEQ ID NO: 34703 - protein, 215 aa, Syntrophus sp.
  REGION 1..215: note = tr|A0A1V4Y1C8|A0A1V4Y1C8_9DELT 7-carboxy-7-deazaguanine synthase OS=Syntrophus sp. PtaB.Bin138 OX=1811711 GN=queE PE=3 SV=1
MSLKVNEIFYSIQGESSFIGIPCVLVRLTGCNLRCSYCDTRYAYEGGTLWELSDLLGRIASHRCRLVEITGGEPLLQAETPALIRSLLEGGYAVLLETNGSLPIRGIDRRCVRIVDIKCPSSGESHRNDFSILDDLTERDEIKFVLGERGDYEFARDILLSRNLAAKTRNPPLLSPVTERLDPKRLARWILEDHLSVRLQLQLHKILWGKDARGV

SEQ ID NO: 34704 - protein, 234 aa, unidentified
  source 1..234: note = Tahibacter aquaticus
  REGION 1..234: note = tr|A0A4R6ZA81|A0A4R6ZA81_9GAMM 7-carboxy-7-deazaguanine synthase OS=Tahibacter aquaticus; OX = 520092 GN=queE PE=3 SV=1
MTAGAGQSVPAAASRADAVPLDQRLRITEIFHSIQGEADAVGWPTVFVRLTGCPLRCTWCDTTYSFHGGQWHSIDEILAEVGRHGARHVCVTGGEPLSQKRCLVLLRRLCDAGYDVSLETSGALDVAAVDGRVRKVMDLKAPDSGEFKRNRWSNLAHLRAHDQVKFVLAGRADYEWARATVEEHQLAQTCQVLFSPVHASLKPRALAEWILADRLPVRMQLQLHKLLWGDEPGH

SEQ ID NO: 34705 - protein, 209 aa, unidentified
  source 1..209: note = Taibaiella chishuiensis
  REGION 1..209: note = tr|A0A2P8DAL1|A0A2P8DAL1_9BACT 7-carboxy-7-deazaguanine synthase OS=Taibaiella chishuiensis OX=1434707 GN=queE PE=3 SV=1
MTAIEAQDITHTSYPVMEHFYTLQGEGAYSGQAAYFIRLGGCDVGCVWCDVKESWDANAHPLMSTGTMQELVSAHPGKIVVVTGGEPSMHDLVPITRALKAAGKRTHIETSASSPLTGDWDWVTLSPKKFKAPLAQNMPLADELKIIVFNKSDFKWAEEFAALVKPECKLYLQPEWDKRDSMTPLIIEYIQDHPQWQLSLQTHKYLNIP

SEQ ID NO: 34706 - protein, 193 aa, unidentified
  source 1..193: note = Taibaiella soli
  REGION 1..193: note = tr|A0A2W2C1F3|A0A2W2C1F3_9BACT 7-carboxy-7-deazaguanine synthase OS=Taibaiella soli; OX = 1649169 GN=queE PE=3 SV=1
MEHFYTLQGEGRFSGQAAYFIRLAGCDVGCVWCDVKESWDTEGHPLFTTEAIVTAASAHPGRIAVITGGEPAMHQLQPLTDALHAAGFRVHIETSGSSTLSGDLDWITLSPKKFKAPLEESLQQANELKVVVFNKTDFAWAEQHAKNVPEHCILYLQPEWSKRDQMTPLIIDFIQQNPQWQLSLQTHKYLNIP

SEQ ID NO: 34707 - protein, 200 aa, unidentified
  source 1..200: note = Taibaiella sp.
  REGION 1..200: note = tr|A0A3N6ZPP1|A0A3N6ZPP1_9BACT 7-carboxy-7-deazaguanine synthase OS=Taibaiella sp. KBW10; OX = 2153357 GN=queE PE=3 SV=1
MSIQYPVMEHFYTLQGEGAYAGHAAYFIRLGGCDVGCVWCDVKESWDADVHPKMSVAEMVAAAAAHPGRIVVITGGEPSMYDLAPLTRALKEAGFRTHIETSASSPLSGELDWVTLSPKKFKAPLAENMAWAHELKIVVFNKHDFKWAEEYAAQVPESCKLYLQTEWDKRESITPIILEYIQQNPKWSLSLQTHKYLNIP

SEQ ID NO: 34708 - protein, 218 aa, unidentified
  source 1..218: note = Tamilnaduibacter salinus
  REGION 1..218: note = tr|A0A2A2HZC1|A0A2A2HZC1_9ALTE 7-carboxy-7-deazaguanine synthase OS=Tamilnaduibacter salinus OX=1484056 GN=queE PE=3 SV=1
MYRIKEAFYTLQGEGAQAGRAAVFCRFSKCNLWNGRESGRATAVCTFCDTDFVGTDGQNGGQFETAADLAAHVALLWPHDTGRPYVVCTGGEPLLQLDEPLIAALHQRGFEVGVETNGTLPAPDGIDWLCVSPKATAPVVIEQCDELKLVYPQIDAMPERFESIRARHFFLSPMASPVAPTEGPDRLKTANTRKATEYCLAHPQWRLTLQMHKIVGID

SEQ ID NO: 34709 - protein, 218 aa, unidentified
  source 1..218: note = Tamilnaduibacter salinus
  REGION 1..218: note = tr|A0A2U1CY48|A0A2U1CY48_9ALTE 7-carboxy-7-deazaguanine synthase OS=Tamilnaduibacter salinus OX=1484056 GN=queE PE=3 SV=1
MYRIKEAFYTLQGEGAQAGRAAVFCRFSKCNLWNGRESGRATAVCTFCDTDFVGTDGQNGGQFETAGDLAAHVASLWPHDTGRPYVVCTGGEPLLQLDEPLIAALHQRGFEVGVETNGTLPAPDGIDWLCVSPKATAPVVIEQCDELKLVYPQTDAMPERFESIRARHFFLSPMASPVAPTEGPDRLKTANTRKATEYCLAHPQWRLTLQMHKIVGID

SEQ ID NO: 34710 - protein, 209 aa, unidentified
  source 1..209: note = Tamlana nanhaiensis
  REGION 1..209: note = tr|A0A0D7W1J5|A0A0D7W1J5_9FLAO 7-carboxy-7-deazaguanine synthase OS=Tamlana nanhaiensis; OX = 1382798 GN=queE PE=3 SV=1
MKNDVKELVNKGEMLPLMEEFYTIQGEGFYKGTAAYFIRIGGCDVGCHWCDVKESWNANLHPPTEIVKIVENAKKYSDTIVITGGEPLMWDMEPLTSQLKSEGLKTHIETSGAYKLTGVWDWICLSPKKMKLPTEEVSAKANELKVIVYNKDDFRFAEEQAAKVNSDCILYLQPEWSKRDKVVPLIVDYVMANPKWKVSLQTHKYLNIP

SEQ ID NO: 34711 - protein, 209 aa, unidentified
  source 1..209: note = Tamlana sedimentorum
  REGION 1..209: note = tr|A0A0D7W878|A0A0D7W878_9FLAO 7-carboxy-7-deazaguanine synthase OS=Tamlana sedimentorum; OX = 1435349 GN=queE PE=3 SV=1
MNEVIKQMVEKGEMLPLMEEFYTIQGEGFHKGTAAYFIRIGGCDVGCHWCDVKESWNAELHPPTKINKIVENAKKYSDTIVITGGEPLMWDMSPLTSKLKEEGLKTHIETSGAYKLTGVWDWICLSPKKMKLPTHEVSAKANELKVIIYNKDDFRFAEEQAAKVNGDCILYLQPEWSKRDKVVPLIVDYVMQNPKWKVSLQTHKYLNIP

SEQ ID NO: 34712 - protein, 209 aa, Tamlana sp.
  REGION 1..209: note = tr|A0A2I7SFB0|A0A2I7SFB0_9FLAO 7-carboxy-7-deazaguanine synthase OS=Tamlana sp. UJ94; OX = 2069432 GN=queE PE=3 SV=1
MKEEIKSQVDKGEMLPLMEEFYTIQGEGFHKGTAAYFIRVGGCDVGCHWCDVKESWNADLHPPTETAKIVENAAKYSDTIVVTGGEPLTWDMTPLTTQLKAKGLQVHIETSGAYKLTGVWDWICLSPKKMKLPTQEVYDNANELKVIVYNKDDFRFAEEQAAKVNKNCILYLQPEWSKRDKVVPEIVDYVMANPKWKVSLQTHKYLNIP

SEQ ID NO: 34713 - protein, 215 aa, Tamlana sp.
  REGION 1..215: note = tr|A0A5C4SPL2|A0A5C4SPL2_9FLAO 7-carboxy-7-deazaguanine synthase OS=Tamlana sp. CW2-9; OX = 2583814 GN=queE PE=3 SV=1
MYLCALMQKEIKKRVDKGEMLPLMEEFYTIQGEGYHKGTAAYFIRVGGCDVGCHWCDVKESWNADLHPPTDTMNIVENAKKYSDTIVVTGGEPLTWDMTFLTRELKARGMKVHIETSGAYKLTGEWDWICLSPKKIKLPTKEVYENANELKVIVYNKDDFRFAEEQAAQVNQDCILYLQPEWSKRDKVVPEIVDYVMANPKWKISLQTHKYLNIP

SEQ ID NO: 34714 - protein, 184 aa, Tannerella sp.
  REGION 1..184: note = tr|R5I134|R5I134_9BACT 7-carboxy-7-deazaguanine synthase OS=Tannerella sp. CAG:118 OX=1262978 GN=queE PE=3; SV = 1
MKKINEIFYSLQGEGYYTGTPAVFVRFSGCNLNCDFCDTEHLSGVFMSDNEILTEITQYPTRHIVLTGGEPTLQIDVSFMQMLKEDGWYIQIETNGTLTSGLSIADRWADWVTCSPKKNCIREKANELKVVYIGQDMSQYDSFVCDVRSLQPCSMLNTQEVIDYIKKHPQWRLSLQTHKMLDIR

SEQ ID NO: 34715 - protein, 184 aa, Tannerella sp.
  REGION 1..184: note = tr|A0A396MYT1|A0A396MYT1_9BACT 7-carboxy-7-deazaguanine synthase OS=Tannerella sp. AF04-6; OX = 2293248 GN=queE PE=3 SV=1
MKKINEIFYSIQGEGYYTGVPAIFIRFSGCNLNCEFCDTDHSLGKIMSDEEILDIIRKFPAKHVVLTGGEPSMQLDDRFLSLLKAQGFYLQIETNGTLTKGFDAVTRWCDWITCSPKKDCVRKQMDELKVVYLSQDMSVYKQYSCKHKMLQPCSMQNTKEVIEFIKKNPEWRLSLQTHKYLHIR

SEQ ID NO: 34716 - protein, 210 aa, Tanticharoenia sakaeratensis
  REGION 1..210: note = tr|A0A0D6MIQ0|A0A0D6MIQ0_9PROT 7-carboxy-7-deazaguanine synthase OS=Tanticharoenia sakaeratensis NBRC 103193 OX=1231623 GN=queE PE=3 SV=1
MAYMVKELFPTLQGEGAQSGRASVFCRFAGCNLWSGRETDREAAACTFCDTDFVGTNGPGGGRFADAATLARAIEAAWRGGTQARHVVFTGGEPLLQLDAALVDAMHAHGFTIAVETNGTIAAPPGIDWICVSPKPGYDLVQRSGDELKLVYPQAACPPERYADLAFHHFMLQPMDGPDQGKNTAAAVSYCLTHPRWRLSLQTHKLIGIP

SEQ ID NO: 34717 - protein, 210 aa, unidentified
  source 1..210: note = Tardiphaga robiniae
  REGION 1..210: note = tr|A0A161QPD5|A0A161QPD5_9BRAD 7-carboxy-7-deazaguanine synthase OS=Tardiphaga robiniae; OX = 943830 GN=queE PE=3 SV=1
MSYAVKEIFLTLQGEGAHAGRASVFCRFSGCNLWTGREQDRAEATCQFCDTDFVGMDGTLGGRYPNADKLADTIAAQWVGPSGNRYVVLTGGEPLLQVDAELIDALHARGFEIGVETNGTVAPPEGVDWICVSPKAGAELVVRSGHELKLVYPQAQAMPEKFEGLSFERFSLQPMDGPDAISNTADAVDYCLRHPQWRLSVQTHKTLGIR

SEQ ID NO: 34718 - protein, 210 aa, unidentified
  source 1..210: note = Tardiphaga sp.
  REGION 1..210: note = tr|A0A2U0U5Z0|A0A2U0U5Z0_9BRAD 7-carboxy-7-deazaguanine synthase OS=Tardiphaga sp. OV697; OX = 2135487 GN=queE PE=3 SV=1
MSYAVKEIFLTLQGEGAHAGRASVFCRFSGCNLWTGREQDRAEATCQFCDTDFVGMDGTLGGRYPTAEKLADTIAAQWVGPADNRYVVLTGGEPLLQVDAELIDALHARGFDIGVETNGTVLPPEGIDWICVSPKAGAELVVRSGHELKLVYPQATAMPEKFEGLTFERFSLQPMDGPNAISNTAGAVDYCLRHPQWRLSVQTHKTLGIR

SEQ ID NO: 34719 - protein, 210 aa, unidentified
  source 1..210: note = Tardiphaga sp.
  REGION 1..210: note = tr|A0A5A7WG30|A0A5A7WG30_9BRAD 7-carboxy-7-deazaguanine synthase OS=Tardiphaga sp. P9-11; OX = 2024614 GN=queE PE=3 SV=1
MSYAVKEIFLTLQGEGAHAGRASVFCRFSGCNLWTGREQDRAEATCQFCDTDFVGMDGTLGARYPTAEKLADTIAAQWVGPSDNRYVVLTGGEPLLQVDAELIDALHDRGFEIGVETNGTVAPPEGIDWICVSPKAGAELVIRRGHELKLVYPQAQAMPEKFEGLTFERFSLQPMDGPDAIRNTAHAVDYCLRNPQWRLSVQTHKTLGIR

SEQ ID NO: 34720 - protein, 217 aa, Tatlockia micdadei
  REGION 1..217: note = tr|A0A098GHQ3|A0A098GHQ3_TATMI 7-carboxy-7-deazaguanine synthase OS=Tatlockia micdadei; OX = 451 GN=queE PE=3 SV=1
MKQVSNQLRITEIFHSLQGESTTVGLPTVFIRLTGCPLRCQYCDTAYAFSGGELTQVSTILDKIESYQCKHVCVTGGEPLAQPGCIPLLQQLCDRGYNVSLETSGARDITPVDKRVMVVMDLKTPDSGESTKNLLSNLDHLKHTDQIKFVLCSRSDYDWACQMMKTYNLSERAQILFSPSWNELDPTTLADWIIKDKLPVRFQLQLHKILWNDAPGH

SEQ ID NO: 34721 - protein, 223 aa, Tatumella citrea
  REGION 1..223: note = tr|A0A1Y0LRB5|A0A1Y0LRB5_TATCI 7-carboxy-7-deazaguanine synthase OS=Tatumella citrea; OX = 53336 GN=queE PE=3 SV=1
MQYPINEMFQTLQGEGFFTGVPAIFIRLQGCPVGCSWCDTKHTWEKLPENAVPVGDILTKTVESDQWGNAEALTILKMISAQGWTARHVVITGGEPAIYDLRPLTEALEAFGYRCQIETSGTHPVQCSEDTFVTVSPKVNMRGGYDVLTPALFRADEIKHPVARQRDIDALDELLVKIQDDKSRVIALQPISCKQDATELCINTCIARNWRLSMQTHKYLNIA

SEQ ID NO: 34722 - protein, 223 aa, Tatumella morbirosei
  REGION 1..223: note = tr|A0A095VKE1|A0A095VKE1_9GAMM 7-carboxy-7-deazaguanine synthase OS=Tatumella morbirosei; OX = 642227 GN=queE PE=3 SV=1
MQYPINEMFQTLQGEGFFTGVPAIFIRLQGCPVGCAWCDTKHTWEKLPENAVPVGDILTKTVESDQWGNADALTILKMIGQQGWTARHVVITGGEPAIYDLRPLTEALEAFGYRCQIETSGTHPVQCSEDTFVTVSPKVNMRGGYDVLTPALLRADEIKHPVARQRDIDALDELLVNIQDEKSRVIALQPISCKQDATELCISTCIARNWRLSMQTHKYLNIA

SEQ ID NO: 34723 - protein, 228 aa, Tatumella ptyseos
  REGION 1..228: note = tr|A0A085JAL4|A0A085JAL4_9GAMM 7-carboxy-7-deazaguanine synthase OS=Tatumella ptyseos ATCC 33301 OX=1005995 GN=ygcF PE=3 SV=1
MIEQVMLYPINEMFQTLQGEGFYTGVPAIFIRLQGCPVGCSWCDTKHTWEKFADNEVPVGDILIKTVESEQWGNAEPLTLLKIISEQQWTARHVVITGGEPAIYDLRPLTTALEAFGYSCQIETSGTHPIQCSDNTWVTVSPKVNMRGGYDVLTPALIRADEIKHPVARERDIEALEQLLAQVQDDKSRIIALQPISCKKEATELCISACIARNWRLSMQTHKYLNIA

SEQ ID NO: 34724 - protein, 223 aa, Tatumella ptyseos
  REGION 1..223: note = tr|A0A2X5R250|A0A2X5R250_9GAMM 7-carboxy-7-deazaguanine synthase OS=Tatumella ptyseos; OX = 82987 GN=queE PE=3 SV=1
MLYPINEMFQTLQGEGFYTGVPAIFIRLQGCPVGCSWCDTKHTWEKFADNEVPVGDILIKTVESEQWGNAEPLTLLKIISEQQWTARHVVITGGEPAIYDLRPLTTALEAFGYSCQIETSGTHPIQCSDNTWVTVSPKVNMRGGYDVLTPALIRADEIKHPVARERDIEALEQLLAQVQDDKSRIIALQPISCKKEATELCISACIARNWRLSMQTHKYLNIA

SEQ ID NO: 34725 - protein, 223 aa, Tatumella sp.
  REGION 1..223: note = tr|A0A2G8BSI4|A0A2G8BSI4_9GAMM 7-carboxy-7-deazaguanine synthase OS=Tatumella sp. OPLPL6; OX = 1928657 GN=queE PE=3 SV=1
MLYPINEMFQTLQGEGFYTGAPAIFIRLQGCPVGCSWCDTKHTWEKYADQQQPLTNIVHKSAESEAWADASVEQLLAVIAEQGWTAKHIVITGGEPALYDLTPLTEQFEQQGFQCQIETSGTHPIHCSAATWVTVSPKVNMRGGYDVLNSALLRANEVKHPVGRQRDIDALDLLLSQVPPSTERIIALQPISCKKAATELCIATCIARNWRFSMQTHKYLNIA

SEQ ID NO: 34726 - protein, 224 aa, Taylorella asinigenitalis
  REGION 1..224: note = tr|G4QDN2|G4QDN2_TAYAM 7-carboxy-7-deazaguanine synthase OS=Taylorella asinigenitalis (strain MCE3); OX = 1008459 GN=queE PE=3 SV=1
MKTINIKSLSDASDEPQFRIVEIFKSLQGEGYNTGMPSVFVRLGRCNLSCEWCDTNYEEFEYKPLSRVLAAVGAFDVRNIILTGGEPSVHPRVEELVAAFKARGYFMCIESNGLARVPVGIDFIAISPKYCYKERYEQAVGFDVDELRIVVDSVAMLSHSIDDFMSWAEAMASKFPAKHRFLSPLELEGQMNILQTIETIGKLNAKGKQRWALSLQTHKLAGIE

SEQ ID NO: 34727 - protein, 189 aa, Taylorella asinigenitalis
  REGION 1..189: note = tr|I7IC98|I7IC98_9BURK 7-carboxy-7-deazaguanine synthase OS=Taylorella asinigenitalis 14/45 OX=1091495; GN = queE PE=3 SV=1
MPSVFVRLGRCNLSCEWCDTNYEEFEYKPLSRVLAAVGAFDVRNIILTGGEPSVHPRVEELVAAFKARGYFMCIESNGLARVPVGIDFIAISPKYCYKERYEQAVGFDVDELRIVVDSVAMLSHSIDDFMSWAEAMASKFPAKHRFLSPLELEGQMNILQTIETIGKLNAKGKQRWALSLQTHKLAGIE

SEQ ID NO: 34728 - protein, 187 aa, Taylorella equigenitalis
  REGION 1..187: note = tr|I7JQB8|I7JQB8_9BURK 7-carboxy-7-deazaguanine synthase OS=Taylorella equigenitalis 14/56 OX=1091497; GN = queE PE=3 SV=1
MPATFVRLGRCNLACGWCDTNYNSFGLKSLSEILQIVEDLGQSNIILTGGEPSVHPNVELLIEAFKSRGYYLCIETNGISDVPEGIDYIAISPKYCYKERYEKVGLRYADEIRIVVDFNETNREDFLNWLQDINEKFNSKKYYLSPLEHDGSMNIQQTIKIIGELNGLKIGPRWELSLQTHKLAGIE

SEQ ID NO: 34729 - protein, 208 aa, Telmatospirillum siberiense
  REGION 1..208: note = tr|A0A2N3PTJ4|A0A2N3PTJ4_9PROT 7-carboxy-7-deazaguanine synthase OS=Telmatospirillum siberiense OX=382514 GN=queE PE=3 SV=1
MTYSVKEIFYTLQGEGAHAGRPAVFCRFSGCNLWSGREEDRATATCRFCDTDFVGADAGRFTDAATLADAIADLWPNKTAGRPYVVCTGGEPLLQLDAALCDALHGRGFEIGVETNGTQDRPSGIDWLCVSPKAGAPLRLTSGDEMKLVYPQESAMPERFSGLAFTHFTLQPMDGPDQAANIQAAAHYCLEHPKWHLGLQTHKIVGLR

SEQ ID NO: 34730 - protein, 210 aa, unidentified
  source 1..210: note = Tenacibaculum caenipelagi
  REGION 1..210: note = tr|A0A4R6TJZ9|A0A4R6TJZ9_9FLAO 7-carboxy-7-deazaguanine synthase OS=Tenacibaculum caenipelagi OX=1325435 GN=queE PE=3 SV=1
MLIKEVQELINTGEMLPLMEEFYTIQGEGAHTGTAAYFIRIGGCDVGCHWCDVKESWDANLHPPTKTDLIVENAKKYAETVVITGGEPLMWSLDYITNKLQEEGIKTHIETSGAYNFSGVWDWFCLSPKKTKLPLERAYQEADELKMIIHNKNDFQFAEEQAAKVGKNCKLFLQPEWSKKEKMTPLIIDYVMENPKWKISLQTHKYLNIP

SEQ ID NO: 34731 - protein, 210 aa, Tenacibaculum dicentrarchi
  REGION 1..210: note = tr|A0A2H1XP33|A0A2H1XP33_9FLAO 7-carboxy-7-deazaguanine synthase OS=Tenacibaculum dicentrarchi OX=669041 GN=queE PE=3 SV=1
MLKKEVQELIDKGQMLPLMEEFYTIQGEGSHTGTAAYFIRIGGCDVGCHWCDVKESWDANLHPPTKTDIIVSNAKKLAKTVVITGGEPLMWSLDYITKQLQDQGMKTHIETSGAYAFSGVWDWFCLSPKKTKLPTKECYKEADELKMIIHNKNDFKFAEEQADKVGKKCQLFLQPEWSKKEAMTPLIIDYVMKNPKWRISLQTHKFLNIP

SEQ ID NO: 34732 - protein, 210 aa, Tenacibaculum dicentrarchi
  REGION 1..210: note = tr|A0A0U3KVR9|A0A0U3KVR9_9FLAO 7-carboxy-7-deazaguanine synthase OS=Tenacibaculum dicentrarchi OX=669041 GN=queE PE=3 SV=1
MLKKEVQELIDKGQMLPLMEEFYTIQGEGSHTGTAAYFIRIGGCDVGCHWCDVKESWDANLHPPTKTDIIVSNAKKLAKTVVITGGEPLMWSLDYITKQLQDHGMKTHIETSGAYAFSGVWDWFCLSPKKTKLPTKECYKEADELKMIIHNKNDFKFAEEQADKVGKKCQLFLQPEWSKKEEMTPLIIDYVMKNPKWRISLQTHKFLNIP

SEQ ID NO: 34733 - protein, 210 aa, Tenacibaculum discolor
  REGION 1..210: note = tr|A0A497Z2X7|A0A497Z2X7_9FLAO 7-carboxy-7-deazaguanine synthase OS=Tenacibaculum discolor OX=361581 GN=queE PE=3 SV=1
MLKKEVQELINTGEMLPLMEEFYTIQGEGAHTGTAAYFIRIGGCDVGCHWCDVKESWDANLHPPTKTDIIVENAKKYAETVVITGGEPLMWSLDYITQQLQEKGVKTHIETSGAYDFSGVWDWFCLSPKKTKLPLERAYQEADELKMIIHNKNDFQFAEEQAAKVGKKCKLFLQPEWSKKEKMTPQIIDYVMEHPQWKISLQTHKYLNIP

SEQ ID NO: 34734 - protein, 210 aa, unidentified; identical to SEQ ID NO: 34732
  source 1..210: note = Tenacibaculum finnmarkense
  REGION 1..210: note = tr|A0A2H1XZZ3|A0A2H1XZZ3_9FLAO 7-carboxy-7-deazaguanine synthase OS=Tenacibaculum finnmarkense OX=1680763 GN=queE PE=3 SV=1

SEQ ID NO: 34735 - protein, 210 aa, Tenacibaculum gallaicum
  REGION 1..210: note = tr|A0A3E0I135|A0A3E0I135_9FLAO 7-carboxy-7-deazaguanine synthase OS=Tenacibaculum gallaicum OX=561505 GN=queE PE=3 SV=1
MLKKEVQELINTGEMLPLMEEFYTIQGEGAHTGTAAYFIRIGGCDVGCHWCDVKESWDANLHPPTKTDIIVENAKKYAETVVITGGEPLMWSLDYITQQLQEKGIKTHIETSGAYDFSGVWDWFCLSPKKNKLPLERAYQEADELKMIIHNKNDFQFAEEQAAKVGKKCTLFLQPEWSKKEKMTPQIVDYVMEHPQWKISLQTHKYLNIP

SEQ ID NO: 34736 - protein, 209 aa, unidentified
  source 1..209: note = Tenacibaculum holothuriorum
  REGION 1..209: note = tr|A0A1Y2PGI8|A0A1Y2PGI8_9FLAO 7-carboxy-7-deazaguanine synthase OS=Tenacibaculum holothuriorum OX=1635173 GN=queE PE=3 SV=1
MDLKTQELINKGEMLPLMEEFYTIQGEGAHTGTAAYFIRIGGCDVGCHWCDVKESWDANLHPPTDTDIIVANAKKYAETVVITGGEPLMWSLDYITNLLQENGIKTHIETSGAYDFSGKWDWFCLSPKKTKLPLDRAYEEADELKMIIHNKNDFQFAEEQAAKVGKKCKLFLQPEWSKKEKMTPMIIDYVMENPKWRISLQTHKYLNIP

SEQ ID NO: 34737 - protein, 209 aa, Tenacibaculum jejuense
  REGION 1..209: note = tr|A0A238UAT4|A0A238UAT4_9FLAO 7-carboxy-7-deazaguanine synthase OS=Tenacibaculum jejuense OX=584609 GN=queE PE=3 SV=1
MDLKTQELIKKGEMLPLMEEFYTIQGEGAHTGTAAYFIRIGGCDVGCHWCDVKESWDANLHPPTLTDQIVTNAKKYAETVVVTGGEPLMWSLDYITKQLQAKGMKTHIETSGAYKFSGVWDWFCLSPKKTKLPLHKAYEEADELKMIIHNKNDFEFAEEQAAKVNNNCKLYLQPEWSKRDKMIPLIIDYVMNHPKWKISLQTHKYLNIP

SEQ ID NO: 34738 - protein, 209 aa, Tenacibaculum litoreum
  REGION 1..209: note = tr|A0A3R9ERV6|A0A3R9ERV6_9FLAO 7-carboxy-7-deazaguanine synthase OS=Tenacibaculum litoreum OX=321269 GN=queE PE=3 SV=1
MKKEVQELINTGEMLPLMEEFYTIQGEGAHTGTAAYFIRIGGCDVGCHWCDVKESWDANLHPPTKTDIIVENAKKYAETVVITGGEPLMWSLDYITGQLQEKGIKTHIETSGAYDFSGVWDWFCLSPKKTKLPLERAYQEADELKMIIHNKNDFQFAEEQAAKVGKKCKLFLQPEWSKKEKMTPQIIDYVMEHPQWKISLQTHKYLNIP

SEQ ID NO: 34739 - protein, 210 aa, Tenacibaculum lutimaris
  REGION 1..210: note = tr|A0A420E045|A0A420E045_9FLAO 7-carboxy-7-deazaguanine synthase OS=Tenacibaculum lutimaris OX=285258 GN=queE PE=3 SV=1
MLKKEVQELINTGEMLPLMEEFYTIQGEGAHTGTAAYFIRIGGCDVGCHWCDVKESWDANLHPPTKTDIIVENAKKYAETVVITGGEPLMWSLDYITQQLQEKGIKTHIETSGAYDFSGVWDWFCLSPKKTKLPLERAYQEADELKMIIHNKNDFQFAEEQAAKVGEKCKLFLQPEWSKKEKMTPQIIDYVMEHPQWKISLQTHKYLNIP

SEQ ID NO: 34740 - protein, 209 aa, Tenacibaculum maritimum
  REGION 1..209: note = tr|A0A2H1E8W6|A0A2H1E8W6_9FLAO 7-carboxy-7-deazaguanine synthase OS=Tenacibaculum maritimum NCIMB 2154 OX=1349785 GN=queE PE=3 SV=1
MDLKIKELIHKGVMLPLMEEFYTIQGEGAHTGTAAYFIRIGGCDVGCHWCDVKESWDANLHPPTETDIIVNNAKKYAKTVVITGGEPLMWNLDYITNQLQSKGMKTHIETSGAYAFSGQWDWFCLSPKKTKLPTTECYNRANELKIIIHNKNDFKFAEEQAKKVGDKCQLFLQPEWSKKEKMTPLIVNYVMEHPKWRVSLQTHKYLNIP

SEQ ID NO: 34741 - protein, 210 aa, Tenacibaculum mesophilum
  REGION 1..210: note = tr|A0A1M5F6B4|A0A1M5F6B4_9FLAO 7-carboxy-7-deazaguanine synthase OS=Tenacibaculum mesophilum OX=104268 GN=queE PE=3 SV=1
MLKKEVQELINTGEMLPLMEEFYTIQGEGAHTGTAAYFIRIGGCDVGCHWCDVKESWDANLHPPTKTDIIVENAKKYAETVVITGGEPLMWSLDYITGQLQEKGIKTHIETSGAYDFSGVWDWFCLSPKKTKLPLERAYQEADELKMIIHNKNDFQFAEEQAAKVGKKCKLFLQPEWSKKEKMTPQIIDYVMEHPQWKISLQTHKYLNIP

SEQ ID NO: 34742 - protein, 209 aa, Tenacibaculum skagerrakense
  REGION 1..209: note = tr|A0A4R2NIW2|A0A4R2NIW2_9FLAO 7-carboxy-7-deazaguanine synthase OS=Tenacibaculum skagerrakense OX=186571 GN=queE PE=3 SV=1
MDLKTQELIKQGKMLPLMEEFYTIQGEGAHTGTAAYFIRIGGCDVGCHWCDVKESWDANLHPPTQTDLIVANAKKYAETVVVTGGEPLMWSLDYITTQLQKQQIKTHIETSGAYKFSGVWDWFCLSPKKTKLPLERAYQEADELKMIIHNKHDFEFAEEQAAKVNDKCLLYLQPEWSKRDKMIPLIIDYVMNNPKWKISLQTHKYLNIP

SEQ ID NO: 34743 - protein, 210 aa, Tenacibaculum soleae
  REGION 1..210: note = tr|A0A1B9XXW1|A0A1B9XXW1_9FLAO 7-carboxy-7-deazaguanine synthase OS=Tenacibaculum soleae; OX = 447689 GN=queE PE=3 SV=1
MLKKEVQELINKGEMLPLMEEFYTIQGEGSHTGTAAYFIRIGGCDVGCHWCDVKESWDANLHPPTNTDVIITNAKKWAKTVVITGGEPLMWSLDYITNQLQDKGMKTHIETSGAYPFSGKWDWFCLSPKKTKLPTKECYKEADELKMIIHNKSDFEFAEEQAEKVGKKCQLFLQPEWSKKEKMTPLIVDYVMKNPKWRVSLQTHKYLNIP

SEQ ID NO: 34744 - protein, 210 aa, Tenacibaculum sp.
  REGION 1..210: note = tr|A0A2N1FBJ6|A0A2N1FBJ6_9FLAO 7-carboxy-7-deazaguanine synthase OS=Tenacibaculum sp. Bg11-29 OX=2058306 GN=queE PE=3 SV=1
MLKKEVQELIKKGEMLPLMEEFYTIQGEGSHTGTAAYFIRIGGCDVGCHWCDVKESWDANLHPPTKTDLIVENAKKYAKTVVITGGEPLMWSLDYITKELQDKGMKTHIETSGAYKFSGIWDWFCLSPKKTKLPTKECYKEADELKMIIHNKNDFQFAEEQAEKVGKKCQLFLQPEWSKKEQMTPLIVDYVMKHPKWRVSLQTHKFLNIP

SEQ ID NO: 34745 - protein, 209 aa, Tenacibaculum sp.
  REGION 1..209: note = tr|A0A4R1A1M6|A0A4R1A1M6_9FLAO 7-carboxy-7-deazaguanine synthase OS=Tenacibaculum sp. M341 OX=2530339 GN=queE PE=3 SV=1
MDLKTQELIKEGKMLPLMEEFYTIQGEGAYTGTAAYFIRIGGCDVGCHWCDVKESWNAKLHPPTHADIIVENAKKYAETVVITGGEPLMWSLDYITEQLKNQDIKTHIETSGAYAFSGTWDWFCLSPKKTKLPLDRAYEEADELKIIIHNKSDFKFAEEQAAKVNSKSLLFLQPEWSKREKMIPLIIDYVMNNPKWKVSLQTHKYLNIP

SEQ ID NO: 34746 - protein, 210 aa, unidentified
  source 1..210: note = Tenacibaculum todarodis
  REGION 1..210: note = tr|A0A1L3JGW6|A0A1L3JGW6_9FLAO 7-carboxy-7-deazaguanine synthase OS=Tenacibaculum todarodis OX=1850252 GN=queE PE=3 SV=1
MLKKEVQELINKGEMLPLMEEFYTIQGEGAHTGTAAYFIRIGGCDVGCHWCDVKESWNADLHPPTKTDLIVENTAKYAKTVVITGGEPLMWSLDYITNQLQEKGIKTHIETSGAYNFSGVWDWFCLSPKKGKLPLDRNYKEADELKMIIHNKDDFKFAEEQAEKVGEKCSLFLQPEWSKKEKMTPLIVDYVMENPKWKISLQTHKYLNIP

SEQ ID NO: 34747 - protein, 226 aa, unidentified
  source 1..226: note = Tenericutes bacterium
  REGION 1..226: note = tr|A0A420Z0W3|A0A420Z0W3_9BACT 7-carboxy-7-deazaguanine synthase OS=Tenericutes bacterium; OX = 2231116 GN=queE PE=3 SV=1
MEKGGSMKVYSIFKSIDGEVNWFGQGTQTTFLRLAGCNFSCPYCDSAYAQSNDDTSETSVPKVFDTILAKGLRKVTITGGEPMLQKEEVYNLTKLLTQNGFDITIETNGSIKPYAFGSYFVMDYKTPSSKMNDRMISEENFVSSLTFRDFVKFVINDEKDLNFAIWKTLRLINKGLMARVAFSPCIVPGEPEMRPEVILRELWKYKMYNVVINIQIHKVVSLREGK

SEQ ID NO: 34748 - protein, 215 aa, unidentified
  source 1..215: note = Tenericutes bacterium
  REGION 1..215: note = tr|A0A420Z1T0|A0A420Z1T0_9BACT 7-carboxy-7-deazaguanine synthase OS=Tenericutes bacterium; OX = 2231116 GN=queE PE=3 SV=1
MTTQINTQTPEPRIESDGRSLEVTEIFDTIQGEGPYAGIPATFVRLAGCNLACVWCDTKYTTRKTLSIDTILGECNKNLVVITGGEPMRQNIIPLIKSLEYENKTVQVETNGVYWDPELKNVDATLVISPKTSSIHPEHYNRPHWIKMIVGGVAFPSQPNNKGGEVEGQYYPDYVIPLDSGDEQVNKLNEQQAIAYTFEHDCIFQLQLHKKIGLK

SEQ ID NO: 34749 - protein, 248 aa, unidentified
  source 1..248: note = Tengunoibacter tsumagoiensis
  REGION 1..248: note = tr|A0A402AA69|A0A402AA69_9CHLR 7-carboxy-7-deazaguanine synthase OS=Tengunoibacter tsumagoiensis OX=2014871 GN=exsD PE=3 SV=1
MVVNVATRLLQISEIFGPTIQGEGLLIGKPTVFVRTGGCDYRCSWCDSLYAVLPEHKSEWRSQSAEEVFAEVQRLSNFQPILVTLSGGNPAIQPLSDLITLGHASGYTFAIETQGSVAQPWFAELDYLTLSPKPPSSRQVTRWDRLERCLEIASHGQNGRTVHTCLKVVVFDEEDYAYARDIAARYPDQPLYLQAGNHTPPHLAEKIDITGILERMDWLIQRTIEDQWYTVTILPQLHTLLWGNKRGV

SEQ ID NO: 34750 - protein, 221 aa, Tepidibacter formicigenes
  REGION 1..221: note = tr|A0A1M6NVQ8|A0A1M6NVQ8_9FIRM 7-carboxy-7-deazaguanine synthase OS=Tepidibacter formicigenes DSM 15518 OX=1123349 GN=queE PE=3 SV=1
MFKVVEKFISINGEGRLSGQLAVFIRFAGCNLDCSFCDTRWANEKDVDYELMTKEDIYKYIKFTKVKNITLTGGEPLLQERIMELLEYLSKDEYLLVEIETNGSIDLKKFSRIEKNRPKFTMDYKLMSSNMEDKMVIDNFKYLNKNDTVKFVVGTIDDLNKAKYLIDKYELTNKTNVYLSPVFGEIDMNEIVEFMKNNKMNEVTLQIQLHKVIWHPDKKGV

SEQ ID NO: 34751 - protein, 221 aa, Tepidibacter thalassicus
  REGION 1..221: note = tr|A0A1M5QN63|A0A1M5QN63_9FIRM 7-carboxy-7-deazaguanine synthase OS=Tepidibacter thalassicus DSM 15285 OX=1123350 GN=queE PE=3 SV=1
MFKVVEKFVSINGEGLRSGQLAVFIRFAGCNLDCSFCDTKWANQTHVDFELMTKEDIYEYIKSTGVKNVTLTGGEPLIQEGILELIELLSNDEYLSIEIETNGSIDLKVFSKMQNNRPIFTMDYKLISSDMEYKMLVDNFKYLNKNDVVKFVIGDIEDLNRAKYLIDKYKLTDKTNVYFSPVFGEADMNDIVEFMKKNNMNEITFQIQLHKVIWNPNKRGV

SEQ ID NO: 34752 - protein, 213 aa, unidentified
  source 1..213: note = Tepidicaulis marinus
  REGION 1..213: note = tr|A0A081B8Y5|A0A081B8Y5_9RHIZ 7-carboxy-7-deazaguanine synthase OS=Tepidicaulis marinus; OX = 1333998 GN=queE PE=3 SV=1
MYSVKEIFYTLQGEGANAGRPAVFCRFAGCNLWTGREEDRAKAVCTFCDTDFVGTDGQNGGKFADAEELAARIASFWPTDGARPQGAPLVVCTGGEPLLQLDEPLIEALHAKGFSIAVETNGTLEAPSGIDWICVSPKADAPLVQRSGQELKLVYPQEKARPEDFDALAFEHFFLQPMDGPGKKENTNAAVAYCMAHPKWRLSLQTHKFIGID

SEQ ID NO: 34753 - protein, 216 aa, unidentified
  source 1..216: note = Tepidiphilus thermophilus
  REGION 1..216: note = tr|A0A0K6INI7|A0A0K6INI7_9PROT 7-carboxy-7-deazaguanine synthase OS=Tepidiphilus thermophilus OX=876478 GN=queE PE=3 SV=1
MKESKRLRVSEIFASLQGESTTVGVPTVFVRLTGCPLRCRWCDTAYAFSGGERLTIDEILARVSDLGLPEVCVTGGEPLAQAACRELLATLADAGHRVSLETSGALSIAGLDPRVRCVMDLKAPGSGEADKNLWDNLDHLRPHDEVKFVLAGRADYDWAKDVLERHGLARRATVLFSPVTGELAPSTLADWIVADRLPVRFQLQLHKILWGDARGK

SEQ ID NO: 34754 - protein, 216 aa, unidentified
  source 1..216: note = Terasakiispira papahanaumokuakeensis
  REGION 1..216: note = tr|A0A1E2V7B6|A0A1E2V7B6_9GAMM 7-carboxy-7-deazaguanine synthase OS=Terasakiispira papahanaumokuakeensis OX=197479 GN=queE PE=3 SV=1
MYHIKEAFYSLQGEGQRAGRPAIFCRFTGCNLWSGREQDRATSPCTLCDTDFIGTDGQHGGRFGEAQDLADHLLALWPDSAEGIAAKPYVVFTGGEPLLQLDVPLIEAMQTRRFEVAVETNGTLPCPPQVDWICVSPKGHSPIVQRHGHELKLVYPQPGVNPADFITLDFEHFILQPLDGEPQGLTENYTQAALNYCLAHPRWTLGLQTHKLLNID

SEQ ID NO: 34755 - protein, 216 aa, Teredinibacter sp.
  REGION 1..216: note = tr|A0A509DX68|A0A509DX68_9GAMM 7-carboxy-7-deazaguanine synthase OS=Teredinibacter sp. ISS155 OX=2584524 GN=queE PE=3 SV=1
MSENSLRITEIFCSLQGEARSVGRPTTFVRLTGCPLRCGYCDSEYAFYGGQRQSLTEILQVVEDFGAKLVCVTGGEPLAQPNCLPLLTALCDAGFDVSIETSGAMDIGAVDNRVSVVMDLKTPGSGEMDRNLYSNIAKLKPTDQVKFVLCDEQDYEWARFKTDEHQLIDKVSDVLFSPCFGQVEPADLADWILRDKLNVRFQMQLHKLLWGDKPGV

SEQ ID NO: 34756 - protein, 214 aa, Teredinibacter turnerae
  REGION 1..214: note = tr|C5BQS6|C5BQS6_TERTT 7-carboxy-7-deazaguanine synthase OS=Teredinibacter turnerae (strain ATCC 39867 / T7901) OX=377629 GN=queE PE=3 SV=1
MTDLRITEIFHSLQGEARTVGVPTVFVRLTGCPLRCQYCDSEYAFFGGEKKSLDEIEALVIGFRCSHVCVTGGEPLAQPNCIPLLERLCDAGLAVSLETSGAMDISAVDTRVSIVLDLKTPDSGERDKNLLSNIPLLAAKDQIKFVICSRSDYEWARFMLDEQQLVGRVGDIFFSPSYTQLAPAELAQWILDDRLPVRFQMQLHKQLWGDKAGV

SEQ ID NO: 34757 - protein, 211 aa, Terrabacter aerolatus
  REGION 1..211: note = tr|A0A512D5D6|A0A512D5D6_9MICO 7-carboxy-7-deazaguanine synthase OS=Terrabacter aerolatus; OX = 422442 GN=queE PE=3 SV=1
MSYKIKEIFYTLQGEGTHAGRPAVFCRFTSCNLWTGREADRERAICKFCDTDFVGTDGEGGGKFHDAEALATAVASKWPVNGGGRPMVVCTGGEPLLQLDADAVDALHARGFYVAVETNGTVTPPPGIDWLCVSPKIGSELLVTKGHELKFVVPQGGVDPTTFEDLEFESYRVQPMDGPDVAANTELAVQFCLDHPLWQLSLQTHKQLGIP

SEQ ID NO: 34758 - protein, 243 aa, Terribacillus aidingensis
  REGION 1..243: note = tr|A0A285P6I9|A0A285P6I9_9BACI 7-carboxy-7-deazaguanine synthase OS=Terribacillus aidingensis OX=586416 GN=queE PE=3 SV=1
MASKFPVLEVFGPTVQGEGMVVGQKTMFVRTAGCDYSCSWCDSSFTWDGSAKEDIRQLTAEQIWDELQETGGDRFRHVTISGGNPALLKNLGEFTQFLKQKDIRIALETQGSRYQPWFLEIDDLTISPKPPSSLMKTDFHRLDEIIEILREAGRLSHVSLKVVIFDEADLRYATDVHKRYPDVDFYVQVGNDDTTTYDDAALKDALLAKYEWLIDQVSASSELNHVRVLPQLHTLVWGNKRGV

SEQ ID NO: 34759 - protein, 243 aa, Terribacillus goriensis
  REGION 1..243: note = tr|A0A075LM03|A0A075LM03_9BACI 7-carboxy-7-deazaguanine synthase OS=Terribacillus goriensis OX=386490 GN=queE PE=3 SV=1
MASKFPVLEVFGPTVQGEGMVVGQKTMFVRTAGCDYSCSWCDSAFTWDGSAKDDIRQLTAEQIWDQLEEVGGDRFRHVTISGGNPALLKNLGEFTELLKKKEVKVALETQGSRYQPWFLEIDDLTISPKPPSSLMKTDFHRLDEIINNLREAGRLMHVSLKVVIFDEEDLRYATNVHKRYPDVSFYVQVGNHDTATLDDAALKDALLSKYEWLIDQVSASNELNHVRVLPQLHTLVWGNKRGV

SEQ ID NO: 34760 - protein, 243 aa, Terribacillus halophilus
  REGION 1..243: note = tr|A0A1G6RU20|A0A1G6RU20_9BACI 7-carboxy-7-deazaguanine synthase OS=Terribacillus halophilus OX=361279 GN=queE PE=3 SV=1
MASKFPVLEVFGPTVQGEGMVVGQKTMFVRTAGCDYSCSWCDSAFTWDGSAKDDIRQLTAEEIWDRLEEVGGDRFRHVTISGGNPALLKNLGEFTELLKKKEVKIALETQGSRYQPWFLEIDDLTISPKPPSSLMKTDFHRLDEIINNLRDAGRLMHVSLKVVIFDEEDLRYATNVHKRYPDVSFYVQVGNHDTATLDDAALKDALLSKYEWLIDQVSASNELNHVRVLPQLHTLVWGNKRGV

SEQ ID NO: 34761 - protein, 243 aa, Terribacillus saccharophilus
  REGION 1..243: note = tr|A0A268HDR0|A0A268HDR0_9BACI 7-carboxy-7-deazaguanine synthase OS=Terribacillus saccharophilus OX=361277 GN=queE PE=3 SV=1
MASKFPVLEVFGPTVQGEGMVVGQKTMFVRTAGCDYSCSWCDSAFTWDGSAKDDIRQLTAEEIWNQLEEVGGDRFRHVTISGGNPALLKNLGEFTELLKKKEVKVALETQGSRYQPWFLEIDDLTISPKPPSSLMKTDFHRLDEIINNLREAGRLMHVSLKVVIFDEEDLRYATNVHKRYPDVSFYVQVGNHDTATLDDAALKDALLSKYEWLIDQVSASNELNHVRVLPQLHTLVWGNKRGV

SEQ ID NO: 34762 - protein, 243 aa, Terribacillus saccharophilus
  REGION 1..243: note = tr|A0A268A810|A0A268A810_9BACI 7-carboxy-7-deazaguanine synthase OS=Terribacillus saccharophilus OX=361277 GN=queE PE=3 SV=1
MASKFPVLEVFGPTVQGEGMVVGQKTMFVRTAGCDYSCSWCDSAFTWDGSAKDDIRQLTAEEIWNQLEEVGGDRFRHVTISGGNPALLKNLGEFTELLKKKEVKVALETQGSRYQPWFLEIDDITISPKPPSSLMKTDFHRLDEIINNLREAGRLMHVSLKVVIFDEEDLRYATNVHKRYPDVSFYVQVGNHDTATLDDAALKDALLSKYEWLIDQVSASNELNHVRVLPQLHTLVWGNKRGV

SEQ ID NO: 34763 - protein, 243 aa, Terribacillus sp.
  REGION 1..243: note = tr|A0A268BMJ4|A0A268BMJ4_9BACI 7-carboxy-7-deazaguanine synthase OS=Terribacillus sp. 7520-G OX=2025389 GN=queE PE=3 SV=1
MASKFPVLEVFGPTVQGEGMVVGQKTMFVRTAGCDYSCSWCDSAFTWDGSAKEDIRQLTAEEIWDRLVEVGGDRFGHVTISGGNPALLKNLGEFTQFLKQKGIRIALETQGSRYQPWFLEIDDLTISPKPPSSMMKTDFHRLDEIIDNLKNAGRLANVSLKVVIFDEEDLQYATNVHKRYPDVSFYVQVGNHDTATLDDAQLRDALLAKYEWLIDQVSLSSELNHVRVLPQLHTLVWGNKRGV

SEQ ID NO: 34764 - protein, 227 aa, unidentified
  source 1..227: note = Terriglobus albidus
  REGION 1..227: note = tr|A0A5B9E5R0|A0A5B9E5R0_9BACT 7-carboxy-7-deazaguanine synthase OS=Terriglobus albidus; OX = 1592106 GN=queE PE=3 SV=1
MHLIELYKSVQGESSFAGMPCIFVRLAGCNLRCSWCDSEYTFTGGKPYTLEQIEDELAALFPCTLVEFTGGEPMLQARELLPLMDRLLAKGFTLMMETSGERPLAAVPRAVHKIVDVKCPGAGSAANSFHLANLDALTGNDEVKFVISDRADYEFARDFIREHGLAARCGHILLSPAFQKTPSPLRTADNATLDPRLLVEWMLADGLPARLSLQIHKFIWEPQRKGV

SEQ ID NO: 34765 - protein, 233 aa, Terriglobus roseus
  REGION 1..233: note = tr|A0A1G7QDJ9|A0A1G7QDJ9_9BACT 7-carboxy-7-deazaguanine synthase OS=Terriglobus roseus; OX = 392734 GN=queE PE=3 SV=1
MRLIELYKSVQGESSFTGVPCIFVRFAGCNLRCAWCDSEYTFTGGKPFTEDEVVAQIEALACPLVEFTGGEPMLHAKDLLPLMQRLLNDEKTKYTLMMETSGERPLEEVPTAVHKIVDVKCPGSGTAFGSFRMSNLDTLTARDEVKFVLRDRRDYEFARDFIREHLASKIADGTLGHILLSPAFIQHPSPLRTADNMELDARDLVQWMLDDLLPARLSLQVHKFVWEPQKKGV

SEQ ID NO: 34766 - protein, 234 aa, Terriglobus roseus
  REGION 1..234: note = tr|I3ZCA0|I3ZCA0_TERRK 7-carboxy-7-deazaguanine synthase OS=Terriglobus roseus (strain DSM 18391 / NRRL B-41598 / KBS 63) OX=926566 GN=queE PE=3 SV=1
MRLIELYKSVQGESSFTGVPCIFVRFAGCNLRCAWCDSEYTFTGGKPFTEDEVVAQIEALAPCPLIEFTGGEPMLHERELLPLMDRLLADEATKYTLMMETSGERPLGDVPKAVHKIVDVKCPGSGSAFGSFRMSNLDTLTVRDEVKFVLRDRVDYEFARDFIREHLAGKIADGTLGHILLSPAFLKAPSILRTADNMELDGRVLVDWMLADGLPARLSLQVHKFVWEPQKKGV

SEQ ID NO: 34767 - protein, 229 aa, Terriglobus saanensis
  REGION 1..229: note = tr|E8UYW0|E8UYW0_TERSS 7-carboxy-7-deazaguanine synthase OS=Terriglobus saanensis (strain ATCC BAA-1853 / DSM 23119 / SP1PR4) OX=401053 GN=queE PE=3 SV=1
MHLIELYKSVQGESSFTGMPCIFVRSAGCNLRCAWCDSEYTFSGGTPFTEDEIVAQIEALAPCRLIEFTGGEPMLHAKELLPLMRRLLADPRGYTLMMETSGERPLQDVPTAVHKIVDVKCPGAGSAFGSFRMSNLDILTQRDEVKFVLRDRVDYEFARDFIREHSLNEKAGGILLSPAFIKVPSILRSADNMELDARHLVDWMLADGLDARLSLQVHKFIWEPQKKGV

SEQ ID NO: 34768 - protein, 218 aa, unidentified
  source 1..218: note = Terrimicrobium sacchariphilum
  REGION 1..218: note = tr|A0A146G856|A0A146G856_TERSA 7-carboxy-7-deazaguanine synthase OS=Terrimicrobium sacchariphilum OX=690879 GN=queE PE=3 SV=1
MDDNAKLTINEIYLSVQGESTWAGLPCVFIRLTGCDLRCSYCDTEYAFYEGKKRLVSEVLAEVSDMPCPMVEVTGGEPLLQKNVKPLMAALCDAGKTVLIETSGAHDISGIDPRVHRIVDLKTPSSGESGRNRYENIPHLTERDEVKFVLGSREDYEWAREQIGRYDLGSRVRAVLLSPVFGKIDPKDIVQWMLDDRLPARFQLQMHKFIWEPRARGV

SEQ ID NO: 34769 - protein, 203 aa, Terrimonas sp.
  REGION 1..203: note = tr|A0A2T7Q6J2|A0A2T7Q6J2_9BACT 7-carboxy-7-deazaguanine synthase OS=Terrimonas sp. NS-102; OX = 2171976 GN=queE PE=3 SV=1
MEAFYTLQGEGMHQGKAAYFIRLGGCDVGCVWCDVKESWNANAHPQKETYTIITEALKEIPGQCASPQNNNVIAVVTGGEPLMHHLDELTTSLKQAGFRTHIETSGSSPLSGTWDWICLSPKKFKAPLPEILSQADELKVVAYNKSDFKWAEQFEKQVSSKCKLYLQPEWSKAQVMTPLIIAYIKEHPQWQLSLQVHKYLNIP

SEQ ID NO: 34770 - protein, 210 aa, unidentified
  source 1..210: note = Testudinibacter aquarius
  REGION 1..210: note = tr|A0A4R3YB60|A0A4R3YB60_9PAST 7-carboxy-7-deazaguanine synthase OS=Testudinibacter aquarius OX=1524974 GN=queE PE=3 SV=1
MRSEIHYNIVEIFESLQGEGFNTGMPSIFIRFGKCNLACPWCDTDYNRFERWTLDQIMQKVRSYTAKNIIITGGEPTIQPKLNVLLDQLKAEGYFLAIETNGLKPVPPQIDYIATSPKRLYQHKYQQRGIPFAHEVRIVNDGDILPFCQQLEQQMQADHYYLSPREQQGEMNLLDTIRKLGELNQRPEALSGKRPKWQLSLQTHKLVGIE

SEQ ID NO: 34771 - protein, 242 aa, Thalassobacillus cyri
  REGION 1..242: note = tr|A0A1H4GY80|A0A1H4GY80_9BACI 7-carboxy-7-deazaguanine synthase OS=Thalassobacillus cyri; OX = 571932 GN=queE PE=3 SV=1
MPKLPVLEIFGPTIQGEGMVVGRKTMFIRTAGCDYSCSWCDSAFTWDGSAKEEITRMDADEILSELQKVGGENFDHVTISGGNPALFPYLDELIGKLKAKRIEVALETQGSRWQEWFLSIDDLTISPKPPSSEMKTDWDQLDGIINRLKENDRLNNTSLKVVIFNEQDLEYAASVHTRYQEVSFYLQVGNDDLEETDDSQIALKLLQKYEWLVDQVMASSALNRVRVLPQLHALLWGNKRGV

SEQ ID NO: 34772 - protein, 234 aa, unidentified
  source 1..234: note = Thalassobium sp.
  REGION 1..234: note = tr|A0A2G2AGV8|A0A2G2AGV8_9RHOB 7-carboxy-7-deazaguanine synthase OS=Thalassobium sp.; OX = 2030825 GN=queE PE=3 SV=1
  VARIANT 133: note = Xaa can be any naturally occurring amino acid
MATNFYRVKEAFYTLQGEGAQAGRAAVFCRFSKCNLWNGREESRSTAVCQFCDTDFIGTDGNNGGEYSKQALVELVSNLWPGKSKGANIQGKPYVVCTGGEPLLQLDAALINAFHDAGFEVAVETNGTLPLPXGIDWVCLSPKADAELAFIRCDELKLVYPQLLAMPERFEHIEADHYYLQPMADYQPVVLASDKLEGAKEGLSGSNTQKALSYCLKHPKWKLSLQTHKMIGIE

SEQ ID NO: 34773 - protein, 228 aa, unidentified
  source 1..228: note = Thalassobium sp.
  REGION 1..228: note = tr|A0A2G2PUM5|A0A2G2PUM5_9RHOB 7-carboxy-7-deazaguanine synthase OS=Thalassobium sp.; OX = 2030825 GN=queE PE=3 SV=1
MADRYRVKEVFYTLQGEGAQAGRPSVFCRFSKCNLWNGREDSRADAVCDFCDTDFIGTDGENGGIYSAAELVSLISSLWPDPAQGVPYVVCTGGEPLLQLDVPLTEALHEAGFEIGVETNGTLPAPASIDWLCLSPKADAEIVLTECDELKLVYPQSKAMPERFASFNARHFYLQPMADYQAMILATDKNEGAKEGLSTSNMRKTVEYCLAHPQWKLSLQTHKWLGID

SEQ ID NO: 34774 - protein, 237 aa, unidentified
  source 1..237: note = Thalassobius activus
  REGION 1..237: note = tr|A0A0P1IYS3|A0A0P1IYS3_9RHOB 7-carboxy-7-deazaguanine synthase OS=Thalassobius activus; OX = 1715691 GN=queE PE=3 SV=1
MLRITEIFGPTIQGEGAVIGAPTVFVRAGGCDYRCSWCDSLHAVDTEHRHTWAKMDSADVFAEVERLSGGTPLTVSLSGGNPAIQDFSDVIALGKSKGYDFALETQGSIAREWFSELAPLILSPKPPSSGHVVDWDKFDACVKAAGEAETVLKIVIFDDTDYAWAKDAAARYPQLPLYIQPGNHTPPSADEDDAAVDMDGIMDRYEWLIDKTLADKWYSPKILPQLHVLIWGNKRGV

SEQ ID NO: 34775 - protein, 193 aa, Thalassobius sp.
  REGION 1..193: note = tr|A0A2E9GD62|A0A2E9GD62_9RHOB 7-carboxy-7-deazaguanine synthase OS=Thalassobius sp.; OX = 1979401 GN=queE PE=3 SV=1
MEAFYTIQGEGAYSGHAAYFIRLAGCDVGCFWCDVKESWDEEKHPQIAVNDIVEEAKKHPARLAVITGGEPLMHDLSELTSKLKSAGFRTHIETSGAHPLSGQLDWITLSPKKFKKALPEIIPQANELKVVIYNKSDFKWAEQYADQVNDSCLLLLQPEWDKEKEMLPQIIEYVKEKPHWKVSLQTHKYMNIP

SEQ ID NO: 34776 - protein, 235 aa, Thalassococcus halodurans
  REGION 1..235: note = tr|A0A1H5TKP5|A0A1H5TKP5_9RHOB 7-carboxy-7-deazaguanine synthase OS=Thalassococcus halodurans OX=373675 GN=queE PE=3 SV=1
MTLRIVEIFGPTVQGEGALIGEATVFVRAGGCDYRCSWCDSLHAVDSQYRHTWLPMSDDAVMDEVRRLSGGRPLTVSISGGNPAIQDFAPLIALGKVEGYRFACETQGSVSQPWFADLDTLVLSPKPPSSGETVDWDKFDACVQMSKGCGQAVMKIVIFDDTDYVWAKEAAARYPEMPLYLQPGNLEVDPDLPVNLEDATDRLRQLIEKTTGDGWFAPRILPQLHVLVWGNKRGV

SEQ ID NO: 34777 - protein, 234 aa, Thalassolituus oleivorans
  REGION 1..234: note = tr|M5DSF3|M5DSF3_9GAMM 7-carboxy-7-deazaguanine synthase OS=Thalassolituus oleivorans MIL-1 OX=1298593; GN = queE PE=3 SV=1
MATNFYRVKEAFYTLQGEGAQAGRAAVFCRFSKCNLWNGREESRSTAVCQFCDTDFIGTDGNNGGEYSKQALVELVSNLWPGKSKGANIQGKPYVVCTGGEPLLQLDAALINAFHDAGFEVAVETNGTLPLPQGIDWVCLSPKADAELAFIRCDELKLVYPQLLAMPERFEHIEADHYYLQPMADYQPVVLASDKLEGAKEGLSGSNTQKALSYCLKHPKWKLSLQTHKMIGIE

SEQ ID NO: 34778 - protein, 234 aa, Thalassolituus oleivorans; identical to SEQ ID NO: 34777
  REGION 1..234: note = tr|W8FZV8|W8FZV8_9GAMM 7-carboxy-7-deazaguanine synthase OS=Thalassolituus oleivorans R6-15 OX=1208320; GN = queE PE=3 SV=1

SEQ ID NO: 34779 - protein, 228 aa, Thalassolituus sp.
  REGION 1..228: note = tr|A0A558NRK7|A0A558NRK7_9GAMM 7-carboxy-7-deazaguanine synthase OS=Thalassolituus sp. C2-1 OX=2597518 GN=queE PE=3 SV=1
MADRYRVKEVFYTLQGEGAQAGRPSVFCRFSKCNLWNGREDSRSTAVCDFCDTDFIGTDGENGGIYSAAELVSLISSLWPDPAQGVPYVVCTGGEPLLQLDEPLIEALHNAGFEIGVETNGTLPAPAGIDWLCLSPKADAGIVITACDELKLIYPQSKAMPERFASFNARHFYLQPMADYQAMILATDKNEGAKEGLSTSNMRKAVEYCLAHPQWKLSLQTHKWLGID

SEQ ID NO: 34780 - protein, 225 aa, Thalassomonas actiniarum
  REGION 1..225: note = tr|A0A0D8CTH1|A0A0D8CTH1_9GAMM 7-carboxy-7-deazaguanine synthase OS=Thalassomonas actiniarum OX=485447 GN=queE PE=3 SV=1
MKTTCYKINELFETIQGEGSFTGQPSIFIRLQGCPVGCSWCDTKHTWEIDPQLQVASDVMLGKTQESDYWSELSIEQILETITTEGYQAKHIVLTGGEPCMVDLKPLCEALEQAGFSCQVETSGTFEIRVSDNCWVTVSPKVNMRGGYEILTSAMSRANEIKHPVATEQHVDELKALLAEHQITTTPVYLQPISQKPRATELAIKTCIENNWRLSVQVHKYLGIE

SEQ ID NO: 34781 - protein, 223 aa, Thalassomonas sp.
  REGION 1..223: note = tr|A0A553FI68|A0A553FI68_9GAMM 7-carboxy-7-deazaguanine synthase OS=Thalassomonas sp. M1454 OX=2594477 GN=queE PE=3 SV=1
MSHYKINELFETIQGEGSFTGQPSIFLRLQGCPVGCSWCDTKHTWEINLDSEVSADVVLEKSAETDEWTNLSCDHILQIIKEKGFKAKHIVITGGEPCMVDLTPLCEMFESNGYSTQIETSGTFEIITTDKCWVTVSPKVNMRGGYEILSSAMQRANEIKHPIATEQHVDDLKQLLGQHKIVDTPVYLQPISQKERATQLAIDTCIENNWRLSIQVHKYIGIE

SEQ ID NO: 34782 - protein, 225 aa, Thalassomonas viridans
  REGION 1..225: note = tr|A0A0D8CRK5|A0A0D8CRK5_9GAMM 7-carboxy-7-deazaguanine synthase OS=Thalassomonas viridans OX=137584 GN=queE PE=3 SV=1
MKTTCYKINELFETIQGEGSFTGQPSIFIRLQGCPVGCSWCDTKHTWEIDPQLQVASDVMLGKTQESDYWSELSVAQILETIQAKGYQAKHIVLTGGEPCMVDLKPLCLALEQAGFSCQVETSGTFEILVSDNCWVTVSPKVNMRGGYKILNSAMLRANEIKHPVATEQHVDDLKALLAEHQIKTTPVYLQPISQKPRATELAIKTCIENNWRLSVQVHKYLGIE

SEQ ID NO: 34783 - protein, 243 aa, unidentified
  source 1..243: note = Thalassospira alkalitolerans
  REGION 1..243: note = tr|A0A1Y2L7J8|A0A1Y2L7J8_9PROT 7-carboxy-7-deazaguanine synthase OS=Thalassospira alkalitolerans OX=1293890 GN=queE PE=3 SV=1
MRISEIFGPTVQGEGSLIGVPTVFVRTGGCDFRCSWCDTLYAVDPAFRADWKPSSAGDVLSQVKTLSGGKPILVTLSGGNPAIQPLGGLIAMGHRDGFTFAIETQGSIARDWFADLDYLTISPKPPSSSTDFDPDALAACIDAARTNGVLNGPAITLKFPVRDADDLMFADYVRKLHPDIPVCLQPVNTTPAEPHPDGANGVDIAGLTARYRWLVDEVSARKWFDIRVLPQWHVHVWGNLRGM

SEQ ID NO: 34784 - protein, 260 aa, unidentified
  source 1..260: note = Thalassospira lohafexi
  REGION 1..260: note = tr|A0A2N3L6K9|A0A2N3L6K9_9PROT 7-carboxy-7-deazaguanine synthase OS=Thalassospira lohafexi OX=744227 GN=queE PE=3 SV=1
MTVQDPHLADMSQSRDKIRISEIFGPTVQGEGTLIGTPTVFVRTGGCDFRCAWCDTLYAVDPAFRADWKPMSPDAVLDEVKKLTGGAPILITLSGGNPAIQPLGRLIELGQKEGFSFAIETQGSIAKDWFADLNYLTISPKPPSASTSFDADALNACIDAANAKGMLSGPAITLKFPVRDEADLLFADHVRKLHTGIPVCVQPVNTTPAEPHPDGADGVDLDGLTARYRWLVDEVAKRKWFDVRVLPQWHVHVWGNLRGV

SEQ ID NO: 34785 - protein, 243 aa, Thalassospira lucentensis
  REGION 1..243: note = tr|A0A367VV80|A0A367VV80_9PROT 7-carboxy-7-deazaguanine synthase OS=Thalassospira lucentensis MCCC 1A00383 = DSM 14000 OX=1123365 GN=queE; PE = 3 SV=1
MRISEIFGPTVQGEGTLIGIPTVFVRTGGCDFRCSWCDTLYAVDPAFRADWKPMRAEAVLDEVKKLTGGAPILITLSGGNPAIQPLGRLIELGQKEGFSFALETQGSIAKDWFADLNYLTISPKPPSASTSFDADALNACIDAANAKGMLSGPAITLKFPVRDEADLLFADHVRKLHTGIPVCVQPVNTTPAAPHPDGADGVDLDALTARYRWLVDEVAKRKWFDVRVLPQWHVHVWGNLRGV

SEQ ID NO: 34786 - protein, 260 aa, Thalassospira lucentensis
  REGION 1..260: note = tr|A0A358HMQ5|A0A358HMQ5_9PROT 7-carboxy-7-deazaguanine synthase OS=Thalassospira lucentensis OX=168935 GN=queE PE=3 SV=1
MSAHDPHLADMSQSRDKIRISEIFGPTVQGEGTLIGMPTVFVRTGGCDFRCAWCDTLYAVDPAFRADWKPMRAEAVLDEVKKLTGGAPILITLSGGNPAIQPLGRLIELGQKEGFSFAIETQGSIAKDWFADLNYLTISPKPPSASTSFDADALNACIDAANAKGMLSGPAITLKFPVRDEADLLFADHVRRLHTGIPVCVQPVNTTPAEPHPDGADGVDLDALTARYRWLVDEVAKRKWFDVRVLPQWHVHVWGNLRGV

SEQ ID NO: 34787 - protein, 275 aa, unidentified
  source 1..275: note = Thalassospira marina
  REGION 1..275: note = tr|A0A2N3KRL7|A0A2N3KRL7_9PROT 7-carboxy-7-deazaguanine synthase OS=Thalassospira marina; OX = 2048283 GN=queE PE=3 SV=1
MTQDIATPTRAEHGLQSTDQSGDDSQLVRRQGKIRISEIFGPTVQGEGALLGMPTVFVRTGGCDFRCSWCDTLYAVDPAFRGDWLPMDAEAILDQVKKLSGGRPVLVTLSGGNPAIQPLESLIDKGQRQGFTFAIETQGSIARRWFAKLDHLTLSPKPPSSGTVFNADDLAACITAARSGSGMGPAITLKFPVADEADLNFANQVRAMHPDIPCYLQPVNATPAAPHPDGADGVDIDALTERYRWLVDRVAENGWFDVRVMPQWHVHVWGNLRGV

SEQ ID NO: 34788 - protein, 257 aa, unidentified
  source 1..257: note = Thalassospira mesophila
  REGION 1..257: note = tr|A0A1Y2L439|A0A1Y2L439_9PROT 7-carboxy-7-deazaguanine synthase OS=Thalassospira mesophila OX=1293891 GN=queE PE=3 SV=1
MRRQGKIRISEIFGPTVQGEGALLGMPTVFVRTGGCDFRCSWCDTLYAVDPTFRADWLPMDATAILDRVKQLSNNQPILITLSGGNPAIQPLAPLIQLGQQQGFTFAIETQGSIARKWFATLDHLTLSPKPPSSGTVFNANDLAACIAAARSPAATGTTPPFASSGPAITLKFPVADEDDLAFADQVRQLHRDIPCYLQPVNATPAAPHPDGANGVDIEALTEKYRWLVDQVSQKGWFDVRVVPQWHVHVWGNLRGV

SEQ ID NO: 34789 - protein, 261 aa, unidentified
  source 1..261: note = Thalassospira permensis
  REGION 1..261: note = tr|A0A074JGC8|A0A074JGC8_9PROT 7-carboxy-7-deazaguanine synthase OS=Thalassospira permensis NBRC 106175 OX=1353532 GN=queE PE=3 SV=1
MSGTEIEPKIESELAHDKIRISEIFGPTVQGEGALIGMPTVFVRSGGCDFRCSWCDTLYAVDPAFRADWKPNTAAEVMDRVRTLSGGKPILVTLSGGNPAIQPLGGLIALGKRDGFTFAIETQGSIARDWFADLDYLTLSPKPPSSSTDFDPDALAACITAAQANGVLDGPAITLKFPIRDDADLMFADHVRKRHPDIPVCLQPVNITPAEPHPDGLNGVDIDGLTERYRWLVDQVSERGWFNIRVLPQWHVHVWGNLRGV

SEQ ID NO: 34790 - protein, 253 aa, unidentified
  source 1..253: note = Thalassospira povalilytica
  REGION 1..253: note = tr|A0A2N3KE96|A0A2N3KE96_9PROT 7-carboxy-7-deazaguanine synthase OS=Thalassospira povalilytica OX=732237 GN=queE PE=3 SV=1
MSDPAEHRGKIRISEIFGPTVQGEGALIGVPTVFVRTGGCDFRCSWCDTLYAVDPAFRADWKPMTAAEVLEDVKKLSGGKPILITLSGGNPAIQPLGALIAMGKQEGFTFAIETQGSIAKDWFADLNYLTISPKPPSASTSFDADALTACIEAAQSRGMLDGPAITLKFPVRDEADLMFADYVRNLHIGIPVCVQPVNTTPAEPHPDGKDGVDIEDLTARYRWLVDEIAKRQWFDVRVLPQWHVHVWGNLRGV

SEQ ID NO: 34791 - protein, 250 aa, Thalassospira profundimaris
  REGION 1..250: note = tr|A0A367W9A0|A0A367W9A0_9PROT 7-carboxy-7-deazaguanine synthase OS=Thalassospira profundimaris OX=502049 GN=queE PE=3 SV=1
MSEHRGKIRISEIFGPTVQGEGALIGVPTVFVRTGGCDFRCSWCDTLYAVDPAFRADWKPMTATEVLDAVKKLSGGKPILITLSGGNPAIQPLGTLIAMGKAEGFSFAIETQGSIAKDWFADLNYLTISPKPPSSSTSFDPDALRACIDAAQANGMLDGPAITLKFPVRDEADLMFADYVRNIHIGIPVCLQPVNTTPAEPHPDGVNGVDIEGLTERYRWLVDEVARRQWFDVRVLPQWHVHVWGNLRGV

SEQ ID NO: 34792 - protein, 260 aa, Thalassospira profundimaris
  REGION 1..260: note = tr|K2LU11|K2LU11_9PROT 7-carboxy-7-deazaguanine synthase OS=Thalassospira profundimaris WP0211 OX=1177928; GN = queE PE=3 SV=1
MTVHDPNLADISEGRGKIRISEIFGPTVQGEGALIGMPTVFVRTGGCDFRCSWCDTLYAVDPAFRADWKPMSAAEVLDAVKKFSGGKPILITLSGGNPAIQPLGELIAMGKDEGFTFAIETQGSIAKDWFADLNFLTISPKPPSSSTSFDKDALQACIEAAQSDGILNGPAITLKFPVRDAADLMFADYVRNLHIGIPVCLQPVNTTPAEPHPDGADGVDIDGLTERYRWLVDEVAKRKWFDVRVLPQWHVHVWGNLRGV

SEQ ID NO: 34793 - protein, 260 aa, Thalassospira sp.
  REGION 1..260: note = tr|A0A419W1X5|A0A419W1X5_9PROT 7-carboxy-7-deazaguanine synthase OS=Thalassospira sp. DSM 26710 OX=2035225 GN=queE PE=3 SV=1
MTMHDPNLADISDARGKIRISEIFGPTVQGEGALIGMPTVFVRTGGCDFRCSWCDTLYAVDPAFRADWKPMSATEVLDAVKKLSGGKPILITLSGGNPAIQPLGDLIAMGKDEGFTFAIETQGSIAKNWFADLNFLTISPKPPSSSTSFDKDALAACIEAAQSDGILNGPAITLKFPVRDAADLMFADYVRNLHIGIPVCLQPVNTTPAEPHPDGADGVDIDGLTERYRWLVDEAAKRKWFDVRVLPQWHVHVWGNLRGV

SEQ ID NO: 34794 - protein, 261 aa, Thalassospira sp.
  REGION 1..261: note = tr|A0A2E2T3X2|A0A2E2T3X2_9PROT 7-carboxy-7-deazaguanine synthase OS=Thalassospira sp.; OX = 1912094 GN=queE PE=3 SV=1
MSGTELAPELGAELASDKIRISEIFGPTVQGEGALIGMPTVFVRTGGCDFRCSWCDTLYAVDPAFRADWKPHTAAEVMDRVRTLSGGKPILVTLSGGNPAIQPLGGLIALGKRNGFTFAIETQGSIARDWFADLDYLTLSPKPPSSSTDFDPRALAACITAARANGVLDGPAITLKFPIRDDADLMFADHVRRLHPDIPVCLQPVNTTPAEPHPDGANGVDIAGLTERYRWLVDQVTERGWFNIRVLPQWHVHVWGNLRGV

SEQ ID NO: 34795 - protein, 261 aa, Thalassospira xiamenensis
  REGION 1..261: note = tr|A0A285RNF9|A0A285RNF9_9PROT 7-carboxy-7-deazaguanine synthase OS=Thalassospira xiamenensis OX=220697 GN=queE PE=3 SV=1
MSGTELAPELGAKLASDKIRISEIFGPTVQGEGALIGMPTVFVRTGGCDFRCSWCDTLYAVDPAFRADWKPHTAAEVMDRVRTLSGGKPILVTLSGGNPAIQPLGGLIALGKRNGFTFAIETQGSIARDWFADLDYLTLSPKPPSSSTDFDPRALAASINAARANGVLDGPAITLKFPVRDDADLMFADHVRKLHPDIPVCLQPVNTTPAEPHPDGANGVDIAGLTERYRWLVDQVSERGWFNIRVLPQWHVHVWGNLRGV

SEQ ID NO: 34796 - protein, 255 aa, Thalassospira xiamenensis
  REGION 1..255: note = tr|A0A0B4XX56|A0A0B4XX56_9PROT 7-carboxy-7-deazaguanine synthase OS=Thalassospira xiamenensis M-5 = DSM 17429 OX=1123366 GN=queE PE=3 SV=1
MSGTELALAPDKIRISEIFGPTVQGEGALIGMPTVFVRTGGCDFRCSWCDTLYAVDPAFRADWKPNTAAEVMDRVRTLSGGKPILVTLSGGNPAIQPLGGLIALGKRNGFTFAIETQGSIARDWFADLDYLTLSPKPPSSSTDFDPDALAACITAAQANGVLDGPAITLKFPIRDDADLMFADHVRKRHPDIPVCLQPVNITPAEPHPDGLNGVDIDGLTERYRWLVDQVSERGWFNIRVLPQWHVHVWGNLRGV

SEQ ID NO: 34797 - protein, 261 aa, Thalassospira xianhensis
  REGION 1..261: note = tr|A0A367UCG0|A0A367UCG0_9PROT 7-carboxy-7-deazaguanine synthase OS=Thalassospira xianhensis MCCC 1A02616 OX=1177929 GN=queE PE=3 SV=1
MSGTELAPVLEPELVTDKIRISEIFGPTVQGEGALIGMPTVFVRTGGCDFRCSWCDTLYAVDPAFRADWKPHTAAEVMARVRALSGGKPILVTLSGGNPAIQPLGGLIALGKRDGFTFAIETQGSIARDWFADLDYLTLSPKPPSSSTDFNPDALAACIEAARANGVLDGPAITLKFPVRDDADLMFADHVRKQHPDIPVCLQPVNTTPAEPHPDGANGVDIDGLTERYRWLVDQVAKRGWFDMRVLPQWHVHVWGNLRGV

SEQ ID NO: 34798 - protein, 222 aa, unidentified
  source 1..222: note = Thalassotalea agarivorans
  REGION 1..222: note = tr|A0A1I0ENA2|A0A1I0ENA2_THASX 7-carboxy-7-deazaguanine synthase OS=Thalassotalea agarivorans OX=349064 GN=queE PE=3 SV=1
MNYKINEMFETIQGEGSFTGQPSIFIRLQGCPVGCSWCDTKHTWDVEQSDEIAIVDVLAKTQETSKWSASSEEQLLDTVKAQGWQAKHIVITGGEPCMYDLRPLCDTFENAGYSIQVETSGTFEVLVSDKCWVTVSPKINMKGGLEVLAQAIDRANEIKHPVATEHHVDELKALLNQFNANHKPVYLQPISQKQRATELAINTCIANNWRLSIQVHKYIGIE

SEQ ID NO: 34799 - protein, 222 aa, unidentified
  source 1..222: note = Thalassotalea euphylliae
  REGION 1..222: note = tr|A0A3E0U6W6|A0A3E0U6W6_9GAMM 7-carboxy-7-deazaguanine synthase OS=Thalassotalea euphylliae OX=1655234 GN=queE PE=3 SV=1
MLYKINEIFETLQGEGSFTGQPSIFIRLQGCPVGCSWCDTKHTWETKPDLAIPVNDLLAKSEESEHWSELSVDGIAKLFVEQNYQAKHVVITGGEPCMFDLTPLCAALESRGYSTQIETSGTFEVNTTEKCWVTVSPKVNMRGGYKVLSQAMQRANEIKHPVATEQHVDDLKALLAEHQVTDKQVYLQPISQKQRATELAINTCIENNWRLSVQVHKYIGIE

SEQ ID NO: 34800 - protein, 222 aa, unidentified
  source 1..222: note = Thalassotalea euphylliae
  REGION 1..222: note = tr|A0A3E0UKI2|A0A3E0UKI2_9GAMM 7-carboxy-7-deazaguanine synthase OS=Thalassotalea euphylliae OX=1655234 GN=queE PE=3 SV=1
MLYKINEIFETLQGEGSFTGQPSIFIRLQGCPVGCSWCDTKHTWETKPELAIPVNDLLAKSEESEHWSELSVDGIAELFVEQNYQAKHVVITGGEPCMFDLKPLCATLESRGYSTQIETSGTFEINTTEKCWVTVSPKVNMRGGYKVLSQAMQRANEIKHPVATEQHVDDLKALLAEHQVTDKQVYLQPISQKQRATELAINTCIENNWRLSVQVHKYIGIE

SEQ ID NO: 34801 - protein, 223 aa, unidentified
  source 1..223: note = Thalassotalea sp.
  REGION 1..223: note = tr|A0A516HGQ7|A0A516HGQ7_9GAMM 7-carboxy-7-deazaguanine synthase OS=Thalassotalea sp. PS06 OX=2594005 GN=queE PE=3 SV=1
MSQYKINEMFETIQGEGSFTGQPSIFIRLQGCPVGCSWCDTKHTWDIDPEREVSAPVMLAKSAETDEWAEFSIADLLQTIADNGWQAKHIVLTGGEPCMVDLEPLCRVLEESGYSTQVETSGTFEVLVSPKCWVTVSPKVNMRGGYKVLGSAMHRANEIKHPVATEQHVDDLKALLAEHGITDTPVYLQPISQKERATQLAIDTCIANNWRLSIQVHKYIGIE

SEQ ID NO: 34802 - protein, 224 aa, unidentified
  source 1..224: note = Thalassotalea sp.
  REGION 1..224: note = tr|A0A1Q6CJH4|A0A1Q6CJH4_9GAMM 7-carboxy-7-deazaguanine synthase OS=Thalassotalea sp. PP2-459 OX=1742724 GN=queE PE=3 SV=1
MSVTYKINELFETIQGEGSFTGQPSIFLRLQGCPVGCSWCDTKHTWDIDVVDQVDIDNMVNKPQESVSWANLTEQEILSVFKEQGFKARHIVITGGEPCMVDLTPLCHTLEEQGFSTQIETSGTFEIKTTDACWVTVSPKINMKGGYPVLKSALERANEIKHPVATETHVDDLKLLLKKNNITDKPVYLQPISQKKRATELAIQTCIENNWRLSIQVHKYIGIE

SEQ ID NO: 34803 - protein, 223 aa, Thauera aminoaromatica
  REGION 1..223: note = tr|A0A5C7SBH5|A0A5C7SBH5_9RHOO 7-carboxy-7-deazaguanine synthase OS=Thauera aminoaromatica OX=164330 GN=queE PE=3 SV=1
MSAVETAPATAVRLRITEIFASLQGESTRVGLPTVFVRLTGCPLRCTWCDTAYAFSGGETRTLDDILAEVASHGLRHVCVTGGEPLAQKGCLPLLAALCDAGHDVSLETSGALDIAGVDPRVSRIVDLKAPGSGELARNRWENLALLYAHDELKFVLADAADYAWAKQQIAEHRLAERCGVLLSPVAGALDPAELAGWIVRDRLPVRFQLQLHKILWNDARGR

SEQ ID NO: 34804 - protein, 223 aa, Thauera aminoaromatica; identical to SEQ ID NO: 34803
  REGION 1..223: note = tr|N6YZU5|N6YZU5_9RHOO 7-carboxy-7-deazaguanine synthase OS=Thauera aminoaromatica S2 OX=1234381 GN=queE; PE = 3 SV=1

SEQ ID NO: 34805 - protein, 223 aa, Thauera aromatica
  REGION 1..223: note = tr|A0A2R4BRC4|A0A2R4BRC4_THAAR 7-carboxy-7-deazaguanine synthase OS=Thauera aromatica K172 OX=44139 GN=queE PE=3 SV=1
MPPIETGADATVRLRITEIFASLQGESSRVGLPTVFVRLTGCPLRCTWCDTAYAFSGGSPRSVDDILAEVARHGLRHVCVTGGEPLAQKGCPALLTALCDAGHSVSLETSGALDIGGVDARVSRIMDLKAPGSGEAAKNRYANLALLNAHDELKIVLADAADYEWAKRQIAEHALAERCPVLLSPVAGSLAPAELAGWIVRDRLPVRFQLQLHKILWDDARGR

SEQ ID NO: 34806 - protein, 223 aa, Thauera chlorobenzoica
  REGION 1..223: note = tr|A0A1L6FC18|A0A1L6FC18_9RHOO 7-carboxy-7-deazaguanine synthase OS=Thauera chlorobenzoica OX=96773 GN=queE PE=3 SV=1
MPSMETGTAAAGRLRITEIFASIQGESTRVGLPTVFVRLTGCPLRCTWCDTAYAFSGGSTRSLDDILAEVARHGLRHVCVTGGEPLAQKACLELLAALCDAGHSVSLETSGALDIGGVDARVSRVMDLKAPGSGEAAKNRYANLALLSAHDELKIVLADAADYEWAKRQITEHALAERCPVLLSPVAGSLAPTELAAWIVRDRLPVRFQLQLHKILWDDARGR

SEQ ID NO: 34807 - protein, 217 aa, unidentified
  source 1..217: note = Thauera humireducens
  REGION 1..217: note = tr|A0A127K990|A0A127K990_9RHOO 7-carboxy-7-deazaguanine synthase OS=Thauera humireducens; OX = 1134435 GN=queE PE=3 SV=1
MTAPAVKLRITEIFASIQGESTWVGLPTVFVRLTGCPLRCSWCDTAYAFTGGENRSLDEVLAEVARHGLKHVCVTGGEPLSQKGCLPLLSALCDAGYAVSLETSGALDIGAADPRVSRIMDLKAPGSGEVERNLYDNIAQLKADDEVKIVLANADDYAWAKQQIATHRLAERCTVLLSPVAGELDPAQLAEWIVRDRLPVRFQLQLHKILWNDARGR

SEQ ID NO: 34808 - protein, 222 aa, Thauera linaloolentis
  REGION 1..222: note = tr|N6ZBU2|N6ZBU2_9RHOO 7-carboxy-7-deazaguanine synthase OS=Thauera linaloolentis 47Lol = DSM 12138; OX = 1123367 GN=queE PE=3 SV=1
MASGTSTAAAVKLRITEIFASVQGESTRVGLPTVFVRLTGCPLRCTWCDTAYAFTGGESRTLDEVMAEVARHGLEHVCVSGGEPLSQKACLALLSALCDAGYSVSLETSGALDVGAVDPRVSRVVDLKAPGSGEVERNLYANIALLTPHDEIKIVLAGEADYEWAKRQIAQHRIAERCTVLLSPVAGALDPARLAEWVVRDRLPVRFQLQLHKVLWNDARGR

SEQ ID NO: 34809 - protein, 223 aa, Thauera phenylacetica
  REGION 1..223: note = tr|N6ZKS5|N6ZKS5_9RHOO 7-carboxy-7-deazaguanine synthase OS=Thauera phenylacetica B4P OX=1234382 GN=queE; PE = 3 SV=1
MSAVETAPATAVRLRITEIFASLQGESTRVGLPTVFVRLTGCPLRCSWCDTAYAFSGGETRTLDNLLAEVAGHGLRHVCVTGGEPLAQKGCLALLAALCDAGHDVSLETSGALDIAGVDPRVSRIMDLKAPGSGELARNRLENLALLNARDELKFVLADAADYAWAKQQIAEYRLAECCTVLLSPVAGALDPAELAGWIVRDRLPVRFQLQLHKILWNDARGR

SEQ ID NO: 34810 - protein, 217 aa, unidentified
  source 1..217: note = Thauera propionica
  REGION 1..217: note = tr|A0A235F267|A0A235F267_9RHOO 7-carboxy-7-deazaguanine synthase OS=Thauera propionica; OX = 2019431 GN=queE PE=3 SV=1
MTAPAVKLRITEVFASIQGESTWVGLPTVFVRLTGCPLRCSWCDTAYAFTGGESRSLDEVLADVARHGLKHVCVTGGEPLSQKGCLPLLSALCDAGYAVSLETSGALDIGAVDPRVSRIMDLKAPGSGEVERNLYDNIAHLKADDELKIVIANTDDYAWAKQQIATHRLAERCTVLLSPVAGEIDPAQLAEWIVRDRLPVRFQLQLHKILWNDARGR

SEQ ID NO: 34811 - protein, 220 aa, Thauera sp.
  REGION 1..220: note = tr|A0A2T4IE08|A0A2T4IE08_9RHOO 7-carboxy-7-deazaguanine synthase OS=Thauera sp. D20; OX = 2136175 GN=queE PE=3 SV=1
MNAPDGRSPRLRLSEIFASIQGESTRVGLPTVFVRLTGCPLRCVWCDTEYAFQGGETRSIDDIVNAVATFGLRHVCVTGGEPLAQKDCPALLRALCDAGHAVSLETSGALDIGAVDARVSRIMDLKAPGSGEAARNRWENLALLRRGDEIKIVLAGEDDYRWACEQIAAHDLAARCEVLLSPVAGQLDPASLAEWIVRDRLPVRFQLQLHKVLWADARGK

SEQ ID NO: 34812 - protein, 232 aa, Thauera sp.
  REGION 1..232: note = tr|A0A290ZQV5|A0A290ZQV5_9RHOO 7-carboxy-7-deazaguanine synthase OS=Thauera sp. K11; OX = 2005884 GN=queE PE=3 SV=1
MHDTAAADAAAPLAGAAPPDARLRITEIFASLQGESTRVGLPTVFVRLTGCPLRCTWCDTAYAFHGGETRTLESVLAEVADHGLRHVCVTGGEPLAQKGCLSLLGALCDAGYSVSLETSGALAVGAVDPRVSRIMDLKAPGSGEAGKNLYANIPLLDANDEIKIVLADEADYAWAKQQIAEHDLARRCTVLLSPVAGALGPATLAGWIVRDRLPVRFQLQLHKILWSDARGR

SEQ ID NO: 34813 - protein, 225 aa, Thauera terpenica
  REGION 1..225: note = tr|T0AWJ1|T0AWJ1_9RHOO 7-carboxy-7-deazaguanine synthase OS=Thauera terpenica 58Eu OX=1348657 GN=queE PE=3; SV = 1
MVSIDTPVAETATVKLRITEIFASVQGESTRVGLPTVFVRLTGCPLRCSWCDTAYAFTGGESRTLDAVLQDIASHGLKHVCVTGGEPLSQKASLALMSALCDAGYSVSLETSGALDISAVDARVARIVDLKAPGSGELERNLPANIPLLRAQDEVKMVLADEADYDWAKAQILEHDLAARCTVLLSPVAGDLDPAQLAEWIVRDRLPVRFQLQLHKVLWNDARGR

SEQ ID NO: 34814 - protein, 212 aa, Thermanaeromonas toyohensis
  REGION 1..212: note = tr|A0A1W1VF86|A0A1W1VF86_9THEO 7-carboxy-7-deazaguanine synthase OS=Thermanaeromonas toyohensis ToBE OX=698762 GN=queE PE=3 SV=1
MLVKEIFLSIQGESASAGLPTIFIRFSGCNLRCRYCDTTYAYEGGENFTPEKLKARVSIYPYKRVCLTGGEPLLQPREEFQGLLDLLGEWEISIETNGSLPLERFTLKPGHRWVMDIKCPGSGEVEANRWENLKVLRPCDEVKFVLTSEEDYMWAREIIRRHSLEGRVGLLFSPAHGWLDPQNLAEWILRDGLDVRLQLQLHKLIFGPDTRR

SEQ ID NO: 34815 - protein, 224 aa, Thermoactinomyces sp.
  REGION 1..224: note = tr|A0A151YXW0|A0A151YXW0_9BACL 7-carboxy-7-deazaguanine synthase OS=Thermoactinomyces sp. AS95 OX=1811386 GN=queE PE=3 SV=1
MVEIFQTVEGEGTRAGFPTTFVRLFNCNLRCTWCDTPYSYAPSKPEYFARVSEIVKEVKKFPHRFICLTGGEPLMHGYKSERLIEALAEIDHIEDIHIETNGAIHLKPFAELRQNHEAARQKVRFILDYKLPGSGENKRMIDENFDCLNDDDEVKFVIAGEEDFKVAKEVVQTKMKKGIPLFSPVWESMEPAKLVDLILKHQLTQVKLSLQMHKMIWDPDLRGV

SEQ ID NO: 34816 - protein, 234 aa, Thermoactinomyces sp.
  REGION 1..234: note = tr|A0A1K1WAA2|A0A1K1WAA2_9BACL 7-carboxy-7-deazaguanine synthase OS=Thermoactinomyces sp. DSM 45891 OX=1761907 GN=queE PE=3 SV=1
MQATYESTKLPMVEVFQTVEGEGMRAGFPTVFVRVFNCNLRCTWCDTPYSYAPSTPEYLATISEILKQVEQYPAKNICLTGGEPLMHGQKSLLLLQALAELDHIVDIHIETNGAIDLTPFQEWRQTHPQGHKVRFVMDYKLPASGESEKMNLLNFDLLQANDEIKFVIGDEVDFHSALIIAKQHVKQGIPMFSPVWESMPPHRLVELMLEHQLTDIKLNLQIHKVIWDPNQRGV

SEQ ID NO: 34817 - protein, 238 aa, Thermoactinomyces vulgaris
  REGION 1..238: note = tr|A0A0N0Y8T6|A0A0N0Y8T6_THEVU 7-carboxy-7-deazaguanine synthase OS=Thermoactinomyces vulgaris OX=2026 GN=queE PE=3 SV=1
MPQAHQTIDEVKIPMVELFETVEGEGTQAGYPTTFVRVFNCNLRCTWCDTPYSYAPAKPEFFATIAEIVAEVKRYGHPRICLTGGEPLIHGEKSLMLIEALAQLEEVADIHIETNGAIHLAPFHAWRKANPEFGKKVRFVLDYKLPASGEQDKMIEENFTFLRDTDEVKFVIADDKDFDVAVEVVRQRMKRGVPLFSPVWESMPPARLVERMLAERLTHVKLNLQLHKVIWDPNARGV

SEQ ID NO: 34818 - protein, 224 aa, unidentified
  source 1..224: note = Thermoanaerobaculum aquaticum
  REGION 1..224: note = tr|A0A062XMY9|A0A062XMY9_9BACT 7-carboxy-7-deazaguanine synthase OS=Thermoanaerobaculum aquaticum OX=1312852 GN=queE PE=3 SV=1
MFVAEVFASLQGEGILAGTPSFFIRTSGCNLRCRWCDTPYTSWQPEGRRVSVGELVAAARDAGLRHVVITGGEPLLQRELPALCAALKAQGHHITVETAGTLAPEFACDLLSVSPKTANSDPEGVWRARHRRLRENLAPLRLLLQRHPNFQLKFVVQGEQDMPEIVALVERLGVSGDRVLLMPEGKTAQEVAQVAPEVARLCLRFGFRFSPRLHLELFGAGRGV

SEQ ID NO: 34819 - protein, 211 aa, Thermobifida halotolerans
  REGION 1..211: note = tr|A0A399FW27|A0A399FW27_9ACTN 7-carboxy-7-deazaguanine synthase OS=Thermobifida halotolerans OX=483545 GN=queE PE=3 SV=1
MGYLVKEIFYTLQGEGAHTGRPAVFCRMSRCNLWTGYEKDRHRAICQFCDTDFVGTDGVGGGRFATADELADAVAQAWPSVSTDHRFVVCTGGEPLLQLDEPAVEALHTRGFEVAVETNGTRRPPRGIDWLCVSPKIGAELVVTKGDELKLVFPQEGGDPTKFEQLDFRFFRLQPMDGPELEVNTQAAIEYCLKNPRWTLSLQTHKYLGIR

SEQ ID NO: 34820 - protein, 243 aa, Thermobrachium celere
  REGION 1..243: note = tr|R7RV27|R7RV27_9CLOT 7-carboxy-7-deazaguanine synthase OS=Thermobrachium celere DSM 8682 OX=941824; GN = queE PE=3 SV=1
MKREKFLDEKIPMVEIFNSISGEGITSGFLTTFVRVYGCNLRCSYCDTKYSYDGEYILMTPSDILKEVNKFNCRRIIVTGGEPLEEDKLKRYIPIYLTQNGYEVRIETNGSVKLYNEEEILEFTGSKERKNLFYTLDIKCPSSNMDKFNIFEENFKRLILGDEIKFVVGNVKDLDYSMQVVEKYKEYFKGVTLNFSSVFSKVEPSQIVDYLKAKNKFFMENNLDVRVNIQLHKIIWDKDKRGV

SEQ ID NO: 34821 - protein, 219 aa, Thermocrinis albus
  REGION 1..219: note = tr|D3SNZ0|D3SNZ0_THEAH 7-carboxy-7-deazaguanine synthase OS=Thermocrinis albus (strain DSM 14484 / JCM 11386 / HI 11/12) OX=638303 GN=queE PE=3 SV=1
MLRGEVRRKTALKVSEIYPSLQGEGLLVGTPSVFVRLQGCNLRCPWCDQPESLHPGGGALMSVEDVIGKVREYPHRHVVITGGEPFTQSFLTLLVEELLKEGFSVQIETNGTLWQKGMDTLASHIHITLSPKGVASWFVHPKVLLYARELKWVVDHLLTLDIILMPSFRRFLEEERVVLQPEGNKEIFLQKALSLQEELLSLGYRVRVLPQLHKLLGLK

SEQ ID NO: 34822 - protein, 221 aa, Thermocrinis minervae
  REGION 1..221: note = tr|A0A1M6SQF5|A0A1M6SQF5_9AQUI 7-carboxy-7-deazaguanine synthase OS=Thermocrinis minervae; OX = 381751 GN=queE PE=3 SV=1
MLRSEVRRKTNLKISEIYPTIQGEGLLVGVPSLFIRLQGCNLRCPWCDQPESLELSSTKATLMSLEDILQKVLTFPYGHVVITGGEPFLHKELSILVEELLLLGKSVQIETNGTLWNEAIEPFAYRIHITCSPKGVVNWYVNPNIIMYAKELKFVVDDAIDLDVLLRKEFLRFLEEGRVVLQPEGNKKVYLWKALELQENLLHMGYQVRIIPQVHKLIGLD

SEQ ID NO: 34823 - protein, 219 aa, Thermocrinis ruber
  REGION 1..219: note = tr|W0DF13|W0DF13_9AQUI 7-carboxy-7-deazaguanine synthase OS=Thermocrinis ruber OX=75906 GN=queE PE=3 SV=1
MLRGQVRETIALKVNEIYPSIQGEGLLIGLPAVFIRLQGCNLRCPWCDQPSALSFSEGGTSFEVEQILDKVSEYKIRHVVITGGEPFAQEGLATLVKELVQRGYSVQIETNGTLWQEGLEKLENLHITCSPKWSAHWFVHPKILQNAKELKFVVDDVLSIEVLLKAQFRNFLEEGKVVLQPEGNKAVFFKKALELQRDLSELGFSVRVLPQLHKLLGLP

SEQ ID NO: 34824 - protein, 219 aa, unidentified
  source 1..219: note = Thermodesulfatator autotrophicus
  REGION 1..219: note = tr|A0A177E8M9|A0A177E8M9_9BACT 7-carboxy-7-deazaguanine synthase OS=Thermodesulfatator autotrophicus OX=1795632 GN=queE PE=3 SV=1
MPAEEPLFDVAEIFVSLQGESTYMGLPTFFVRLSGCNLRCKWCDTIYAQKPQNNLLGLSEILIRWQKEGSLKFVQITGGEPLLQENVYLLMKAFLEKGATILLETNGSVSLGRVPKEVVKIMDFKTPSSGMTHHMCYENLAYLTRKDQVKFVIADKEDYNWAKEILARFYLPVYTQVLFSPVWQTVKPQELAEWIIKDRLQVRFQLQLHKVLWGEKRGV

SEQ ID NO: 34825 - protein, 219 aa, Thermodesulfatator indicus
  REGION 1..219: note = tr|F8ACX8|F8ACX8_THEID 7-carboxy-7-deazaguanine synthase OS=Thermodesulfatator indicus (strain DSM 15286 / JCM 11887 / CIR29812) OX=667014 GN=queE PE=3 SV=1
MPERDLILDIAEIFVSLQGESTYVGLPTFFVRLAGCNLQCQWCDTVYAQQPQKNFISLSEILDRWQRGGKLKVVQITGGEPLLQENVYPLMKAFLDKGATVLLETNGSMPLERVPREVVKIMDIKPPSSEMNAYMRFENLAYLDRKDQVKFVIADREDYKWAKNVMTKFYLPVYTQVLFSPVWQRLEPRELAEWIIKDKLPVRFQLQLHKILWGEKRGV

SEQ ID NO: 34826 - protein, 235 aa, Thermodesulfatator sp.
  REGION 1..235: note = tr|A0A432UI34|A0A432UI34_9BACT 7-carboxy-7-deazaguanine synthase OS=Thermodesulfatator sp. OX=1874629 GN=queE PE=3 SV=1
MHTVSRSAKPRQAASSTVNKLDNTLLSVCELFSSIQGEGVFSGYPCFFIRLSGCNLRCSYCDTSYAYGKGKPMSVAELVAAWRKSRIPLVLVTGGEPLMQEGVYELMKELVRCGAECLLETNGALSISRVPGQVVKIVDWKTPGSGFGSSFRMENLRFISKKDQIKFVIISKKDYEWVLNKMRSHFLEYCCQVIISPAFGMVDPEELASWMMQDLPEARLQIQLHKVLWGDRKGT

SEQ ID NO: 34827 - protein, 205 aa, Thermodesulfatator sp.
  REGION 1..205: note = tr|A0A432UGS1|A0A432UGS1_9BACT 7-carboxy-7-deazaguanine synthase OS=Thermodesulfatator sp. OX=1874629 GN=queE PE=3 SV=1
METLVTLQGEGPGSGRPVFLIRLAGCNLACRWCDTPQARSPEAGRARSLSDLLREFEASGLSEVLLTGGEPLLQEGTVVLLQALVSRGARVYLETNGSLPLGPVPQEVIKIMDLKTPSSGMSHQMLYENLRHLTFRDAVKFVIADEEDYLFAREKTFSLRLPSFTEVYFSPAWGEMSPERLARLILRDRLPVRFQVQLHKFLGLP

SEQ ID NO: 34828 - protein, 250 aa, unidentified
  source 1..250: note = Thermodesulfitimonas autotrophica
  REGION 1..250: note = tr|A0A3N5BUW5|A0A3N5BUW5_9THEO 7-carboxy-7-deazaguanine synthase OS=Thermodesulfitimonas autotrophica OX=1894989 GN=queE PE=3 SV=1
MQGPRGTVTGVSLREVFSSVQGEGPYVGCRHLFVRFAGCNLSCRYCDTPRDIPVSCKVQVQPGGHEVVKIPNPLTPEEVAVLAAGLDLSRHHAVSLTGGEPLLYPEFLQELIPLLRGARRGIYLETNGTLPAALEAVVELVDLVAMDVKLPSATGMAPFWEKHREFLRVAQGREVIVKAVVIRGTPLAEVITAAELAAAAGATLVLQPVTTNDRALRPSPAELLRLQAEALGIARDVRVIPQVHRFCGMW

SEQ ID NO: 34829 - protein, 215 aa, unidentified
  source 1..215: note = Thermodesulfobacteria bacterium
  REGION 1..215: note = tr|A0A496QKK3|A0A496QKK3_9BACT 7-carboxy-7-deazaguanine synthase OS=Thermodesulfobacteria bacterium OX=2202153 GN=queE PE=3 SV=1
MGGLRLSVSETFLSLQGEGAWVGWPCFFIRLAGCNLRCTYCDTRYAYNKGEKRDIPGLVEEWRKSRIGLVQVTGGEPLLQAETLTLLEALLNEGAKVLLETNGSLALGNVPMEVIKIVDRKTPGSGMEKFFLEANLGWLNQGDQLKFVITDREDYEWAREEVVRLCLSCYTEVLFSPAWGGPVPFQLAEWIIADRLSVRFQIQLHKILWGEKRGA

SEQ ID NO: 34830 - protein, 213 aa, unidentified
  source 1..213: note = Thermodesulfobacteriales bacterium
  REGION 1..213: note = tr|A0A524JTN6|A0A524JTN6_9BACT 7-carboxy-7-deazaguanine synthase; OS = Thermodesulfobacteriales bacterium OX=2528040 GN=queE; PE = 3 SV=1
MKISEIFFSLQGEGLEIGLPTVFIRLFACDLRCSWCDTMYAVEGRDFRDQSVSEVVNEVEKYECRRVCITGGEPLIQIKEVEELADCLLGNSYTILLETSGHKMPPPILWTENSTISMDCKCPSSSMQDRMDFDLFVKLRAKDQLKFVIQDEIDYQYARGILRKYNIKANIIFQPTHGSELGWITKKVIDDKLEFIRVLPQLHKIIWGDKKGV

SEQ ID NO: 34831 - protein, 212 aa, Thermodesulfobacterium commune
  REGION 1..212: note = tr|A0A3B8N6Y0|A0A3B8N6Y0_9BACT 7-carboxy-7-deazaguanine synthase; OS = Thermodesulfobacterium commune OX=1741 GN=queE PE=3 SV=1
MNLKISETFFSIQGEGPFAGYPTFFVRLFGCNLKCTWCDTLYARESDKYQSITLEEIIKLWENHYSSIPYIAITGGEPLLQPEVYPLIDRFLNKKCIVCIETNGSLSLKHLPPQVIKVMDLKTPSSGMADHNLYENIDFLSSKDVIKFVIQDRKDFEFALDKIKTFDLISKTQVYFSPVFEKLSPKELANWLLEVKLPIRLQIQLHKLLNLK

SEQ ID NO: 34832 - protein, 216 aa, Thermodesulfobacterium commune
  REGION 1..216: note = tr|A0A075WYZ2|A0A075WYZ2_9BACT 7-carboxy-7-deazaguanine synthase; OS = Thermodesulfobacterium commune DSM 2178 OX=289377; GN = queE PE=3 SV=1
MPPTLNLKISETFFSIQGEGPFAGYPTFFVRLFGCNLKCTWCDTLYARESDKYQSITLEEIIKLWENHYSSIPYIAITGGEPLLQPEVYPLIDRFLNKKCIVCIETNGSLSLKHLPPQVIKVMDLKTPSSGMADHNLYENIDFLSSKDVIKFVIQDRKDFEFALDKIKTFDLISKTQVYFSPVFEKLSPKELANWLLEVKLPIRLQIQLHKLLNLK

SEQ ID NO: 34833 - protein, 213 aa, unidentified
  source 1..213: note = Thermodesulfobacterium geofontis
  REGION 1..213: note = tr|A0A2N7Q9Q7|A0A2N7Q9Q7_9BACT 7-carboxy-7-deazaguanine synthase; OS = Thermodesulfobacterium geofontis OX=1295609 GN=queE; PE = 3 SV=1
MSKLKISEIFFSLQGEGPLIGYPTLFIRLFGCNLNCSWCDTPYAKGNNPHKEVEISEILSFWEKNFNSLPFITITGGEPLIQNPVYNLMNAFLEKNCIVVLETNGSISLNRVPKKVIKVMDVKTPSSNMDRHNLYENFKFLGKKDAVKFVIKDEKDFEFSLDIIDKFFLTYYTQVFLSPAHPFLDPKNLAEWILKTKKPLRFQIQLHKVVGIK

SEQ ID NO: 34834 - protein, 213 aa, unidentified
  source 1..213: note = Thermodesulfobacterium geofontis
  REGION 1..213: note = tr|A0A2N7PMH0|A0A2N7PMH0_9BACT 7-carboxy-7-deazaguanine synthase; OS = Thermodesulfobacterium geofontis OX=1295609 GN=queE; PE = 3 SV=1
MSKLKISEIFFSLQGEGPLIGYPTLFIRLFGCNLNCSWCDTPYAKGNNPHKEVEISEILSFWEKNFNSLPFITITGGEPLIQNPVYNLMNAFLEKNCIVVLETNGSISLNRVPKEVIKVMDVKTPSSNMDRHNLYENFKFLGKKDAVKFVIKDEKDFEFSLDIIDKFFLTYYTQVFLSPAHPFLDPKNLAEWILKTKKPLRFQIQLHKVVGIK

SEQ ID NO: 34835 - protein, 216 aa, unidentified
  source 1..216: note = Thermodesulfobium acidiphilum
  REGION 1..216: note = tr|A0A2R4W1X2|A0A2R4W1X2_9FIRM 7-carboxy-7-deazaguanine synthase OS=Thermodesulfobium acidiphilum OX=1794699 GN=queE PE=3 SV=1
MIAIHSIFESISGEVGFISQGSWCTIVRLQGCNLRCRWCDTKESQSIEAKYILSIDDVVARCKNSKVLLTGGEPLIQKETLELIDYLIEKKHFVQVETNGSISLPKGYLSDCGWVVDYKGPSSGMMDRMPSFEEFIDNWIEHRVIVKLVVDNSEEDLEFVFQVLSKMHGLFQFAISPLDAKGEKILDIVNFIRERDEKLLDELIFSIQMHKVVGLL

SEQ ID NO: 34836 - protein, 216 aa, Thermodesulfobium narugense
  REGION 1..216: note = tr|M1E8P6|M1E8P6_9FIRM 7-carboxy-7-deazaguanine synthase OS=Thermodesulfobium narugense DSM 14796; OX = 747365 GN=queE PE=3 SV=1
MIAIHSIFESISGEVGFMPQGSWCTIVRLQGCNLRCRWCDTKDSQSIEAKYMLSIDEVIDRCKNHKVLITGGEPLIQEETLKLIDRLIERHHFVQIETNGSIFLPSGYSSDCGWVVDYKGPSSGMMDRMPSFEEFIDNWIEHRVIVKLVVDNSKEDLEFVFQILSKMYGLFQFAISPLDAKGEKILDIVNFIRERDEKLLGDLIFSIQMHKVVGLL

SEQ ID NO: 34837 - protein, 217 aa, Thermodesulforhabdus norvegica
  REGION 1..217: note = tr|A0A1I4SMB5|A0A1I4SMB5_9DELT 7-carboxy-7-deazaguanine synthase OS=Thermodesulforhabdus norvegica OX=39841 GN=queE PE=3 SV=1
MGEPGIFVSEMFISIQGESSFAGWPCVFIRTAGCNLKCTYCDTLYARNGGRKVTLRNCLRFVEDSGLKLVEITGGEPLLQEELPRLVKMLIDREYTVLIETNGSLDISPIPEKAIRIMDIKCPSSGMMHKNDYENLKRLHPADEVKFVIGNFEDYLFASQWARRVLEESPVRVIHFSPVFGLLEPSTLAEWILKDKIPVRLNLQLHKYIWSPDAKGV

SEQ ID NO: 34838 - protein, 208 aa, Thermodesulfovibrio aggregans
  REGION 1..208: note = tr|A0A2J6WN20|A0A2J6WN20_9BACT 7-carboxy-7-deazaguanine synthase OS=Thermodesulfovibrio aggregans OX=86166 GN=queE PE=3 SV=1
MKVCEIFASIQGESSLAGIPMIFLRLTGCNLRCSYCDTKYAYYEGEELSIDKVLKKIHSFPFKYVEITGGEPLLEEEVYEIMNQLVQTHTVLLETNGSISIERVNPQVKIIMDIKTPGSGMSERNYIENLKFLKKIDELKFVLTDRADYEWAKDFLKNHEIKVKEILFSPAYGILNPAELAKWIISDGLSVRLNLQIHKYIFGNLRGV

SEQ ID NO: 34839 - protein, 208 aa, Thermodesulfovibrio aggregans
  REGION 1..208: note = tr|A0A0U9HWN4|A0A0U9HWN4_9BACT 7-carboxy-7-deazaguanine synthase OS=Thermodesulfovibrio aggregans OX=86166 GN=queE PE=3 SV=1
MKVCEIFSSIQGESSLAGIPMIFVRLTGCNLRCAYCDTKYAYYEGEELSIDEILKKVRSFPFKYVEITGGEPLLQDEVHELMNELVKTHRVLIETNGSISIEKVNPEVKVIMDIKTPGSGMSERNYIENLRFLKETDEVKFVLTSRTDYEWAKDFIKKHEIKTSEILFSPAYGILEPKELAKWIINDALPVRLNLQIHKYIFGDIRGA

SEQ ID NO: 34840 - protein, 204 aa, Thermodesulfovibrio sp.
  REGION 1..204: note = tr|A0A1C3FDR0|A0A1C3FDR0_9BACT 7-carboxy-7-deazaguanine synthase OS=Thermodesulfovibrio sp. N1 OX=1871110 GN=queE PE=3 SV=1
MKICEIFPSIQGESSLVGVPMVFIRFTGCNLRCTYCDTKYAYDNGTELSKDEILQIIHDLPFKFVEITGGEPLLQEDVYPLIDELVKNYYVLLETNGSVSIEKVNRKVKIIMDIKTPGSGMCDKNYLDNLTYLKEFDEIKFVLTDKFDYEWAKEFLKIYKLKTKEILFSPAFGMLNATELAQWIIKDGLSVRLNLQIHKYISIK

SEQ ID NO: 34841 - protein, 198 aa, Thermodesulfovibrio sp.
  REGION 1..198: note = tr|A0A1G3XZI2|A0A1G3XZI2_9BACT 7-carboxy-7-deazaguanine synthase (Fragment); OS = Thermodesulfovibrio sp. RBG_19FT_COMBO_42_12 OX=1802373; GN = A2Z47_04510 PE=3 SV=1
SSYAGLPCTFIRMKGCNLRCSYCDTTYAYHEGRELSEENIISEVRRAGISLVEITGGEPLLQKEVSQLIKRLLDEGYKVLIETNGSLSIREVDKRAVVILDIKTPGSGMCEKMDLSNIDNIKSTDEIKFVITGRNDYEWSKAIIYKYNLIDKCHLLLSPAYGVLPSEKLAKWMIEDRLQVRLNLQLHKYIFGADERGT

SEQ ID NO: 34842 - protein, 208 aa, Thermodesulfovibrio yellowstonii
  REGION 1..208: note = tr|B5YGD1|B5YGD1_THEYD 7-carboxy-7-deazaguanine synthase OS=Thermodesulfovibrio yellowstonii (strain ATCC 51303 / DSM 11347 / YP87) OX=289376 GN=queE PE=3 SV=1
MKVCEIFTSIQGESSLAGIPMVFVRLTGCNLRCSYCDTKYAYYEGEELSINKVLEKIHSFPFQYVEITGGEPLLQDETYKLINELVKSHNVLIETNGSIPIEKVNPEVKIIMDIKTPGSGMSEKNYIENLRFLKKIDEVKFVLTNRDDYEWAKNFIKNHEIKANEILFSPAYGILNPAELAKWLINDGISVRLNLQIHKYIFGNIRGV

SEQ ID NO: 34843 - protein, 238 aa, unidentified
  source 1..238: note = Thermoflavifilum aggregans
  REGION 1..238: note = tr|A0A2M9CWL5|A0A2M9CWL5_9BACT 7-carboxy-7-deazaguanine synthase OS=Thermoflavifilum aggregans OX=454188 GN=queE PE=3 SV=1
MPNGPDRGFHPNFAEMPTDTAHIKPLKVADTAWPLNAADPGRLPVMETFYSLQGEGFHQGRAAFFIRLAGCDVGCVWCDVKESWATEGYLQKTVQQLADEAAAHPARLAIVTGGEPTLYDLSALCDALHQRGFRVHLETSGAHEVIGDFDWICLSPKKFKPPLESVCRQAHELKVVIYHRSDFSWAESYARQVSDSCRLYLQPEWSRCAQMAPLIIAYIQQHPQWELSLQLHKYVHIP

SEQ ID NO: 34844 - protein, 238 aa, Thermoflavimicrobium dichotomicum
  REGION 1..238: note = tr|A0A1I3RQV5|A0A1I3RQV5_9BACL 7-carboxy-7-deazaguanine synthase OS=Thermoflavimicrobium dichotomicum OX=46223 GN=queE PE=3 SV=1
MTVQTENEQEMKLPMVEIFETVEGEGTRAGFPTTFVRVYNCNLRCTWCDTKYSYAPAKPAFWATIGEIVSQVKKYPHQHICLTGGEPLMHGRKSLALVKALAAIDYVKDIHIETNGAIHLEPFHRLRQTDPLLREKVRFIMDYKLPASGEHDKMIMDNFQYLNERDEIKFVIGNEEDFHTAVTVVKQHVQQGLPLFSPVWETMPPARLVSLMLKHQLSHVKLNVQLHKVIWDPEARGV

SEQ ID NO: 34845 - protein, 236 aa, Thermoflavimicrobium sp.
  REGION 1..236: note = tr|A0A364K139|A0A364K139_9BACL 7-carboxy-7-deazaguanine synthase OS=Thermoflavimicrobium sp. FBKL4.011 OX=2137476 GN=queE PE=3 SV=1
MNLLEYEEIKLPMVEIFETVEGEGTRAGFSTTFVRVYNCNLRCTWCDTPYSYAPAKPEFWATISEIVSEVKKYPHQHICLTGGEPLMHGKKSLALIQALAEIDYIQDIHIETNGAIHLGLFQELREMHPLVQNKVRFVLDHKLPASGEHDKMVLENFQYLTEQDEIKFVIGSEEDFDYAVDILNKWHQNGLPLFSPVWETMPPAKLVSLMLEHQLTHVKLNLQLHKVIWDPEARGV

SEQ ID NO: 34846 - protein, 220 aa, unidentified
  source 1..220: note = Thermoflexibacter ruber
  REGION 1..220: note = tr|A0A1I2C5J4|A0A1I2C5J4_9BACT 7-carboxy-7-deazaguanine synthase OS=Thermoflexibacter ruber OX=1003 GN=queE PE=3 SV=1
MLVLYLLKILDMEISENIPTKTSALPLMEAFYTIQGEGAWQGHAAYFIRLAGCDVGCVWCDVKESWDAKAHPVVSVEAIVQEARQYPCKIAVITGGEPLMYDLTYLTEELKRAGFRTHIETSGVYPLTGQWDWVCFSPKKFKKPHESIYFKADELKAIVYNPSDFSFAESFINSMKKNCKLLLQPEWSRQDKMMPLIVEYVKANPQWQVSLQTHKYMNIP

SEQ ID NO: 34847 - protein, 236 aa, unidentified
  source 1..236: note = Thermoflexus hugenholtzii
  REGION 1..236: note = tr|A0A2A9HEW3|A0A2A9HEW3_9CHLR 7-carboxy-7-deazaguanine synthase OS=Thermoflexus hugenholtzii OX=1495650 GN=queE PE=3 SV=1
MERLIVARMADGGPEIFASVQGEGVSMGVPSTFVRLAICNLRCRWCDTAYTWDWQRFDRAASTMEITEEEAAASVRALPPRNVVITGGEPLLQRRQLVPLVEALRAEGYRFEVETNGTVGPGPLAELIDQFNVSPKLAHSGNEGLRRIAPAVLREFAASGRAWFKFVVAEPGDLEEVRAVCAAGGIPPERVVLMPEGTSAAVLTARGRWLAEACAREGYRFSTRLHILLWGDRRGV

SEQ ID NO: 34848 - protein, 233 aa, unidentified
  source 1..233: note = Thermogemmatispora argillosa
  REGION 1..233: note = tr|A0A455SZK2|A0A455SZK2_9CHLR 7-carboxy-7-deazaguanine synthase OS=Thermogemmatispora argillosa OX=2045280 GN=queE PE=3 SV=1
MLVMEIYRSIQGEGSLMGVPTTFVRFFACNLRCSWCDTKYSWSVREGGSWETLSPETVAERVAALGARHVVLTGGEPTLQKELPQLATLLKAQGHHLTIETNATIFPALAVPLIDLWSLSPKLPSAGSGANYLRHPVIEQFLHSLAPTQQQWKFVVRDADDEQALRALLEAHPLFKERRLPIILQPEGDAALPDYPSALAWLAECLRDPFWDQYNVRVLPQLHVLIWGRRRLV

SEQ ID NO: 34849 - protein, 233 aa, unidentified
  source 1..233: note = Thermogemmatispora tikiterensis
  REGION 1..233: note = tr|A0A328VNQ5|A0A328VNQ5_9CHLR 7-carboxy-7-deazaguanine synthase OS=Thermogemmatispora tikiterensis OX=1825093 GN=queE PE=3 SV=1
MLVMEIYRSIQGEGSLMGVPTTFVRFFACNLRCSWCDTKYSWSVREGGSWETLSPATVAERVAALGARHVVLTGGEPTLQKELPQLATLLKAQGYHLTVETNATIFPALAVPLIDLWSLSPKLPSAGSGANYLRHPVIEQFLHSLEPEHQQWKFVVRDAHDEQALRSLLEAHPLFKERRLPIIVQPEGDAALSDYPAALAWLAERVRDPFWDQYNVRVLPQLHVLIWGRRRLV

SEQ ID NO: 34850 - protein, 248 aa, unidentified
  source 1..248: note = Thermogutta terrifontis
  REGION 1..248: note = tr|A0A286RM60|A0A286RM60_9PLAN 7-carboxy-7-deazaguanine synthase OS=Thermogutta terrifontis OX=1331910 GN=queE PE=3 SV=1
MAYHPKGHTTGAAEQRLAQPLRIAEIFQSRQGEGFLTGTESVFIRVSGCNLRCRFCDTPYASWEPEGPLLTVEEILRRVENFPARHIVLTGGEPMMFPQVVPLTRHLSDRGYHVTVETAGTVYRPVQCHLMSISPKLSNSTPDRELHPRWWKEHERRRHQPDVIRRLVREYPYQIKFVIDRPEDVDEVERYLRALAEIDRNRVLLMPQGTDQEALGEKMTWLEPICQQHGFRLCPRKHIEWYGPGRGK

SEQ ID NO: 34851 - protein, 242 aa, unidentified
  source 1..242: note = Thermolongibacillus altinsuensis
  REGION 1..242: note = tr|A0A4V2QA80|A0A4V2QA80_9BACI 7-carboxy-7-deazaguanine synthase OS=Thermolongibacillus altinsuensis OX=575256 GN=queE PE=3 SV=1
MMKKIPVIEIFGPTIQGEGMLIGQKTMFVRTAGCDYSCRWCDSAFTWDGSAKKEIRQLTALNIWRELQQLGGDRFNHVTISGGNPALIQALGELVSLLKQNGIRVALETQGSRWQEWFYEIDDLTISPKPPSSGMKTDFHVLDDIIFRLTKKEKQGVSLKVVVFDDADFSYAEMVHKRYPHIPFYLQVGNDAISSNDESMLRTALLDKLNWLVEKTVQSKDMNDVRVLPQLHTLLWGNKRGV

SEQ ID NO: 34852 - protein, 228 aa, Thermomonas haemolytica
  REGION 1..228: note = tr|A0A4R3NC67|A0A4R3NC67_9GAMM 7-carboxy-7-deazaguanine synthase OS=Thermomonas haemolytica OX=141949 GN=queE PE=3 SV=1
MNDVADAAAASAAGQAERLKLTEIFLSLQGEARDAGWPTVFVRLTGCPLRCQYCDTAYAFHGGQWWEIDAILQEVARHGARHVCVTGGEPLAQKRCLALLEKLCDAGYVVSLETSGALDIAGVDARVSRVLDIKTPGSGEVQRNLWANLALLTARDQVKFVICSRADYDWARAVVTEHRLPEVCDVLFSPSATQLAARELADWIVADRLPVRFQVQLHKLLWGEEPGK

SEQ ID NO: 34853 - protein, 228 aa, Thermomonas hydrothermalis
  REGION 1..228: note = tr|A0A1M4WBR8|A0A1M4WBR8_9GAMM 7-carboxy-7-deazaguanine synthase OS=Thermomonas hydrothermalis OX=213588 GN=queE PE=3 SV=1
MTAVADAAAASAAGQAERLKLTEIFLSLQGEARDVGWPTVFVRLTGCPLRCQYCDTAYAFHGGQWWTLEAILAEVARFDVRHVCVTGGEPLAQKRCLQLLTRLCDAGYHVSLETSGALDIAGVDPRVSRVVDIKTPGSGEEARNLWANLDLLTPHDQVKFVICSRADYDWACAVVARHRLHTRCEVLFSPSAGQLEPRTLADWIVADRLPVRFQIQLHKLLWNDAPGH

SEQ ID NO: 34854 - protein, 228 aa, Thermomonas sp.
  REGION 1..228: note = tr|A0A5B7ZPX3|A0A5B7ZPX3_9GAMM 7-carboxy-7-deazaguanine synthase OS=Thermomonas sp. SY21; OX = 2202149 GN=queE PE=3 SV=1
MNAVADAAAASAALQPDRLKLTEIFLSLQGEARDAGWPTVFVRLTGCPLRCQYCDTAYAFHGGQWWEIDAILAEVAAHGARHVCVTGGEPLAQKRCLQLLGKLCDAGYEVSLETSGAIDVAGVDARVSRVLDIKTPGSAEVERNLWDNLALLTPRDQVKFVICSRADFDWAKGIVAEHRLHEVCDVLFSPSATQVPARELADWIVAEKLPVRFQMQLHKFLWNDEPGR

SEQ ID NO: 34855 - protein, 285 aa, unidentified
  source 1..285: note = Thermophagus xiamenensis
  REGION 1..285: note = tr|A0A1I2F0Y2|A0A1I2F0Y2_9BACT 7-carboxy-7-deazaguanine synthase OS=Thermophagus xiamenensis OX=385682 GN=queE PE=3 SV=1
MSYLALANEGVFPITKDKDGQSQSELPATGFSFPGTIQGEGKLAGVPSLFIRLSGCNLRCIWSMPDGSFCRCDTPYASFAPERTFSMAIDDVVALVQQNLGAMKHVVITGGEPFLQHKALADLCLELKKIPQLHLSVETNGTLFSREVAQHIDLFSISPKLSNSNPTDEKITFYGLKPSGPLSYHAQRRKNLPVLQKFIDFSRENNKDFQLKFVIGNHNDYLEINKEYLSELKNWNADDILLMPLGATMEELKKTSKMVLEMAIQNGWRYAPRVHIELFGSIAGV

SEQ ID NO: 34856 - protein, 196 aa, Thermosinus carboxydivorans
  REGION 1..196: note = tr|A1HNF0|A1HNF0_9FIRM 7-carboxy-7-deazaguanine synthase OS=Thermosinus carboxydivorans Nor1 OX=401526; GN = queE PE=3 SV=1
MKAIKYPVVEIFTSIQGEGTHMGLPAAFIRLAGCNLRCRWCDTVHAFDPANATYLTPDEIATGLAPQLVVITGGEPTLHDLGPLVAALHARGKYVAIETNGTNPIPEKWGIDWVTASPKPNSGYLLACQADELKYVVDDEFTLDCVADDAVPPGRIFLQVESARPESAKKAFALVMENPERGLRLGIQLHKILGVD

SEQ ID NO: 34857 - protein, 250 aa, Thermosporothrix hazakensis
  REGION 1..250: note = tr|A0A326UDK6|A0A326UDK6_9CHLR 7-carboxy-7-deazaguanine synthase OS=Thermosporothrix hazakensis OX=644383 GN=queE PE=3 SV=1
MSVAVKRAEKTIAVSEIFGPTIQGEGALIGKPTVFVRTGGCDYRCQRCDTLYAVLPEYKGDWKPMSATEIFAEIQRLSKQTPILVTLSGGNPAMQPLEALIDLGHEAGYTFTIETQGSIAQPWFAKLDYLTLSPKAPGMGNPWPTNWERLDRCLQYARQGEKQPAICLKIVIFDEVDYAYAKELAARYPEVPLYLQVGNHTPPHVSNTIDTAGLLERLDWLIQRVTEDRWYTVTVLPQLHVLLWGNKRGV

SEQ ID NO: 34858 - protein, 250 aa, Thermosporothrix sp.
  REGION 1..250: note = tr|A0A455SF27|A0A455SF27_9CHLR 7-carboxy-7-deazaguanine synthase OS=Thermosporothrix sp. COM3 OX=2490863 GN=queE PE=3 SV=1
MSVAVKRAEKTIAVSEIFGPTIQGEGALIGKPTVFVRTGGCDYRCQRCDTLYAVLPEYKGDWKPMSATEIFAEIQRLSNQTPILVTLSGGNPAMQPLEALIDLGHEAGYTFTIETQGSIAQPWFAKLDYLTLSPKAPGMGNPWPTNWERLDRCLQYARQGEKQPAICLKIVIFDEVDYAYAKELAARYPEVPLYLQVGNHTPPHVSNTIDTAGLLERLDWLIQRVTEDRWYTVTVLPQLHVLLWGNKRGV

SEQ ID NO: 34859 - protein, 243 aa, Thermosulfidibacter takaii
  REGION 1..243: note = tr|A0A0S3QTI4|A0A0S3QTI4_THET7 7-carboxy-7-deazaguanine synthase OS=Thermosulfidibacter takaii (strain DSM 17441 / JCM 13301 / NBRC 103674 / ABI70S6) OX=1298851 GN=q ueE PE=3 SV=1
MKLKVSEIFCSLQGEGLRVGEPAVFLRLAGCNLRCSYCDTKYSWESGDLLEIEEVVQRVKDFDIRTLIVTGGEPTLQSTALIDLVNKLVPLKYSIMCETNGSVCDEVAIDFLNRLDMVAVSPKLKSFMGEGAADYNMESVLALLSQLSTNFFLKFVVTCWSDLDDILSFLKYCSNQQIENFEVFLQPNASLFSDVEKYVSFLRSSWERTIEFQKRLLEENLSFKVRMVPQLHRLVFWEVEEGI

SEQ ID NO: 34860 - protein, 218 aa, unidentified
  source 1..218: note = Thermosulfurimonas dismutans
  REGION 1..218: note = tr|A0A179D2Z6|A0A179D2Z6_9BACT 7-carboxy-7-deazaguanine synthase OS=Thermosulfurimonas dismutans OX=999894 GN=queE PE=3 SV=1
MPLISGDKIRLKISELFVSLQGEGPAAGYPAFFVRLSGCNLSCCWCDTPHARQPETGQEMEMPKIINRFRKSGVSQVLITGGEPLLQEGVYALMEELLALGAQVFLETNGSLSLKRVPSEVTKVMDLKPPSSGMSKYMLYENLRYLSHRDQIKFVIADEEDYRWAKEKVLGLGLNYFTEVSFSPAWGLMSPEKLAKMILRDRLPVRLQLQLHKILKLP

SEQ ID NO: 34861 - protein, 301 aa, unidentified
  source 1..301: note = Thermosynechococcus elongatus
  REGION 1..301: note = tr|A0A3B7MNY4|A0A3B7MNY4_9CYAN 7-carboxy-7-deazaguanine synthase OS=Thermosynechococcus elongatus PKUAC-SCTE542 OX=2016101 GN=queE PE=3 SV=1
MGRHSTYLLNTLTIFKVLSKRMPDCDQACTSPVISVKEQQTKDHFSLAQITLPLVELFSAIQGEGANVGCRQIFIRLAGCDLRCTYCDSAHTWLVPAHALIEEQAGDRHFQTVANPVTAAHILKAVQQLNTPPIHDSISLTGGEPLLHAATLALFLPLLKAHSSLPLYLETGGHHPEALEQILPYLDSVGMDIKLPSVSGECHWSAHEAFLRLCDRAPVEVFCKVIISQTTDPTDLHRLSDLVASVNPDIPVFLQPVTPVGTGRCTPPPTPAQVLAWQGQLKARLTHVRVIPQTHKFLGQR

SEQ ID NO: 34862 - protein, 301 aa, unidentified
  source 1..301: note = Thermosynechococcus elongatus
  REGION 1..301: note = tr|Q8DKG4|Q8DKG4_THEEB 7-carboxy-7-deazaguanine synthase OS=Thermosynechococcus elongatus (strain BP-1); OX = 197221 GN=queE PE=3 SV=1
MGRHSIDLLNTLTIFKVLSGRGLHCDQACLPPVISAKEYQTKDHSSLGAIALPLVEIFSAIQGEGANVGCRQIFIRLAGCDLRCTYCDSAHTWFVPSHALIEKQTGDRHFQTVPNPVSAAHILEAVQRLNTPPIHDSISLTGGEPLLHAATLARFLPLLKAHSSLPLYLETGGHHPEALQLILPYLDSVGMDIKLPSVSGECHWSAHGVFLRLCDRAPVEVFCKVIVSRTTDPADLDRLSALVASVNPHIPIFLQPVTPVGTGRCTPPPTPDQVLKWQGQLKTRLTHVRVVPQTHKFLGQR

SEQ ID NO: 34863 - protein, 301 aa, unidentified
  source 1..301: note = Thermosynechococcus sp.
  REGION 1..301: note = tr|A0A5C2M6G3|A0A5C2M6G3_9CYAN 7-carboxy-7-deazaguanine synthase OS=Thermosynechococcus sp. CL-1 OX=2583530 GN=queE PE=3 SV=1
MGRHSTYLLNTLTIFKVLSERTPDCDQACTSPVISVKEQQTNDQFSLAPITLPLVEMFSAIQGEGANVGCRQIFIRLAGCDLRCTYCDSAHTWFVPAHALIEAQAGDRHFQTVPNPVTAAHILEAVQQLNTPPIHDSISLTGGEPLLHAATLAPFLPLLKAHSSLPLYLETGGHHPEALEQILPYLDSVGMDIKLPSVSGECHWSAHEAFLRLCDRAPVEVFCKVIISQTTDPADLDCLSALVASVNPHIPVFLQPVTPVGTGRCTPPPTPEQLLRWQAQLKAQLTQVRVVPQTHKYLGQR

SEQ ID NO: 34864 - protein, 269 aa, unidentified
  source 1..269: note = Thermosynechococcus sp.
  REGION 1..269: note = tr|V5V7A8|V5V7A8_9CYAN 7-carboxy-7-deazaguanine synthase OS=Thermosynechococcus sp. NK55a OX=1394889; GN = queE PE=3 SV=1
MISVKEQQIKDYSSLAQIALPLVEIFSAIQGEGANVGCRQIFIRLAGCDLRCTYCDSAHTWFVPSHALIEEQSGDRHFQAIPNPVPAAHILEAVQQLNTPPIHDSISLTGGEPLLHAATLAPFLPLLKAHSSLPLYLETGGHHPEALQLILPAIDSVGMDIKLPSVSGECHWSAHEVFLRLCDRASVEVFCKVIISRTTDPADLDRLSTLVASVNPHIPVFLQPVTPVGTGRCTPPPTPEQVLKWQGQLKARLTHVRVIPQTHKFLGQR

SEQ ID NO: 34865 - protein, 243 aa, Thermosyntropha lipolytica
  REGION 1..243: note = tr|A0A1M5PD70|A0A1M5PD70_9FIRM 7-carboxy-7-deazaguanine synthase OS=Thermosyntropha lipolytica DSM 11003 OX=1123382 GN=queE PE=3 SV=1
MKAYLIEIMESIQGEGLTAGMRQIFLRFGGCNLRCSYCDTGASLATPEEGFFYPQAGNSRSKEAFKNPLDTLSVIELVRRFSSSWISFTGGEPLLWSDFVRELGLKLKPAGYRFLLETNGTLVEELDKCLPLVDLISMDFKLPSATGKDNWDNHYFFLREAVTKPCYVKIVANQDTREDEIYQAFDIIGKIDRKIPVYLQPVTKEGRPDLKLLPFLLRMQEKGLNRLEDVRIMPQLHVFLGLM

SEQ ID NO: 34866 - protein, 195 aa, Thermotalea metallivorans
  REGION 1..195: note = tr|A0A140LAA7|A0A140LAA7_9CLOT 7-carboxy-7-deazaguanine synthase OS=Thermotalea metallivorans OX=520762 GN=queE PE=3 SV=1
MMYPVVEIFDSIQGEGSFMGCPVTFIRLAGCNLHCKWCDTNHTLKENMLVDDILKRIRYSKVVITGGEPTIHHLEPLIKALRLKKGAFVMLETNGTNSTRNIRDFVDWIVCSPKPENHWKINPLCWFDELKYVVDGHFHPDLHIEDEIKNSYQNKIWLQPESSKMHERFAEAYEMAMKYPYLRVGLQFHKILGVQ

SEQ ID NO: 34867 - protein, 332 aa, unidentified
  source 1..332: note = Thermotogae bacterium
  REGION 1..332: note = tr|A0A1V6GZ07|A0A1V6GZ07_9BACT 7-carboxy-7-deazaguanine synthase OS=Thermotogae bacterium ADurb.Bin062 OX=1852923 GN=queE PE=4 SV=1
MFEVREALFYEEIENGSVRCLLCPRHCVIDKGQVGFCRTRKNVDGVLYTLIYGRLSSIATDPIEKKPLYHYHPGTKILSVGTWGCNMSCPWCQNHEISQGTPQTQKVDPERLVHIALDRNSPGIAYTYNEPMIWFEFVLDTSRMASADGLYNVLVTNGYVSADPFKLLLQTVQAMNIDLKGFDQRFYQKRCSADLEVVKRNIQLAYEEGVHVELTTLLIPDENDSVEKINEQCQWIASIDPAIPLHLSLYFPAYRFNKPPTDLNRAIELWKTAKKTLQYVYLGNQLESEYQRTLCPYCSNVLIERSGYQIQIVGLGEGRRCQQCHRQIPIVL

SEQ ID NO: 34868 - protein, 219 aa, Thermovibrio ammonificans
  REGION 1..219: note = tr|E8T5R3|E8T5R3_THEA1 7-carboxy-7-deazaguanine synthase OS=Thermovibrio ammonificans (strain DSM 15698 / JCM 12110 / HB-1) OX=648996 GN=queE PE=3 SV=1
MITICETFVSVQGEGLTVGTPAFFIRTGKCSVGCRFCDTKYSWSSRERKSVEELVAEAERAGFQTVIVTGGEPLEEEELPHLLTALKRAKPVKQVIVETCGHTFRDDLPRNVRLVLSPKPPSMGVPFPFESVKAFLKHYREVELKFTLFNGEDLKRIKEFIEESEGLLPSPVVFQPLETPLEDYGKTCKRVAQMLLSDGELRKLPFRVIPQVHKLIGLK

SEQ ID NO: 34869 - protein, 219 aa, Thermovibrio guaymasensis
  REGION 1..219: note = tr|A0A420W885|A0A420W885_9BACT 7-carboxy-7-deazaguanine synthase OS=Thermovibrio guaymasensis OX=240167 GN=queE PE=3 SV=1
MRICEVFESIQGEGLTVGTPSFFIRTGRCSVGCLFCDTKYSWSSGRELRVDEIVDLVVSSGLPEVVITGGEPFEEEELPDLVELLTSLPSVRRVTVETCSYIFRELPKNKLHLVLSPKPPTMGVEFPLETLLKFLESYEDVELKYTLYDERDLDLFEGFLFSNSNLIPQPVVLQPIHHPKEDYAETFKRVWDMVRRRERLLKSFEVRLIPQVHKLLGMR

SEQ ID NO: 34870 - protein, 213 aa, Thioalbus denitrificans
  REGION 1..213: note = tr|A0A369C4E6|A0A369C4E6_9GAMM 7-carboxy-7-deazaguanine synthase OS=Thioalbus denitrificans OX=547122 GN=queE PE=3 SV=1
MSRLRITEVFLSLQGEARTVGLPTVFVRLTGCPLRCDWCDTEYAFQGGVWREIPELTAEVGAFGVRHVCVTGGEPLAQQAVHELLRALCDAGFEVALETSGALDVCGVDPRVSRVMDLKAPGSGEVGRNRWENLHCLTARDQVKFVLRDRADYDWACEQLRVHDLTERCEVLFSPVHGVLPPRQLAEWILADRLPVRFQLQLHKLLWGEERGR

SEQ ID NO: 34871 - protein, 220 aa, Thioalkalivibrio denitrificans
  REGION 1..220: note = tr|A0A1V3NKH5|A0A1V3NKH5_9GAMM 7-carboxy-7-deazaguanine synthase OS=Thioalkalivibrio denitrificans OX=108003 GN=queE PE=3 SV=1
MTSIQTDTDRLRITEIFLSLQGESRTVGWPTVFVRLTGCPLRCGYCDTAYAFTGGEWMSLDAVMERVDDYGVRHVTVTGGEPLAQKPCQVLLKRLCDQGYEVSLETSGAMEVAGVDPRVVKVMDIKTPGSGECDRNLFENLRYLTLRDQVKFVICDRADYDWAKQTVATHDIGARCEILFSPSHEQLPARELADWIVADRLDVRFQIQMHKYVWGNEPGR

SEQ ID NO: 34872 - protein, 232 aa, Thioalkalivibrio halophilus
  REGION 1..232: note = tr|A0A1V3A0Z8|A0A1V3A0Z8_9GAMM 7-carboxy-7-deazaguanine synthase OS=Thioalkalivibrio halophilus OX=252474 GN=queE PE=3 SV=1
MSVEAPLRRTSAPASASGGALRLRLSEMFVSLQGEAAQVGWPTVFVRLTGCPLRCRWCDTEYAFEGGETTDVATVLQRVTGEGARHVCVTGGEPLAQPGSRALITGLCDAGLAVTIETSGAMDVSDVDPRAGLVMDWKAPASCESGRNRAENLAYLGEGDQLKFVLANRADFEWARDALPGMGLDPAVEVLFSPVHGELEPRLLADWIVAERLPVRFQVQLHKWLWGDEPGR

SEQ ID NO: 34873 - protein, 228 aa, Thioalkalivibrio nitratireducens
  REGION 1..228: note = tr|L0E178|L0E178_THIND 7-carboxy-7-deazaguanine synthase OS=Thioalkalivibrio nitratireducens (strain DSM 14787 / UNIQEM 213 / ALEN2) OX=1255043 GN=queE [H] PE=3; SV = 1
MQTLAVPDRARADSTAVRLRITETFLSLQGEAAQVGWPTVFVRLTGCPLRCRWCDTTYSFTGGQMLRLDGILDTVAGFAVRHVCVTGGEPLAQPGCLALLEALCERGFAVSLETSGALDLREVDPRVRIVMDLKAPASGESARNRLDNLALLRPGDQIKFVLADRADFDWALDLLARRPRPDGVEVLFSPVYGELEPQRLAEWILEARAPVRFQLQLHKLLWGDVAGR

SEQ ID NO: 34874 - protein, 235 aa, Thioalkalivibrio paradoxus
  REGION 1..235: note = tr|W0DKJ8|W0DKJ8_9GAMM 7-carboxy-7-deazaguanine synthase OS=Thioalkalivibrio paradoxus ARh 1 OX=713585; GN = queE PE=3 SV=1
MAGDGPMTQTAAVPGGARAERAPARLRITETFLSLQGEAAQVGWPTVFVRLTGCPLRCRWCDTAYSFSGGQMLGLDEILDTVAGFGVRHVCVTGGEPLAQPGCPALLEALCERGHAVSLETSGALELREVDPRVRIVMDLKAPASGESARNRLDNLERLRPGDQIKIVLADRADFDWALELLLRHPRPDGVEVLFSPVYGELEPQRLAEWILEARAPVRFQLQLHKLLWGDVAGH

SEQ ID NO: 34875 - protein, 232 aa, Thioalkalivibrio sp.
  REGION 1..232: note = tr|D3SF17|D3SF17_THISK 7-carboxy-7-deazaguanine synthase OS=Thioalkalivibrio sp. (strain K90mix) OX=396595; GN = queE PE=3 SV=1
MTEIPVRATRAPTRGDSGGATQVRITEMFVSLQGEAADSGWPTAFVRLTGCPLRCRWCDSAYAFEGGEARALDSILAWVGQTGVRHVCVTGGEPLAQPGCRELLARLCDDGYRVSLETSGALDIGGLDARVTVVMDWKAPGSGEQDRNLEANIAHLAAGDQLKFVLANRADFDWACAELGRLDLAPGVEVLFSPVFGELAPRELADWIVAERLAVRFQLQLHKLLWGDQPGR

SEQ ID NO: 34876 - protein, 232 aa, Thioalkalivibrio sp.
  REGION 1..232: note = tr|A0A318VS47|A0A318VS47_9GAMM 7-carboxy-7-deazaguanine synthase OS=Thioalkalivibrio sp. ALE21 OX=1158175 GN=queE PE=3 SV=1
MNVEAPLRRATAPASASGGAPRLRLSEMFVSLQGEAAQVGWPTVFVRLTGCPLRCRWCDTEYAFEGGETTDVATVLQRVTGEGVRHVCVTGGEPLAQPGSRALITGLCDAGLAVTIETSGAMDVSDVDPRAGLVMDWKAPASCESGRNRAENLAYLGEGDQLKFVLANRADFEWARDALSGMGLDSAVEVLFSPVHGELEPRLLADWIVAERLPVRFQMQLHKWLWGDEPGR

SEQ ID NO: 34877 - protein, 227 aa, unidentified
  source 1..227: note = Thioalkalivibrio sulfidiphilus
  REGION 1..227: note = tr|B8GUI6|B8GUI6_THISH 7-carboxy-7-deazaguanine synthase OS=Thioalkalivibrio sulfidiphilus (strain HL-EbGR7) OX=396588 GN=queE PE=3 SV=1
MSIHAPSPAPVTPQAERLRITEIFLSLQGESRSVGWPTVFVRLTGCPLRCGYCDTEYAFTGGEWMSLEAVLAQVASHGVHHVTVTGGEPLAQRACLELLTRLCDAGYEVSLETSGALDVAAVDPRVVKVMDLKTPASGEAGRNRYENLGYLSLKDQVKFVICDRADYEWARQTVATHDLTARCEVLFSPSYGQLAPRDLADWIVADRLPVRFQLQLHKILWGEEQGR

SEQ ID NO: 34878 - protein, 231 aa, Thioalkalivibrio versutus
  REGION 1..231: note = tr|A0A1V3BS55|A0A1V3BS55_9GAMM 7-carboxy-7-deazaguanine synthase OS=Thioalkalivibrio versutus OX=106634 GN=queE PE=3 SV=1
MTTDTLRDARGAGVIDPAAVRLRITEMFVSLQGEAAQVGWPTAFVRLTGCPLRCRWCDSEYAFEGGEALMLATILDWVGRAGVRHVCVTGGEPLAQPGCLPLLEGLCDAGFSVSLETSGAMAIAGVDPRVAIVMDWKAPASQESARNHPENIPRLRAGDQLKFVLAGREDFDWARAELERLGLAPEVEVLFSPVYGELEPRALADWIIAERLPVRFQMQLHKLLWGDQPGR

SEQ ID NO: 34879 - protein, 231 aa, Thioalkalivibrio versutus
  REGION 1..231: note = tr|A0A0G3GAB4|A0A0G3GAB4_9GAMM 7-carboxy-7-deazaguanine synthase OS=Thioalkalivibrio versutus OX=106634 GN=queE PE=3 SV=1
MTTDTLRDARGAGVIDPAAVRLRITEMFVSLQGEAAQVGWPTAFVRLTGCPLRCRWCDSEYAFEGGEALMLATILDWVGRAGVRHVCVTGGEPLAQPGCLPLLEGLCDAGFSVSLETSGAMEIAGVDPRVAIVMDWKAPASQEAARNRPENIPRLKAGDQLKFVLAGREDFDWARAELERLGLAPEVEVLFSPVYDELEPRALADWIIAERLPVRFQVQLHKLLWGDQPGR

SEQ ID NO: 34880 - protein, 213 aa, Thiobaca trueperi
  REGION 1..213: note = tr|A0A4V2V1R2|A0A4V2V1R2_9GAMM 7-carboxy-7-deazaguanine synthase OS=Thiobaca trueperi; OX = 127458 GN=queE PE=3 SV=1
MSYLVKEIFYTLQGEGAQAGRPAVFCRFAGCNLWSGREQDRAQAVCTFCDTDFRGTDGVGGGHFRTAEDLASAICAQWPREAGLSAPPYVVCTGGEPLLQLDAALIDALHAQGCEIAVETNGTCPAPPGLDWICVSPKAGAGIKLTVGDELKLVYPQPAAPPERFTSLTFTHFFLQPLDGPDLAVHTARAIAYCKAHPRWRLSVQTHKMLGFP

SEQ ID NO: 34881 - protein, 216 aa, Thiobacillus denitrificans
  REGION 1..216: note = tr|Q3SGT7|Q3SGT7_THIDA 7-carboxy-7-deazaguanine synthase OS=Thiobacillus denitrificans (strain ATCC 25259); OX = 292415 GN=queE PE=3 SV=1
MLAPPTLRITEIFLSLQGETSRTGLATVFVRLAGCPLRCRWCDTTYSFQGGETVSLDEVLARVAGFGVSVVCVTGGEPLAQKNCLPLLARLCDAGYSVSLETSGALDVSAVDPRVSRIVDVKPPESGEVARNRWENLAHLGAHDEIKFVLADRADYEWAREVLRERALERVCPVLFSPVQGELAPAQLAEWILADRLPVRMQVQLHKLLWGSAPGR

SEQ ID NO: 34882 - protein, 219 aa, Thiobacillus denitrificans
  REGION 1..219: note = tr|A0A119CVC0|A0A119CVC0_THIDE 7-carboxy-7-deazaguanine synthase OS=Thiobacillus denitrificans OX=36861 GN=queE PE=3 SV=1
MESNAQTATLRLTEVFLSLQGETSRAGLPTVFVRLAGCPLRCRWCDTPYSFQGGETVPLASLLARVADYGVPTVCVTGGEPLAQKNCLPLLAALCDAGYSVSLETSGALDVSLVDARVSRIVDIKPPGSGEDARNRWENLAHLTPHDEIKFVLADHADYDWAREVVREQKLAQVCPILFSPVQGELPPAHLADWILADRLPVRMQVQLHKVLWGNTPGK

SEQ ID NO: 34883 - protein, 232 aa, Thiobacillus sp.
  REGION 1..232: note = tr|A0A1Q4EMT1|A0A1Q4EMT1_9PROT 7-carboxy-7-deazaguanine synthase OS=Thiobacillus sp. 0-1251 OX=1895858 GN=queE PE=3 SV=1
MVVEPTSRQQPRTKDVEASTTTLRLTEIFLSLQGETSRAGLPTVFIRLTGCPLRCRWCDTTYSFQGGETVTLTSLLARVADYGVSTVCVTGGEPLAQKNCLPLLVALCDAGYSVSLETSGALDVSKVDPRVSRIVDIKPPESGEEARNRWENIAHLTPHDEIKFVLANRADYEWAREVIQAQKLAHACPILFSPVQGELPPTQLAEWILVDRLPVRMQVQLHKILWGNTPGT

SEQ ID NO: 34884 - protein, 232 aa, Thiobacillus sp.
  REGION 1..232: note = tr|A0A1E4NVR3|A0A1E4NVR3_9PROT 7-carboxy-7-deazaguanine synthase OS=Thiobacillus sp. SCN 63-57 OX=1660145 GN=queE PE=3 SV=1
MVVEPTSRQQPRTKDAEASTTTLRLTEIFLSLQGETSRAGLPTVFIRLTGCPLRCRWCDTTYSFQGGETVTLTSLLARVADYGVSTVCVTGGEPLAQKNCLPLLVALCDAGYSVSLETSGALDVSKVDPRVSRIVDIKPPESGEEARNRWENIAHLTPHDEIKFVLANRADYEWAREVIQAQKLAQACPILFSPVQGELPPTQLAEWILADRLPVRMQVQLHKILWGNTPGT

SEQ ID NO: 34885 - protein, 213 aa, Thiocapsa marina
  REGION 1..213: note = tr|F9UID0|F9UID0_9GAMM 7-carboxy-7-deazaguanine synthase OS=Thiocapsa marina 5811 OX=768671 GN=queE PE=3; SV = 1
MSYSVKEIFYTLQGEGAQAGRAAVFCRFAGCNLWSGREQDRATAVCRFCDTDFRGTDGAGGGLFGDPETLAERIAAIWSEHAGPGGRPFVVLTGGEPLLQLDSGLIDALHAAGFEIAVETNGTIAVPEGVDWVCVSPKAGADLVQQSGRELKLVFPQSGLSPDDLEHLAFDHFFLQPMDGPHLQEHTRQAIAYCRARPRWRLSVQTHKLLGFP

SEQ ID NO: 34886 - protein, 213 aa, Thiocapsa rosea
  REGION 1..213: note = tr|A0A495VFS2|A0A495VFS2_9GAMM 7-carboxy-7-deazaguanine synthase OS=Thiocapsa rosea; OX = 69360 GN=queE PE=3 SV=1
MSYSVKEIFYTLQGEGAQAGRAAVFCRFAGCNLWSGREQDRAKAVCRFCDTDFRGTDGEGGGLFGDPETLADRIRATWSEHAGAGGRPFVVLTGGEPLLQLDVALIEALHARGFEIALETNGTGSVPDGVDWVCVSPKAGADLLQQSGQELKLIFPQPGLSPEDLEHLAFEHFFLQPMDGPHLQEHTRQAIAYCQTRPHWRLSIQTHKLLGFP

SEQ ID NO: 34887 - protein, 213 aa, Thiocapsa roseopersicina
  REGION 1..213: note = tr|A0A1H2STH4|A0A1H2STH4_THIRO 7-carboxy-7-deazaguanine synthase OS=Thiocapsa roseopersicina OX=1058 GN=queE PE=3 SV=1
MSYSVKEIFHTLQGEGAQAGRAAVFCRFAGCNLWSGREQDRATAVCRFCDTDFRGTNGEGGGVFADPETLAERIRATWSEHAGSGGRPFVVLTGGEPLLQLDLALIEALHAQGFEIALETNGTLSVPAGVDWICVSPKAGADLVRQSGAELKLVFPQPGLSPEDLEHLAFKHFFLQPMDGPHLQEHTRQAIAYCQTRPRWRLSIQTHKLLGFP

SEQ ID NO: 34888 - protein, 213 aa, Thiocapsa sp.
  REGION 1..213: note = tr|A0A0U5DZA3|A0A0U5DZA3_9GAMM 7-carboxy-7-deazaguanine synthase OS=Thiocapsa sp. KS1; OX = 610332 GN=queE PE=3 SV=1
MSYSVKEIFYTLQGEGAQAGRAAVFCRFAGCNLWSGREQDRATAICRFCDTDFRGTDGEGGGLFRDPDALAERIRSVWPEPAGAHGRPFVVLTGGEPLLQLDVHLIAALHARGFEIAVETNGTLPVPEGVDWVCVSPKAGAELVQRTGQELKLVFPQPGLSPDDLEHLAFDHFFLQPMDGPNLQAHTRQAIAYCQTRPLWRLSIQTHKLLGFP

SEQ ID NO: 34889 - protein, 235 aa, unidentified
  source 1..235: note = Thioclava atlantica
  REGION 1..235: note = tr|A0A085TSC7|A0A085TSC7_9RHOB 7-carboxy-7-deazaguanine synthase OS=Thioclava atlantica; OX = 1317124 GN=queE PE=3 SV=1
MTLRIAEIFGPTIQGEGALIGEPTVFIRAGGCDYRCSWCDSLHAVDSAYRETWRPMQPDAIWEEVRRLSGGQPLTVSISGGNPAIQDFAPVIGRGKAEGYRFACETQGSIARDWFGDLDWLVLSPKPPSSGEQVDWEAFAKCVAAGQGAGATVMKIVIFDEADFNWAREAAARFPDLPLYLQPGNPEVDPQTPVDLETLSERMLWLVDRVTEAGWFSARVLPQLHVFLWGNKRGV

SEQ ID NO: 34890 - protein, 236 aa, unidentified
  source 1..236: note = Thioclava dalianensis
  REGION 1..236: note = tr|A0A074TGH3|A0A074TGH3_9RHOB 7-carboxy-7-deazaguanine synthase OS=Thioclava dalianensis; OX = 1185766 GN=queE PE=3 SV=1
MSRLRIAEIFGPTIQGEGALIGEPTVFVRTGGCDYRCSWCDSLHAVDPAHRHLWQAMTTDAVWAEITRLSRGRPLTVSLSGGNPAIQDFTALIALGQAQGYRFACETQGSIAKPWFAQLDTLVLSPKPPSSGESVDWPAFDACLSAAKGAAQIVMKIVIFDETDYAWARAATDRYPALPLYLQPGNPEVDPATPVNPQDLSDRLLWLVDKTMADGWFAPRILPQLHVLLWGNKRGV

SEQ ID NO: 34891 - protein, 236 aa, unidentified
  source 1..236: note = Thioclava electrotropha
  REGION 1..236: note = tr|A0A1W9XW04|A0A1W9XW04_9RHOB 7-carboxy-7-deazaguanine synthase OS=Thioclava electrotropha OX=1549850 GN=queE PE=3 SV=1
MTTLRIAEIFGPTIQGEGALIGEPTLFVRAGGCDYRCSWCDSLHAVDSAYRHTWAPMSSEEVWTELRRLSGDRPLTISLSGGNPAIQDFGPLIALGRAAGYRFACETQGSVARPWFGDLDTLVLSPKPPSSGEQVDWGAFAKCVAAGHSARSTVMKIVIFDRADYDWAKDAHARHPDLPLYLQPGNPEVDPEVPVDPQGLADRLGWLTDTAMADNWFAPRILPQLHVLIWGNKRGV

SEQ ID NO: 34892 - protein, 236 aa, Thioclava sp.
  REGION 1..236: note = tr|A0A4R7KJF3|A0A4R7KJF3_9RHOB 7-carboxy-7-deazaguanine synthase OS=Thioclava sp. ES.032; OX = 1798206 GN=queE PE=3 SV=1
MTTLRIAEVFGPTIQGEGALIGEPTLFVRAGGCDYRCSWCDSLHAVDSAYRHTWAPMSSEEVWTELRRLSGDRPLTISLSGGNPAIQDFGPLIALGRAAGYRFACETQGSVARPWFGDLDTLVLSPKPPSSGEQVDWDAFAACVAAGHAARSTVMKIVIFDRADYDWARDAHARHPDLPLYLQPGNPEVDPEVPVDPQDLADRLGWLTDTVMADSWFVPRILPQLHVVIWGNKRGV

SEQ ID NO: 34893 - protein, 233 aa, Thioclava sp.
  REGION 1..233: note = tr|A0A1C2HRU4|A0A1C2HRU4_9RHOB 7-carboxy-7-deazaguanine synthase OS=Thioclava sp. SK-1; OX = 1889770 GN=queE PE=3 SV=1
MSLRIAEIFGPTIQGEGALIGEPTVFVRTGGCDYRCVWCDSPHAVDSAYRATWAKMETDEVWEKVRALSGGQPLTVSLSGGNPAIQDFGPMIAMGHAQGYRFACETQGSIAKDWFSDLDMLVLSPKPPSSQEHVDWEAFAACVATKPAKTVMKIVIFDEKDYHWARQAHARFPQLPLFLQPGNLEVDPNIAVDLSAQSARLEWLVDKAMADRWFAPRILPQLHVMIWGNKRGV

SEQ ID NO: 34894 - protein, 229 aa, Thiocystis violascens
  REGION 1..229: note = tr|I3Y5B3|I3Y5B3_THIV6 7-carboxy-7-deazaguanine synthase OS=Thiocystis violascens (strain ATCC 17096 / DSM 198 / 6111) OX=765911 GN=queE PE=3 SV=1
MRGQSLLGRTGTGIADMSYRVKEIFYTLQGEGAQTGRPAVFCRFAGCNLWSGREPDRERAVCNFCDTDFRGTDGEGGGRFRDASALADRIRAAWLGDDDAGVRPYVVCTGGEPLLQLDAPLIAALHARGCEIAVETNGTCPAPLGLDWICVSPKAGAELRLIEGDELKLVYPQPEAPPERFEGLGFRYFFLQPMDGPHLAVHTAQAIDYCKAQPRWRLSVQTHKLLGIP

SEQ ID NO: 34895 - protein, 217 aa, Thioflavicoccus mobilis
  REGION 1..217: note = tr|L0GVN0|L0GVN0_9GAMM 7-carboxy-7-deazaguanine synthase OS=Thioflavicoccus mobilis 8321 OX=765912 GN=queE; PE = 3 SV=1
MGEDAARLRVTEIFHSLQGEGLATGERTAFVRLTGCPLRCRYCDSAYAFTGGTRLTIPAVLERVAAHQVRHVCVTGGEPLAQPACLDLLKALCDAGHQVSLETAGALDLGGVDPRVVKVMDLKAPGSGEVHRNRFENLALLTPQDQIKFVLCDEGDYRWAVAQLRTHGLERICTVLFSAAAGELAPNELAEWILRDRLPVRLQLQLHKILWGEEPGR

SEQ ID NO: 34896 - protein, 226 aa, unidentified
  source 1..226: note = Thioflexothrix psekupsii
  REGION 1..226: note = tr|A0A251X6I7|A0A251X6I7_9GAMM 7-carboxy-7-deazaguanine synthase OS=Thioflexothrix psekupsii OX=1570016 GN=queE PE=3 SV=1
MKYSEIFYSLQGEGALIGMPSVFFRSSFCNLRCHWCDTPYTSWQPESQIITVMDAVKTITDYGVHHVVITGGEPFLQKEPLAILCDELMARGHHVTIETNATLFAPVKAHLISMSPKLAHSTPLGDPIWATRHEQSRLQLAVIQQFLTHYDCQLKFVLDTAEDILEIKQLLTHLSIKPEQVILMPQGRQIKTIADKQQWLAELCKQYGFRYSPRLHIDLWEDQRGT

SEQ ID NO: 34897 - protein, 225 aa, unidentified
  source 1..225: note = Thiogranum longum
  REGION 1..225: note = tr|A0A4R1HB16|A0A4R1HB16_9GAMM 7-carboxy-7-deazaguanine synthase OS=Thiogranum longum; OX = 1537524 GN=queE PE=3 SV=1
MQPVLHTSSHQPAERLRVSEIFISLQGESTTIGLPTVFIRLTGCPLRCQYCDTAYAFRGGEIMATSDVVSRVGDYQVKHVTVTGGEPLAQPASLLLLERLCETGYRVSLETSGALDISQVDTRVMKVMDLKTPASGEVDKNRFENLKYLVPRDQVKFVICNREDYLWACQMLEQHAIDRHCEVLFSPAFGQQDAATLAEWIIADRLPVRFQIQLHKILWGDEPGR

SEQ ID NO: 34898 - protein, 226 aa, Thiohalobacter thiocyanaticus
  REGION 1..226: note = tr|A0A1Z4VPF4|A0A1Z4VPF4_9GAMM 7-carboxy-7-deazaguanine synthase OS=Thiohalobacter thiocyanaticus OX=585455 GN=queE PE=3 SV=1
MPEPSTPTLAQAAASRLRITEIFHSLQGEADTVGWPTVFVRLTGCPLRCHYCDTEYAFHGGEWMDLDAILAGVEQYGAQYVTVTGGEPLAQKACRPLLTQLCDAGYRVSLETSGALDIDRIDPRVVKVVDLKTPGSGEVGRNRYCVLEHMSPADQLKFVLCDRADYEWARDKLTEYDIPAICQVLFSPAWGQLEPRELADWILADRLPVRFQVQLHKLLWGDVPGR

SEQ ID NO: 34899 - protein, 226 aa, Thiohalobacter thiocyanaticus
  REGION 1..226: note = tr|A0A426QHC4|A0A426QHC4_9GAMM 7-carboxy-7-deazaguanine synthase OS=Thiohalobacter thiocyanaticus OX=585455 GN=queE PE=3 SV=1
MPELSTPTSGPAAGDRLRITEIFHSLQGEADTVGWPTVFVRLTGCPLRCHYCDTEYAFHGGEWMDLGAILTEVGQYGARHVTVTGGEPLAQKACRPLLTRLCDAGYRVSLETSGALDIDRIDPRVIKVVDLKTPGSGEVERNRYCVLEHMSPDDQIKFVLCDRADYDWAREKLTEYDIPAICQVLFSPVWGRLAPRDLADWILADRLPVRFQVQLHKLLWGDVPGR

SEQ ID NO: 34900 - protein, 225 aa, Thiohalomonas denitrificans
  REGION 1..225: note = tr|A0A1G5PLK7|A0A1G5PLK7_9GAMM 7-carboxy-7-deazaguanine synthase OS=Thiohalomonas denitrificans OX=415747 GN=queE PE=3 SV=1
MAGASRTTLRITEIFLSLQGEARDAGWPTLFVRLTGCPLRCTYCDTSYAFTGGHTMTLDAIMEEVKQVAASRGYGEVRHVCVTGGEPLAQRGCLELLARLCDADYQVSLETSGALDVSNVDVRVVRVMDLKTPGSGEQSKNRWENLKLLTGSDQVKFVIADRNDYEWARAVIKRYRIADRCEVLFSPVFGRFEPRQLADWIIEDRLPVRFQIQLHKLLWNDEAGR

SEQ ID NO: 34901 - protein, 222 aa, Thiohalophilus thiocyanatoxydans
  REGION 1..222: note = tr|A0A4V3H439|A0A4V3H439_9GAMM 7-carboxy-7-deazaguanine synthase OS=Thiohalophilus thiocyanatoxydans OX=381308 GN=queE PE=3 SV=1
MSDNAVIAAADRLRITEIFYSLQGEACQVGLPTVFIRLTGCPLRCGYCDTSYAFSGGQWYSLPDILAEVSRYHTRHITVTGGEPLAQKNCPALLTQLCDHGYSVSLETSGALDVCQLDPRVIKVMDLKTPSSGEQDKNLYTNLDCLNSQDQVKFVIGDRADYDWAVEMLRTYNLAGRCEVLFSPVFETLKPAELADWILHDQLPVRFQLQLHKLLWGDEPGR

SEQ ID NO: 34902 - protein, 238 aa, Thiohalorhabdus denitrificans
  REGION 1..238: note = tr|A0A0P9C8Y8|A0A0P9C8Y8_9GAMM 7-carboxy-7-deazaguanine synthase OS=Thiohalorhabdus denitrificans OX=381306 GN=queE PE=3 SV=1
MTSDREERLRISEIFGPTVQGEGRHIGEPTVFVRTGGCDYRCRWCDTLFAVLPEHRGEWAPMDPEEVLAEVDRLAGEPILVSLSGGNPALQPLGGLIAAGHERGHSFTLETQGSVAAAWFAALDSLTLSPKGPSSGHITRLAELEACLDAAGEGPETTFKVVVFDEADYGYARELAANYPGHPFYLQVGNPEPVGEPDPADLMARYRWLVERVTNDRWYAATVLPQLHVLAWGNQRGV

SEQ ID NO: 34903 - protein, 220 aa, Thiohalospira halophila
  REGION 1..220: note = tr|A0A1I1QLU1|A0A1I1QLU1_9GAMM 7-carboxy-7-deazaguanine synthase OS=Thiohalospira halophila DSM 15071 OX=1123397 GN=queE PE=3 SV=1
MSEVADRMETLRITEIFRSLQGEARQVGWPTVFVRLTGCPLRCGWCDTTYAFTGGEAWTREAILAEVAGHGVEHVTVSGGEPLAQRGCLELLGELCDAGHRVSLETSGALDITGVDPRVERVIDLKAPGSGEAHQNRWANLEDLRPADQVKFVLADRADYEWARDVVAEHGLDRRCEVLFSPVHEGLAAQELADWIVTDALPVRFQVQLHKLLWGDEAGR

SEQ ID NO: 34904 - protein, 213 aa, unidentified
  source 1..213: note = Thiolapillus brandeum
  REGION 1..213: note = tr|W0TNE2|W0TNE2_9GAMM 7-carboxy-7-deazaguanine synthase OS=Thiolapillus brandeum OX=1076588 GN=queE PE=3; SV = 1
MSRLRVTEIFHSLQGESRSVGWPTVFVRLAGCPLRCEYCDTAYAFKGGEWMDVQEIHQQIGIYGCRHVTVTGGEPLAQKEAWPLLVSLCDAGYETSVETSGSLDISAIDPRVSIVMDIKTPGSGEVEKNRWENLSLLSEKDQIKLVIAHREDYEWARKQLQDRQLAEITEVLFSPVQGQLAPVDLADWILQDCLPVRFQLQLHKILWGDQPGR

SEQ ID NO: 34905 - protein, 213 aa, unidentified
  source 1..213: note = Thiomicrorhabdus sp.
  REGION 1..213: note = tr|A0A4P9K5J2|A0A4P9K5J2_9GAMM 7-carboxy-7-deazaguanine synthase OS=Thiomicrorhabdus sp. G1 OX=2580412 GN=queE PE=3 SV=1
MSYSIKEVFYSLQGEGFHSGRAAIFCRFSKCNLWTGREADRANAVCQFCDTDFIGTDGQNGGKFANAEALCQHLMKFWPDNNTQPFVVLTGGEPLLQVDSALIDRLHHHNFEIAIETNGTKNAPKGIDWVCMSPKANAPIILDKGNELKLVYPQAQLMPEQVADLEFDFFYLQPMDDADPKIQQANVKAALEYCLKHPKWQLSLQTHKLLGID

SEQ ID NO: 34906 - protein, 212 aa, unidentified
  source 1..212: note = Thiomicrospira aerophila
  REGION 1..212: note = tr|W0DWT1|W0DWT1_9GAMM 7-carboxy-7-deazaguanine synthase OS=Thiomicrospira aerophila AL3 OX=717772 GN=queE; PE = 3 SV=1
MSYQIKEAFYTLQGEGFHTGRPAIFCRFTQCNLWTGRESDRAQAVCQFCDTDFIGTDGQNGGRFESAASLVEHLLTLWPSSSATDPFVVLTGGEPLLQVDQTLVDAFHDFKFEIALETNGTKYPPKGIDWVCVSPKANAPWLLTKGDELKLVFPQPQLMPDQIAHMDQFKYCYLQPMDGENASSNIQRAVTYCLTHPQWRLSLQTHKILGID

SEQ ID NO: 34907 - protein, 218 aa, unidentified
  source 1..218: note = Thiomicrospira cyclica
  REGION 1..218: note = tr|F6DC01|F6DC01_THICA 7-carboxy-7-deazaguanine synthase OS=Thiomicrospira cyclica (strain DSM 14477 / JCM 11371 / ALM1) OX=717773 GN=queE PE=3 SV=1
MTWANTMSYQIKEAFYTLQGEGFHAGRPAIFCRFTQCNLWTGRETDRAQAICQFCDTDFIGTDGQNGGRFDTATHLVEHLLGLWPKTAKTHPFVVLTGGEPLLQADQSLVDTFHQFNFEIALETNGTKQAPEQIDWICVSPKANAPWLLTEGDELKLVFPQKNLMPDQINQAHQFKHYYLQPMDGPKVAEHTEMAVQYCLQHPQWRLSLQTHKILGID

SEQ ID NO: 34908 - protein, 221 aa, Thiomicrospira sp.
  REGION 1..221: note = tr|A0A3S9TPH2|A0A3S9TPH2_9GAMM 7-carboxy-7-deazaguanine synthase OS=Thiomicrospira sp. S5; OX = 1803865 GN=queE PE=3 SV=1
MGYRIKEAFYSLQGEGFHSGRPAIFCRFSNCNLWTGREADRAQAVCQFCDTDFLGTDGQNGGQFKTADDLAEHLLTLWPKTHPSKNNQAWPNPFVVLTGGEPLLQVDQALVDTFHEHGFEIAIETNGTQKAPQGIDWVCVSPKAKAPLILDAGDELKLVYPQANCPPEKVAGLAFDHFYLQAMDDADPTIQARNLKATLDYCLAHPQWKLSLQTHKILGVD

SEQ ID NO: 34909 - protein, 221 aa, Thiomicrospira sp.
  REGION 1..221: note = tr|A0A0X3TGM5|A0A0X3TGM5_9GAMM 7-carboxy-7-deazaguanine synthase OS=Thiomicrospira sp. XS5 OX=1775636 GN=queE PE=3 SV=1
MGYRIKEAFYSLQGEGFHSGRPAIFCRFSNCNLWTGREADRAQAVCQFCDTDFLGTDGQNGGQFKTADDLAEHLLTLWPETNPSDKNPARPHPFVVLTGGEPLLQVDQTLVDTFHEHGFEIAIETNGTQKAPQGIDWICVSPKANAPLILDEGDELKLVYPQTDCPPEKVAGLTFDHFYLQAMDDANPTIQARNLKATLDYCLSHPQWKLSLQTHKILGVD

SEQ ID NO: 34910 - protein, 211 aa, Thiomonas delicata
  REGION 1..211: note = tr|A0A238D4J1|A0A238D4J1_THIDL 7-carboxy-7-deazaguanine synthase OS=Thiomonas delicata; OX = 364030 GN=queE PE=3 SV=1
MTYAVKEIFYTLQGEGANAGRAAVFCRFAGCNLWSGRESDRATAVCRFCDTDFVGTDGSLGGKYEQADMLARTIASQWPQGHAGRRLAVLTGGEPLLQVDDALVDALHAQRFEIAVETNGTVAAPAGLDWICVSPKAGAELRQIRGDELKVVVPQPGLDLDALAALDFTHRFLQPMDAPARAEHTQWAIAHCLADPRWRLSLQTHKITGIR

SEQ ID NO: 34911 - protein, 201 aa, Thiomonas sp.
  REGION 1..201: note = tr|A0A259Q0X2|A0A259Q0X2_9BURK 7-carboxy-7-deazaguanine synthase (Fragment) OS=Thiomonas sp. 14-66-4 OX=1970450 GN=B7X42_02600 PE=3 SV=1
TLQGEGANAGRAAVFCRFAGCNLWSGRESDRATAVCRFCDTDFVGTDGSLGGKYEQADMLARTIASQWPQGHAGRRLAVLTGGEPLLQVDDALVDALHAQRFEIAVETNGTIAAPAGLDWICVSPKVGAELRQIRGDELKVVVPQPGLDLDALAALDFTHRFLQPMDAPARAEHTQWAIAHCLADPRWRLSLQTHKITGIR

SEQ ID NO: 34912 - protein, 211 aa, Thiomonas sp.
  REGION 1..211: note = tr|A0A259QFH6|A0A259QFH6_9BURK 7-carboxy-7-deazaguanine synthase OS=Thiomonas sp. 13-66-29 OX=1970448 GN=queE PE=3 SV=1
MTYAVKEIFYTLQGEGANAGRAAVFCRFAGCNLWSGRESDRATAVCRFCDTDFVGTDGSLGGKYEQADMLARTIASQWPQGHAGRRLAVLTGGEPLLQVDDALVDALHAQRFEIAVETNGTIAAPAGLDWICVSPKVGAELRQIRGDELKVVVPQPGLDLDALAALDFTHRFLQPMDAPARAEHTQWAIAHCLADPRWRLSLQTHKITGIR

SEQ ID NO: 34913 - protein, 211 aa, Thioploca ingrica
  REGION 1..211: note = tr|A0A090AC14|A0A090AC14_9GAMM 7-carboxy-7-deazaguanine synthase OS=Thioploca ingrica; OX = 40754 GN=queE PE=3 SV=1
MTYIVKEIFYTLQGEGLHTGRAAVFCRFSGCNLWSGRELDRAKAICPFCDTDFVGIDGQGGGKFNSAQALVEQVVAHWPWQLPGHPYVVCTGGEPLLQLDNALIEAFHQAGLEVAVETNGTLPLPPGIDWVCVSPKAQAPLVVQSGDELKLVFPQVDALPDKFQQLNFKYFFLQPLADSQQVENTRLAVHYCLKHPQWRLSLQTHKWLEIP

SEQ ID NO: 34914 - protein, 238 aa, unidentified
  source 1..238: note = Thiopseudomonas denitrificans
  REGION 1..238: note = tr|A0A4R6U6D9|A0A4R6U6D9_9GAMM 7-carboxy-7-deazaguanine synthase OS=Thiopseudomonas denitrificans OX=1501432 GN=queE PE=3 SV=1
MILISEIFGPTVQGEGALIGMPTVFVRTGGCDFRCNWCDTLYAVEPQFKTQWQAMDAAAIMQRVNQLSGGVPLLITLSGGNPALQPLAPLLQLGKQQGYRFAMETQASKVQPWFAQLDYLTLSPKPPSSGMHFSAGRLRECVQAAGEDTQVQLKLVVADEQDYQWARQLAADFAQLPLCLQPCNLQAATPQQPERMTDLEQLNAGYRWLVQRISEDRWFDVRILPQLHVLVWNNERGV

SEQ ID NO: 34915 - protein, 210 aa, unidentified
  source 1..210: note = Thiorhodococcus drewsii
  REGION 1..210: note = tr|G2DXJ1|G2DXJ1_9GAMM 7-carboxy-7-deazaguanine synthase OS=Thiorhodococcus drewsii AZ1 OX=765913 GN=queE; PE = 3 SV=1
MSYSVKEIFYTLQGEGAQAGRPAVFCRFAGCNLWSGREADRAGAICRFCDTDFRGTDGEGGGRFEDAELLAERIRALWPDDSVAPYVVCTGGEPLLQLDSALIQALHARGCLIAVETNGTLPVPSGIDWVCVSPKAGTELRVRSGNELKLVYPQPEAPPECFDGLAFEQFFLQPMDGSDVSGNTEAALMYCKSHPHWRLTVQMHKLIGIP

SEQ ID NO: 34916 - protein, 212 aa, Thiorhodospira sibirica
  REGION 1..212: note = tr|G4E220|G4E220_9GAMM 7-carboxy-7-deazaguanine synthase OS=Thiorhodospira sibirica ATCC 700588 OX=765914; GN = queE PE=3 SV=1
MAYQVKEIFYSLQGEGAHSGRAAVFCRFSGCNLWSGQDRDRASAVCGFCDTDFNGTDGPAGGQYADAAQLAEQIARHWQARDTACSRFVVLTGGEPLLQVDAPLLAALKAQHFQIALETNGTLPVPEGIDWVCVSPKSLHRLRVHHGDELKLVFPQPQLSPEKLTGLSFSHFFLQPMDGPNLADHQQLAAQYCLQHPPWRLSLQLHKLLGIP

SEQ ID NO: 34917 - protein, 216 aa, Thiorhodovibrio sp.
  REGION 1..216: note = tr|H8Z4H4|H8Z4H4_9GAMM 7-carboxy-7-deazaguanine synthase OS=Thiorhodovibrio sp. 970 OX=631362 GN=queE PE=3; SV = 1
MAYQVHEIFHSLQGEGARSGRSALFCRFAGCNLWSGREQDRAAAICRFCDTEFRGTHGSGGGVFASAAALADHLGDLWHSQTSGAERPYIVCTGGEPLLQLDQPLIDVLHARGGEIAVETNGTIEPPVGIDWLCVSPKAGATLVATRGDELKLVFPQPGLTPEAVEALEQLEFREFFLQPCDGPERAANIDAALSYCKAHPRWRLSLQLHKLLGIR

SEQ ID NO: 34918 - protein, 213 aa, Thiothrix caldifontis
  REGION 1..213: note = tr|A0A1H4FUJ2|A0A1H4FUJ2_9GAMM 7-carboxy-7-deazaguanine synthase OS=Thiothrix caldifontis; OX = 525918 GN=queE PE=3 SV=1
MTYSVKEIFYTLQGEGFHAGRPAIFCRFAGCNLWSGLEADRAQAVCNFCDTDFVGVDGVNGGKFRDAKALVAAIIQEWWIGVKQDMNRFIVFTGGEPLLQLDKALIDALHRENFEIAVETNGTKPAPAGIDWLCVSPKADSKIVLTAGNELKLVYPQPLAMPERFAGLDFQHFYLQAMDGAAQAQNTKAAIAYCMQHPQWKLSVQTHKLLGIP

SEQ ID NO: 34919 - protein, 215 aa, Thiothrix lacustris
  REGION 1..215: note = tr|A0A1Y1Q9A7|A0A1Y1Q9A7_9GAMM 7-carboxy-7-deazaguanine synthase OS=Thiothrix lacustris; OX = 525917 GN=queE PE=3 SV=1
MDLSSLRITEIFHSLQGETRTVGLPTVFVRLTGCPLRCHYCDTAYAFTGGTSMALADIVEQVASYQAHYVTVTGGEPLAQKNCLALLSTLCDQGYEVSLETSGAITLEGVDPRVVKVMDIKTPASGEAAKNRWENLALLDSKDQLKAVICSRDDYEWFRDIAEVHDLFERCEVLISPSHTELKPRELAEWVLEDRLPVRFQLQLHKYLWNDEPGH

SEQ ID NO: 34920 - protein, 222 aa, Thiothrix sp.
  REGION 1..222: note = tr|A0A432UV00|A0A432UV00_9GAMM 7-carboxy-7-deazaguanine synthase OS=Thiothrix sp. OX=1032; GN = queE PE=3 SV=1
MTSNDLAAGGDRLRITEIFLSLQGESRSIGWPTVFIRLTGCPLRCTYCDTEYAFSGGEWVSLKKILVQVATYGTQHVCVTGGEPLAQKNCLLLLTRLADVGHNVSLETSGALDIHRVDFRVIKVMDIKTPGSGELSRNRLENIRLLKAQDQVKFVLCDRKDYEWAKNLLRELCIDKICEVLFSPVYSQLEPSQLAEWILADKLPVRFQIQLHKILWGEQSGR

SEQ ID NO: 34921 - protein, 217 aa, unidentified
  source 1..217: note = Thiotrichaceae bacterium
  REGION 1..217: note = tr|A0A2A5G6J7|A0A2A5G6J7_9GAMM 7-carboxy-7-deazaguanine synthase OS=Thiotrichaceae bacterium OX=2030882 GN=queE PE=3 SV=1
  VARIANT 6: note = Xaa can be any naturally occurring amino acid
  VARIANT 66..67: note = Xaa can be any naturally occurring amino acid
MSNQQXRLKITEIFYSLQGEALNVGLPTVFIRLTGCPLRCTYCDTEYAFTGGEWMDVDVIVNSIEXXNATHVMVTGGEPLAQKNCIELLQKLCDSGYSVSLETSGAILVDKVDHRVVKVLDIKTPASNEESKNKFENFDLLNKQDQIKFVICDENDYQWSKQLIDQQNLADRCEVLFSPAYQQQDATVLAEWILRDQLKVRFQFQLHKYLWGDKPGV

SEQ ID NO: 34922 - protein, 215 aa, unidentified
  source 1..215: note = Thiotrichales bacterium
  REGION 1..215: note = tr|A0A1H6FCP1|A0A1H6FCP1_9GAMM 7-carboxy-7-deazaguanine synthase OS=Thiotrichales bacterium HS_08 OX=1899563 GN=queE_3 PE=3 SV=1
MTYSVKEVFYTLQGEGINAGRPAVFCRFAGCNLWSGLEQDRHKASCSFCDTDFVGVNGKGGGKFATARQLALHIKHYFPETESIRGFVVFTGGEPLLQLDTPLIEALHALDFEIAVETNGTIAVPDQLDWICVSPKAGTDLVQTSGHELKLIYPQNGICPETFESLPFQYFLLQALDDPLDSNKQQQHLQQAIAYCKQHPHWRLSIQTHKWLDIP

SEQ ID NO: 34923 - protein, 227 aa, unidentified
  source 1..227: note = Thiotrichales bacterium
  REGION 1..227: note = tr|A0A2A4RNU3|A0A2A4RNU3_9GAMM 7-carboxy-7-deazaguanine synthase OS=Thiotrichales bacterium OX=2026796 GN=queE PE=3 SV=1
MVSEQDNSSGNAESAVRLRITEIFHSLQGESRTVGIPTIFIRLTGCPLRCGYCDSAYAFEGGEWMSLDQVLFNVVDKECHYVTVTGGEPLAQKGCFPLLSRLCDLGYQVSLETSGSIDITKVDPRVVKVMDLKTPGSGEEAKNRYENIKWLQNSDQVKFVICSREDYLWACNKLVEYDLPAQYEILFQAVHNDLEDRVLADWILQDRLPVRMQIQLHKLLWGDLPGK

SEQ ID NO: 34924 - protein, 212 aa, unidentified
  source 1..212: note = Bathymodiolus puteoserpentis
  REGION 1..212: note = tr|A0A483AP37|A0A483AP37_9BACT 7-carboxy-7-deazaguanine synthase OS=thiotrophic endosymbiont of Bathymodiolus puteoserpentis (Logatchev); OX = 343240 GN=queE PE=3 SV=1
MNTELNINEIFYSLQGEAREVGLPTVFVRLTGCPLRCSYCDTEYAFKGNNPLSIDAILAKVKKYNTKFVCVTGGEPLAQINCYVLLDRLVKENYQVSLETSGSIDIADINPGVSIVMDIKTPSSNESDKNLYDNIEKLETKDQLKFVIGSKADFDWSVKFLSKYPTQAEVLFSSVFDAIEPAQLAQWILDGQLNVRLQVQLHKLLWGDEKGK

SEQ ID NO: 34925 - protein, 242 aa, Thiovulum sp.
  REGION 1..242: note = tr|J0L433|J0L433_9HELI 7-carboxy-7-deazaguanine synthase OS=Thiovulum sp. ES OX=1177931 GN=queE PE=3 SV=1
MSIPLSEEFLSIQGEGERAGIPSIFLRFGGCNLQCRGFGVEYFVNGEKRFGCDSYFSVDKDFSSEWKTISKISEFIEILNKYPQNISDVVLTGGEPLLYAKQELFLELLNYLKNSDKTITIETNGTIKIDKKVEFQGIYFSISPKLEVSGEILKKGVSFSAVKSYQKNSEKNFLKFTLRENSEKIHQFRKEFPEIPIYCMALSGDKEELEKNAENVVKFAIEHGYRYSDRLHIRLWGDERGR

SEQ ID NO: 34926 - protein, 210 aa, Tistrella mobilis
  REGION 1..210: note = tr|A0A3B9IMP0|A0A3B9IMP0_9PROT 7-carboxy-7-deazaguanine synthase OS=Tistrella mobilis; OX = 171437 GN=queE PE=3 SV=1
MSYTVKELFLTLQGEGAQAGRTAVFCRFAGCNLWSGRERDRAGALCRFCDTDFVGTDGDGGGRFRDAQDLAAAIEGCWGAGRSRRYVVFTGGEPLLQLDEALIRAVKARGFEIAVETNGTIAAPDGIDWICVSPKAGTELVQRRGHELKLVHPQDGLDPAALEALDFGVMWVQPMDGPDRAVNTEAAVAWCLAHPRWRLSLQTHKLIGIP

SEQ ID NO: 34927 - protein, 247 aa, Tistrella mobilis
  REGION 1..247: note = tr|I3TXT3|I3TXT3_TISMK 7-carboxy-7-deazaguanine synthase OS=Tistrella mobilis (strain KA081020-065); OX = 1110502 GN=ygcF PE=3 SV=1
MVDRGGRMCFNSAHGQPESPARDPEDRIADARSNEDKMSYTVKELFLTLQGEGAQAGRTAVFCRFAGCNLWSGRERDRAGALCRFCDTDFVGTDGDGGGRFRDAQDLAAAIEGCWGGGRARRYVVFTGGEPLLQLDEALIHAVKARGFEIAVETNGTIAAPEGIDWICVSPKAGTELVQRRGHELKLVHPQAGLDPAALEALDFGVMWVQPMDGPDRAVNTEAAVAWCLAHPRWRLSLQTHKLIGIP

SEQ ID NO: 34928 - protein, 210 aa, Tistrella sp.; identical to SEQ ID NO: 34926
  REGION 1..210: note = tr|A0A2E3EHP3|A0A2E3EHP3_9PROT 7-carboxy-7-deazaguanine synthase OS=Tistrella sp.; OX = 2024861 GN=queE PE=3 SV=1

SEQ ID NO: 34929 - protein, 210 aa, Tistrella sp.
  REGION 1..210: note = tr|A0A2D8QA33|A0A2D8QA33_9PROT 7-carboxy-7-deazaguanine synthase OS=Tistrella sp.; OX = 2024861 GN=queE PE=3 SV=1
MSYTVKELFLTLQGEGAQAGRTAVFCRFAGCNLWSGRERDRAGALCRFCDTDFVGTDGDGGGRFRDAQDLAAAIEGRWGAGRSRRYVVFTGGEPLLQLDEALIRAVKARGFEIAVETNGTIAAPDGIDWICVSPKAGTELVQRRGHELKLVHPQDGLDPAALEALDFGVMWVQPMDGPDRAVNTEAAVAWCLAHPRWRLSLQTHKLIGIP

SEQ ID NO: 34930 - protein, 225 aa, Tolumonas auensis
  REGION 1..225: note = tr|C4LAB5|C4LAB5_TOLAT 7-carboxy-7-deazaguanine synthase OS=Tolumonas auensis (strain DSM 9187 / TA4); OX = 595494 GN=queE PE=3 SV=1
MMSNHYPINEIFQSIQGEGFFSGVPAIFVRLQGCKVGCSWCDTKHSWELDADNLIPVRQLFTDKKPKAGWSWLSPEEILSCFSAEEYTARHVVITGGEPCEYDLMVLSQTLIAHGYRVQIETSGTQPVQADDACWVTVSPKINMAGGYDVLPDVLLRANEIKHPVATAKHIAQLDALLAGIDTSEKVICLQPISQKSRATELAMKICIQRNWRLSVQLHKYLDIE

SEQ ID NO: 34931 - protein, 225 aa, Tolumonas sp.
  REGION 1..225: note = tr|A0A5C7QYD7|A0A5C7QYD7_9GAMM 7-carboxy-7-deazaguanine synthase OS=Tolumonas sp.; OX = 1978237 GN=queE PE=3 SV=1
MQSHHYPINEIFQSIQGEGYFSGVPAIFVRLQGCKVGCSWCDTKHSWELDAENLIPVRQLFTEKKPKAGWSWFTPEEILRCFSEQGYSVKHVVITGGEPCEYDLMALSQSLIAHGYRVQIETSGTQPIRADDRCWVTVSPKIRMAGGYSVLPEALNRANEIKHPVATAKNIAQLDELLAGVELSAKVVCLQPISQKSRATELAMEVCIQRNWRLSVQLHKYLNIE

SEQ ID NO: 34932 - protein, 265 aa, unidentified
  source 1..265: note = Tolypothrix bouteillei
  REGION 1..265: note = tr|A0A0C1QXL7|A0A0C1QXL7_9CYAN 7-carboxy-7-deazaguanine synthase OS=Tolypothrix bouteillei VB521301 OX=1479485 GN=queE PE=3 SV=1
MTAKTTVTPTARLIEIFSAIQGEGLNVGTRQIFIRFALCDLRCHFCDSAHTWHAPATCRIERTPGLRDFETYSNPVTLPALLQWVEWQNLPFVHDTISLTGGEPLLHASFLLEFLPQVRSVTGLPIYLETGGHRPKQLAAILPYLDSVGMDFKLPSTSGESHWQEHAEFLQLCHTAKVELFVKLIVSQTTDPSELERSAELVASVDPSIPVFLQPVTPLDTSLNLTDKPQLAPFPEQVLTWQALMKRLVKQVRVIPQTHKMLNQL

SEQ ID NO: 34933 - protein, 265 aa, unidentified
  source 1..265: note = Tolypothrix campylonemoides
  REGION 1..265: note = tr|A0A0C2PST1|A0A0C2PST1_9CYAN 7-carboxy-7-deazaguanine synthase OS=Tolypothrix campylonemoides VB511288 OX=1245935 GN=queE PE=3 SV=1
MSVKNTITPTARLIEVFSAIQGEGLNVGTRQIFIRFALCDLRCHFCDSAHTWNAPATCKIEQTPGLRDFEIYSNPVPLPMLLKWVERQNLPCLHDTISLTGGEPLLHTPFLLEFLPEVRSVTGLPIYLETGGHRPEQLDIILPYVDSVGMDFKLPSTSGENRWREHAEFLQLCWNSQVEVFVKIIVSQTTDPTELEDSAQLVASVSPSIPVFLQPVTPLDDLIAFNQPPMLAPSPSQVLNWQSLMKRFIKQVRVVPQTHKMLNQL

SEQ ID NO: 34934 - protein, 265 aa, Tolypothrix sp.; identical to SEQ ID NO: 30258
  REGION 1..265: note = tr|A0A0D6KR07|A0A0D6KR07_9CYAN 7-carboxy-7-deazaguanine synthase OS=Tolypothrix sp. PCC 7601 OX=1188 GN=queE PE=3 SV=1

SEQ ID NO: 34935 - protein, 218 aa, Tolypothrix sp.
  REGION 1..218: note = tr|A0A218QMU2|A0A218QMU2_9CYAN 7-carboxy-7-deazaguanine synthase OS=Tolypothrix sp. NIES-4075 OX=2005459 GN=queE PE=3 SV=1
MLDIKTGSTIVQILEIKLPIHETFQSTVQGEGYWTGSLVDFIRLSGCPVGCPWCDTGYGDGGAKLPRKERSIQELLAELKSPRVVISGGEPFIQKHLPDLVQALLAAGKEVCIETSGSFWQEISPAAWITLSPKGHVNPRYPVQKQFWSRANEVKIVIGTGTEVDFYQEHLSAQSNLPVYLQPEWNNSAKTLPLILQLLQQKPHYRLSLQTHKYIGVQ

SEQ ID NO: 34936 - protein, 265 aa, Tolypothrix tenuis; identical to SEQ ID NO: 27931
  REGION 1..265: note = tr|A0A1Z4MWA6|A0A1Z4MWA6_9CYAN 7-carboxy-7-deazaguanine synthase OS=Tolypothrix tenuis PCC 7101 OX=231146 GN=queE PE=3 SV=1

SEQ ID NO: 34937 - protein, 223 aa, Trabulsiella guamensis
  REGION 1..223: note = tr|A0A085A889|A0A085A889_9ENTR 7-carboxy-7-deazaguanine synthase OS=Trabulsiella guamensis ATCC 49490 OX=1005994 GN=ygcF PE=3 SV=1
MQYPINEMFQTLQGEGYFTGVPAIFIRLQGCPVGCAWCDTKHTWDKLADREVSLFSILAKTKESDKWGAASAEDLLAIIGRQGWTARHVVITGGEPCIHDLTLLTTLLEHNGCSCQIETSGTHEVRCSHATWVTVSPKVNMRGGYNVLSQALQRADEIKHPVGRVRDIEALDELLATLTDDKQRVIALQPISQKDDATRLCIETCIARNWRLSMQTHKYLNIA

SEQ ID NO: 34938 - protein, 223 aa, Trabulsiella odontotermitis
  REGION 1..223: note = tr|A0A0L0H0Z8|A0A0L0H0Z8_9ENTR 7-carboxy-7-deazaguanine synthase OS=Trabulsiella odontotermitis OX=379893 GN=queE PE=3 SV=1
MQYPINEMFQTLQGEGYFTGVPAIFIRLQGCPVGCAWCDTKHTWDKLADREVSLFSILAKTKESDKWGAASAEDLLAIIGRQSWTARHVVITGGEPCIHDLTPLTTLLEHNGFSCQIETSGTHEVRCSHATWVTVSPKVNMRGGYGVLTQALQRADEIKHPVGRVRDIEALDELLDTLTDDKQRVIALQPISQKDDATRLCIETCIARNWRLSMQTHKYLNIA

SEQ ID NO: 34939 - protein, 221 aa, Trichococcus collinsii
  REGION 1..221: note = tr|A0A143YUD1|A0A143YUD1_9LACT 7-carboxy-7-deazaguanine synthase OS=Trichococcus collinsii OX=157076 GN=queE PE=3 SV=1
MVLQVVEKFVSINGEGRRCGQLATFIRFAGCNLNCGYCDTAWANDRKVAFDPMTAEEVYAYIKDTQVTNVTLTGGEPLLQQDMGELLELLSQDPDLYVEIETNGSVLLSKFSDLDNPPSFTMDYKLPSSGMERMMALENFDHLTEKDTVKFVSGSMTDLEKARELINKYNLTEKTNIFISPVFGDIELESIVDFMKDNQMNGVNMQVQLHKIIWDPNERGV

SEQ ID NO: 34940 - protein, 219 aa, unidentified
  source 1..219: note = Trichococcus ilyis
  REGION 1..219: note = tr|A0A143YHJ0|A0A143YHJ0_9LACT 7-carboxy-7-deazaguanine synthase OS=Trichococcus ilyis; OX = 640938 GN=queE PE=3 SV=1
MQVVEKFVSINGEGRRCGQLATFIRFAGCNLNCGYCDTAWANDRKVAFDPMTPEEVYAYIKDTQVTNVTLTGGEPLLQQDIGELLELLSQDPQLYVEIETNGSVLLSRFSDLENPPSFTMDYKLPYSGMERMMALDNFEQLTAKDTVKFVSGSLADLEKAKEMIDRYKLTEKTAVFISPIFGEIELETIVDFMKDNQLNGVNMQVQLHKVIWDPNERGV

SEQ ID NO: 34941 - protein, 238 aa, Trichococcus palustris
  REGION 1..238: note = tr|A0A143YEA6|A0A143YEA6_9LACT 7-carboxy-7-deazaguanine synthase OS=Trichococcus palustris OX=140314 GN=queE PE=3 SV=1
MKRRQTAQPTKKAGLNKMVLQVVEKFVSINGEGSRCGQLATFIRFAGCNLNCGYCDTAWANDRKVAFVPMSAEEIYGYIKDTKVTNVTLTGGEPLLQKDIGTLLALLSKDPELYVEIETNGSVLLSKFSDLENPPSFTMDYKLPSSGMERMMALDNFDHLTNNDTVKFVSGSLEDLEKAKELINKYKLTEKTNIFISPVFGDIQLESIVDFMKDNNMNGVNMQVQLHKIIWDPNERGV

SEQ ID NO: 34942 - protein, 221 aa, Trichococcus pasteurii
  REGION 1..221: note = tr|A0A1W1IFU5|A0A1W1IFU5_9LACT 7-carboxy-7-deazaguanine synthase OS=Trichococcus pasteurii OX=43064 GN=queE PE=3 SV=1
MVLQVVEKFVSINGEGRRCGQLATFIRFAGCNLNCGYCDTAWANDRKVAFDPMTAEEVYAYIKDTQVTNVTLTGGEPLLQQDMGELLELLSQDSELYVEIETNGSVLLSKFSDLENPPSFTMDYKLPSSGMERMMALENFDHLTEKDAVKFVSGSMADLEKARELINAYKLTEKASVFISPVFGDIELESIVDFMKDNQMNGVNMQVQLHKIIWDPNERGV

SEQ ID NO: 34943 - protein, 221 aa, Trichococcus patagoniensis
  REGION 1..221: note = tr|A0A2T5IJ19|A0A2T5IJ19_9LACT 7-carboxy-7-deazaguanine synthase OS=Trichococcus patagoniensis OX=382641 GN=queE PE=3 SV=1
MVLQVVEKFVSINGEGRRCGQLATFIRFAGCNLNCGYCDTAWANDRKVAFDPMTAEEVYAYIKDTQVTNVTLTGGEPLLQQDIGGLLELLSQDPELYVEIETNGSVLLSRFSGLENPPSFTMDYKLPSSGMERMMALDNFDQLTEKDTVKFVSGSLQDLEKARELIDRYKLTEKTAVFISPIFGEIELETIVDFMKDNQLNGVNMQVQLHKIIWDPNERGV

SEQ ID NO: 34944 - protein, 221 aa, Trichococcus sp.
  REGION 1..221: note = tr|A0A383TDR2|A0A383TDR2_9LACT 7-carboxy-7-deazaguanine synthase OS=Trichococcus sp. ART1; OX = 2094020 GN=queE PE=3 SV=1
MVLQVVEKFISINGEGRRCGQLATFIRFAGCNLNCGYCDTAWANDRKVAFDPMTAEEVYAYIKETQVTNVTLTGGEPLLQQDMGELLELLSQDPELYVEIETNGSVLLSKFSDLENPPSFTMDYKLPSSGMERMMALENFDHLTEKDTVKFVSGSMEDLEKARELINKYKLTEKTSIFISPVFGDIELESIVDFMKDNQMNGVNMQVQLHKIIWDPNERGV

SEQ ID NO: 34945 - protein, 207 aa, unidentified
  source 1..207: note = Trichodesmium erythraeum
  REGION 1..207: note = tr|Q11A86|Q11A86_TRIEI 7-carboxy-7-deazaguanine synthase OS=Trichodesmium erythraeum (strain IMS101); OX = 203124 GN=queE PE=3 SV=1
MTENLIIPIHETFQKTIQGEGYWAGTPVDFIRLAGCPVGCHYCDTGYADGGISLPRQIQTLDKLINELFSPRVVISGGEPFIHKQLPALINRIEATGRQVSIETSGCYWQNISPNAWVTLSPKEHISHKYPIVPSMWTRASEIKLVIETGKELEFYSKILLLKNQTPVFLQPEWYNRDFTLPLVQKLLQEYPHCRLSIQLHKYLGIK

SEQ ID NO: 34946 - protein, 264 aa, unidentified
  source 1..264: note = Trichormus variabilis
  REGION 1..264: note = tr|A0A1Z4KLE1|A0A1Z4KLE1_ANAVA 7-carboxy-7-deazaguanine synthase OS=Trichormus variabilis NIES-23 OX=1973479 GN=queE PE=3 SV=1
MTAKTTAEPTARLVEVFSAIQGEGLNVGTRQIFIRFAFCDLRCHFCDSAHTWNAPASCRIERSPGLRDFESHPNPVPLTTLIEWVERQNLPCLHDSISLTGGEPLLHAPFLQEFLPKVRSLTGLPIYLETGGHRPEQLATILPYLDSVGMDLKLPSVSGESHWQAHSQFLQLCLTQSETFVKIIISHRTNLAELERAALLVADVSPEIPVFLQPVTPLAESEQFSPTPALAPAPADVLTWQASMKRFLKYVRVVPQTHKMLNQL

SEQ ID NO: 34947 - protein, 289 aa, unidentified
  source 1..289: note = Trichormus variabilis
  REGION 1..289: note = tr|A0A3S1ADX3|A0A3S1ADX3_ANAVA 7-carboxy-7-deazaguanine synthase OS=Trichormus variabilis SAG 1403-4b OX=447716 GN=queE PE=3 SV=1
MEQEAKNVLVVVQNQCDRAAIYHLMIAKTRVKPTARLVEVFSAIQGEGLNVGTRQIFIRFGLCDLRCHFCDSPHTWNAPSMCKIERSPGLRDFEIHSNPVPLPILIEWVERQNLPSLHDSISLTGGEPLLHAPFLAQFLPIVRSLTHLPIYLETGGHRPEELGLILPYLDSVGMDLKLPSVSGETYWTEHKKFLQICFDANLEIFVKIIVSQKTEPAELERSAMLVAAVSQDIPIFLQPVTPLADPEKFSQVPVTAPTPDQVLGWQALMKQFVKSVRVIPQTHKMLNQM

SEQ ID NO: 34948 - protein, 210 aa, unidentified
  source 1..210: note = Trinickia caryophylli
  REGION 1..210: note = tr|A0A1X7FAQ5|A0A1X7FAQ5_TRICW 7-carboxy-7-deazaguanine synthase OS=Trinickia caryophylli; OX = 28094 GN=queE PE=3 SV=1
MTYAVKEIFYTLQGEGANAGRPAVFCRFAGCNLWSGREEDRESAVCRFCDTDFVGTNGENGGKYRDAGALVEKIASLWPAGERHRFVVCTGGEPMLQMDEPLVRALHEAGFEVAIETNGSLPVLESIDWVCVSPKADAPLVVTKGNELKVVVPQENQRLAEYAALDFEYFLVQPMDGPARELNTRLAIDWCKRHPKWRLSMQTHKYLNIP

SEQ ID NO: 34949 - protein, 210 aa, unidentified
  source 1..210: note = Trinickia soli
  REGION 1..210: note = tr|A0A2N7VLG0|A0A2N7VLG0_9BURK 7-carboxy-7-deazaguanine synthase OS=Trinickia soli; OX = 380675 GN=queE PE=3 SV=1
MTYAVKEIFYTLQGEGANAGRPAVFCRFAGCNLWSGREEDRESAVCRFCDTDFVGTDGENGGKYRDAGALVDRIASLWPAGEAHRFVVCTGGEPMLQMDEPLVAALHRAGFEVAIETNGSLPVLDSIDWVCVSPKADAPLVVTKGNELKVVVPQDNQRLSEYAELDFEHFLVQPMDGPARELNTRLAIDWCKRHPRWRLSMQTHKYLNIP

SEQ ID NO: 34950 - protein, 210 aa, unidentified
  source 1..210: note = Trinickia sp.
  REGION 1..210: note = tr|A0A4U1HV42|A0A4U1HV42_9BURK 7-carboxy-7-deazaguanine synthase OS=Trinickia sp. 7GSK02; OX = 2571161 GN=queE PE=3 SV=1
MTYAVKEIFYTLQGEGTNAGRPAVFCRFAGCNLWSGREEDRAEAVCRFCDTDFVGTDGENGGKYKSADELVALIASLWPEGEGHRFVVCTGGEPMLQIDPPFVDALHAAGFEIAIETNGSLPVLETIDWICVSPKADAPLVVTKGNELKVVIPQENQRLADYAKLDFDHFLVQPMDGPSRDLNTKLAIDWCKRHPQWRLSMQTHKYLNIP

SEQ ID NO: 34951 - protein, 210 aa, unidentified
  source 1..210: note = Trinickia symbiotica
  REGION 1..210: note = tr|A0A2N7X7Q1|A0A2N7X7Q1_9BURK 7-carboxy-7-deazaguanine synthase OS=Trinickia symbiotica; OX = 863227 GN=queE PE=3 SV=1
MTYAVKEVFYTLQGEGANAGRPAVFCRFAGCNLWSGREEDRESAVCRFCDTDFIGTDGENGGKYRDAAALVDKIASLWPTGEDYRFVVCTGGEPMLQLDAPLIDALHAAGFEVAIETNGSLPVLESIDWVCVSPKADAPLVVTKGDELKVVIPQDNQRLAEYAALDFDHFLVQPMDGPSRDINTRLAIDWCKRHPKWRLSMQTHKYLNIP

SEQ ID NO: 34952 - protein, 210 aa, unidentified
  source 1..210: note = Trinickia symbiotica
  REGION 1..210: note = tr|A0A2T3XYV5|A0A2T3XYV5_9BURK 7-carboxy-7-deazaguanine synthase OS=Trinickia symbiotica; OX = 863227 GN=queE PE=3 SV=1
MTYAVKEIFYTLQGEGANAGRPAVFCRFAGCNLWSGREEDRESAVCRFCDTDFVGTDGENGGKYRDAAALVAKIASLWPTGEDYRFIVCTGGEPMLQLDAPLVDALHTAGFEVAIETNGSLPVLESIDWVCVSPKADAPLVVTKGNELKVVIPQDNQRLAEYAALDFDHFLVQPMDGPSRDLNTRLAIDWCKRHPKWRLSMQTHKYLNIP

SEQ ID NO: 34953 - protein, 235 aa, unidentified
  source 1..235: note = Tropicibacter phthalicicus
  REGION 1..235: note = tr|A0A238JEX5|A0A238JEX5_9RHOB 7-carboxy-7-deazaguanine synthase OS=Tropicibacter phthalicicus OX=1037362 GN=queE PE=3 SV=1
MTLRIAEIFGPTIQGEGALIGEPTVFVRTGGCDYRCSWCDSLHAVDSAHRHDWHPMSAEAVWDEVERLSGGTPLTVSLSGGNPAIQDFTQVMALGQSKGYRFACETQGSIAKPWFGALETLVLSPKPPSSGETVDWADFEDCIAATGAKTQVVMKIVIFDANDYDWARAAAGRYPDLPLYLQPGNPDVDPDLPIKTQDSLDRMLWLVEKVTSDGWFTPRILPQLHVLLWGNKRGV

SEQ ID NO: 34954 - protein, 218 aa, unidentified
  source 1..218: note = Tumebacillus algifaecis
  REGION 1..218: note = tr|A0A223D451|A0A223D451_9BACL 7-carboxy-7-deazaguanine synthase OS=Tumebacillus algifaecis OX=1214604 GN=queE PE=3 SV=1
MRLNELFLSIQGETSSAGLPTIFVRFTGCNLRCTYCDTKYSYFEGDTITPGEVMDKIRALKCKRVCLTGGEPLIQPRAEMQQLLDLLAAEGYEVSIETDGSIDISKFKLHDKQRFIVDMKVPSSGMSDKMHLPNLQHIVAERDEVKFVVGNREDYEWCTRLIAEQGIDPKDGYQLVFSPVYREIELVDLVNWILEDQLDARFQVQLHKIVWDPDKRGV

SEQ ID NO: 34955 - protein, 218 aa, unidentified
  source 1..218: note = Tumebacillus avium
  REGION 1..218: note = tr|A0A1Y0IMP2|A0A1Y0IMP2_9BACL 7-carboxy-7-deazaguanine synthase OS=Tumebacillus avium; OX = 1903704 GN=queE PE=3 SV=1
MRLNELFLSIQGETSSAGLPTIFVRFTGCNLRCTYCDTKYSYFEGDIITPDEVMDKIRALKCKRVCLTGGEPLIQPRAEMQRLLDLLAEESYEVSIETDGSIDVSKFQLHAKQRFIVDMKVPSSGMSEKMHLPNLQHIVAERDEVKFVVGSRADYEWCTALIREQGIHPKDGYQLIFSPVFREIELEDLVNWILEDELDARFQVQLHKIVWDPDKRGV

SEQ ID NO: 34956 - protein, 218 aa, unidentified
  source 1..218: note = Tumebacillus flagellatus
  REGION 1..218: note = tr|A0A074LNU4|A0A074LNU4_9BACL 7-carboxy-7-deazaguanine synthase OS=Tumebacillus flagellatus OX=1157490 GN=queE PE=3 SV=1
MRLNELFLSIQGETSSAGLPTIFVRFTGCNLRCTYCDTKYSYYEGDPITPEQVMEQIRALKVKRVCLTGGEPLIQPRQETQVLLDMLANEGYEVSIETDGSIDISKYTMHENQRFIVDMKVPSSGMSERMHWANLRHLVPNRDEVKFVVGNREDYEWCTNLVREYDLDPAKGYQLIFSPIFREIELEQLVNWILEDGLDARFQVQLHKIVWDPDKRGV

SEQ ID NO: 34957 - protein, 218 aa, Tumebacillus permanentifrigoris
  REGION 1..218: note = tr|A0A316D8H4|A0A316D8H4_9BACL 7-carboxy-7-deazaguanine synthase OS=Tumebacillus permanentifrigoris OX=378543 GN=queE PE=3 SV=1
MRLNELFLSIQGETASAGLPTIFVRFTGCNLRCTYCDTKYSYFEGDTITPADVMDKIRELKVKRVCLTGGEPLIQPRQEMQLLLDLLGAEGYEVSIETDGSIDISKFALHDKQRFIVDMKVPSSGMSENMHLENLRHIRPTRDEVKFVVGNRADYEWCVDLIREHDIHPSKGYQLLFSPVFREIDLEEMVNWILADELDARFQVQLHKIVWDPDKRGV

SEQ ID NO: 34958 - protein, 218 aa, Tumebacillus sp.
  REGION 1..218: note = tr|A0A4R2R0N1|A0A4R2R0N1_9BACL 7-carboxy-7-deazaguanine synthase OS=Tumebacillus sp. BK434 OX=2512169 GN=queE PE=3 SV=1
MRLNELFLSIQGETSSAGLPTIFVRFTGCNLRCTYCDTKYSYYEGDTITPDEVMDKIRALKCKRVCLTGGEPLIQPRAEMQDLLDKLAEEGYEVSIETDGSIDVSKFKLHPKQRFIVDMKVPSSGMSAKMHLPNLQHIVAERDEVKFVVGSRADYEWCTQLIREQGIHPKDGYQLIFSPVFREIELEDLVNWILEDELDARFQVQLHKIVWDPDKRGV

SEQ ID NO: 34959 - protein, 222 aa, Turicibacter sanguinis
  REGION 1..222: note = tr|D4W838|D4W838_9FIRM 7-carboxy-7-deazaguanine synthase OS=Turicibacter sanguinis PC909 OX=702450 GN=queE; PE = 3 SV=1
MYQVIEKFISIDGEGPCAGQLAAFIRFKNCNLRCDWCDTCYSYDGSVEGENLSPLEIYHFVKENKVNHVTLTGGEPLIQPQIEVLIGILAADKELTIHIETNGSVNIQRFKKKFSKSNVVFILDYKLPNSLMQSRMDDENFKWVTKTDVYKFVIASQEDLKVAHEVIREQGLLERCLVYFSPVVDYINPSLIVDYMKDHQLNDVRLQLQLHKYIWPKEMRGV

SEQ ID NO: 34960 - protein, 222 aa, Turicibacter sanguinis
  REGION 1..222: note = tr|A0A174UPG4|A0A174UPG4_9FIRM 7-carboxy-7-deazaguanine synthase OS=Turicibacter sanguinis OX=154288 GN=queE PE=3 SV=1
MFNVIETFVSIDGEGPTSGELATFIRFSSCNLKCIWCDTTYSWDGTACITKMSTKEIYELIKKAGTKNVTLTGGEPLIQPNIEWLLDALAEDEALSIHVESNGSIDITGLKERYKNSNIHFILDYKCPTSKMSAQMCHQNLNVVDQQDVYKFVVAGYEDLHMALSIIKSYHLTKKCRVYLSPVTEFIEPSKIVEFMKEHQLNDVRLQLQLHKYIWPKEMRGV

SEQ ID NO: 34961 - protein, 222 aa, Turicibacter sp.
  REGION 1..222: note = tr|A0A109RMQ3|A0A109RMQ3_9FIRM 7-carboxy-7-deazaguanine synthase OS=Turicibacter sp. H121; OX = 1712675 GN=queE PE=3 SV=1
MFNVIETFVSIDGEGPTSGELATFIRFSSCNLKCIWCDTTYSWDGTACITKMSTKEIYELIKKAGTKNVTLTGGEPLIQPNIELLLDALAEDEALSIHVESNGSIDITGLKERYKNSNIHFILDYKCPTSKMSAQMCHQNLNVVDQQDVYKFVVAGYEDLHMALSIIKSYHLTKKCRVYLSPVTEFIEPSKIVEFMKEHQLNDVRLQLQLHKYIWPKEMRGV

SEQ ID NO: 34962 - protein, 224 aa, Turneriella parva
  REGION 1..224: note = tr|I4BC20|I4BC20_TURPD 7-carboxy-7-deazaguanine synthase OS=Turneriella parva (strain ATCC BAA-1111 / DSM 21527 / NCTC 11395 / H) OX=869212 GN=queE PE=3 SV=1
MDVTAKREDLKLTVNEIFYSIQGEGSYALHPCVFVRLTGCNLRCTWCDTTYSFYEGEPQTITQILQTVTGYAAKNVEITGGEPLLQKNVYPLMHALHESGHKVLLETSGSVKVNQVPQFVHTILDMKAPGSGEHKKNRYENLQLLKSSDDLKIVIANHEDFQFAEDLIREHKVEALLQNPVIIQPVFGELNLAEAGEWLKNSPLNLRLGMQLHKYIYEPTLRAV

SEQ ID NO: 34963 - protein, 208 aa, unidentified
  source 1..208: note = Tychonema bourrellyi
  REGION 1..208: note = tr|A0A2G4EZA8|A0A2G4EZA8_9CYAN 7-carboxy-7-deazaguanine synthase OS=Tychonema bourrellyi FEM_GT703 OX=2040638 GN=queE PE=3 SV=1
MSILQVKLPIHETFQSTVQGEGFWTGTLVDFIRLAGCPVGCPWCDTGYANGGKGLPIVPRSIAQLLAQLQSPRVVITGGEPFIHRDLPELVEALLAADKQVSIETSGAYWLDISPLAWITLSPKEHVNPKYPVKELFWTRSNEIKLVVSTGEEVEFYHNHLANNVNIPVFLQPEWNSKISVIPIILELLKQNHSYRLSLQTHKFIGVQ

SEQ ID NO: 34964 - protein, 219 aa, unidentified
  source 1..219: note = Tyzzerella sp.
  REGION 1..219: note = tr|A0A1Y4UDN3|A0A1Y4UDN3_9FIRM 7-carboxy-7-deazaguanine synthase OS=Tyzzerella sp. An114; OX = 1965545 GN=queE PE=3 SV=1
MKVVEKFVSINGESRRAGELAVFIRFKGCNLHCCYCDTKWANETDCDFEELTVEEILSYIISTNVKNVTLTGGEPLLQPEIGSLLKALSQYPEIRVEIETNGSVSIEPFCNDDYRPSFTMDYKLPESGCENDMCLENFCFLKNTDTVKFVCSSIDDLKKAKYIIEKYNLTKICAVYISPVFGKIEPADMVSYMIENNLNDIKLQIQMHKVIWDPNLKGV

SEQ ID NO: 34965 - protein, 217 aa, Uliginosibacterium sp.
  REGION 1..217: note = tr|A0A2N4XTX4|A0A2N4XTX4_9RHOO 7-carboxy-7-deazaguanine synthase OS=Uliginosibacterium sp. TH139 OX=2067453 GN=queE PE=3 SV=1
MAAAAPRLRISEIFHSLQGESTRVGLPTVFVRLTGCPLRCVWCDTEYAFTGGKMRELEDILAEVAGYGARHVCVTGGEPLAQKPCLTLLTALCDAGYSVSLETSGALDVSEVDARVSKIMDLKAPGSGEVDKNLWSNLAHITAQDEIKVVVADEADYQWTRAVLAEHGLTSRCTVLLSPVQGKLDPQDLAAWILRDRLTVRMQLQMHRIIWGERTGV

SEQ ID NO: 34966 - protein, 209 aa, Ulvibacter antarcticus
  REGION 1..209: note = tr|A0A3L9YRC2|A0A3L9YRC2_9FLAO 7-carboxy-7-deazaguanine synthase OS=Ulvibacter antarcticus OX=442714 GN=queE PE=3 SV=1
MKKDIKALVDKGEMLPLMEEFYTIQGEGFHKGTAAYFIRVGGCDVGCHWCDVKESWNAELHPPTDIDTIVNNAAKYSKTIVVTGGEPLTWNMDPLTNALKSKGMQLHIETSGAYKLSGTWDWICLSPKKIKLPTEEVYEFAHELKVIIFNKDDFKFAEEQAAKVNKDCILYLQPEWSKREKMIPLLVDYVMENPKWKVSLQTHKYLNIP

SEQ ID NO: 34967 - protein, 209 aa, Ulvibacter litoralis
  REGION 1..209: note = tr|A0A1G7BTY4|A0A1G7BTY4_9FLAO 7-carboxy-7-deazaguanine synthase OS=Ulvibacter litoralis; OX = 227084 GN=queE PE=3 SV=1
MQEDIKELVNKGEMLPLMEEFYTIQGEGFHKGTAAYFVRIGGCDVGCHWCDVKESWNATLHPPTHTNKIVDNAASYSNTVVVTGGEPLTWDMGPLTKQFKEKGMQVHIETSGAYKLSGTWDWICLSPKKIKLPQPEIYEVAHELKVIIFNKDDFRFAEEQAAKVNKDCILYLQPEWSNRDKMIPLMVDYVMKNPAWKVSLQTHKYLNIP

SEQ ID NO: 34968 - protein, 192 aa, unidentified
  source 1..192: note = Ulvibacter marinus
  REGION 1..192: note = tr|A0A5J4J8E2|A0A5J4J8E2_9FLAO 7-carboxy-7-deazaguanine synthase OS=Ulvibacter marinus; OX = 1397112 GN=queE PE=4 SV=1
MEEFYTIQGEGFHKGTAAYFIRVGGCDVGCHWCDVKESWNPDIHPPTSIEAIADNAEKYSKTIVITGGEPLTWDMGPLTSLLKRKGMKTHIETSGAYKLTGTWDWICLSPKKLKLPTKEVYDNAHELKVIIYNKDDFKFAEEQAAKVNDDCILYLQPEWSKRDKMIPEIVDYVMANPQWMVSLQTHKYLNIP

SEQ ID NO: 34969 - protein, 209 aa, Ulvibacter sp.
  REGION 1..209: note = tr|A0A167IDK9|A0A167IDK9_9FLAO 7-carboxy-7-deazaguanine synthase OS=Ulvibacter sp. LPB0005 OX=1763537 GN=queE PE=3 SV=1
MQKEIQDLVNAGEMLPLMEEFYTIQGEGFHKGTAAYFIRIGGCDVGCHWCDVKESWNADLHPPTKKDAIVANASAYSKTVVITGGEPLTWDMGPLTSALKEKGMQIHIETSGAYALTGTWDWICLSPKKIKLPQPEIYEVAHELKVIIFNKDDFRFAEEQAAKVNDNCILYLQPEWSNRDKMSPLIVDYVMQNPKWKVSLQTHKYLNIP

SEQ ID NO: 34970 - protein, 209 aa, Ulvibacter sp.
  REGION 1..209: note = tr|A0A5J4G0D0|A0A5J4G0D0_9FLAO 7-carboxy-7-deazaguanine synthase OS=Ulvibacter sp. KK4; OX = 2494560 GN=queE PE=4 SV=1
MKIEIQDKVDNGIMLPLMEEFYTIQGEGYHKGTAAYFIRVGGCDVGCHWCDVKESWNPKSHPPTAIESIVDNAVKHSKTIVITGGEPLMWDMNPLTTLLKSKGVDTHIETSGAYELSGTWDWICLSPKKRMLPTQKVYEQAHELKVIIYNKDDFRFAEEQAAKVNKKCKLFLQPEWSKRDTVIPQIVDYVMANPQWVVSLQTHKYLNIP

SEQ ID NO: 34971 - protein, 217 aa, Umboniibacter marinipuniceus
  REGION 1..217: note = tr|A0A3L9ZXR1|A0A3L9ZXR1_9GAMM 7-carboxy-7-deazaguanine synthase OS=Umboniibacter marinipuniceus OX=569599 GN=queE PE=3 SV=1
MYTVKEMFYTLQGEGAHTGRAAVFLRFTGCNLWSGLEKHRAEAICSFCDTDFVGTDGVNGGKFKTASELAEAVAKLFPGEKNRFVVCTGGEPLLQLDNELVSALRERNFEVAVESNGTIRPPSGGVDWLCISPKGTAEVVVTHCDELKLVFPQADAMPDRFAGIKAQLRYLTPMADPHAGMDEVIYRNTTTQQTIQYCLDHPQWQLNLQSHKVINIA

SEQ ID NO: 34972 - protein, 212 aa, unidentified
  source 1..212: note = Alphaproteobacteria bacterium
  REGION 1..212: note = tr|A0A212KJV4|A0A212KJV4_9PROT 7-carboxy-7-deazaguanine synthase OS=uncultured Alphaproteobacteria bacterium OX=91750 GN=queE PE=3 SV=1
MYRVKEIFHTLQGEGAHAGRAAVFCRFAGCNLWSGREKDRERAVCRFCDTDFLGTDGPGGGDFATPEALAAAVAACWEDSSDASGAPYVVCTGGEPLLQLDAPLIAALHAAGFAVAVETNGSRAAPPGLDWICVSPKAGAPLVQTAGDEFKLVWPQPAFDPQALAALAFDHFFLQPMDGPDAAANLSACVAYCRAHPRWRLSLQTHKLIGIP

SEQ ID NO: 34973 - protein, 208 aa, Avibacterium sp.
  REGION 1..208: note = tr|A0A486XF01|A0A486XF01_9PAST 7-carboxy-7-deazaguanine synthase OS=uncultured Avibacterium sp. OX=1936169 GN=queE PE=3 SV=1
MAELISNPSYSIVEIFQSLQGEGANTGMPSIFIRFGKCNLTCPWCDTPYNDFEPWSLQQILAKVRSFSAKNIIITGGEPTIQPQLSLLLDQLKAEGYFLAIETNGLKPVPAQIDYIATSPKREYAQKYLQRCIAQANEVRIVADADVQEFCALIESQIQAQHYYLSPCESNGEMNLLHTITQLGLLNQRPNKPKWQLSIQTHKLIGIE

SEQ ID NO: 34974 - protein, 219 aa, unidentified
  source 1..219: note = Unknown
  REGION 1..219: note = tr|L7VWA3|L7VWA3_9BACT 7-carboxy-7-deazaguanine synthase OS=uncultured bacterium A1Q1_fos_1807 OX=1256552; GN = queE PE=3 SV=1
MGYTVKELFYTLQGEGSHTGRAAVFCRFAGCNLWSGRESDRPSATCRFCDTDFIGTDGPGGGKFASADALADAVLACWDTHARSHPERRFVVLTGGEPLLQVDAALCRSLHARGFYLAIETNGTQPLPIGPPADRIDWVCVSPKAGSTLVLSAGDELKLVFPQPGAEPERFADLPFSAFFLQPMDGPLRSEHTTSAIAYCQTHPRWRLSLQTHKLLGIP

SEQ ID NO: 34975 - protein, 213 aa, unidentified
  source 1..213: note = Unknown
  REGION 1..213: note = tr|K2B1L4|K2B1L4_9BACT 7-carboxy-7-deazaguanine synthase OS=uncultured bacterium OX=77133 GN=queE PE=3 SV=1
MSRLRITEIFFSLQGETRTVGLPTVFIRLTGCPLRCTYCDTAYAFHGGTWYEIDSILQQVAHYRTRYVTVTGGEPLAQKACLELLTGLCDANYEVSLETSGALDVSAVDPRVIKVIDLKTPGSGEVEKNNLSNMTCLLPHDQIKFVICHRTDYDWAKDMVQQYSLTEQCQVLFSPSYIEQSAVELADWILADQLPVRLQIQLHKFLWGDVQGR

SEQ ID NO: 34976 - protein, 181 aa, Bacteroides sp.
  REGION 1..181: note = tr|A0A1C5LIK9|A0A1C5LIK9_9BACE 7-carboxy-7-deazaguanine synthase OS=uncultured Bacteroides sp. OX=162156 GN=queE PE=3 SV=1
MRKINEIFYSLQGEGFHTGTPAVFVRFSGCNLKCSFCDTHHEDGRMMSDDEIIAEVCKYPCRMVILTGGEPGLWIDGKLTAALHAAGKYVAIETNGTCILPEDIDWVTCSPKEGAILKVSRIDEVKVVYVGQDVYEYLKLPARHFFLQPCSGQNTNDVISYIKEHPQWRLSLQTHKLIDIP

SEQ ID NO: 34977 - protein, 181 aa, Bacteroides sp.
  REGION 1..181: note = tr|A0A1C5NSP4|A0A1C5NSP4_9BACE 7-carboxy-7-deazaguanine synthase OS=uncultured Bacteroides sp. OX=162156 GN=queE PE=3 SV=1
MKKINEIFYSLQGEGFYVGTPAVFVRFSGCNLKCDFCDTRHEKGTFLSDEEIVEEVCRYPCRMVILTGGEPGLWIDEPLIEALHRAGKYVCVETNGTCVLPSSVDWVTCSPKKSGSLHVARIDEVKVVFVGQDVEPYLQLKASAYFLQPCSGKNTTEVVEYIKQHPVWRLSLQTHKLIDIP

SEQ ID NO: 34978 - protein, 216 aa, Blautia sp.
  REGION 1..216: note = tr|A0A1C6JH71|A0A1C6JH71_9FIRM 7-carboxy-7-deazaguanine synthase OS=uncultured Blautia sp. OX=765821 GN=queE PE=3 SV=1
MKVVEKFTSINGEGTRAGELAVFIRFKGCNLRCSYCDTMWANEPECPYKEETPEEILNYVLGTGIHNVTLTGGEPLLQKDIRDLIHLLLKAGLQVEIETNGAVDLAAFCEERPVFTMDYKLPSSGCEDHMITENMELLEKNDTVKFVSGSQEDLLKALELIRTYDLTNRCHVYLSPVFGSIEPVQIVEFMLKHRLNGVRLQIQMHKVIWDPDKRGV

SEQ ID NO: 34979 - protein, 222 aa, Blautia sp.
  REGION 1..222: note = tr|A0A1C5WDL2|A0A1C5WDL2_9FIRM 7-carboxy-7-deazaguanine synthase OS=uncultured Blautia sp. OX=765821 GN=queE PE=3 SV=1
MSTYQVVEKFVSINGEGRRAGELAAFIRFKGCNLQCSYCDTSWANEPGCESERLTEEEILSWIRETGVKNVTLTGGEPLLRKGMEELIEAILEDPFRRVEIETNGSVDLKPYHILKKRPSFTMDYKAPDSGMEKEMLLSNLELLGSEDTLKFVVSSRRDMEKALEILEKYRLVGKTAVYFSPVFGRIQPVEIVDFLMEKKLNDVKLQIQLHKVIWDPQKRGV

SEQ ID NO: 34980 - protein, 172 aa, Citrobacter sp.
  REGION 1..172: note = tr|A0A212IL51|A0A212IL51_9ENTR 7-carboxy-7-deazaguanine synthase OS=uncultured Citrobacter sp. OX=200446 GN=queE PE=3 SV=1
MGHDTLAVKTKESDKWGAASSEDLLAVISRQGYTARHVVITGGEPCIHDLMPLTDLLEKNGFSCQIETSGTHEVRCTPNTWVTVSPKVNMRGGYDVLSQALERANEIKHPVGRVRDIEALDELLATLSDDKPRIIALQPISQKEDATRLCIDTCIARNWRLSMQTHKYLNIA

SEQ ID NO: 34981 - protein, 172 aa, Citrobacter sp.
  REGION 1..172: note = tr|A0A212I879|A0A212I879_9ENTR 7-carboxy-7-deazaguanine synthase OS=uncultured Citrobacter sp. OX=200446 GN=queE PE=3 SV=1
MGHDTLAAKTKESDKWGAASSEDLLAVISRQGYTARHVVITGGEPCIHDLMPLTDLLEKNGFSCQIETSGTHEVRCTPNTWVTVSPKVNMRGGYDVLSQALERANEIKHPVGRVRDIEALDELLATLSDDKPRIIALQPISQKEDATRLCIDTCIARNWRLSMQTHKYLNIA

SEQ ID NO: 34982 - protein, 216 aa, Clostridium sp.
  REGION 1..216: note = tr|A0A1C5TKY0|A0A1C5TKY0_9CLOT 7-carboxy-7-deazaguanine synthase OS=uncultured Clostridium sp. OX=59620 GN=queE PE=3 SV=1
MKVVEKFTSINGEGVRAGELAVFVRFKGCNLRCSYCDTMWANEPECLYKEETPEEILNYVLGTGIHNVTLTGGEPLLQKDIRDLIHLLLQAGLRVEIETNGAVDLAAFCEERPVFTMDYKLPSSGCEEYMITKNMELLGKDDTVKFVSGSQEDLLKALELIRSYDLTNRCHVYLSPVFGAIEPVQIVEFMLKHRLNGVRLQIQMHKVIWDPDERGV

SEQ ID NO: 34983 - protein, 226 aa, Clostridium sp.
  REGION 1..226: note = tr|A0A1C5UBC6|A0A1C5UBC6_9CLOT 7-carboxy-7-deazaguanine synthase OS=uncultured Clostridium sp. OX=59620 GN=queE PE=3 SV=1
MKVIEIFDSIDGEGIRTGQCATFIRLAGCNLRCSYCDTVYSLFGEETPCEYTEMTVDEIISKVNMTYKRVTLTGGEPLVHTDSAELVSKLTEIGCDVNIETNGAVDIVDFLGKVPKSDNLFFTIDYKLPSSGMTDKMIWNNFINLRPCDVIKFVIGSDEDMNLTIDIVKKLKQVYTEMPHIYLGAVYGMYDAQKLVNIMLKEPVLCDATFQIQLHKVIWDPEERGV

SEQ ID NO: 34984 - protein, 222 aa, Coprococcus sp.
  REGION 1..222: note = tr|A0A1C5RZA9|A0A1C5RZA9_9FIRM 7-carboxy-7-deazaguanine synthase OS=uncultured Coprococcus sp. OX=458253 GN=queE PE=3 SV=1
MAKFKVAERFVSINGESVKAGELAVFIRFTGCNLNCSYCDTKWANEADAPYEELTDEEIYDYIKRTGVRNVTLTGGEPLIQKDIDKLLLMLAMDEELQVEVETNGSVDIAEFKALTDRVAFTLDYKLLGSGMESNMCFSNYNYIDKKDAVKFVSGSIKDLETARDIIHEWALDIKSNVYISPVYGKINPEDIVDFMIENEMNGVKLQLQLHKYIWDPEMRGV

SEQ ID NO: 34985 - protein, 218 aa, unidentified
  source 1..218: note = Unknown
  REGION 1..218: note = tr|H5SJE1|H5SJE1_9DELT 7-carboxy-7-deazaguanine synthase OS=uncultured delta proteobacterium OX=34034; GN = queE PE=3 SV=1
MAKEDTLVVHEIYASIQGESTWAGWPCTFVRTTGCNLRCSYCDTPQAFYGGTRMRRSEVLSKALAFETPLVEVTGGEPLLQPGVIPLLTELADAGRTVLLETSGERDISRVDPRVHRIMDLKTPDSGEVHRNRWENLPLLGPRDEVKFVLCSRRDYEWMREVIRTHQLDRRVRAVLASTAFGRLHPRELVAWVLEDKLPVRIQLQIHKYIWSPDAQGV

SEQ ID NO: 34986 - protein, 221 aa, unidentified
  source 1..221: note = Desulfobacteraceae bacterium
  REGION 1..221: note = tr|A0A484HIF6|A0A484HIF6_9DELT 7-carboxy-7-deazaguanine synthase OS=uncultured Desulfobacteraceae bacterium OX=218296 GN=queE PE=3 SV=1
MRYQINDIHPCVQGEGVHAGVPMVLIRLQGCGVGCPWCDSKETWGFSEKNRVGLADALGTNPRWAGAGVGETLAFVRSRPPKIRWALITGGEPAGQDLAPLAKGLKEDGYRTAIETSGTARGHLGAGFDWICVSPKFDMPGGGEPLPECLESAHEIKHVAGKPADIDRLDRALDGLGLREGVVISLQPESLGRKATELCVKTVMERGWRLSLQTHKFINQR

SEQ ID NO: 34987 - protein, 219 aa, Desulfobacterium sp.
  REGION 1..219: note = tr|E1YHE5|E1YHE5_9DELT 7-carboxy-7-deazaguanine synthase OS=uncultured Desulfobacterium sp. OX=201089; GN = queE PE=3 SV=1
MRSENMTLLINEIFYSIQGESLYSGLPCAFIRLAGCNLRCAYCDTKYAYNEGSEIETDHLVKKISEFGCPLVEITGGEPLIQEETPVLIEKLLDNKFSVLLETNGSLDISYIDKRCIKIIDIKCPTSGESEKNNLANINRLNQKDQIKFVIGNRVDYEFAKDIVKQIPKTFFRENILFSPIYNKLELSELARWMLKDKLTVRFHLQLHKIIWPDTIRGV

SEQ ID NO: 34988 - protein, 215 aa, Desulfobacterium sp.
  REGION 1..215: note = tr|A0A445MUQ5|A0A445MUQ5_9DELT 7-carboxy-7-deazaguanine synthase OS=uncultured Desulfobacterium sp. OX=201089 GN=queE PE=3 SV=1
MSLLVNEIFYSIQGESSYAGRPCVFIRLTGCNLRCLYCDTRYAYSEGFLMGAEEILERVSSYECPLVEITGGEPLLQDETSLLTTRLLDKGHMVLLETNGSLDIGGTDERCIRIMDIKCPSSGEQKSFLPENLGLLMGKDEIKFVIGDRQDYEFARKMLNPIRRDCPATICVNFSAVFEKMDARHLAEWILGDHLDVRINVQIQKVLWGPEQRGV

SEQ ID NO: 34989 - protein, 212 aa, Desulfovibrio sp.
  REGION 1..212: note = tr|A0A212IZN0|A0A212IZN0_9DELT 7-carboxy-7-deazaguanine synthase OS=uncultured Desulfovibrio sp. OX=167968 GN=queE PE=3 SV=1
MSFAVKEIFYTLQGEGFHAGRPAIFCRFSGCNLWSGREEDRKFAKCPFCDTDFLGAEKSGGEFKNAATLAQAICSFFPSYTHPGYRPYVVFTGGEPALQLTEELLQELGRCGVETGIETNGTLPLPKGLDWITVSPKAGTKLVVTSGSELKLVWPQEGISVQDFEQLDFKHFFLQPRDYAGQSQATEDAVRICQDRPLWKLSLQTHKFIGIA

SEQ ID NO: 34990 - protein, 193 aa, Dysgonomonas sp.
  REGION 1..193: note = tr|A0A212JLF1|A0A212JLF1_9BACT 7-carboxy-7-deazaguanine synthase OS=uncultured Dysgonomonas sp. OX=206096 GN=queE PE=3 SV=1
MKLIVNEIFYSLQGEGGRTGEASVFIRLTKCNLVCSFCDTDFADGDEMSVDEILEAISVYPCKWIIWTGGEPTIQLKDEHLAVFREHGYKQAIETNGTRRVPSLIDYITCSPKQDYETIKNRISFVHEIRMPIQAGDPVPDISVFPKADNYFLSPVFDADKINLENVAYCVELIKQHPQWRLSLQTHKLIHIE

SEQ ID NO: 34991 - protein, 193 aa, Dysgonomonas sp.; identical to SEQ ID NO: 29810
  REGION 1..193: note = tr|A0A212JSQ8|A0A212JSQ8_9BACT 7-carboxy-7-deazaguanine synthase OS=uncultured Dysgonomonas sp. OX=206096 GN=queE PE=3 SV=1

SEQ ID NO: 34992 - protein, 222 aa, Eubacterium sp.; identical to SEQ ID NO: 27753
  REGION 1..222: note = tr|A0A1C5ZTK3|A0A1C5ZTK3_9FIRM 7-carboxy-7-deazaguanine synthase OS=uncultured Eubacterium sp. OX=165185 GN=queE PE=3 SV=1

SEQ ID NO: 34993 - protein, 221 aa, Eubacterium sp.; identical to SEQ ID NO: 27742
  REGION 1..221: note = tr|A0A1C6F8X9|A0A1C6F8X9_9FIRM 7-carboxy-7-deazaguanine synthase OS=uncultured Eubacterium sp. OX=165185 GN=queE PE=3 SV=1

SEQ ID NO: 34994 - protein, 65 aa, unidentified
  source 1..65: note = Gammaproteobacteria bacterium
  REGION 1..65: note = tr|A0A5E5PSZ5|A0A5E5PSZ5_9GAMM Queuosine Biosynthesis QueE Radical SAM (Fragment) OS=uncultured Gammaproteobacteria bacterium OX=86473 GN=BSPCLSOX_1610; PE = 4 SV=1
MNTELNINEIFYSLQGEAREVGLPTVFVRLTGCPLRCSYCDTEYAFKGNNLLSIDVILTEIKKYN

SEQ ID NO: 34995 - protein, 212 aa, unidentified
  source 1..212: note = Gammaproteobacteria bacterium
  REGION 1..212: note = tr|A0A5E6NDT9|A0A5E6NDT9_9GAMM 7-carboxy-7-deazaguanine synthase OS=uncultured Gammaproteobacteria bacterium OX=86473 GN=queE PE=3 SV=1
MNTELNINEIFYSLQGEAREVGLPTVFVRLTGCPLRCSYCDTEYAFKGNNLLSIDAVLTEIKKYNTKFVCVTGGEPLAQINCHILLDRLVKENYQVSLETSGSIDIADINPGVSIVMDVKTPSSNESDKNLYTNIEKLELKDQLKFVIGSKADFDWSVALLSKHPTPAEVLFSPVFEAVKPMQLAQWILDGQLNVRLQVQLHKLLWGDEKGK

SEQ ID NO: 34996 - protein, 220 aa, Megasphaera sp.
  REGION 1..220: note = tr|A0A1C5MAL0|A0A1C5MAL0_9FIRM 7-carboxy-7-deazaguanine synthase OS=uncultured Megasphaera sp. OX=165188 GN=queE PE=3 SV=1
MKYKFPVVEIFDSIEGEGKRTGYLSTFIRFAGCNLRCSYCDTAYALSADDAAAEYTADELAQIVLDKPWSRATLTGGEPMLQPLQELTERLCRGGCEINIETNGAVLLPSRRPEGLFYTMDWKSPSSGMSEAMKLENLQERLTPADVVKFVVATKDDLDDMAYTISHLLPASRPLLYVSPVWGEIEPAALVDFVKEKGLDDVCVQVQLHKIIYDPEARGV

SEQ ID NO: 34997 - protein, 230 aa, unidentified; identical to SEQ ID NO: 28231
  source 1..230: note = Unknown
  REGION 1..230: note = tr|H5SJQ6|H5SJQ6_9BACT 7-carboxy-7-deazaguanine synthase OS=uncultured planctomycete OX=120965 GN=queE; PE = 3 SV=1

SEQ ID NO: 34998 - protein, 225 aa, Prochlorococcus marinus
  REGION 1..225: note = tr|Q1PJG1|Q1PJG1_PROMR 7-carboxy-7-deazaguanine synthase OS=uncultured Prochlorococcus marinus clone HOT0M-3E5 OX=379388 GN=queE PE=3 SV=1
MKMTNFLPLVEQFHSLQGEGYHAGKSAFFIRLAGCKVGCSWCDTKNSWDEKKHPSISIEKIIDRIKIARKKGASFCVITGGEPLQHNLDNFCKAIKKMTMGEEQKPMKIHIETSGVNSISGSYDWITLSPKRHSPPKNYFLKNCNEIKIIINEIEDIEFAIQIKNETLKQYQISKSEDGLKKEDKIFYLQPAWNNANGFSLAIDFVKNNPDWKLSLQTHKYLKIN

SEQ ID NO: 34999 - protein, 222 aa, Roseburia sp.
  REGION 1..222: note = tr|A0A1C5VYP3|A0A1C5VYP3_9FIRM 7-carboxy-7-deazaguanine synthase OS=uncultured Roseburia sp. OX=512314 GN=queE PE=3 SV=1
MANYKVVEIFSSINGEGKRAGQLAVFIRMQGCNLNCRYCDTAWANEEDCRYHWTSTEEILELIHSMGIKNVTITGGEPLLQKDIGVLLENLAEEKELHVEIETNGSVDLKPFLAMENRPSFTMDYKLPGSEMEAHMLTENFSCLDQRDTVKFVVAGWEDLVRAKAVIEQFDLTKQCSVYLSPVYGEIDLEEIVYFMKRNCMNGVTMQLQMHKIIWDPQLRGV

SEQ ID NO: 35000 - protein, 221 aa, Ruminococcus sp.
  REGION 1..221: note = tr|A0A1C6DMM9|A0A1C6DMM9_9FIRM 7-carboxy-7-deazaguanine synthase OS=uncultured Ruminococcus sp. OX=165186 GN=queE PE=3 SV=1
MYRYNIAEKFVSINGEGRKAGQPAVFIRFKGCNLNCSYCDTFWANSDNCPAEMMTANDILVYIQKTGISNVTLTGGEPLIQTGIYELIDLLCQNGLDVEIETNGSEDISPFRQMKIMPSFTLDYKLPSSGMERFMEMKNYDFLTKNDTIKFVCGSNEDLQKALEIIEKKHLTKKCAVYLSPVFGKIEPREIVDFMLENKMNGINFQLQLHKFIWNPDKRGV

SEQ ID NO: 35001 - protein, 235 aa, Ruminococcus sp.
  REGION 1..235: note = tr|A0A1C6A9F6|A0A1C6A9F6_9FIRM 7-carboxy-7-deazaguanine synthase OS=uncultured Ruminococcus sp. OX=165186 GN=queE PE=3 SV=1
MRPPTTAQFTKLVMIMIFKVAEKFVSINGEGTKAGQPAVFIRLAGCNLRCSYCDTMWANGSDTPFEPMTEDEIAAYIADSGIKNVTLTGGEPLMAENVRVLLERLSHEDIAVEIETNGSADISVCDGISPRPSVTLDYKLPSSGMEKHMLMSNYDRLTKYDTVKFVAGSHDDLEKALEVIKKYDLTNKCHVYFSPVFGKIEPVEMVDFILKHKLNGVNFQLQLHKFIWDPNKRGV

SEQ ID NO: 35002 - protein, 210 aa, Sphingopyxis sp.
  REGION 1..210: note = tr|A0A1Y5Q0B6|A0A1Y5Q0B6_9SPHN 7-carboxy-7-deazaguanine synthase OS=uncultured Sphingopyxis sp. OX=310581 GN=queE PE=3 SV=1
MVYAVKEIFLTLQGEGAQAGRRAVFCRFAGCNLWTGREKDRAKAVCQFCDTDFVGTDGTLGGKYRSAAALADVIAESWGEGGEDRYVVLTGGEPMLQVDDALVGALHDRGFTVAIESNGTLPIPRSIDWICVSPKAGSELVQTSGDELKLVWPQPGSDVARLAALDFKHLLVQPLDDPHAAANVQACIDLVMADPRWRLSLQTHKHLGLR

SEQ ID NO: 35003 - protein, 241 aa, Sporomusa sp.; identical to SEQ ID NO: 34390
  REGION 1..241: note = tr|A0A212LR58|A0A212LR58_9FIRM 7-carboxy-7-deazaguanine synthase OS=uncultured Sporomusa sp. OX=307249 GN=queE PE=3 SV=1

SEQ ID NO: 35004 - protein, 229 aa, Stenotrophomonas sp.
  REGION 1..229: note = tr|A0A1Y5PZS7|A0A1Y5PZS7_9GAMM 7-carboxy-7-deazaguanine synthase OS=uncultured Stenotrophomonas sp. OX=165438 GN=queE PE=3 SV=1
MNHPAASVPSEIVQSPLPRLKITEIFLSLQGEADTAGWPTVFVRLTGCPLRCSYCDTEYAFHGGQWRDIDDIVAEVLGHSVRHVCVTGGEPLAQKRCLVLLRQLCDAGLDVSLETSGALDIGGVDPRVSRVVDLKTPDSGEMGRNRLQNLPLLTARDQLKFVLCSRSDYEWARDMVATHRLHERCMVLFSPSKSELAPRELADWIVADRLPVRFQMQLHKLLWNDEPGR

SEQ ID NO: 35005 - protein, 212 aa, unidentified
  source 1..212: note = Unknown
  REGION 1..212: note = tr|A0A483A821|A0A483A821_9GAMM 7-carboxy-7-deazaguanine synthase OS=uncultured SUP05 cluster bacterium OX=655186 GN=queE PE=3 SV=1
MTTDLNITEIFYSLQGEAREVGLPTTFIRLTGCPLRCSYCDTEYAFKGNNLVSINEIIGEVEQYNTRYICVTGGEPLAQINCHILLDTLVKNDYLVSLETSGSIDISEINPDVSIVMDVKTPSSNESSQNLYGNIEKLQEKDQLKFVIGSRTDFDWSVDILGEYSTNAGVLFSPVFDRITPTQLADWIIEAQLNVRMQVQMHKLLWGDEKGR

SEQ ID NO: 35006 - protein, 209 aa, unidentified
  source 1..209: note = Unknown
  REGION 1..209: note = tr|A0A482ZQV0|A0A482ZQV0_9GAMM 7-carboxy-7-deazaguanine synthase OS=uncultured SUP05 cluster bacterium OX=655186 GN=queE PE=3 SV=1
MLNINEIFYSLQGEAREVGLPTVFIRLTGCPLRCTYCDTEYAFKGNNPLSIEAILTEIGQYNTQYVCVTGGEPLAQINCHILLDALIKADYQVSLETSGSIDIAEVNPAVSVVMDVKTPSSNEADKNLYQNIALLQSKDQLKFVIGSKADFDWSVDILNQYPTTAGVLFSPVFNAVEPVQLADWILEKQLNVRLQVQMHKLLWGDEKGK

SEQ ID NO: 35007 - protein, 215 aa, Thiohalocapsa sp.; identical to SEQ ID NO: 29131
  REGION 1..215: note = tr|V4JM15|V4JM15_9GAMM 7-carboxy-7-deazaguanine synthase OS=uncultured Thiohalocapsa sp. PB-PSB1; OX = 1385625 GN=queE PE=3 SV=1

SEQ ID NO: 35008 - protein, 211 aa, Undibacterium parvum
  REGION 1..211: note = tr|A0A3S9HP27|A0A3S9HP27_9BURK 7-carboxy-7-deazaguanine synthase OS=Undibacterium parvum; OX = 401471 GN=queE PE=3 SV=1
MTYSIKESFYTLQGEGNHAGRPAVFCRFTGCNLWSGREEDRSSAVCQFCDTDFVGVNGEGGGKFKTALALAERINSLWPTSYPQTKYVVFTGGEPLLQLDANLIKAMHQFGFEIAIETNGTLPVPEGVDWVCVSPKMGSKLVVLKGSELKVVIPQLGQPMSEYASLDFEHFFVQAMDGPLQADNLRLAIDYCKAHPQWKLSVQTHKLLQIP

SEQ ID NO: 35009 - protein, 211 aa, Undibacterium pigrum
  REGION 1..211: note = tr|A0A318JIM2|A0A318JIM2_9BURK 7-carboxy-7-deazaguanine synthase OS=Undibacterium pigrum; OX = 401470 GN=queE PE=3 SV=1
MTYSVKEIFYTLQGEGNHAGRPAVFCRFSGCNLWSGREEDRATAVCQFCDTDFVGTNGEGGGKFKQAEALAATINALWPVSYTASKYVVFTGGEPLLQLDAALIEAMHAVGFEIAIETNGTLPVPEGVDWICVSPKMGSELVVRKGSELKVVIPQFGQDMAAYANLDFEHYFVQAMDGPLRDDNLRLAIEFCKQHPQWKLSLQTHKLLQIP

SEQ ID NO: 35010 - protein, 211 aa, Undibacterium sp.
  REGION 1..211: note = tr|A0A3S0I0M3|A0A3S0I0M3_9BURK 7-carboxy-7-deazaguanine synthase OS=Undibacterium sp. S11R28 OX=2495591 GN=queE PE=3 SV=1
MTYSIKEIFYTLQGEGNHAGRPAVFCRFSGCNLWSGREEDRSSAICQFCDTDFVGIDGEGGGKFKTAAALAERINSLWPLSYPDSKYVVFTGGEPLLQLDTELIHAMHQVGFEIAIETNGTLPVPEGVDWICVSPKMGSKLVVLKGSELKVVIPQLGQSMSDYEALDFEHYFVQAMDGPKQDENLRLAIAYCKANPKWKLSVQTHKLLQIP

SEQ ID NO: 35011 - protein, 209 aa, unidentified
  source 1..209: note = Unknown
  REGION 1..209: note = tr|A6EMG7|A6EMG7_9BACT 7-carboxy-7-deazaguanine synthase OS=unidentified eubacterium SCB49 OX=50743; GN = queE PE=3 SV=1
MQKELKEQVDKGVILPLMEEFYTIQGEGYYKGTAAYFIRIGGCDVGCHWCDVKESWNPDIHPPTSIETIADNAAKYSKTIVITGGEPLMWDMNPLTELLKSKGVNTHIETSGAYSLSGTWDWICLSPKKMKLPTPEVYAAAHELKMIIYNKDDFRFAEEQASKVNADCKLFLQPEWSKRDKMVPEIVDYVMQNPKWVVSLQTHKYLNIP

SEQ ID NO: 35012 - protein, 242 aa, Ureibacillus terrenus
  REGION 1..242: note = tr|A0A540UX12|A0A540UX12_9BACL 7-carboxy-7-deazaguanine synthase OS=Ureibacillus terrenus; OX = 118246 GN=queE PE=3 SV=1
MSKIPVIEIFGPTIQGEGMVIGQKTMFVRTAGCDYSCSWCDSSFTWDGSGKDLIRQMTPEEIWSELKRLGGNGFSFVTISGGNPALIRNIGELVRILKDNRMKICVETQGSRWQDWLYDIDQLTISPKPPSSGMKTDFAALSEMLDKLKARNGSGHISLKVVVFNDEDYQFAKEVHRRLPAIPFYLQVGNDDTTSEDREKLVRHLLGKYEELIRKAMGDEELKDVRVLPQLHTLVWGNKRGV

SEQ ID NO: 35013 - protein, 242 aa, Ureibacillus thermophilus
  REGION 1..242: note = tr|A0A4P6UX91|A0A4P6UX91_9BACL 7-carboxy-7-deazaguanine synthase OS=Ureibacillus thermophilus OX=367743 GN=queE PE=3 SV=1
MSKIPVMEIFGPTIQGEGMVIGQKTMFVRTAGCDYSCEWCDSAFTWDGSGKELIRQMTAEEIWTELKRLGGDGFSFVTISGGNPALIRNLEGLVRILKENGIQIGVETQGSRWQDWLYDVNQVTISPKPPSSGMKTDFTVLTEIIDKLNARNGNQHISLKVVVFDEEDYEYAKKVHLRYPTIPFFLQVGNDDTTTKDQTKLVSHLLKKYERLINKVMADEELQNVKVLPQLHTLVWGNKRGV

SEQ ID NO: 35014 - protein, 210 aa, Uruburuella suis
  REGION 1..210: note = tr|A0A4R2MY60|A0A4R2MY60_9NEIS 7-carboxy-7-deazaguanine synthase OS=Uruburuella suis; OX = 252130 GN=queE PE=3 SV=1
MQTIHPENPEFRIVEIFESLQGEGYNTGMSAVFIRLGKCNLACAWCDTDYLKFGMMRLSDILSRLQTYAARNIIITGGEPTIQPHLSVLLDALKAQGYRLCIETNGLKPAPVQIDYVAASPKACYAEKYRQQCIEAADEVRIVADGDVLAFCAEMEQKIRAAHYYLSPCEIDGQMNIYDTIRQIGLLNARADAQVHWQLSVQTHKWAGIE

SEQ ID NO: 35015 - protein, 223 aa, unidentified
  source 1..223: note = Vampirococcus sp.
  REGION 1..223: note = tr|A0A410P2Z0|A0A410P2Z0_9BACT 7-carboxy-7-deazaguanine synthase OS=Vampirococcus sp. LiM; OX = 1930593 GN=queE PE=3 SV=1
MKAKIAEIFESIQGEGLYTGERQVFIRFYGCNLSCSFCDTPLTHYREYTAESLRRQIAAYDGCHSISLTGGEPLVQAEFLVSFLPLLRQDRPKIYLETNGTLWREFSLVRDNVDIVAMDIKLPSSGGQKPFWDEHKKFLELAAAKDAFVKIVVGLSTQAQDIVASSVILASFSGRIPVVLQPVWQDMGPNVLEKMEAFKRLLAERGVNSVHILSQAHKLAGVK

SEQ ID NO: 35016 - protein, 211 aa, unidentified
  source 1..211: note = Variibacter gotjawalensis
  REGION 1..211: note = tr|A0A0S3PW79|A0A0S3PW79_9BRAD 7-carboxy-7-deazaguanine synthase OS=Variibacter gotjawalensis OX=1333996 GN=queE PE=3 SV=1
MAKFAVKEIFLTLQGEGTHAGRAAVFCRFAGCNLWSGREQDRASAECTFCDTDFVGTDGTKGGRYADADALADAIEAEWTGGSGNRFCVLTGGEPLLQVSEALTAALHRRGFEIAVETNGTVPRPEGIDWMCVSPKAATELAITAGDELKLVYPQREAPPERFADLPFANFLLQPMDGPDVIENTRAAIAYCLKHPQWRLSAQTHKHLGIR

SEQ ID NO: 35017 - protein, 212 aa, Variovorax boronicumulans
  REGION 1..212: note = tr|A0A1E7U2E2|A0A1E7U2E2_9BURK 7-carboxy-7-deazaguanine synthase OS=Variovorax boronicumulans OX=436515 GN=queE PE=3 SV=1
MTYSVKEIFYTLQGEGGQAGMPAVFCRFAGCNLWTGREEDRDTAVCRFCDTDFVGTDGTLGGKFKSADQLADTIAAQWPAGDTAHRLVVLTGGEPLLQVDAALVDALHARHFRIAVESNGTVAAPAGIDWLCISPKAGAPWVQQRGQELKLVWPQVGIDLDAMARTGEFMHRFLQPMDGPDRLANTELCIAECMKQPVWRLSVQTHKITGIR

SEQ ID NO: 35018 - protein, 212 aa, Variovorax boronicumulans
  REGION 1..212: note = tr|A0A250DFX3|A0A250DFX3_9BURK 7-carboxy-7-deazaguanine synthase OS=Variovorax boronicumulans OX=436515 GN=queE PE=3 SV=1
MTYSVKEIFYTLQGEGGQAGMPAVFCRFAGCNLWTGREEDRDTAVCRFCDTDFVGTDGTLGGKFKSADQLADTIAAQWPTGDTTHRLVVLTGGEPLLQVDAALVDALHARHFRIAVESNGTVAAPAGIDWLCISPKAGAPWVQQRGQELKLVWPQAGIDLDAMARTGEFTHRFLQPMDGPDRLANTELCIAECMKQPVWRLSVQTHKITGIR

SEQ ID NO: 35019 - protein, 212 aa, unidentified
  source 1..212: note = Variovorax gossypii
  REGION 1..212: note = tr|A0A3S0H039|A0A3S0H039_9BURK 7-carboxy-7-deazaguanine synthase OS=Variovorax gossypii; OX = 1679495 GN=queE PE=3 SV=1
MTYSVKEIFYTLQGEGGQAGMPAVFCRFAGCNLWTGREEDRASAICRFCDTDFVGTDGTLGGKFKTADQLADTIAAQWPAADADHRLVVLTGGEPLLQVDAALVDALHARRFRIAVESNGTVEAPEGIDWLCISPKAGAPWVQQRGQELKLVWPQAEFDLDTMARTGEFTHRFLQPMDGPDRVANTELCIAECMKRPAWRLSVQTHKITGIR

SEQ ID NO: 35020 - protein, 212 aa, unidentified
  source 1..212: note = Variovorax guangxiensis
  REGION 1..212: note = tr|A0A3S0ZRV4|A0A3S0ZRV4_9BURK 7-carboxy-7-deazaguanine synthase OS=Variovorax guangxiensis OX=1775474 GN=queE PE=3 SV=1
MTYSVKEIFYTLQGEGGQAGMPAVFCRFAGCNLWTGREEDRASAICRFCDTDFVGTDGTLGGKFKTADLLADTIAAQWPATDADHRLVVLTGGEPLLQVDKALVDALHARRFRIAVESNGTVEAPEGIDWLCISPKAGAPWVQRRGQELKLVWPQAGFDLDTMARTGEFTHRFLQPMDGPDQLANTELCIAECMKQPVWRLSVQTHKITGIR

SEQ ID NO: 35021 - protein, 210 aa, unidentified
  source 1..210: note = Variovorax guangxiensis
  REGION 1..210: note = tr|A0A433MHZ7|A0A433MHZ7_9BURK 7-carboxy-7-deazaguanine synthase OS=Variovorax guangxiensis OX=1775474 GN=queE PE=3 SV=1
MTYSVKEIFYTLQGEGLRAGRPAVFCRFAGCNLWTGQEKQRSNAICQFCDTDFVGTDGTLGGKYPDANVLAALIAAQWPEGHAHRYVVLTGGEPLLQVDAPLIDGLHSHQFEIAVETNGTIAAPVGIDWICVSPKAGADWVQRSGDELKLVYPQLGLHPDSLNEHDFQHHLLQPMDGPLQRQNTRDAIDYCQAHPQWRLSVQTHKILNIR

SEQ ID NO: 35022 - protein, 212 aa, Variovorax paradoxus
  REGION 1..212: note = tr|E6UYM0|E6UYM0_VARPE 7-carboxy-7-deazaguanine synthase OS=Variovorax paradoxus (strain EPS) OX=595537; GN = queE PE=3 SV=1
MTYSVKEIFYTLQGEGGQAGMPAVFCRFAGCNLWTGREEDRASAVCRFCDTDFVGTDGTLGGKFKTADQLADTIAAQWPANDAEHRLVVLTGGEPLLQVDAALVDALHARRFRIAVESNGTVAAPEGIDWLCISPKAGAPWVQQRGQELKLVWPQTAFDLDAMARTGDFTHRFLQPMDGPDRVANTELCIAECMRQPAWRLSVQTHKITGIR

SEQ ID NO: 35023 - protein, 212 aa, Variovorax paradoxus
  REGION 1..212: note = tr|A0A0P9G0W8|A0A0P9G0W8_VARPD 7-carboxy-7-deazaguanine synthase OS=Variovorax paradoxus; OX = 34073 GN=queE PE=3 SV=1
MSYSVKEIFYTLQGEGGQAGMPAVFCRFAGCNLWSGREADRASAVCRFCDTDFVGTDGTLGGKFKEADALADTIAAQWPADDAGHRLVVLTGGEPLLQVDAALIDALHARGFRIAVESNGTVAAPEGIDWLCISPKAGAPWVQRRGQELKLVWPQEGIDLDAMARSGEFAHRFLQPMDGPRQAANTALCIDACLRQPRWRLSVQTHKFTGIR

SEQ ID NO: 35024 - protein, 212 aa, Variovorax sp.
  REGION 1..212: note = tr|A0A1H7MD16|A0A1H7MD16_9BURK 7-carboxy-7-deazaguanine synthase OS=Variovorax sp. YR750; OX = 1884384 GN=queE PE=3 SV=1
MTYSVKEIFYTLQGEGGQAGMPAVFCRFAGCNLWTGREEDRASAICRFCDTDFVGTDGTLGGKFKTADLLADTIAAQWPAADADHRLVVLTGGEPLLQVDAALVDALHARRFRIAVESNGTVEAPEGIDWLCISPKAGAPWVQQRGQELKLVWPQAEFDLDTMARTGEFTHRFLQPMDGPDRVANTELCIAECMKQPAWRLSVQTHKITGIR

SEQ ID NO: 35025 - protein, 212 aa, Variovorax sp.
  REGION 1..212: note = tr|A0A2P8KLZ9|A0A2P8KLZ9_9BURK 7-carboxy-7-deazaguanine synthase OS=Variovorax sp. WS11; OX = 1105204 GN=queE PE=3 SV=1
MSYSVKEIFYTLQGEGGQAGMPAVFCRFAGCNLWSGREQDRDSAVCRFCDTDFVGTDGTLGGKFASAGSLADVIAAQWPAGDAEHRLVVLTGGEPLLQVDAELIAALHARRFRIAVESNGTIAAPEGIDWLCISPKAGAPWVQRSGQELKLVWPQPGLELDVLEAQGRFAHRFLQPMDGPTQAENTALCIDTCMRRPGWRLSLQTHKLTGIR

SEQ ID NO: 35026 - protein, 215 aa, unidentified
  source 1..215: note = Varunaivibrio sulfuroxidans
  REGION 1..215: note = tr|A0A4R3JI76|A0A4R3JI76_9PROT 7-carboxy-7-deazaguanine synthase OS=Varunaivibrio sulfuroxidans OX=1773489 GN=queE PE=3 SV=1
MSYAIKEMFYTLQGEGARAGRPAVFCRFAGCNLWSGREEDRAQARCTFCDTDFVGVDGAGGGRFEDADDLAHAIERLWPTPAETEKAGGRYVVLTGGEPTLQIDAALIDALHARHFEIALETNATRVPPPGIDWICASPKGDAPLAVGAGDELKLVYPQPGVDPAAFADLDFTHFFLQPMDGPERARNTALTVRYCLDHPCWKLSLQTHKIIGIP

SEQ ID NO: 35027 - protein, 220 aa, Veillonella atypica
  REGION 1..220: note = tr|A0A3A6WKD0|A0A3A6WKD0_9FIRM 7-carboxy-7-deazaguanine synthase OS=Veillonella atypica; OX = 39777 GN=queE PE=3 SV=1
MLLSMNVIELFSSIDGEGKRQGFLTTFLRLHDCNIRCSYCDTLYSYGPESTFESMSVQAVADAIEQLENHRITITGGEPLLQEPAIIELIDELTRRNHRYDFNIETNGTIIPSFHRDNVWFTYDYKTPSSLAEDAMNLDIFKVATPADIIKFVVGSMQDLDRMDEILKTYPTDAQIFVSPVWGNIEGATIIEYMKAHDWQNVRFQLQIHKFIWDPDAKGV

SEQ ID NO: 35028 - protein, 220 aa, Veillonella atypica
  REGION 1..220: note = tr|A0A380N5J3|A0A380N5J3_9FIRM 7-carboxy-7-deazaguanine synthase OS=Veillonella atypica; OX = 39777 GN=queE PE=3 SV=1
MLLSMNVIELFSSIDGEGKRQGFLTTFLRLHDCNIRCSYCDTLYSYGPESTFESMSVQAVADVIEQLENHRITITGGEPLLQEPAIIELIDELTRRNARYDFNIETNGTIIPSFHRDNVWFTYDYKTPSSLAEDAMNLDIFKVATPADIIKFVVGSMQDLDRMNEILKTYPTEAQIFVSPVWGNIEGATIIEYMKAHNWQNVRFQLQIHKFIWDPDAKGV

SEQ ID NO: 35029 - protein, 219 aa, Veillonella criceti
  REGION 1..219: note = tr|A0A380NNK2|A0A380NNK2_9FIRM 7-carboxy-7-deazaguanine synthase OS=Veillonella criceti; OX = 103891 GN=queE PE=3 SV=1
MNVIELFSSIEGEGTRQGFPCSFLRLHDCNLRCVYCDTLYSYGDDAVFETYTINEMADALEALGNRYITITGGEPLLQAKEVEALIDVLSARTTPYGPYEFNIETNGSILPPFQRANVFYTFDYKCPDSAAEEHMQPKLCDSLTDKDVLKFVVSSYSDLQKMKEIVTTKQPKGHIFVSPVFGKIDPKDIVEYLLTNHLQQVRLQLQIHKFIWDPDAKGV

SEQ ID NO: 35030 - protein, 239 aa, Veillonella denticariosi
  REGION 1..239: note = tr|A0A2S7Z7Y6|A0A2S7Z7Y6_9FIRM 7-carboxy-7-deazaguanine synthase OS=Veillonella denticariosi JCM 15641 OX=1298594 GN=queE PE=3 SV=1
MLRFMNVIEIFSSIDGEGSRQGFLTTFLRLYDCNIRCSYCDTKYSYGPDSVYKEMFVQEVADTIESLGNHRITITGGEPLLQEREVIALIDELTRRSESSESCVSEREDEIYSHDTMPYDFNIETNGTIVPSFQRDNVWFTYDYKTPSSLAEKSMNLDIFKAATERDLIKFVVGTPEDLDCMRHILAAHMTEAHIYVSPVWGQIEATSIIEYMKAHNLQNVRFQLQIHKFIWDPDAKGV

SEQ ID NO: 35031 - protein, 247 aa, Veillonella dispar
  REGION 1..247: note = tr|A0A3D2WR55|A0A3D2WR55_9FIRM 7-carboxy-7-deazaguanine synthase OS=Veillonella dispar; OX = 39778 GN=queE PE=3 SV=1
MNVIEIFGSIDGEGSRQGLLTTFLRLHDCNIRCSYCDTTYSYGIDSTFTDMTVQEVADAIESLGNHRITITGGEPLLQEAAVVELIDELNRRKSTKLEDKPCTVGKSTARYELSKGTQGILTDESPYDFNIETNGTIIPSFHRDNVWFTYDYKTPSSLAEESMDLDIFKVSTRQDLIKFVVGSVEDLDCMRRIIKEHPTKAQIYVSPVWGKIEAASIIDYMKTYNLQNVRFQLQIHKFVWDPDAKGV

SEQ ID NO: 35032 - protein, 247 aa, Veillonella dispar
  REGION 1..247: note = tr|C4FPK9|C4FPK9_9FIRM 7-carboxy-7-deazaguanine synthase OS=Veillonella dispar ATCC 17748 OX=546273; GN = queE PE=3 SV=1
MNVIEIFASIDGEGSRQGLLTTFLRLHDCNIRCSYCDTTYSYGIDSTFTDMTVREVADAIESLGNHRITITGGEPLLQEAAVVELIDELNRRKSAKLEDEPCTDIKSTTGINVSVDAQDVLDSESLYDFNIETNGTIIPSFHRENVWFTYDYKTPSSLAEKSMNLDIFKVSREQDLIKFVVGSVEDLDCMRHMINQYPTKAQIYVSPVWGKIEAAAIIDYMNEHNLQNVRFQLQIHKFVWDPDAKGV

SEQ ID NO: 35033 - protein, 211 aa, Veillonella montpellierensis
  REGION 1..211: note = tr|A0A096CRW8|A0A096CRW8_9FIRM 7-carboxy-7-deazaguanine synthase OS=Veillonella montpellierensis DNF00314 OX=1401067 GN=queE PE=3 SV=1
MNVIEIFNSIEGEGIRAGELCTFIRLAGCNLRCSYCDTQYSFTGGKKMTIGEIVKIVDRYGNYNVTITGGEPLLHDISPLLDKLSNYYVNIETNGSIDPIPKYKKYNNVMFTVDYKCPSSGQEKFMRNGVALQQLRCHDVIKFVVGSLEDLNCMKQLIQENKFRSQIYVSPVFGEIKPSDIVDYMKTYNLQGVRLQLQIHKFIWPPEMKGV

SEQ ID NO: 35034 - protein, 244 aa, Veillonella parvula
  REGION 1..244: note = tr|F5L2V1|F5L2V1_9FIRM 7-carboxy-7-deazaguanine synthase OS=Veillonella parvula ACS-068-V-Sch12 OX=768727; GN = queE PE=3 SV=1
MNVIEIFASIDGEGSRQGLLTTFLRLHDCNIRCSYCDTTYSYGIDSVFTEMTVAEVADVIESLGNHRITITGGEPLLQEAAVVELIDELNRRKALKIQDSPSSQSDLTRINDVDKRERPNNSPYDFNIETNGTIIPSFHRDNVWFTYDYKTPSSLAEESMNIDIFKVATERDLIKFVVGSPEDLDCMRRIISKYPTVAQIYVSPVWGQIEAASIIDYMKTYNLQNVRFQLQIHKFVWDPDAKGV

SEQ ID NO: 35035 - protein, 251 aa, Veillonella parvula
  REGION 1..251: note = tr|D1YS15|D1YS15_9FIRM 7-carboxy-7-deazaguanine synthase OS=Veillonella parvula ATCC 17745 OX=686660; GN = queE PE=3 SV=1
MNVIEIFASIDGEGSRQGLLTTFLRLHDCNIRCSYCDTTYSYGIDSVFTEMTVAEVADVIESLGNHRITITGGEPLLQEAAVVELIDELNRRKALKIQDSPSSQSDLTRINDVDKDVDKFDKRKIPNISYYDFNIETNGTIIPSFHRDNVWFTYDYKTPSSLAEESMNIDIFKVATERDLIKFVVGSPEDLDCMRRIISKYSTVAQIYVSPVWGQIEAASIIDYMKTYNLQNVRFQLQIHKFVWDPDAKGV

SEQ ID NO: 35036 - protein, 239 aa, Veillonella rodentium
  REGION 1..239: note = tr|A0A239ZEY0|A0A239ZEY0_9FIRM 7-carboxy-7-deazaguanine synthase OS=Veillonella rodentium; OX = 248315 GN=queE PE=3 SV=1
MLRFMNVIEIFSSIDGEGSRQGFLTTFLRLYDCNIRCSYCDTTYSYGPDSVYKQMSVQEVADTIESLGNHRITITGGEPLLQEREVIALIDELTRRSESSESCVSEREDEIYSHDTMPYDFNIETNGTIVPSFQRDNVWFTYDYKTPSSLAEKSMNLDIFKVATGRDLIKFVVGTVEDLDCMHHILETQTTKAHIYVSPVWGRIEAASIIEYMKTHNWQNVRFQLQIHKFIWDPDAKGV

SEQ ID NO: 35037 - protein, 219 aa, unidentified
  source 1..219: note = Veillonella seminalis
  REGION 1..219: note = tr|K9DIR7|K9DIR7_9FIRM 7-carboxy-7-deazaguanine synthase OS=Veillonella seminalis ACS-216-V-Col6b; OX = 883156 GN=queE PE=3 SV=1
MNVIERFSSIEGEGTRQGSLCSFLRLYDCNLRCIYCDTTYSYGLDVEYDTQSAAAVAEDLKQMGNRYITITGGEPLLQAAEVEQLIDILSRETTPFGPYEFNIETNGSIIAPFQRDNVFYTYDYKCPDSSAEESMHPHLCEALTDKDVLKFVVSSFGDLQRMKEIVLTKQPKGHIFVSPVFGKIAPKEIVDYLLTNNLQQIRIQLQIHKFIWDPDAKGV

SEQ ID NO: 35038 - protein, 220 aa, Veillonella sp.
  REGION 1..220: note = tr|A0A2S7Z9F0|A0A2S7Z9F0_9FIRM 7-carboxy-7-deazaguanine synthase OS=Veillonella sp. T34266-5 OX=2027457 GN=queE PE=3 SV=1
MLLSMNVIELFSSIDGEGKRQGFLTTFLRLHDCNIRCSYCDTLYSYGPESTFESMSVQAVADVIEQLENHRITITGGEPLLQETAVIELIDELARRNPGYDFNIETNGTIIPSFHRDNVWFTYDYKTPSSLAEEAMNLDIFKVATPADIIKFVVGSMQDLDRMNEILKTYPTDAQIFVSPVWGNIEGATIVEYMKAHNWQNVRFQLQIHKFIWDPDAKGV

SEQ ID NO: 35039 - protein, 223 aa, Veillonella sp.
  REGION 1..223: note = tr|R5BVV5|R5BVV5_9FIRM 7-carboxy-7-deazaguanine synthase OS=Veillonella sp. CAG:933 OX=1262980 GN=queE; PE = 3 SV=1
MWRFMNVIERFSSIEGEGTRQGSLCSFLRLYDCNLRCVYCDTTYSYGDEVDYEVQSVEDVADALRQMGNRYITITGGEPLLQADEVEQLIDVLSRETTPFGPYEFNIETNGSIIAPFQRDNVFYTYDYKCPDSSAEESMHPKLCEAMTDKDVLKFVVSSYGDLQRMKEIVLTKKPKGHIFVSPVFGKIDPQEIVAYLLKNNLQQIRLQLQIHKFIWDPDAKGV

SEQ ID NO: 35040 - protein, 220 aa, unidentified
  source 1..220: note = Veillonella tobetsuensis
  REGION 1..220: note = tr|A0A2S7ZQZ2|A0A2S7ZQZ2_9FIRM 7-carboxy-7-deazaguanine synthase OS=Veillonella tobetsuensis OX=1110546 GN=queE PE=3 SV=1
MLLSMNVIEIFASIDGEGKRQGCLTTFLRLHDCNIRCSYCDTLYSYGPQSTFESMSIQAVADIIEQLGNHRITITGGEPLLQEQDVIELIDELTKRNPQYDFNIETNGTIVPSFQRDNVWFTYDYKTPSSLAEDSMNLDIFKMATAEDIIKFVVGSVQDLDRMDEVLKTYPTNGQIFVSPVWGNIEGAMIVDYMKAHNWQNVKFQLQIHKFIWDPGAKGV

SEQ ID NO: 35041 - protein, 219 aa, unidentified
  source 1..219: note = Veillonella tobetsuensis
  REGION 1..219: note = tr|A0A480B4W3|A0A480B4W3_9FIRM 7-carboxy-7-deazaguanine synthase OS=Veillonella tobetsuensis OX=1110546 GN=queE PE=3 SV=1
MLSMNVIEIFASIDGEGKRQGCLTTFLRLHDCNIRCSYCDTLYSYGPQSTFESMSIQAVADIIEQLGNHRITITGGEPLLQEQAVIELIDELTKRNPQYDFNIETNGTIVPSFQRENVWFTYDYKTPSSLAEDSMNLDIFKMATAEDIIKFVVGSVQDLDRMDEVLKTYPTNGQIFVSPVWGNIEGAMIVDYMKAHNWQNVKFQLQIHKFIWDPGAKGV

SEQ ID NO: 35042 - protein, 210 aa, unidentified
  source 1..210: note = Veillonellaceae bacterium
  REGION 1..210: note = tr|A0A134CJY8|A0A134CJY8_9FIRM 7-carboxy-7-deazaguanine synthase OS=Veillonellaceae bacterium DNF00751 OX=1384082 GN=queE PE=3 SV=1
MKNKLYVNELFNSIDGEGRRAGELASFIRLCGCNLRCSYCDTTYAFTEGTPMAVEEILSQLRYRNITLTGGEPLLQDVHLLLQRLQDRDVNIETNGSVSIRPYLSYSHVWFTVDYKSISSGMTTAMKEENFQLLRPQDVLKFVVGTHADLEQARKICAYFKPSCPIYISAVFAAIEPKEIVAYMEAYRLMNWRLQLQLHKYIWPPTARGV

SEQ ID NO: 35043 - protein, 219 aa, unidentified
  source 1..219: note = Veillonellaceae bacterium
  REGION 1..219: note = tr|A0A134CB22|A0A134CB22_9FIRM 7-carboxy-7-deazaguanine synthase OS=Veillonellaceae bacterium DNF00626 OX=1588754 GN=queE PE=3 SV=1
MKNKFPVVEIFDSIDGEGKRTGYMAIFVRFAGCNIRCTYCDTCYALSPEDALFYFTKDELLAKIRSYPWKRITFTGGEPLLQPLEEICRILGDEGYDINIETNGAVPLFRHRPKGVFYTMDYKCTGSGVRKYMRTENFRDLTQDDVLKFVVSDRRDLDDMKYILDTYFPTGGPKFYVSPVWGRIEPVELVDYVKAHGLDRVCVQVQLHKIIWSPTKRGV

SEQ ID NO: 35044 - protein, 222 aa, Verminephrobacter eiseniae
  REGION 1..222: note = tr|A1WGV0|A1WGV0_VEREI 7-carboxy-7-deazaguanine synthase OS=Verminephrobacter eiseniae (strain EF01-2); OX = 391735 GN=queE PE=3 SV=1
MNYRAPAPRPMTYSVKEIFYTLQGEGGQTGMPAVFCRFAGCNLWSGREADRADALCRFCDTDFVGTDGTLGGKFAQADALAERIAAQWPAADSAHRLVVLTGGEPLLQVDAALLAALHAQQFRIAVETNGSLAAPPGIDWLCVSPKAGAPWVQTQGQELKLVWPQAGMDLAAIARTGQFTHRFLQPMDGPDQAAHIAICIAACLQQPLWRLSLQTHKISGIR

SEQ ID NO: 35045 - protein, 212 aa, Verminephrobacter sp.
  REGION 1..212: note = tr|A0A4Q2LSQ4|A0A4Q2LSQ4_9BURK 7-carboxy-7-deazaguanine synthase OS=Verminephrobacter sp. Larva24 OX=2509434 GN=queE PE=3 SV=1
MTYSVKEIFYTLQGEGGQTGMPAVFCRFAGCNLWSGREADRADALCRFCDTDFVGTDGTLGGKFAQADALAERIAAQWPAADSAHRLVVLTGGEPLLQVDAALLAALHAQQFRIAVETNGSLAAPPGIDWLCVSPKAGAPWVQTQGQELKLVWPQAGMDLAAIARTGQFTHRFLQPMDGPDQAAHIALCIAACLQQPLWRLSLQTHKISGIR

SEQ ID NO: 35046 - protein, 219 aa, unidentified
  source 1..219: note = Verrucomicrobia bacterium
  REGION 1..219: note = tr|A0A1Q6V3D1|A0A1Q6V3D1_9BACT 7-carboxy-7-deazaguanine synthase OS=Verrucomicrobia bacterium 13_2_20CM_55_10 OX=1805420 GN=queE PE=3 SV=1
MPEQEKTLTINEIYHSIQGESTWAGCPCVFARLTFCDLRCNYCDTEYAFYEGKKQTLQGVIDAVASFRCSLVEITGGEPLLQKNVLPLMSMLCDAGYTVLLETSGAHDISKVDSRVHRIMDLKTPGSGEVEKNLWANIDYLTLRDEVKFVMGSREDYEWSRDKVQRYGLSSRCNAVLFSPIFGRIDPRQIVEWILADNLDVRFQLQMHKFIWSPTQRGV

SEQ ID NO: 35047 - protein, 225 aa, unidentified
  source 1..225: note = Verrucomicrobia bacterium
  REGION 1..225: note = tr|A0A424HLU7|A0A424HLU7_9BACT 7-carboxy-7-deazaguanine synthase OS=Verrucomicrobia bacterium TMED71 OX=1986878 GN=queE PE=3 SV=1
MEYPVHEMFHSWQGEGDHSGKSAFFVRLYGCPVHCPWCDSAGTWHPDYVPEKIDRIDAATIADAAAAVRCDLVVITGGEPTIHDLGPLTDAMKERGLKSHLETSGSFQIRVSFDWITLSPKWLSTPLPESLAVANEFKLIVEDESSVQKWVETLGNSIDKRSVWLHPEWSVRKDPRILESITEFVKKNGGPFRAGLQGHKYYRADLLDRNSAKPSPLGGNPMLGY

SEQ ID NO: 35048 - protein, 245 aa, unidentified
  source 1..245: note = Verrucomicrobia subdivision
  REGION 1..245: note = tr|A0A0R2RN02|A0A0R2RN02_9BACT 7-carboxy-7-deazaguanine synthase OS=Verrucomicrobia subdivision 6 bacterium BACL9 MAG-120507-bin52 OX=1655590; GN = queE PE=3 SV=1
MRIAEIFHSIQGEGLLAGVPSIFIRTSGCNLRCHWCDTPYASWKPEGPEMSIQEILKKTSPWDCHHVVLTGGEPMIAPGLPELATALKKEGKHITIETAGTILPHGIPCDLASLSPKLSNSTPPPERDSAWTKKHEANRLQPEVISDWIRNYNFQLKFVVSSENDLVEIKSLLSRLETFVAPPHQSVRGEEGPPVPFHQVLLMPEGIDVKTLAARSPWLVEICQREGFRFCPRLHIDLFGHTRGT

SEQ ID NO: 35049 - protein, 221 aa, unidentified
  source 1..221: note = Verrucomicrobia subdivision
  REGION 1..221: note = tr|A0A520Q555|A0A520Q555_9BACT 7-carboxy-7-deazaguanine synthase OS=Verrucomicrobia subdivision 3 bacterium OX=2052186 GN=queE PE=3 SV=1
MHETFYSWQGEGVHFGRAAYFIRTYGCPVKCTWCDSAGTWHPNYTPDNIEKISEENLVNAAKATQCDFVVITGGEPTIFDLNELTAQLEKEKISRHLETSGGFEIKGDFQWITVSPKREKLPLDSNLRLANELKIIVDGEAALEEWKKYLKPYTLKIPIWLNIEWSLRDNKKLKEKITTFVKEHGFPYRVGYQFHKLFQADEMDGNSKPNVPLGGNLDLGY

SEQ ID NO: 35050 - protein, 243 aa, unidentified
  source 1..243: note = Verrucomicrobiaceae bacterium
  REGION 1..243: note = tr|A0A1Z9FIC7|A0A1Z9FIC7_9BACT 7-carboxy-7-deazaguanine synthase OS=Verrucomicrobiaceae bacterium TMED137 OX=1986879 GN=queE PE=3 SV=1
MKVSRLADGSPEIFHTLQGEGASLGSPAVFLRLSLCNLHCHWCDTPYTWNWERTPWRHQDDVKFSKTEEIVELSPAEIAPLILSYNCNRLVLTGGEPLLQQDELVKLAELLPEITFIEIETNGTKLLSDDFIDIPTQFNVSPKLSNSGIDEKLRLNFKALDLFASLEKAFFKFVVCNQSDLDEIKALHSKLNISPDRIHLMPEGRDAETLQQRSLWLADICRDKGYHFSPRLHVLLWGNKRAK

SEQ ID NO: 35051 - protein, 243 aa, unidentified
  source 1..243: note = Verrucomicrobiaceae bacterium
  REGION 1..243: note = tr|A0A1Z9A8W9|A0A1Z9A8W9_9BACT 7-carboxy-7-deazaguanine synthase OS=Verrucomicrobiaceae bacterium TMED86 OX=1986881 GN=queE PE=3 SV=1
MKVARLADGSPEIFHTLQGEGPSLGAPAVFLRLSLCNLHCHWCDTPYTWNWENTPWEHQDGEKFSKADQLLELAPKNLAETILQYDCPRLVITGGEPLLQQPDLIDLLAFLPGLPLIEVETNGTQLPNPALAHRVTQFNVSPKLSNSGIKESLRLNSDALSFFAKSDKAAFKFVVCNEIDLAEIQALQAKFHIPAGKIFLMPEGRDAETLKNRSLWLAECCRDQGYHFSPRLHVLLWGNERAK

SEQ ID NO: 35052 - protein, 252 aa, unidentified
  source 1..252: note = Verrucomicrobiae bacterium
  REGION 1..252: note = tr|A0A2A2Q0L9|A0A2A2Q0L9_9BACT 7-carboxy-7-deazaguanine synthase OS=Verrucomicrobiae bacterium Tous-C2TDCM OX=1982329 GN=queE PE=3 SV=1
MKLARMPDGAPEIFHTLQGEGRGAGRPSVFIRSSLCNLHCQWCDTDYTWNWTDTPHRHERDSDPSYQKFQRGEQIVDLSTAEITAILSRHDCRNYVFTGGEPLIQEKSWLELMAALDGDGRPRPHFEIETNGTLLPGTAFLDRIDQLNVSPKLANSGVAEELRLKPGTMKILATTGKTDFKFVIGSQEDLDEVLALIEPASLPRDRVFLMPKALNVAELEANQSKVAAMALSHGLRYSDRLHLRLYGAKRGV

SEQ ID NO: 35053 - protein, 230 aa, unidentified
  source 1..230: note = Verrucomicrobiae bacterium
  REGION 1..230: note = tr|A0A2A2YCY6|A0A2A2YCY6_9BACT 7-carboxy-7-deazaguanine synthase OS=Verrucomicrobiae bacterium AMD-G2 OX=1982328 GN=queE PE=3 SV=1
MLICELFHSIQGEGSLAGVPSVFVRTSGCNLRCVWCDTPYASWNPTGTKYEIADLLGEILAYPAQHVVLTGGEPLIAKGIEFLAAELRANGKHLTIETAGTIAPQGIACDLASLSPKLAHSTPSEEQAGPWAARHQATRWQPDVIRAWINHCDYQLKFVVRNEQDVIELMELLGSSNIQVAAHKILLMPEGIDANILKQSAFAVSELCKRYGFRYTPRLHIDLYGNTRGT

SEQ ID NO: 35054 - protein, 243 aa, unidentified
  source 1..243: note = Verrucomicrobiales bacterium
  REGION 1..243: note = tr|A0A353F334|A0A353F334_9BACT 7-carboxy-7-deazaguanine synthase OS=Verrucomicrobiales bacterium OX=2026801 GN=queE PE=3 SV=1
MKVSRLADGSPEIFHTLQGEGASLGSPAVFLRLSLCNLHCHWCDTPYTWNWKQTPWKHQDDVKFSKTEEIVEISPAEIAPLILSYNCNRLVLTGGEPLLQQDELVKLAELLPEITFIEIETNGTKLLSEDFIDIPTQFNVSPKLSNSGIDEKLRLNFKALELFASLEKAFFKFVVCNQSDLDEIKALHSKLNISPDRIHLMPEGRDAETLQQRSLWLADICRDKGYHFSPRLHVLLWGNKRAK

SEQ ID NO: 35055 - protein, 243 aa, unidentified; identical to SEQ ID NO: 35050
  source 1..243: note = Verrucomicrobiales bacterium
  REGION 1..243: note = tr|A0A3B9GDK7|A0A3B9GDK7_9BACT 7-carboxy-7-deazaguanine synthase OS=Verrucomicrobiales bacterium OX=2026801 GN=queE PE=3 SV=1

SEQ ID NO: 35056 - protein, 238 aa, Verrucomicrobium sp.
  REGION 1..238: note = tr|A0A1H2ENY7|A0A1H2ENY7_9BACT 7-carboxy-7-deazaguanine synthase OS=Verrucomicrobium sp. GAS474 OX=1882831 GN=queE PE=3 SV=1
MSSDALPDLSGLNLTINEVFHSIQGESTFAGRPCLFIRLTACDLRCTYCDTEYAFYEGNKRPVADLLAEALAHPCQLVEVTGGEPLLQKNVHPLMTALCDAGKTVLLETSGAHDIGPVDFRVHRIMDLKCPSSGESGRNLAANRPLLTARDEVKFVAGTEEDCLWALAQIRDGLKENGGDGWPQRVAAILFSPVFGKIDLRFLADTLLAAPFPSAVAEKIRLQVQLHKLIWEPTARGV

SEQ ID NO: 35057 - protein, 224 aa, Verrucosispora sp.
  REGION 1..224: note = tr|A0A2N7T4T8|A0A2N7T4T8_9ACTN 7-carboxy-7-deazaguanine synthase OS=Verrucosispora sp. ts21 OX=2069341 GN=queE PE=3 SV=1
MKCNLTCGYPRLPRTAEVSALGAMVCDTEHTWNTAEHDLQAVPTMSATEIWDQLARLDPSTDNPGLAPVDLIVVSGGEPLLHPDIVTALAQRASASGRSLEIETNATIAPGAALIEAGAHFNAGLKLASSAVPRGKRIKPQVIEQLQSSGRARWKFVVTGPNDVREIADLQQEFGLTEVWLSPEGTSADVVIDRMRWLADVALTHGWHLTTRQHVLIWGDKRGR

SEQ ID NO: 35058 - protein, 215 aa, Verrucosispora sp.
  REGION 1..215: note = tr|A0A2N7T3Q8|A0A2N7T3Q8_9ACTN 7-carboxy-7-deazaguanine synthase OS=Verrucosispora sp. ts21 OX=2069341 GN=queE PE=3 SV=1
MRSAYRVKEIFYTLQGEGKHAGRAAVFCRFTSCNLWTGREKDRRRAICQFCDTDFVGTDGPGGGQFRSAKDLAAAVAKTWAGATHSRGKPYVVCTGGEPLLQLDTAAVEAFHEEGFEVAIETNGTRPAPTGIDWTCVSPKAGTDLILKRGDELKLVYPQRGAEPERFEGLDFDHFLLQPMDGPNQAANTRAAINYCLAHPQWALSLQTHKYIGIA

SEQ ID NO: 35059 - protein, 211 aa, unidentified
  source 1..211: note = Verticiella sediminum
  REGION 1..211: note = tr|A0A556AWM4|A0A556AWM4_9BURK 7-carboxy-7-deazaguanine synthase OS=Verticiella sediminum; OX = 1247510 GN=queE PE=3 SV=1
MTYSVKEIFYTLQGEGANAGRPAVFCRFAGCNLWTGREEDRGKAICQFCDTDFVGTDGTLGGKFRAAAELAERIAGQWPTADRAHRLVVLTGGEPLLQVDAALIDALHAQGFEIAVETNGSVEAPAGLDWICVSPKAGAPWVQRSGHELKVVWPQPGLDLDELERGDFAHRYLQPMDNAQQRANTEACIAQCMARPAWHLSLQTHKVINIR

SEQ ID NO: 35060 - protein, 213 aa, unidentified
  source 1..213: note = Vesicomyosocius okutanii
  REGION 1..213: note = tr|A5CX03|A5CX03_VESOH 7-carboxy-7-deazaguanine synthase OS=Vesicomyosocius okutanii subsp. Calyptogena okutanii (strain HA) OX=412965 GN=queE PE=3 SV=1
MINAKLNINEIFYSIQGEAREVGLPSVFIRLTGCPLKCTYCDTEYAFHGNNLMEIDAIISEIKQYDTTYICVTGGEPLLQKNCYLLLDRLVENNYQVSLETSGSINIQDVNALVSIVMDVKTPSSGESEQNKYTNFKKLTVKDQLKFVIGSHSDFDWSVAILNQYHTTAGVLFSPVFGNITPTQLADWILDQQLNVRLQLQLHKLLWGDEKGK

SEQ ID NO: 35061 - protein, 213 aa, unidentified
  source 1..213: note = Vespertiliibacter pulmonis
  REGION 1..213: note = tr|A0A3N4VUQ0|A0A3N4VUQ0_9PAST 7-carboxy-7-deazaguanine synthase OS=Vespertiliibacter pulmonis OX=1443036 GN=queE PE=3 SV=1
MQAVNLINNFANTEYRIVEIFETLQGEGFNTGMPSIFIRFGKCNLACPWCDTNYNQFEIKTLAEIMQAVHSFSAKNVIITGGEPTIQPQIEKLLDVLKAEGYFIAVETNGLKPVPKQIDYIATSPKRIYQKNYLKHHLPFAHEVRIVVDGDVLDFCEQIENAIKADRYYLSPCEISGEMNMLDTITQLGILNQRQSKPRWQLSIQTHKIAGIE

SEQ ID NO: 35062 - protein, 238 aa, Vibrio aerogenes
  REGION 1..238: note = tr|A0A1M5XQ42|A0A1M5XQ42_9VIBR 7-carboxy-7-deazaguanine synthase OS=Vibrio aerogenes CECT 7868 OX=1216006 GN=queE PE=3 SV=1
MVCDQCSLSCINRVTSLYKINEIFQTIQGEGLFTGVPSVFIRLQGCPVGCAWCDTKQTWDVDEADRREFQDVIVKTQDSPHWCEMTVEEILKRYHELGYTAKHIVITGGEPCIYDLTALSYAFEQIGCQCQIETSGTSEIKTSENTWVTVSPKLGMKGKLPVLTSALLRANEIKHPVGTQKDIEQLDNLLKQAQIPKETIIALQPISQKQRATELCIQICTERNWRLSIQTHKYLSIA

SEQ ID NO: 35063 - protein, 222 aa, Vibrio agarivorans
  REGION 1..222: note = tr|A0A2K1CHK0|A0A2K1CHK0_9VIBR 7-carboxy-7-deazaguanine synthase OS=Vibrio agarivorans; OX = 153622 GN=queE PE=3 SV=1
MYKLNEMFETIQGEGVFTGVPAVFIRLQECPVGCSWCDTKQTWFAEEADKVRIGDILLKKEDSPTWCHVTSDEIIAEYKKQGFNAQHIVITGGEPCIYDLRSLTHAFEELGCQCQIETSGTSEVVASENSWVTLSPKIAMKGKLPVLRSALRRANEIKHPVGTQKDIEQLDHLLSSANLTSQPVIALQPISQKSRATKLCIDTCIERNWRLSIQTHKYLNIA

SEQ ID NO: 35064 - protein, 222 aa, unidentified
  source 1..222: note = Vibrio alfacsensis
  REGION 1..222: note = tr|A0A347UQ80|A0A347UQ80_9VIBR 7-carboxy-7-deazaguanine synthase OS=Vibrio alfacsensis; OX = 1074311 GN=queE PE=3 SV=1
MYKLNEMFETIQGEGVFTGVPAVFVRLQECPVGCSWCDTKQTWFAQEEDQRSIGDILLKTEDSPTWCFVSADAIVSEYKKQGFNAKHIVITGGEPCIYDLRALTEAFESMGCQCQIETSGTSEVVTSDNTWVTVSPKVAMKGRLPVLRSALERANEIKHPVGTQKDIDHLDELLSSANIEATTVIALQPISQKPRATQLCIDTCVARNWRLSVQTHKYLSIA

SEQ ID NO: 35065 - protein, 226 aa, Vibrio alginolyticus
  REGION 1..226: note = tr|D0X1M6|D0X1M6_VIBAL 7-carboxy-7-deazaguanine synthase OS=Vibrio alginolyticus 40B OX=674977 GN=queE; PE = 3 SV=1
MSSALYKLNEMFETIQGEGVFTGVPAVFVRLQECPVGCSWCDTKQTWYADENDQRQIGDILVKTEDSPTWCVASAENIVEQYQQQGFNAKHIVITGGEPCIYDLRPLTKAFEDMGCQCQIETSGTSEVITSENTWVTVSPKVAMKGKLPVLNSALERANEIKHPVGTQKDIDHLDDLLANANVAAETIIALQPISQKPRATQLCIDTCIARNWRLSVQTHKYLSIA

SEQ ID NO: 35066 - protein, 222 aa, Vibrio alginolyticus
  REGION 1..222: note = tr|A0A1W6WAL9|A0A1W6WAL9_VIBAL 7-carboxy-7-deazaguanine synthase OS=Vibrio alginolyticus; OX = 663 GN=queE PE=3 SV=1
MYKLNEMFETIQGEGIFTGVPAVFVRLQECPVGCSWCDTKQTWYADENDQRQIGDILVKTEDSPTWCVASAENIVEQYQQQGFNAKHIVITGGEPCIYDLRPLTKAFEDMGCQCQIETSGTSEVITSENTWVTVSPKVAMKGKLPVLNSALERANEIKHPVGTQKDIDHLDDLLANANVAAETIIALQPISQKPRATQLCIDTCIARNWRLSVQTHKYLSIA

SEQ ID NO: 35067 - protein, 222 aa, unidentified
  source 1..222: note = Vibrio algivorus
  REGION 1..222: note = tr|A0A557P8P6|A0A557P8P6_9VIBR 7-carboxy-7-deazaguanine synthase OS=Vibrio algivorus; OX = 1667024 GN=queE PE=3 SV=1
MYKINEIFETIQGEGYFTGVPSVFIRLQVCPVGCSWCDTKQTWTAEESDKTTLGDIIIKQGDSPSWSPASVEDIVSLYQHQGYTAKHVVITGGEPCIYDLHPLTSAFEAIGCQCQIETSGTSEIICSDNTWVTVSPKIAMKGKLEVLDSALQRANEIKHPVGTQKDIDQLDALLTRAQCESKSNIALQPISQKPRATELCMETCIKRNWRLSIQTHKYLNIA

SEQ ID NO: 35068 - protein, 222 aa, Vibrio anguillarum
  REGION 1..222: note = tr|A0A241P3P6|A0A241P3P6_VIBAN 7-carboxy-7-deazaguanine synthase OS=Vibrio anguillarum; OX = 55601 GN=queE PE=3 SV=1
MYKINEMFETIQGEGVHTGVPAVFIRLQECPVGCAWCDTKQTWDATPQDERPINDVLAKTQDSPTWCSVSAEEMVSLYKTQGYHAKHIVITGGEPCIYDLRPLAQAFEAIGCHIQIETSGTFPVQTSANTWVTVSPKIAMKGKLPVLDSALLRANEIKHPVATAKDIEQLDTLLLRAQVPDSTVIALQPISQKERATQLCIETCIARNWRLSIQTHKYLSIA

SEQ ID NO: 35069 - protein, 222 aa, Vibrio anguillarum
  REGION 1..222: note = tr|F7YJS8|F7YJS8_VIBA7 7-carboxy-7-deazaguanine synthase OS=Vibrio anguillarum (strain ATCC 68554 / 775); OX = 882102 GN=queE PE=3 SV=1
MYKINEMFETIQGEGVHTGVPAVFIRLQECPVGCAWCDTKQTWDATPQDERPINDVLAKTQDSPTWCSVSAEEMVSIYKTQGYHAKHIVITGGEPCIYDLRPLAQAFEAIGCYIQIETSGTFPVQTSANTWVTVSPKIAMKGKLPVLDSALLRANEIKHPVATAKDIEQLDTLLLRAQVPDSTVIALQPISQKERATQLCIETCIARNWRLSIQTHKYLSIA

SEQ ID NO: 35070 - protein, 226 aa, unidentified
  source 1..226: note = Vibrio antiquarius
  REGION 1..226: note = tr|A7K041|A7K041_VIBAE 7-carboxy-7-deazaguanine synthase OS=Vibrio antiquarius (strain Ex25) OX=150340; GN = queE PE=3 SV=1
MSSTLYKLNEMFETIQGEGVFTGVPAVFVRLQECPVGCSWCDTKQTWYADENDQRQIGDILVKTEDSPTWCVASAENIVEQYQLQGFNAKHIVITGGEPCIYDLRPLTKAFEDMGCQCQIETSGTSEVITSENTWVTVSPKVAMKGKLPVLNSALERANEIKHPVGTQKDIDHLDELLANANVAVETVIALQPISQKPRATQLCIETCIARNWRLSVQTHKYLSIA

SEQ ID NO: 35071 - protein, 216 aa, Vibrio atlanticus
  REGION 1..216: note = tr|A0A558H1Q5|A0A558H1Q5_9VIBR 7-carboxy-7-deazaguanine synthase OS=Vibrio atlanticus; OX = 693153 GN=queE PE=3 SV=1
MFETIQGEGVFTGVPAVFVRLQICPVGCSWCDTKQTWEALPEDETSLGDIMVKTEDSPTWSAIDAQGIVNEYIKQGYTAKHIVITGGEPCIYDLVPLTEAFEQHGCRCQIETSGTSEVKATNDTWVTVSPKVAMKTKLEILDSALQRANEIKHPVGTGKDIDQLDGLLERADVSSETVIALQPISQKDRATQLCIDTCIERNWRLSIQTHKYLSIA

SEQ ID NO: 35072 - protein, 222 aa, Vibrio atlanticus
  REGION 1..222: note = tr|A0A1C3IZT4|A0A1C3IZT4_9VIBR 7-carboxy-7-deazaguanine synthase OS=Vibrio atlanticus; OX = 693153 GN=queE PE=3 SV=1
MYKINEMFETIQGEGVFTGVPAVFVRLQICPVGCSWCDTKQTWEALPEDETSLGDIMVKTEDSPTWSAIDAQGIVNEYIKQGYTAKHIVITGGEPCIYDLVPLTEAFEQHGCRCQIETSGTSEVKATSDTWITVSPKVAMKAKLEILDSALQRANEIKHPVGTSKDIEQLDGLLERAAVASDTVIALQPISQKDRATQLCIDTCIERNWRLSIQTHKYLSIA

SEQ ID NO: 35073 - protein, 231 aa, Vibrio azureus
  REGION 1..231: note = tr|U3ADM5|U3ADM5_9VIBR 7-carboxy-7-deazaguanine synthase OS=Vibrio azureus NBRC 104587 OX=1219077 GN=queE; PE = 3 SV=1
MFYKQVSSTLYKLNEMFETIQGEGVFTGVPAVFVRLQVCPVGCSWCDTKQTWFAEETDRVQIGDILLKKEDTPTWCFVTADEIIAEYKKQGFNAQHIVITGGEPCIYDLRPLTHAFEELGCQCQIETSGTSEITTSESSWVTVSPKVAMKGKLPVLHSALRRANEIKHPVGTQKDIEQLDHLLSSANLTSQPVIALQPISQKPRATKLCIDTCIERNWRLSIQTHKYLNIA

SEQ ID NO: 35074 - protein, 226 aa, unidentified
  source 1..226: note = Vibrio barjaei
  REGION 1..226: note = tr|A0A1J4QWF8|A0A1J4QWF8_9VIBR 7-carboxy-7-deazaguanine synthase OS=Vibrio barjaei; OX = 1676683 GN=queE PE=3 SV=1
MSNTRFKINEMFETIQGEGMFTGVPAVFIRLQICNVGCSWCDTKQTWEANDEDERSFGEIITKQGDSPTWSDVDAAEIVAMYQSQKFNAKHIVITGGEPCEYDLTALCEAFEAIGCRCQIETSGTSEIRVTPATWVTVSPKVAMKGKLPVLPSSLERADEIKHPVATQKNIDQLDELLQGVKLNSDVVIALQPISQKPRATELCIETCIQRNWRLSVQTHKYLSIA

SEQ ID NO: 35075 - protein, 216 aa, unidentified
  source 1..216: note = Vibrio bivalvicida
  REGION 1..216: note = tr|A0A177XUP9|A0A177XUP9_9VIBR 7-carboxy-7-deazaguanine synthase OS=Vibrio bivalvicida; OX = 1276888 GN=queE PE=3 SV=1
MFETIQGEGVFTGVPSVFVRLQECPVGCAWCDTKQTWDATPQDERSLDEVLAKTEDSPTWCSVTAEDIVNEYKNQGYTAKHIVITGGEPCIYDLTLLTQAFENNGCKCQIETSGTSEVCVTDTTWVTVSPKVAMKGKLPVLDSALLRANEIKHPVATQKDIDQLDELLTRAGVSEETTIALQPISQKPRATQLCIDVCVARNWRLSIQTHKYLSIA

SEQ ID NO: 35076 - protein, 222 aa, Vibrio brasiliensis
  REGION 1..222: note = tr|E8LPE7|E8LPE7_9VIBR 7-carboxy-7-deazaguanine synthase OS=Vibrio brasiliensis LMG 20546 OX=945543; GN = queE PE=3 SV=1
MYKINEMFQTIQGEGVFTGVPSVFVRLQECPVGCAWCDTKQTWDATPQDECSLDEILAKKEDSPAWCSVSAQDIVNEYQKQGYTARHIVITGGEPCIYDLRPLTAAFEAIGCQCQIETSGTYQVDASENTWVTVSPKVAMKGKLPVIDSALLRANEIKHPVATQKDIDQLDELLTRAQVPQSTTIALQPISQKPRATQLCIDTCVERNWRLSIQTHKYLSIA

SEQ ID NO: 35077 - protein, 215 aa, Vibrio breoganii
  REGION 1..215: note = tr|A0A2N7HLM8|A0A2N7HLM8_9VIBR 7-carboxy-7-deazaguanine synthase OS=Vibrio breoganii; OX = 553239 GN=queE PE=3 SV=1
MFETIQGEGFFTGVPSIFIRLQGCPVGCAWCDTKQTWDVNLEDETDFKTVLLKQGDDERWCSTSESALVAYCLEQYSAKHVVITGGEPCQYDLLPLTTELEANGYRCQIETSGTFEVLATPNTWVTVSPKIGMKGKLPIEPSAMSRANEVKHPVGKESDIDDLKALLEVSTLQDGVEVLLQPISQKPRATKLCIDTCIANNWRLSVQTHKYLDIA

SEQ ID NO: 35078 - protein, 224 aa, Vibrio breoganii
  REGION 1..224: note = tr|A0A4U2G8K2|A0A4U2G8K2_9VIBR 7-carboxy-7-deazaguanine synthase OS=Vibrio breoganii; OX = 553239 GN=queE PE=3 SV=1
MNNVLKINEMFETIQGEGFFTGVPSIFIRLQGCPVGCAWCDTKQTWDVNLEDETDFKTVLLKQGDDERWCSTSESALVAYCLEQYSAKHVVITGGEPCQYDLLPLTTELEANGYRCQIETSGTFEVLATPNTWVTVSPKIGMKGKLPIEPSAMSRANEVKHPVGKESDIDDLKALLEVSTLQDGVEVLLQPISQKPRATKLCIDTCIANNWRLSVQTHKYLDIA

SEQ ID NO: 35079 - protein, 222 aa, Vibrio campbellii
  REGION 1..222: note = tr|A0A1Q1P9H5|A0A1Q1P9H5_9VIBR 7-carboxy-7-deazaguanine synthase OS=Vibrio campbellii; OX = 680 GN=queE PE=3 SV=1
MYKLNEMFETIQGEGVFTGVPAVFVRLQECPVGCSWCDTKQTWYAEEKDQRQIGDILVKTEDSPTWCFASAEDIVAEYKKQGFNAKHIVITGGEPCIYDLRALTAAFEEMGCQCQIETSGTSEVVTSESTWVTVSPKVAMKGKLPVLKSALERANEIKHPVGTQKDIDQLDALLASAEIAEKTVIALQPISQKPRATQLCIDTCVARNWRLSVQTHKYLSIA

SEQ ID NO: 35080 - protein, 216 aa, Vibrio campbellii
  REGION 1..216: note = tr|A7MW46|A7MW46_VIBCB 7-carboxy-7-deazaguanine synthase OS=Vibrio campbellii (strain ATCC BAA-1116 / BB120) OX=338187 GN=queE PE=3 SV=1
MFETIQGEGIFTGVPAVFVRLQECPVGCSWCDTKQTWYAEEKDQRQIGDILVKTEDSPTWCFASAEDIVAEYKKQGFNAKHVVITGGEPCIYDLRALTAAFEEMDCQCQIETSGTSEVVTSESTWVTVSPKVAMKGKLPVLKSALERANEIKHPVGTQKDIDQLDVLLASAEIGEKTVIALQPISQKPRATQLCIDTCVARNWRLSVQTHKYLSIA

SEQ ID NO: 35081 - protein, 238 aa, unidentified
  source 1..238: note = Vibrio caribbeanicus
  REGION 1..238: note = tr|E3BNP5|E3BNP5_9VIBR 7-carboxy-7-deazaguanine synthase OS=Vibrio caribbeanicus ATCC BAA-2122 OX=796620; GN = queE PE=3 SV=1
MSRSCKIFDYELAEKKLYKVNEMFETIQGEGVFTGVPSVFVRLQECPVGCAWCDTKQTWDASPKDERTLKEILSKTTDSPTWCRASANDVVSEYLRQGYTARHIVITGGEPCIYDLIPLTEAFEAINCKCQIETSGTSEVITSPNTWVTVSPKIAMKGKLPVLPSALIRANELKHPVATQKDIDRLDDLLSGVSLSEDTEIALQPISQKPRATELCIEVCIKRNWRLSIQTHKYLSIA

SEQ ID NO: 35082 - protein, 216 aa, unidentified
  source 1..216: note = Vibrio caribbeanicus
  REGION 1..216: note = tr|A0A0A6TAK4|A0A0A6TAK4_9VIBR 7-carboxy-7-deazaguanine synthase OS=Vibrio caribbeanicus; OX = 701175 GN=queE PE=3 SV=1
MFETIQGEGVFTGVPSVFVRLQECPVGCAWCDTKQTWDATPQDETSFSEIMNKTQDSPTWCQSSAQGIVDEYRNQEYTAKHIVITGGEPCIYDLAPLTEAFEAIGCQCQIETSGTSEVRATDNTWVTVSPKVAMKGKLPVLDSALVRANEIKHPVATQKDIDQLDDLLERAKVPETTVVALQPISQKPRATQLCIDVCVKRNWRLSIQTHKYLSIA

SEQ ID NO: 35083 - protein, 222 aa, Vibrio casei
  REGION 1..222: note = tr|A0A368LHR6|A0A368LHR6_9VIBR 7-carboxy-7-deazaguanine synthase OS=Vibrio casei; OX = 673372 GN=queE PE=3 SV=1
MYKINEIFQTIQGEGYFTGVPSVFVRLQVCPVGCAWCDTKQTWTAEAQDETTLGDIMLKQSDSPTWSYATAEEIIQQYVMKGYTAKHIVITGGEPCIYDLTSLTEAFESIGCRCQIETSGTSEVLCSSNTWVTVSPKIAMKGKLDVLDSAVQRANEIKHPVGTQKDIDHLDSLLKKANCESKGHIALQPISQKARATELCMEICIQRNWRLSIQTHKYLNIA

SEQ ID NO: 35084 - protein, 222 aa, Vibrio celticus
  REGION 1..222: note = tr|A0A1C3JH26|A0A1C3JH26_9VIBR 7-carboxy-7-deazaguanine synthase OS=Vibrio celticus; OX = 446372 GN=queE PE=3 SV=1
MYKINEMFETIQGEGVFTGVPAVFVRLQICPVGCSWCDTKQTWEALPEDETSLGDIMVKTEDSPTWSAIDAQGIVNEYIKQGYTAKHIVITGGEPCIYDLVPLTEAFEQHGCRCQIETSGTSEVKATSNTWVTVSPKVAMKAKLEILDSALQRANEIKHPVGTSKDIEQLDGLLERAAVPSDTVIALQPISQKDRATQLCIDTCIERNWRLSIQTHKYLSIA

SEQ ID NO: 35085 - protein, 216 aa, Vibrio chagasii
  REGION 1..216: note = tr|A0A2S7VEK2|A0A2S7VEK2_9VIBR 7-carboxy-7-deazaguanine synthase OS=Vibrio chagasii; OX = 170679 GN=queE PE=3 SV=1
MFETIQGEGVFTGVPAVFVRLQICPVGCSWCDTKQTWEAFPEDETSLGDIMVKTEDSPTWSSIDAQGIVNEYIKQGYTAKHIVITGGEPCIYDLVPLTEAFEKHGCRCQIETSGTSEVKATPDTWVTVSPKVAMKAKLEILDSALQRANEIKHPVGTGKDIEQLDGLLERAEVSNETVIALQPISQKDRATKLCIDTCIERNWRLSIQTHKYLSIA

SEQ ID NO: 35086 - protein, 245 aa, Vibrio cholerae
  REGION 1..245: note = tr|A0A0X1KWH1|A0A0X1KWH1_VIBCO 7-carboxy-7-deazaguanine synthase OS=Vibrio cholerae (strain MO10) OX=345072 GN=queE PE=3 SV=1
MTSIAISIMVCHLQLFIHVRSFILYRINEMFEIIQGEGVFTGVPAVFVRLQGCPVGCAWCDTKQTWETLDSDQTSFSQILLKTNDAPTWCQATAQEVVQRYQAQGYQAKHIVITGGEPCIYDLTELTQAFEAMGCRCQIETSGTYEVCATENTWVTVSPKVAMKGKLPILDSALQRANEIKHPVATEKDIDNLDELLARAQVSAQTAIALQPISQKPRATELCIRTCIARNWRLSIQTHKYLNIA

SEQ ID NO: 35087 - protein, 245 aa, Vibrio cholerae
  REGION 1..245: note = tr|A0A544C6N6|A0A544C6N6_VIBCL 7-carboxy-7-deazaguanine synthase OS=Vibrio cholerae; OX = 666 GN=queE PE=3 SV=1
MTSIAISIMVCHLQLFIHVRSFILYRINEMFETIQGEGVFTGVPAVFVRLQGCPVGCAWCDTKQTWETLDSDQTSFSQILLKTSDAPTWCQATAQEVVQRYQAQGYQAKHIVITGGEPCIYDLTELTQAFEAMGCRCQIETSGTYEVCATENTWVTVSPKVAMKGKLPILDSALQRANEIKHPVATEKDIDNLDELLARAQVSAQTAIALQPISQKPRATELCIRTCIARNWRLSIQTHKYLNIA

SEQ ID NO: 35088 - protein, 216 aa, unidentified
  source 1..216: note = Vibrio cidicii
  REGION 1..216: note = tr|A0A151KRF1|A0A151KRF1_9VIBR 7-carboxy-7-deazaguanine synthase OS=Vibrio cidicii; OX = 1763883 GN=queE PE=3 SV=1
MFETIQGEGVFTGVPAVFVRLQVCPVGCSWCDTKQTWQALEQDQRTFGEIILKSGDSPSWCNADAEAIVTQYQLQGFNAKHIVITGGEPCIYDLTSLTEAFEAIGCQCQIETSGTYPVQTSPATWVTVSPKVAMKGKLPVLDSALLRANEIKHPVGTEKDIEQLDRLLARAQVPATTTIALQPISQKARATQLCIETCIARNWRLSVQTHKYLSIA

SEQ ID NO: 35089 - protein, 216 aa, unidentified
  source 1..216: note = Vibrio cidicii
  REGION 1..216: note = tr|A0A151JLD4|A0A151JLD4_9VIBR 7-carboxy-7-deazaguanine synthase OS=Vibrio cidicii; OX = 1763883 GN=queE PE=3 SV=1
MFETIQGEGVFTGVPAVFVRLQVCPVGCSWCDTKQTWQALEQDQRTFGEIILKSGDSPSWCNADAEEIVTQYQLQGFNAKHIVITGGEPCIYDLTSLTEAFEAIGCQCQIETSGTYPVQTSPATWVTVSPKVAMKGKLPVLDSALLRANEIKHPVGTEKDIEQLDVLLARAQVPATTTIALQPISQKARATQLCIETCIARNWRLSIQTHKYLSIA

SEQ ID NO: 35090 - protein, 222 aa, Vibrio cincinnatiensis
  REGION 1..222: note = tr|A0A1T4RHW3|A0A1T4RHW3_VIBCI 7-carboxy-7-deazaguanine synthase OS=Vibrio cincinnatiensis DSM 19608 OX=1123491 GN=queE PE=3 SV=1
MYKVNEIFETIQGEGVFTGVPAVFVRLQYCPVGCAWCDTKQTWQAFEQDQRSMEQIIVKQGDSPTWCSVSADEIILQYHRQGYSAKHIVITGGEPCFYDLLPLTQAFEAIGCQCQIETSGTFEVRASEHTWVTVSPKIAMKGKLPVLTSALLRANEIKHPVGTEKDIEQLEALLNQVPLPESTVIALQPLSQKPRATQLCIEACIARNWRLSIQTHKYLNIA

SEQ ID NO: 35091 - protein, 221 aa, Vibrio comitans
  REGION 1..221: note = tr|A0A4Y3IPV7|A0A4Y3IPV7_9VIBR 7-carboxy-7-deazaguanine synthase OS=Vibrio comitans NBRC 102076 OX=1219078 GN=ygcF PE=3 SV=1
MLKINEMFETIQGEGFFTGVPSIFIRLQGCPVGCAWCDTKQTWDVNLEDETDFKTVLLKKGDDERWCSTSEAELVAYCLDHYSAKHVVITGGEPCQYDLFPLTTELEAKGFRCQIETSGTFEVQATANTWVTVSPKIGMKGKLPIEPSAMSRANEVKHPVGKESDIDDLKALLKVSELQDGVEVLLQPISQKPRATKLCIDTCIANNWRLSVQTHKYLDIA

SEQ ID NO: 35092 - protein, 222 aa, Vibrio coralliilyticus
  REGION 1..222: note = tr|A0A2A2CN35|A0A2A2CN35_9VIBR 7-carboxy-7-deazaguanine synthase OS=Vibrio coralliilyticus OX=190893 GN=queE PE=3 SV=1
MYKLNEMFETIQGEGVFTGVPSVFVRLQICPVGCAWCDTKQTWDATPQDERPLAEVLAKTGDSPTWCSVSGDDIIEQYRQQGYQAKHIVITGGEPCIYDLRPLTEAFEAIGCRCQIETSGTSPVLASENTWVTVSPKVAMKGKLPVLDCALLRANEIKHPVATDKDIEQLDALIERAGVPESTTIALQPISQKPRATQLCIDTCIARNWRLSIQTHKYLSIA

SEQ ID NO: 35093 - protein, 216 aa, Vibrio coralliilyticus
  REGION 1..216: note = tr|A0A1V0I7F2|A0A1V0I7F2_9VIBR 7-carboxy-7-deazaguanine synthase OS=Vibrio coralliilyticus OX=190893 GN=queE PE=3 SV=1
MFETIQGEGVFTGVPSVFVRLQICPVGCAWCDTKQTWDATPQDERPLAEVLAKTEDSPTWCSVSGGDIIDQYRQQGYQAKHIVITGGEPCIYDLRPLTEAFEAIGCRCQIETSGTSPVLASENTWVTVSPKVAMKGKLPVLDCALLRANEIKHPVATDKDIEQLDALIERAGVPESTTIALQPISQKPRATQLCIDTCIARNWRLSIQTHKYLSIA

SEQ ID NO: 35094 - protein, 222 aa, Vibrio crassostreae
  REGION 1..222: note = tr|A0A4R2GD33|A0A4R2GD33_9VIBR 7-carboxy-7-deazaguanine synthase OS=Vibrio crassostreae; OX = 246167 GN=queE PE=3 SV=1
MYKINEMFETIQGEGVFTGVPAVFVRLQICPVGCSWCDTKQTWEALPEDETSLGDIMLKTEDSPTWSAIDAQGIVNEYIKQGYTAKHIVITGGEPCIYDLVPLTQAFEQHGCRCQIETSGTSEVKATSDTWVTVSPKVAMKAKLEILDSALQRANEIKHPVGTGKDIEQLDALLERADVSSDTVIALQPISQKDRATQLCIDTCIERNWRLSIQTHKYLSIA

SEQ ID NO: 35095 - protein, 222 aa, Vibrio crassostreae
  REGION 1..222: note = tr|A0A0T7D5V1|A0A0T7D5V1_9VIBR 7-carboxy-7-deazaguanine synthase OS=Vibrio crassostreae; OX = 246167 GN=queE PE=3 SV=1
MYKINEMFETIQGEGVFTGVPAVFVRLQICPVGCSWCDTKQTWEALPEDETSLGDIMVKTEDSPTWSAIDAQGIVNEYIKQGYTAKHIVITGGEPCIYDLVPLTEAFEQHGCRCQIETSGTSEVKATPDTWVTVSPKVAMKAKLEILDSALQRANEIKHPVGTSKDIEQLDGLLDRAAVPSDTVIALQPISQKDRATQLCIDTCIERNWRLSIQTHKYLSIA

SEQ ID NO: 35096 - protein, 222 aa, Vibrio diabolicus
  REGION 1..222: note = tr|A0A2L2K979|A0A2L2K979_9VIBR 7-carboxy-7-deazaguanine synthase OS=Vibrio diabolicus; OX = 50719 GN=queE PE=3 SV=1
MYKLNEMFETIQGEGVFTGVPAVFVRLQECPVGCSWCDTKQTWYADENDQRQIGDILVKTEDSPTWCVASAENIVEQYQLQGFNAKHIVITGGEPCIYDLRPLTEAFEDMGCQCQIETSGTSEVITSENTWVTVSPKVAMKGKLPVLNSALERANEIKHPVGTQKDIDHLDELLANANVTVETVIALQPISQKPRATQLCIETCIARNWRLSVQTHKYLSIA

SEQ ID NO: 35097 - protein, 222 aa, Vibrio diazotrophicus
  REGION 1..222: note = tr|A0A329DZP4|A0A329DZP4_VIBDI 7-carboxy-7-deazaguanine synthase OS=Vibrio diazotrophicus; OX = 685 GN=queE PE=3 SV=1
MYKVNEMFETIQGEGVFTGVPAVFVRLQECPVGCAWCDTKQTWEANEQDQQSFDQVIVKTGDSPNWCSASAQQIIAMYQSQGYTAKHIVITGGEPCIYDLVPLTQAFEEIGCQCQIETSGTFEVRATKDTWVTVSPKVAMKGKLPVIASALLRANEIKHPVATDKDIENLDQLLQSANVPESTVIALQPISQKPRATQLCIDTCVARNWRLSIQTHKYLSIA

SEQ ID NO: 35098 - protein, 216 aa, Vibrio diazotrophicus
  REGION 1..216: note = tr|A0A2J8GMF0|A0A2J8GMF0_VIBDI 7-carboxy-7-deazaguanine synthase OS=Vibrio diazotrophicus; OX = 685 GN=queE PE=3 SV=1
MFETIQGEGVFTGVPAVFVRLQECPVGCAWCDTKQTWEANEQDQLSFDQIIVKTGDSPNWCSASAQQIIAMYQSQGYTAKHIVITGGEPCIYDLVPLTQAFDEIGCQCQIETSGTFEVRATKDTWVTVSPKVAMKGKLPVIESALLRANEIKHPVATDKDIENLDQLLQSANVPESTVIALQPISQKPRATQLCIDTCVARNWRLSIQTHKYLSIA

SEQ ID NO: 35099 - protein, 216 aa, unidentified
  source 1..216: note = Vibrio europaeus
  REGION 1..216: note = tr|A0A178JEE3|A0A178JEE3_9VIBR 7-carboxy-7-deazaguanine synthase OS=Vibrio europaeus; OX = 300876 GN=queE PE=3 SV=1
MFETIQGEGVFTGVPSVFVRLQECPVGCAWCDTKQTWDATPQDERPLDEILAKKEDSPTWCSVSAMDIVNEYIKQGYTAKHVVITGGEPCIYDLVPLTQAFEEHGCRCQIETSGTSEVKATDNTWVTVSPKVAMKGKLPVLDSALVRANEIKHPVATQKDIDHLDELLERANVPEDTTIALQPISQKPRATQLCIDVCVARNWRLSIQTHKYLSIA

SEQ ID NO: 35100 - protein, 221 aa, Vibrio ezurae
  REGION 1..221: note = tr|U3AIB8|U3AIB8_9VIBR 7-carboxy-7-deazaguanine synthase OS=Vibrio ezurae NBRC 102218 OX=1219080 GN=queE; PE = 3 SV=1
MFKVNEIFETIQGEGFFTGVPSIFIRLQGCPVGCAWCDTKQTWDVLEEKETDFGTIIVKSGDDEYWCQSSAKDLVDYCIAHYSAKHVVITGGEPCQYDLLPLTSELEAKGYRCQIETSGTFEVQATAETWVTVSPKIGMKGKLPIAASAMSRANEIKHPVGKESDIDELKALLAAHPLSPATEVLLQPISQKPRATKLCIDTCIENNWRLSVQTHKYLNIA

SEQ ID NO: 35101 - protein, 246 aa, Vibrio fluvialis
  REGION 1..246: note = tr|A0A120L4F1|A0A120L4F1_VIBFL 7-carboxy-7-deazaguanine synthase OS=Vibrio fluvialis; OX = 676 GN=queE PE=3 SV=2
MTFTNASFKVSDLQFLDNKLGNFTLYKVNEMFETIQGEGVFTGVPAVFVRLQECPVGCAWCDTKQTWDAEPADERSFDEILVKTEDNPNWCSASAQQIIERYRAQGYSAKHIVITGGEPCIYDLVPLTQAFEAIGCRCQIETSGTFDVQATENTWVTVSPKVAMKGKLPVIDSALRRANEIKHPVATDKDIDNLDQLLARAKVPETTVIALQPISQKPRATQLCIETCIARNWRLSIQTHKYLSIA

SEQ ID NO: 35102 - protein, 224 aa, Vibrio fluvialis
  REGION 1..224: note = tr|A0A1L9L8E1|A0A1L9L8E1_VIBFL 7-carboxy-7-deazaguanine synthase OS=Vibrio fluvialis; OX = 676 GN=queE PE=3 SV=1
MTLYKVNEMFETIQGEGVFTGVPAVFVRLQICPVGCSWCDTKQTWEAAEQDEQSFAEIIVKTGDSPTWCQADASAIVEQYQRQGYSAKHIVITGGEPCLYDLTELTQAFEAIGCQCQIETSGTYEVKASENTWVTVSPKVAMKGKLPILDSALQRANEIKHPVGTQKDIDQLDALLLRAQVPATTVIALQPISQKERATQLCIDTCIKRNWRLSIQTHKYLSIA

SEQ ID NO: 35103 - protein, 216 aa, Vibrio fortis
  REGION 1..216: note = tr|A0A066V0S3|A0A066V0S3_9VIBR 7-carboxy-7-deazaguanine synthase OS=Vibrio fortis; OX = 212667 GN=queE PE=3 SV=1
MFETIQGEGVFTGVPAVFVRLQICPVGCSWCDTKQTWEALAEDETSLGDIMVKTEDSPTWSSVDAQGIVDQYVKQGFNAKHIVITGGEPCIYDLVPLTEAFEKMGCRCQIETSGTSEVKATVKTWVTVSPKVAMKAKLEILDSALQRADEIKHPVGTSKDVDQLDHLLERAKVSSETVIALQPISQKDRATQLCIDTCIERNWRLSIQTHKYLSIA

SEQ ID NO: 35104 - protein, 246 aa, Vibrio furnissii
  REGION 1..246: note = tr|F0LUE4|F0LUE4_VIBFN 7-carboxy-7-deazaguanine synthase OS=Vibrio furnissii (strain DSM 14383 / NCTC 11218 / VL 6966) OX=903510 GN=queE PE=3 SV=1
MTFTNASFKVSDLQFLDNKLGNFTLYKVNEMFETIQGEGVFTGVPAVFVRLQECPVGCAWCDTKQTWDAAPADERSFDEILVKTEDNPNWCSASAQQIIERYRAQGYTAKHIVITGGEPCIYDLVPLTQAFEAIGCRCQIETSGTFAVQATENTWVTVSPKVAMKGKLPVVDVALQRANEIKHPVATEKDIDNLDQLLARAGVPETTVVALQPISQKPRATQLCIDTCIARNWRLSIQTHKYLSIA

SEQ ID NO: 35105 - protein, 216 aa, Vibrio furnissii
  REGION 1..216: note = tr|A0A0Q2M9N8|A0A0Q2M9N8_VIBFU 7-carboxy-7-deazaguanine synthase OS=Vibrio furnissii; OX = 29494 GN=queE PE=3 SV=1
MFETIQGEGVFTGVPAVFVRLQECPVGCAWCDTKQTWDAAPADERSFDEILVKTEDNPNWCSASAQQIIERYRAQGYTAKHIVITGGEPCIYDLVPLTQAFEAIGCRCQIETSGTFAVQATENTWVTVSPKVAMKGKLPVVDVALQRANEIKHPVATEKDIDNLDQLLARADVPATTVVALQPISQKPRATQLCIDTCIARNWRLSIQTHKYLSIA

SEQ ID NO: 35106 - protein, 216 aa, unidentified
  source 1..216: note = Vibrio galatheae
  REGION 1..216: note = tr|A0A0F4NKP7|A0A0F4NKP7_9VIBR 7-carboxy-7-deazaguanine synthase OS=Vibrio galatheae; OX = 579748 GN=queE PE=3 SV=1
MFQTIQGEGVYTGVPSVFVRLQECPVGCAWCDTKQTWDATPQDERPLDEILAKQEDSPTWCSVTAEQIVDEYKKQGYTAKHIVITGGEPCIYDLTPLSTAFEAIDCQCQIETSGTSEVRTSENTWVTVSPKIAMKGKLPVLDSALLRANEIKHPVATQKDIDQLDELLVRAGVSAETTIALQPISQKPRATQLCIDVCVARNWRLSIQTHKYLSIA

SEQ ID NO: 35107 - protein, 232 aa, Vibrio gazogenes
  REGION 1..232: note = tr|A0A1Z2SBG1|A0A1Z2SBG1_VIBGA 7-carboxy-7-deazaguanine synthase OS=Vibrio gazogenes; OX = 687 GN=queE PE=3 SV=1
MTAELGFILSIYKVNEIFQTIQGEGVFTGAPAVFVRLQGCPVGCSWCDTKHTWFTEPQDQRSVDDIIVKTQDSPLWCQMSAEAIIDCYHRQGYTAKHIVITGGEPCLYDLTVLTEAFEAIGCRCQIETSGTADVLASAQTWVTVSPKIAMKGRLPVLEGALRRANEIKHPVGTRKDIEQLDHLLHQTPVADDTIIALQPISQKPRATELCIEVCIERNWRLSIQTHKYLSIA

SEQ ID NO: 35108 - protein, 232 aa, Vibrio gazogenes
  REGION 1..232: note = tr|A0A1M4ZB81|A0A1M4ZB81_VIBGA 7-carboxy-7-deazaguanine synthase OS=Vibrio gazogenes DSM 21264 = NBRC 103151 OX=1123492 GN=queE PE=3 SV=1
MTAELGFILSIYKVNEIFQTIQGEGVFTGAPAVFVRLQGCPVGCSWCDTKHTWFTEPQDLRSVDDIIVKTQDSSLWCQMSAEAIIDCYHRQGYTAKHIVITGGEPCLYDLTVLTEAFEAIGCRCQIETSGTADVQASVQTWVTVSPKIAMKGRLPVLESALRRANEIKHPVGTRKDIEQLDHLLHQTPVTDDTIIALQPISQKPRATELCIEVCIERNWRLSIQTHKYLSIA

SEQ ID NO: 35109 - protein, 216 aa, unidentified
  source 1..216: note = Vibrio genomosp.
  REGION 1..216: note = tr|A0A1B9QV00|A0A1B9QV00_9VIBR 7-carboxy-7-deazaguanine synthase OS=Vibrio genomosp. F10; OX = 723171 GN=queE PE=3 SV=1
MFETIQGEGYFTGVPSVFVRLQECPVGCAWCDTKQTWDALESDKRTINEILVKTEDNPLWCAISAEGIVEQYQHQGYTAKHVVITGGEPCIYDLRPLTKAFEQIGCRCQIETSGTFEVKATGSTWVTVSPKVAMKGKLPIIDSALERADEIKHPVGTQKDIDHLDELLSRVTIDQKTVIALQPISQKTRSTELCIETCIKRNWRLSVQTHKYLSIA

SEQ ID NO: 35110 - protein, 222 aa, unidentified
  source 1..222: note = Vibrio genomosp.
  REGION 1..222: note = tr|A0A4U1YSM6|A0A4U1YSM6_9VIBR 7-carboxy-7-deazaguanine synthase OS=Vibrio genomosp. F6; OX = 723172 GN=queE PE=3 SV=1
MYKINEMFETIQGEGVFTGVPAVFVRLQECPVGCAWCDTKQTWDATPQDERPLAEVLAKTSDSPTWCSVSAADIVNQYQASGFTAKHIVITGGEPCIYDLIPLTEAFEVLGCECQIETSGTSEVKVTPNTWVTVSPKVAMKGKLPILKSAFLRANEIKHPVGTQKDIDHLDDLIETFGTADKAIVALQPISQKDRATQLCIETCVARNWRLSIQTHKYLSIA

SEQ ID NO: 35111 - protein, 221 aa, Vibrio halioticoli
  REGION 1..221: note = tr|V5FJH0|V5FJH0_9VIBR 7-carboxy-7-deazaguanine synthase OS=Vibrio halioticoli NBRC 102217 OX=1219072; GN = queE PE=3 SV=1
MLKINEIFETIQGEGFFTGVPSIFIRLQGCPVGCAWCDTKQTWDVLEEKQTDFGTIIAKSGDDEFWCQQSEQDLVTYCLANYSAKHVVITGGEPCQYDLLPLTTKLEEHGFRCQIETSGTFAIQATANTWVTVSPKIGMKGKLPIQASAMARANEVKHPVGTQSDIEDLKALLASSQLQPNTEILLQPISQKPRATKLCIDTCIANNWRLSVQTHKYLNIA

SEQ ID NO: 35112 - protein, 226 aa, Vibrio hangzhouensis
  REGION 1..226: note = tr|A0A1H5YFR0|A0A1H5YFR0_9VIBR 7-carboxy-7-deazaguanine synthase OS=Vibrio hangzhouensis; OX = 462991 GN=queE PE=3 SV=1
MTHTRFKINEMFETIQGEGVFTGVPAVFVRLQICNVGCAWCDTKQTWTAEPEQQRSFGDIILKQGDDPTWSEVSADDIVVMYNQQGFNAKHIVITGGEPCEYDLTELCKAFEAIGCQCQIETSGTSEVRVTESTWVTVSPKIAMKGKLPVLTSALERANEVKHPVATEKNISQLDELLAQAALRKDVVIALQPISQKPRATELCIETCIERNWRLSVQTHKYLSIA

SEQ ID NO: 35113 - protein, 222 aa, Vibrio harveyi
  REGION 1..222: note = tr|A0A3A1PUW4|A0A3A1PUW4_VIBHA 7-carboxy-7-deazaguanine synthase OS=Vibrio harveyi OX=669; GN = queE PE=3 SV=1
MYKLNEMFETIQGEGVFTGVPAVFVRLQECPVGCSWCDTKQTWYAEEKDQRQIGDILVKTEDSPTWCFASAQDIVAEYKKQGFNAQHIVITGGEPCIYDLRDLTAAFEDMGCQCQIETSGTSEVVTSENTWVTVSPKVAMKGKLPVLKSALERADEIKHPVGTQKDIDHLDDLLAMADIDSKTIIALQPISQKPRATQLCIDTCVARNWRLSVQTHKYLSIA

SEQ ID NO: 35114 - protein, 226 aa, Vibrio harveyi
  REGION 1..226: note = tr|D0XI30|D0XI30_VIBH1 7-carboxy-7-deazaguanine synthase OS=Vibrio harveyi (strain 1DA3) OX=673519 GN=queE; PE = 3 SV=1
MSSTLYKLNEMFETIQGEGVFTGVPAVFVRLQVCPVGCSWCDTKQTWYAEEEGQRQIGDILVKTEDSPTWCFASAEDIVAEYKKQGFNAKHIVITGGEPCIYDLRALTAAFEEMGCQCQIETSGTSEVVTSESTWVTVSPKVAMKGKLPVLKSALERANEIKHPVGTQKDIDQLDSLLASADIAEKTVIALQPISQKPRATQLCIDTCVARNWRLSVQTHKYLSIA

SEQ ID NO: 35115 - protein, 216 aa, Vibrio hepatarius
  REGION 1..216: note = tr|A0A0M0HWI6|A0A0M0HWI6_9VIBR 7-carboxy-7-deazaguanine synthase OS=Vibrio hepatarius; OX = 171383 GN=queE PE=3 SV=1
MFETIQGEGVFTGVPSVFVRLQQCPVGCAWCDTKQTWEALADDERNFGEIILKTEDSPTWCSASAEAIVNEYQKQAYTAKHIVITGGEPCIYDLTPLTSAFEAIGCQCQIETSGTSEVLATESTWVTVSPKVAMKGKLPVLDSALQRANEIKHPVATEKDIDQLDELLSRAEVSSQTTIALQPISQKPRATQLCIDVCVKRNWRLSIQTHKYLSIA

SEQ ID NO: 35116 - protein, 215 aa, Vibrio ichthyoenteri
  REGION 1..215: note = tr|F9S2J9|F9S2J9_9VIBR 7-carboxy-7-deazaguanine synthase OS=Vibrio ichthyoenteri ATCC 700023 OX=870968; GN = queE PE=3 SV=1
MFETIQGEGEFTGTPSVFIRLQECGVGCAWCDTQQTWSANPEDEVKLIEVLAKQGDSPTWCRISAEEIVSLYQEKYNARHIVITGGEPCIYDLRPLTLAFESLGCTCQIETSGTSEVVVSDSSWVTVSPKISMKGRLPVLPSSLLRANEIKHPVGTQKDIDQLDELLDGLMISPTTVIALQPISQKERATQLCIDTCIARNWRLSIQTHKYLEIA

SEQ ID NO: 35117 - protein, 221 aa, Vibrio inusitatus
  REGION 1..221: note = tr|A0A4Y3HU57|A0A4Y3HU57_9VIBR 7-carboxy-7-deazaguanine synthase OS=Vibrio inusitatus NBRC 102082 OX=1219070 GN=ygcF PE=3 SV=1
MLKINEMFETIQGEGFFTGVPSIFIRLQGCPVGCAWCDTKQTWDVNLEDETDLKTVLLKQGDDERWCSTSEAVLVAYCLEQYSAKHVVITGGEPCQYDLLPLTTKLEANGYRCQIETSGTFEVLATPNTWVTVSPKIGMKGKLPIEPSAMSRANEVKHPVGKESDIDDLKSLLEVSKLQDGVEVLLQPISQKPRATKLCIDTCIANNWRLSVQTHKYLDIA

SEQ ID NO: 35118 - protein, 134 aa, unidentified
  source 1..134: note = Vibrio ishigakensis
  REGION 1..134: note = tr|A0A0B8NNW2|A0A0B8NNW2_9VIBR Queuosine biosynthesis queE radical SAM OS=Vibrio ishigakensis; OX = 1481914 GN=JCM19231_2529 PE=4 SV=1
MITGGEPCQYDLVSLTDALEANGFRCQIETSGTFEVKASKNTWVTVSPKIGMKGKLPIEPQAMTRANEVKHPVGKQADIDALEELLLANPVGEGVEILLQPISQKPRATQLCIDTCIAKNWRLSIQTHKYLQIA

SEQ ID NO: 35119 - protein, 78 aa, unidentified
  source 1..78: note = Vibrio ishigakensis
  REGION 1..78: note = tr|A0A0B8NZW5|A0A0B8NZW5_9VIBR Queuosine biosynthesis queE radical SAM OS=Vibrio ishigakensis; OX = 1481914 GN=JCM19231_2528 PE=4 SV=1
MLKLNEIFETIQGEGFFTGVPSIFIRLQGCPVGCAWCDTKQTWDVLEDKETDFGTIIAKTGMMSFGVISLWIRWWRFV

SEQ ID NO: 35120 - protein, 216 aa, unidentified
  source 1..216: note = Vibrio jasicida
  REGION 1..216: note = tr|A0A2S7VUG4|A0A2S7VUG4_9VIBR 7-carboxy-7-deazaguanine synthase OS=Vibrio jasicida; OX = 766224 GN=queE PE=3 SV=1
MFETIQGEGVFTGVPAVFVRLQECPVGCSWCDTKQTWYAEKEDQRQIGDILVKTEDSPTWCFASAEDIVAEYKKQGFNAKHIVITGGEPCIYDLRALTAAFEEMGCQCQIETSGTSEVVTSEGTWVTVSPKVAMKGKLPVLKSALERANEIKHPVGTQKDIDQLDALLASAEIGEKTVIALQPISQKPRATQLCIDTCVARNWRLSVQTHKYLSIA

SEQ ID NO: 35121 - protein, 216 aa, Vibrio kanaloae
  REGION 1..216: note = tr|A0A1E5DR50|A0A1E5DR50_9VIBR 7-carboxy-7-deazaguanine synthase OS=Vibrio kanaloae 5S-149 OX=1191299 GN=queE PE=3 SV=1
MFETIQGEGMFTGVPAVFVRLQVCPVGCSWCDTKQTWDALPKDETSLGNIMVKTEDSPTWSAIDAQGIVNEYIKQGYTAKHIVITGGEPCIYDLVPLTEAFEQHGCRCQIETSGTSEVKATSDTWVTVSPKVAMKAKLEILDSALQRANEIKHPVGTSKDIEQLDGLLDRAAVASDTVIALQPISQKDRATQLCIDTCIERNWRLSIQTHKYLSIA

SEQ ID NO: 35122 - protein, 216 aa, Vibrio kanaloae
  REGION 1..216: note = tr|A0A4U2CRQ1|A0A4U2CRQ1_9VIBR 7-carboxy-7-deazaguanine synthase OS=Vibrio kanaloae; OX = 170673 GN=queE PE=3 SV=1
MFETIQGEGMFTGVPAVFVRLQVCPVGCSWCDTKQTWDALPKDETSLGNIMVKTEDSPTWSAIDAQGIVNEYIKQGYTAKHIVITGGEPCIYDLVPLTEAFEQHGCRCQIETSGTSEVKATPDTWVTVSPKVAMKAKLEILDSALQRANEIKHPVGTSKDIEQLDGLLERAAVASDTVIALQPISQKDRATQLCIDTCIERNWRLSIQTHKYLSIA

SEQ ID NO: 35123 - protein, 216 aa, Vibrio lentus
  REGION 1..216: note = tr|A0A2N7IAM2|A0A2N7IAM2_9VIBR 7-carboxy-7-deazaguanine synthase OS=Vibrio lentus; OX = 136468 GN=queE PE=3 SV=1
MFETIQGEGVFTGVPAVFVRLQICPVGCSWCDTKQTWEALPEDETSLGDIMVKTEDSPTWSAIDAQGIVNEYIKQGYTAKHIVITGGEPCIYDLVPLTEAFEQHGCRCQIETSGTSEVKATPDTWVTVSPKVAMKAKLDILDSALVRANEIKHPVGTGKDIEQLDALIARADVPEKTVIALQPISQKERATQLCIDTCIERNWRLSIQTHKYLSIA

SEQ ID NO: 35124 - protein, 216 aa, Vibrio lentus
  REGION 1..216: note = tr|A0A4U2FS97|A0A4U2FS97_9VIBR 7-carboxy-7-deazaguanine synthase OS=Vibrio lentus; OX = 136468 GN=queE PE=3 SV=1
MFETIQGEGVFTGVPAVFVRLQICPVGCSWCDTKQTWDALPEDETSLGDIMVKTEDSPTWSAIDAQGIVNEYIKQGYTAKHIVITGGEPCIYDLVPLTEAFEQHGCRCQIETSGTSEVKATPDTWVTVSPKVAMKAKLDILDSALVRANEIKHPVGTGKDIEQLDALIARADVPEKTVIALQPISQKERATQLCIDTCIERNWRLSIQTHKYLSIA

SEQ ID NO: 35125 - protein, 232 aa, Vibrio mangrovi
  REGION 1..232: note = tr|A0A1Y6IN62|A0A1Y6IN62_9VIBR 7-carboxy-7-deazaguanine synthase OS=Vibrio mangrovi; OX = 474394 GN=queE PE=3 SV=1
MTVELGFILSIYKVNEIFQTIQGEGVFTGVPAVFIRLQGCPVGCSWCDTKQTWLTEPKDKRSVEEIIVKTQDSPHWCQMNTEEIIRCYHQQGYTARHIVITGGEPCIYHLTELTKAFEELGCRCQIETSGTAEVQVSEQTWVTVSPKVAMKGRLPVLGSAMLRANEIKHPVGTRKDIEQLEQLLRQNQVSDDTIIALQPISQKPRATELCIEVCTERNWRLSIQTHKYLSIA

SEQ ID NO: 35126 - protein, 226 aa, Vibrio maritimus
  REGION 1..226: note = tr|A0A090SP81|A0A090SP81_9VIBR 7-carboxy-7-deazaguanine synthase OS=Vibrio maritimus; OX = 990268 GN=queE PE=3 SV=1
MSGKQFKINEMFETIQGEGVFTGVPAVFVRLQICNVGCAWCDTKQTWEAKAEDERAFGEIITKQGDSPTWSDVSAQDIVDMYNAQGFNAKHIVITGGEPCEYDLTPLCEAFEAIGARCQIETSGTSEVKVTDATWVTVSPKIAMKGKREVLESALERANEIKHPVATDKNIEQLDELLDGVALKDDVVIALQPISQKPRATELCMSTCIARNWRLSVQTHKYLNIA

SEQ ID NO: 35127 - protein, 226 aa, Vibrio maritimus
  REGION 1..226: note = tr|A0A090T340|A0A090T340_9VIBR 7-carboxy-7-deazaguanine synthase OS=Vibrio maritimus; OX = 990268 GN=queE PE=3 SV=1
MSGKQFKINEMFETIQGEGVFTGVPAVFIRLQICNVGCAWCDTKQTWEAKQEDERTFGEIITKQGDSPTWSDVSADEIVAMYQAQGFTAKHIVITGGEPCEYDLTPLCEAFEAIDARCQIETSGTSEVRVTENTWVTVSPKIAMKGKREVLASALERANEIKHPVATDKNIEQLDALLDGVALKPDVVIALQPISQKPRATELCMSTCIARNWRLSVQTHKYLNIA

SEQ ID NO: 35128 - protein, 226 aa, Vibrio mediterranei
  REGION 1..226: note = tr|A0A3G4V547|A0A3G4V547_9VIBR 7-carboxy-7-deazaguanine synthase OS=Vibrio mediterranei; OX = 689 GN=queE PE=3 SV=1
MSNTRFKINEMFETIQGEGMFTGVPAVFIRLQICNVGCSWCDTKQTWDANNEDQRSFGEIITKQGDSPTWSDVDAAEIVAMYQSQQFNAKHIVITGGEPCEYDLTALCEAFEAIGCRCQIETSGTSEIRVTPVTWVTVSPKVAMKGKLPVLSSSLERADEIKHPVATQKNVDQLDELLHGVELKSDVVIALQPISQKPRATELCIETCIQRNWRLSVQTHKYLSIA

SEQ ID NO: 35129 - protein, 226 aa, Vibrio mediterranei
  REGION 1..226: note = tr|A0A2C9PEG9|A0A2C9PEG9_9VIBR 7-carboxy-7-deazaguanine synthase OS=Vibrio mediterranei; OX = 689 GN=queE PE=3 SV=1
MSNTRFKINEMFETIQGEGMFTGVPAVFIRLQICNVGCSWCDTKQTWDANNEDQRSFGEIITKQGDSPTWSDVDAAEIVAMYQLQQFNAKHIVITGGEPCEYDLTALCEAFEAIGCRCQIETSGTSEIRVTPATWVTVSPKVAMKGKLPVLSSSLERADEIKHPVATQKNVDQLDELLQGVELKSDVVIALQPISQKPRATELCIETCIQRNWRLSVQTHKYLSIA

SEQ ID NO: 35130 - protein, 216 aa, unidentified
  source 1..216: note = Vibrio metoecus
  REGION 1..216: note = tr|A0A0N8VAW7|A0A0N8VAW7_9VIBR 7-carboxy-7-deazaguanine synthase OS=Vibrio metoecus; OX = 1481663 GN=queE PE=3 SV=1
MFETIQGEGVFTGVPAVFVRLQGCPVGCAWCDTKQTWESLDADQTSFSQILLKTSDAPTWCHASAQDVVQRYQTQGYQAKHIVITGGEPCIYDLTELTQAFESIGCHCQIETSGTYEVRATPLTWVTVSPKVAMKGKLPILDSALQRANEIKHPVATEKDIDNLDELLVRAKVTEKTVVALQPISQKPRATELCISTCIARNWRLSIQTHKYLNIA

SEQ ID NO: 35131 - protein, 216 aa, unidentified
  source 1..216: note = Vibrio metoecus
  REGION 1..216: note = tr|A0A067B5G2|A0A067B5G2_9VIBR 7-carboxy-7-deazaguanine synthase OS=Vibrio metoecus; OX = 1481663 GN=queE PE=3 SV=1
MFETIQGEGVFTGVPAVFVRLQGCPVGCAWCDTKQTWESLDADQTSFSQILLKTSDAPTWCHASAQDVVQRYQTQGYQAKHIVITGGEPCIYDLTELTQAFESIGCHCQIETSGTYEVRATPLTWVTVSPKVAMKGKLPILDSALQRANEIKHPVATEKDIDNLDELLVRAKVTEKTVVALQPISQKPRATELCIRTCIARNWRLSIQTHKYLNIA

SEQ ID NO: 35132 - protein, 224 aa, Vibrio metschnikovii
  REGION 1..224: note = tr|C9P4J3|C9P4J3_VIBME 7-carboxy-7-deazaguanine synthase OS=Vibrio metschnikovii CIP 69.14 OX=675813; GN = queE PE=3 SV=1
MTLYKVNEIFETIQGEGVFTGVPAVFVRLQQCPVGCAWCDTKQTWDAEPQDQRSFEQIIVKQGDSPTWCQGSAEQIVAQYQQQGYTAKHIVITGGEPCLYDLVPLTEAFEAIGCQCQIETSGTFEIKASAKTWVTVSPKIAMKGKLPIVPSALQRANEIKHPVGTEKDIAQLEALLAQVAISPDTIIALQPISQKPRATQLCIETCITRNWRLSIQTHKYLNIA

SEQ ID NO: 35133 - protein, 224 aa, Vibrio metschnikovii; identical to SEQ ID NO: 35132
  REGION 1..224: note = tr|A0A380NVU9|A0A380NVU9_VIBME 7-carboxy-7-deazaguanine synthase OS=Vibrio metschnikovii; OX = 28172 GN=queE PE=3 SV=1

SEQ ID NO: 35134 - protein, 216 aa, Vibrio mimicus
  REGION 1..216: note = tr|D2YJD4|D2YJD4_VIBMI 7-carboxy-7-deazaguanine synthase OS=Vibrio mimicus VM603 OX=671074 GN=queE PE=3; SV = 1
MFETIQGEGVFTGVPAVFVRLQGCPVGCAWCDTKQTWETLESDQTSFPQILLKTSDAPTWCQASAQDVIERYRAQGYQAKHIVITGGEPCIYDLTELTQAFEAIGCQCQIETSGTYEILATPTTWVTVSPKVAMKGKLLILDSALQRANEIKHPVATEKDIDNLDELLVRASVDTKTVIALQPISQKPRATELCIRTCIARNWRLSIQTHKYLNIA

SEQ ID NO: 35135 - protein, 216 aa, Vibrio mimicus
  REGION 1..216: note = tr|A0A5B6XH16|A0A5B6XH16_VIBMI 7-carboxy-7-deazaguanine synthase OS=Vibrio mimicus OX=674; GN = queE PE=3 SV=1
MFETIQGEGVFTGVPAVFVRLQGCPVGCAWCDTKQTWETLESDQTSFPQILLKTSDAPTWCQASAQDVIERYRAQGYQAKHIVITGGEPCIYDLTELTQAFEAIGCQCQIETSGTYEILATPTTWVTASPKVAMKGKLPILDSALQRANEIKHPVATEKDIDNLDELLVRASVDAKTVIALQPISQKPRATELCIRTCIARNWRLSIQTHKYLNIA

SEQ ID NO: 35136 - protein, 216 aa, Vibrio mytili
  REGION 1..216: note = tr|A0A0C3I918|A0A0C3I918_9VIBR 7-carboxy-7-deazaguanine synthase OS=Vibrio mytili; OX = 50718 GN=queE PE=3 SV=1
MFETIQGEGIFTGVPAVFIRLQECPVGCSWCDTKQTWEAAESDQRTIGDILVKTGDSPTWCVASASDLVEQYKHQGFNAKHIVITGGEPCIYDLRPLAEAFEIIGCQCQIETSGTYEVITTNNTWVTVSPKVAMKGKLPVLKSALERANEIKHPVGTQKDIDHLDELLASAGVSPKTIVALQPISQKPRATQLCIDTCVERNWRLSIQTHKYLSIA

SEQ ID NO: 35137 - protein, 216 aa, Vibrio natriegens
  REGION 1..216: note = tr|A0A1B1ECI5|A0A1B1ECI5_VIBNA 7-carboxy-7-deazaguanine synthase OS=Vibrio natriegens; OX = 691 GN=queE PE=3 SV=1
MFETIQGEGVFTGVPAVFVRLQECPVGCSWCDTKQTWEAAEEDQRSIGDILIKTEDSPTWCVATAEDIVEQYKKQGFNAKHIVITGGEPCIYDLRPLAQAFEDMGCQCQIETSGTSEVVTTEKTWVTVSPKVAMKGKLPVLKSALERANEIKHPVGTQKDIDHLDELLASAEITPETIIALQPISQKPRATQLCIDTCVARNWRLSIQTHKYLSIA

SEQ ID NO: 35138 - protein, 216 aa, Vibrio navarrensis
  REGION 1..216: note = tr|A0A099LV60|A0A099LV60_9VIBR 7-carboxy-7-deazaguanine synthase OS=Vibrio navarrensis; OX = 29495 GN=queE PE=3 SV=1
MFETIQGEGVFTGVPAVFVRLQVCPVGCSWCDTKQTWQALEQDQRTFGEIILKSGDSPSWCNADAEEIVAQYQQQGFNAKHIVITGGEPCIYDLTSLTEAFEAIGCQCQIETSGTYPVQTSPATWVTVSPKVAMKGKLPVLDSALLRANEIKHPVGTEKDIEQLDLLLARAQVPATTTIALQPISQKARATQLCIETCIARNWRLSVQTHKYLSIA

SEQ ID NO: 35139 - protein, 222 aa, unidentified
  source 1..222: note = Vibrio neocaledonicus
  REGION 1..222: note = tr|A0A4P8G1U7|A0A4P8G1U7_9VIBR 7-carboxy-7-deazaguanine synthase OS=Vibrio neocaledonicus; OX = 1208308 GN=queE PE=3 SV=1
MYKLNEMFETIQGEGVFTGVPAVFVRLQECPVGCSWCDTKQTWYADENDQRQIGDILVKTEDSPTWCVASAENIVEQYQQQGFNAKHIVITGGEPCIYDLRPLTKAFEDMGCQCQIETSGTSEVITSENTWVTVSPKVAMKGKLPVLNSALERANEIKHPVGTQKDIDHLDDLLANANVAAETIIALQPISQKPRATQLCIDTCIARNWRLSVQTHKYLSIA

SEQ ID NO: 35140 - protein, 216 aa, Vibrio neptunius
  REGION 1..216: note = tr|A0A0F4P1U6|A0A0F4P1U6_9VIBR 7-carboxy-7-deazaguanine synthase OS=Vibrio neptunius; OX = 170651 GN=queE PE=3 SV=1
MFETIQGEGVFTGVPSVFVRLQICPVGCAWCDTKQTWDATPQDERPLAEVLAKTEDSPTWCSVSGDDIIEQYRQQGYQAKHIVITGGEPCIYDLRPLTEAFEALGCSCQIETSGTSPVFASENTWVTVSPKVAMKGKLPVLDCALLRANEIKHPVATDKDIEQLDALIERAGVPESTTVALQPISQKPRATQLCIDTCIARNWRLSIQTHKYLSIA

SEQ ID NO: 35141 - protein, 216 aa, Vibrio nereis
  REGION 1..216: note = tr|A0A0M0HV99|A0A0M0HV99_VIBNE 7-carboxy-7-deazaguanine synthase OS=Vibrio nereis OX=693; GN = queE PE=3 SV=1
MFETIQGEGVFTGVPSVFVRLQECPVGCAWCDTKQTWDALPQDERSFGEILVKTEDNTQWCSASADAIVNQYQNQGYTARHIVITGGEPCIYDLRPLTRAFEDIGCKCQIETSGTSEVFATESTWVTVSPKVAMKGKLPVLDSALQRADEIKHPVATQKDIDQLDELLSHVNVSDKTTIALQPISQKPRATELCIDVCVKRNWRLSIQTHKYLSIA

SEQ ID NO: 35142 - protein, 226 aa, Vibrio nigripulchritudo
  REGION 1..226: note = tr|U4K5Q4|U4K5Q4_9VIBR 7-carboxy-7-deazaguanine synthase OS=Vibrio nigripulchritudo OX=28173 GN=queE PE=3; SV = 1
MLNSQYKINEMFETIQGEGTFTGVPSVFVRLQECPVGCAWCDTKQTWEAEEQDQVPIGDIMIKTADSPTWCFVSAGDIVEQYQKHGYTAKNIVITGGEPCVYDLVALTKAFEDIGCQCQIETSGTFEVKATDSTWVTVSPKIAMKGKLPVLVSALERANEIKHPVGTQKDIDQLDELIASADVSDETTIALQPISQKPRATKLCIDTCIARNWRLSVQTHKYLDIA

SEQ ID NO: 35143 - protein, 226 aa, Vibrio nigripulchritudo
  REGION 1..226: note = tr|U4EEE6|U4EEE6_9VIBR 7-carboxy-7-deazaguanine synthase OS=Vibrio nigripulchritudo FTn2 OX=1238441; GN = queE PE=3 SV=1
MLNSQYKINEMFETIQGEGTFTGVPSVFVRLQECPVGCAWCDTKQTWEAEEQHQVPIGDIMIKTADSPTWCFVSAGDIVEQYQKHGYTAKNIVITGGEPCVYDLVALTKAFEDIGCQCQIETSGTFEVKATDSTWVTVSPKIAMKGKLPVLVSALERANEIKHPVGTQKDIDQLDELIASADVSDETTIALQPISQKPRATKLCIDTCIARNWRLSVQTHKYLNIA

SEQ ID NO: 35144 - protein, 222 aa, Vibrio orientalis
  REGION 1..222: note = tr|C9QHW8|C9QHW8_VIBOR 7-carboxy-7-deazaguanine synthase OS=Vibrio orientalis CIP 102891 = ATCC 33934; OX = 675816 GN=queE PE=3 SV=1
MYKINEMFETIQGEGVFTGVPSVFVRLQECPVGCAWCDTKQTWDATPTDERPLNEILAKTEDSPTWCGVSAEDIVNEYKKQGYTAKHIVITGGEPCIYDLRPLTQAFEENGCQCQIETSGTFEVKATTKTWVTVSPKVAMKGKLPVIDSALLRANEIKHPVATQKDIDQLDELLERAKVSEQTTVALQPISQKPRATQLCIDVCVARNWRLSIQTHKYLSIA

SEQ ID NO: 35145 - protein, 216 aa, Vibrio owensii
  REGION 1..216: note = tr|A0A0C1Z4T3|A0A0C1Z4T3_9VIBR 7-carboxy-7-deazaguanine synthase OS=Vibrio owensii CAIM 1854 = LMG 25443 OX=1229493 GN=queE PE=3 SV=1
MFETIQGEGVFTGAPAVFVRLQVCPVGCSWCDTKQTWYAEEEDQRQIGDILVKTEDSPTWCFASAEDIVAEYKKQGFNAKHIVITGGEPCIYDLRALTAAFEEMGCQCQIETSGTSEVVTSESTWVTVSPKVAMKGKLPVLKSALERANEIKHPVGTQKDIDQLDSLLASADIAEKTVIALQPISQKPRATQLCIDTCVARNWRLSVQTHKYLSIA

SEQ ID NO: 35146 - protein, 221 aa, Vibrio owensii
  REGION 1..221: note = tr|A0A3G2PUM7|A0A3G2PUM7_9VIBR 7-carboxy-7-deazaguanine synthase OS=Vibrio owensii; OX = 696485 GN=queE PE=3 SV=1
MLKVNEIFETIQGEGVFTGVPSIFLRLQGCPVGCAWCDTKHTWEVDLEHEVSFDAVIGKCTESEQWGQVSVEQVVKECSERYSAKHVVITGGEPCMYDLTSLTSRLESFGFTCQIETSGTFDVNASEACWVTVSPKIGMKGGLNIQAQAVSRANEIKYPIGTQKDLDNLTDLLSTFETRENVVVALQPISQKKRATELCIEACIQNNWRLSIQTHKYLQIA

SEQ ID NO: 35147 - protein, 224 aa, unidentified
  source 1..224: note = Vibrio palustris
  REGION 1..224: note = tr|A0A1R4B2B0|A0A1R4B2B0_9VIBR 7-carboxy-7-deazaguanine synthase OS=Vibrio palustris; OX = 1918946 GN=queE PE=3 SV=1
MTLYKINEMFETIQGEGVFTGVPAVFVRLQQCPVGCAWCDTKQTWDATPQDETTFDVIIQKAQDNPQWCQASADDIIQRYQQEGYTARHIVITGGEPCIYDLHALTHAFEAIGCRCQIETSGTFEVKASVDTWVTVSPKVAMKGKLPIIDSALLRANEIKHPVATAKDIDNLDALVSRVDIANSTEIALQPISQKGRATELCIETCIKRNWRLSIQTHKYLSIA

SEQ ID NO: 35148 - protein, 221 aa, unidentified
  source 1..221: note = Vibrio panuliri
  REGION 1..221: note = tr|A0A1Q9HFM1|A0A1Q9HFM1_9VIBR 7-carboxy-7-deazaguanine synthase OS=Vibrio panuliri; OX = 1381081 GN=queE PE=3 SV=1
MYKLNEMFETIQGEGVFTGVPSVFIRLQYCPVGCAWCDTKHTWSAEPQDERAIEQVLEKTQESATWCAISAEELVAIYQQNYTVKHIVITGGEPCEYDLIPLTHAFESIGCQCQIETSGTADIHASDNTWVTVSPKVAMKAQLPIKSSALARANEIKHPVGTSKDIEQLDQLLARGVASQEVVIALQPISQKPRATQLCIDTCIERNWRLSIQTHKYLDIA

SEQ ID NO: 35149 - protein, 222 aa, Vibrio parahaemolyticus
  REGION 1..222: note = tr|A0A2R9VKD0|A0A2R9VKD0_VIBPH 7-carboxy-7-deazaguanine synthase OS=Vibrio parahaemolyticus OX=670 GN=queE PE=3 SV=1
MYKLNEMFETIQGEGIFTGVPAVFVRLQECPVGCSWCDTKQTWDAEEKDQRPIGDILVKTEDSPTWCTASAEDIVEQYKQQGFNAKHIVITGGEPCIYDLRPLSKAFEDMGCQCQIETSGTSEVVTSEKTWVTVSPKVAMKGKLPVLRSALERANEIKHPVGTQKDIDHLDELLANADIKTETVIALQPISQKPRATQLCIETCIARNWRLSIQTHKYLSIA

SEQ ID NO: 35150 - protein, 222 aa, Vibrio parahaemolyticus
  REGION 1..222: note = tr|Q87P79|Q87P79_VIBPA 7-carboxy-7-deazaguanine synthase OS=Vibrio parahaemolyticus serotype O3:K6 (strain RIMD 2210633) OX=223926 GN=queE PE=3 SV=1
MYKLNEMFETIQGEGIFTGVPAVFVRLQECPVGCSWCDTKQTWDAEEKDQRPIGDILVKTEDSPTWCTASAEDIVEQYKQQGFNAKHIVITGGEPCIYDLRPLSKAFEDMGCQCQIETSGTSEVVTSEKTWVTVSPKVAMKGKLPVLRSALERANEIKHPVGTQKDIDHLDELLANADIKVETVIALQPISQKPRATQLCIETCIARNWRLSIQTHKYLSIA

SEQ ID NO: 35151 - protein, 222 aa, Vibrio pectenicida
  REGION 1..222: note = tr|A0A427TZT9|A0A427TZT9_9VIBR 7-carboxy-7-deazaguanine synthase OS=Vibrio pectenicida; OX = 62763 GN=queE PE=3 SV=1
MYKINEMFETIQGEGVFTGIPSVFIRLQECAVGCSWCDTKHTWDATPQDERSLKEILTKTQDLPTWCSASCVDIIEQYHQLGYQAQHVVITGGEPCIYDLRPLTEAFESIGCQCQIETSGTSPILASEDTWVTVSPKVAMKGKLPILDSALLRANEIKHPVGTMKDIEQLDELIKRADIPETTVIALQPISQKSRATQLCITTCIERNWRLSIQSHKYLNIA

SEQ ID NO: 35152 - protein, 216 aa, Vibrio penaeicida
  REGION 1..216: note = tr|A0A432DAN7|A0A432DAN7_9VIBR 7-carboxy-7-deazaguanine synthase OS=Vibrio penaeicida; OX = 104609 GN=queE PE=3 SV=1
MFETIQGEGTFTGVPSVFVRLQECPVGCAWCDTKQTWEAEEKDLAPIGDIMVKTEDSPTWCFVSAAQIVEQYKLHGFSAKNIVITGGEPCVYDLVNLTEAFEKIGCQCQIETSGTFEVKATDSTWVTVSPKIAMKGKLPVLKSALERADEIKHPVGTQKDIDQLDELIASANVSEKTTIALQPISQKPRATKLCIDTCIERNWRLSVQTHKYLNIA

SEQ ID NO: 35153 - protein, 222 aa, Vibrio ponticus
  REGION 1..222: note = tr|A0A090PHX4|A0A090PHX4_9VIBR 7-carboxy-7-deazaguanine synthase OS=Vibrio ponticus; OX = 265668 GN=queE PE=3 SV=1
MLYKLNEMFETIQGEGVFTGVPSVFIRLQYCPVGCAWCDTKHTWEVDIKDECETQEILTKSQESSKWANVTAQELVAIYQQRFNAKHIVITGGEPCEYDLRPLTAAFEEIGCQCQIETSGTCDVLTSENTWVTVSPKIAMKGQRDVIASAMARANEIKHPVGTGKDIEQLDQLLEQCPVAKQTIIALQPISQKARATQLCIDTCIERNWRLSIQTHKYLDIA

SEQ ID NO: 35154 - protein, 221 aa, Vibrio ponticus
  REGION 1..221: note = tr|A0A3N3DWH9|A0A3N3DWH9_9VIBR 7-carboxy-7-deazaguanine synthase OS=Vibrio ponticus; OX = 265668 GN=queE PE=3 SV=1
MYKLNEMFQTIQGEGSFTGVPSVFIRLQLCRVGCAWCDTKQTWQINLDDQTDVSHILSKEEESPKWCSISAQELVELYRQKYTAKHIVITGGEPCEYDLLPLTQAFEAIGCQCQIETSGTSPVSVTADTWVTVSPKIAMKGRLPVLDSALARANEIKHPVGTGKDIEQLDQLLAGVQLKSDAIIALQPISQKPRATQLCIDTCIERNWRLSIQTHKYLNIA

SEQ ID NO: 35155 - protein, 222 aa, Vibrio proteolyticus
  REGION 1..222: note = tr|U2ZIM4|U2ZIM4_VIBPR 7-carboxy-7-deazaguanine synthase OS=Vibrio proteolyticus NBRC 13287 OX=1219065; GN = queE PE=3 SV=1
MYKVNEMFETIQGEGIFTGVPSVFVRLQICPVGCAWCDTKQTWTAEAEDERTIGDILLKTEDSPTWCRQTAEQIVATYKQQGYRAKHIVITGGEPCIYDLRPLSEAFEAIGCQCQIETSGTSEVLTSEKTWVTVSPKVAMKGKLPVLDSALLRANEVKHPVATQKDIDQLDVLLQRAGVPESTPIALQPISQKPRATQLCIDTCIERNWRLSIQTHKYLSIA

SEQ ID NO: 35156 - protein, 222 aa, unidentified
  source 1..222: note = Vibrio qinghaiensis
  REGION 1..222: note = tr|A0A223MX91|A0A223MX91_9VIBR 7-carboxy-7-deazaguanine synthase OS=Vibrio qinghaiensis; OX = 2025808 GN=queE PE=3 SV=1
MYKINEMFETIQGEGVYTGVPSVFIRLQECPVGCAWCDTKQTWDATPQDKRPINEVLTKTQDSPAWCSVSADELVLLYKKQGYNAKHIVITGGEPCIYDLRSLAQAFEAMGCHIQIETSGTFPVQTSADTWVTVSPKVAMKGKLPVLDSALLRANEIKHPVATAKDIEQLDALLLRAQVPDSTVIALQPISQKERATQLCIETCIARNWRLSIQTHKYLSIA

SEQ ID NO: 35157 - protein, 238 aa, unidentified
  source 1..238: note = Vibrio quintilis
  REGION 1..238: note = tr|A0A1M7Z2M7|A0A1M7Z2M7_9VIBR 7-carboxy-7-deazaguanine synthase OS=Vibrio quintilis; OX = 1117707 GN=queE PE=3 SV=1
MVCDQCSLSSVIRMTSLYKINEIFQTIQGEGVFTGVPSVFIRLQGCPVGCAWCDTKQTWETDEADRREFQDVIMKTQDSPAWCEMTPEEIVKRYQEQGYTAKHIVITGGEPCIYDLTALSCAFEHVGCRCQIETSGTSEIKASENTWVTVSPKIGMKGKLPVLTSALLRANEIKHPVGTLKDIEQLDTLLKQARIPEETIIALQPISQKQRATELCIQVCTERNWRLSIQTHKYLSIA

SEQ ID NO: 35158 - protein, 221 aa, unidentified
  source 1..221: note = Vibrio renipiscarius
  REGION 1..221: note = tr|A0A0C2NP25|A0A0C2NP25_9VIBR 7-carboxy-7-deazaguanine synthase OS=Vibrio renipiscarius; OX = 1461322 GN=queE PE=3 SV=1
MYKLNEMFETIQGEGAFTGVPSVFIRLQQCDVGCSWCDTKQTWSADPEDEVKLVDVMAKQQDSAHWCNVSVEDIVSLYQATYTARHIVITGGEPCLYDLTPLTSAFETLGCVCQIETSGTSEIRTTPNTWVTVSPKVAMKGRLPILNSALVRANEIKHPVATQKDIDILDDLLASVCFDPQRIIALQPISQKERATQLCIETCIKRNWRLSIQTHKYLQIA

SEQ ID NO: 35159 - protein, 216 aa, Vibrio rotiferianus
  REGION 1..216: note = tr|A0A2K7SYP6|A0A2K7SYP6_9VIBR 7-carboxy-7-deazaguanine synthase OS=Vibrio rotiferianus; OX = 190895 GN=queE PE=3 SV=1
MFETIQGEGVFTGVPAVFVRLQECPVGCSWCDTKQTWYAEEEDQRQIGDILVKTEDSPTWCFASAEDIVAEYKKQGFNAKHIVITGGEPCIYDLRALTAAFEEMGCQCQIETSGTSEVVTSESTWVTVSPKVAMKGKLPVLKSALERANEIKHPVGTQKDIDQLDALLASAEIAEKTVIALQPISQKPRATQLCIDTCVARNWRLSVQTHKYLSIA

SEQ ID NO: 35160 - protein, 226 aa, Vibrio rotiferianus
  REGION 1..226: note = tr|A0A510I4W4|A0A510I4W4_9VIBR 7-carboxy-7-deazaguanine synthase OS=Vibrio rotiferianus; OX = 190895 GN=queE PE=3 SV=1
MSSTLYKLNEMFETIQGEGVFTGVPAVFVRLQECPVGCSWCDTKQTWYAEEEDQRQIGDILVKTEDSPTWCFASAEDIVAEYKKQGFNAKHIVITGGEPCIYDLRALTAAFEEMGCQCQIETSGTSEVVTSEGTWVTVSPKVAMKGKLPVLKSALERANEIKHPVGTQKDIDQLDVLLASAEIGEKTVIALQPISQKPRATQLCIDTCVARNWRLSVQTHKYLSIA

SEQ ID NO: 35161 - protein, 232 aa, Vibrio ruber
  REGION 1..232: note = tr|A0A1R4LNY1|A0A1R4LNY1_9VIBR 7-carboxy-7-deazaguanine synthase OS=Vibrio ruber DSM 16370 OX=1123498 GN=queE PE=3 SV=1
MTAELGFILSIYRVNEIFQTIQGEGVFTGVPAVFVRLQGCPVGCAWCDTKQTWDTELQDQRAVEEIIVKTQDSPLWCQMSAEAIIDCYHRQGYTAKHIVITGGEPCLYDLTALTTAFETIGCRCQIETSGTADIQVSVHTWVTVSPKIAMKGRLPVLESALLRANEIKHPVGTRKDIEQLDHLLHRTPVADDTIIALQPISQKPRATELCIEVCIERNWRLSIQTHKYLCIA

SEQ ID NO: 35162 - protein, 222 aa, Vibrio rumoiensis
  REGION 1..222: note = tr|A0A1E5E513|A0A1E5E513_9VIBR 7-carboxy-7-deazaguanine synthase OS=Vibrio rumoiensis 1S-45 OX=1188252 GN=queE PE=3 SV=1
MYKVNEVFQTIQGEGYFTGVPSVFVRLQVCPVGCAWCDTKQTWTAEIQDETTLGDIMLKQGDSPTWSHATAESIIQQYVAQGYTAKHIVITGGEPCIYDLIPLTQAFEAIGCRCQIETSGTSEILCSSNTWVTVSPKVAMKGQLDVLDSALQRANEIKHPVGTQKDIDHLDALLKKANCEAKEHIALQPISQKPRATELCMDTCIERNWRLSIQTHKYLNIA

SEQ ID NO: 35163 - protein, 231 aa, Vibrio sagamiensis
  REGION 1..231: note = tr|A0A511QDV8|A0A511QDV8_9VIBR 7-carboxy-7-deazaguanine synthase OS=Vibrio sagamiensis NBRC 104589 OX=1219064 GN=queE PE=3 SV=1
MFYKQVSSTLYKLNEMFETIQGEGVFTGVPAVFIRLQECPVGCSWCDTKQTWFAEEADKVRIGDILLKKEDSPTWCHVTSDEIIAEYKKQGFNAQHIVITGGEPCIYDLRSLTHAFEELGCQCQIETSGTSEVVASENSWVTLSPKIAMKGKLPVLRSALRRANEIKHPVGTQKDIEQLDHLLSSANLTSQPVIALQPISQKSRATKLCIDTCIERNWRLSIQTHKYLNIA

SEQ ID NO: 35164 - protein, 221 aa, Vibrio scophthalmi
  REGION 1..221: note = tr|A0A1E3WNJ0|A0A1E3WNJ0_9VIBR 7-carboxy-7-deazaguanine synthase OS=Vibrio scophthalmi; OX = 45658 GN=queE PE=3 SV=1
MYKLNEMFETIQGEGAFTGTPSVFIRLQECAVGCAWCDTQQTWSADPEDEVKLVDILAKQGDSPTWCRVSSAEIVALYQQTYRAKHIVITGGEPCIYDLRPLTEAFESIGCVCQIETSGTADIRVSDQTWVTVSPKIAMKGRLEVLEGSLIRANEIKHPVGTQKDIQQLDDLLAGVAIKPSTMIALQPISQKNRATQLCIDTCIARNWRLSIQTHKYLEIA

SEQ ID NO: 35165 - protein, 221 aa, Vibrio scophthalmi
  REGION 1..221: note = tr|A0A1B1NNT9|A0A1B1NNT9_9VIBR 7-carboxy-7-deazaguanine synthase OS=Vibrio scophthalmi; OX = 45658 GN=queE PE=3 SV=1
MYKLNEMFETIQGEGAFTGTPSVFIRLQECAVGCAWCDTQQTWSADPEDEVKLVDILAKRGDSPTWCRVSSTEIVALYQQKYGAKHIVITGGEPCIYDLRPLTEAFESIGCVCQVETSGTADIRVSEQTWVTVSPKVAMKGRLEVLEGSLIRANEIKHPVGTQKDIQQLDDLLAGVAIKPSTVIALQPISQKNRATQLCIDTCIARNWRLSIQTHKYLEIA

SEQ ID NO: 35166 - protein, 226 aa, Vibrio shilonii
  REGION 1..226: note = tr|A6D5M8|A6D5M8_9VIBR 7-carboxy-7-deazaguanine synthase OS=Vibrio shilonii AK1 OX=391591 GN=queE PE=3 SV=1
MSNTRFKINEMFETIQGEGMFTGVPAVFIRLQICNVGCSWCDTKQTWDANNEDQRSFGEIITKQGDSPTWSDVDAAEIVAMYQSQQFNAKHIVITGGEPCEYDLTALCEAFEAIGCRCQIETSGTSEIRVTPVTWVTVSPKVAMKGKLPVLSSSLERADEIKHPVATQKNVDQLDELLQGVELKSDVVIALQPISQKPRATELCIETCIQRNWRLSVQTHKYLSIA

SEQ ID NO: 35167 - protein, 216 aa, Vibrio sinaloensis
  REGION 1..216: note = tr|E8M5V6|E8M5V6_9VIBR 7-carboxy-7-deazaguanine synthase OS=Vibrio sinaloensis DSM 21326 OX=945550 GN=queE; PE = 3 SV=1
MFETIQGEGVYTGVPSVFVRLQECPVGCAWCDTKQTWEALPEDETSFDRIMVKTQDSPTWCSTSAEGIVNQYRVQGYTAKHIVITGGEPCVYDLRPLTEAFEAIGCQCQIETSGTSEVLTSDNTWVTVSPKVAMKGKLPVLDSALLRADEIKHPVATEKDIDQLDELIKRAQVPKQTTIALQPISQKPRATQLCIDVCVKRNWRLSIQTHKYLSIA

SEQ ID NO: 35168 - protein, 216 aa, Vibrio sinaloensis
  REGION 1..216: note = tr|A0A0A5HQ45|A0A0A5HQ45_9VIBR 7-carboxy-7-deazaguanine synthase OS=Vibrio sinaloensis; OX = 379097 GN=queE PE=3 SV=1
MFETIQGEGVFTGVPSVFVRLQECPVGCAWCDTKQTWDATPQDETSFSEIMKKTQDSPTWCQSSAQGIVDEYRNQEYTAKHVVITGGEPCIYDLTPLTEAFEAIGCQCQIETSGTSEVRATDNTWVTVSPKVAMKGKLPVLDSALVRANEIKHPVATQKDIDQLDELLERAKVPETTVVALQPISQKPRATQLCIDVCVKRNWRLSIQTHKYLSIA

SEQ ID NO: 35169 - protein, 216 aa, Vibrio sp.
  REGION 1..216: note = tr|A0A3N9THW3|A0A3N9THW3_9VIBR 7-carboxy-7-deazaguanine synthase OS=Vibrio sp. LJC006; OX = 2487322 GN=queE PE=3 SV=1
MFETIQGEGVFTGVPSVFIRLQVCPVGCAWCDTKQTWDARPDDERVIGDILLKQEDSPTWTSISAPELVEVYREKGFIAKHIVITGGEPCIYDLVALTQAFENIGCRCQIETSGTSEVKVTPDTWVTVSPKIAMKGKLPVLPQALERANEIKHPVGTEKDIEQLDVLLAGVNLKKGVEISLQPISQKSRATKLCIDTCIERNWRLSIQTHKYLNIA

SEQ ID NO: 35170 - protein, 226 aa, Vibrio sp.
  REGION 1..226: note = tr|A0A084T4I3|A0A084T4I3_9VIBR 7-carboxy-7-deazaguanine synthase OS=Vibrio sp. ER1A; OX = 1517681 GN=queE PE=3 SV=1
MSNTRFKINEMFETIQGEGMFTGVPAVFIRLQICNVGCSWCDTKQTWDANNEDQRSFGEIISKQGDSPTWSDVDAAEIVAMYQSQQFNAKHIVITGGEPCEYDLTALCEAFEAIGCRCQIETSGTSEIRVTPATWVTVSPKVAMKGKLPVLSSSLERADEIKHPVATQKNVDQLDELLQGVELKSDVVIALQPISQKPRATELCIETCIQRNWRLSVQTHKYLSIA

SEQ ID NO: 35171 - protein, 232 aa, unidentified
  source 1..232: note = Vibrio spartinae
  REGION 1..232: note = tr|A0A1N6M3X4|A0A1N6M3X4_9VIBR 7-carboxy-7-deazaguanine synthase OS=Vibrio spartinae; OX = 1918945 GN=queE PE=3 SV=1
MTAELGFILSIYKVNEIFQTIQGEGVFTGVPAVFVRLQGCPVGCSWCDTKHTWFTEPQDQRSVDDIIVKTQDSPLWCPMSAAAIIDCYHRQGYTAKHIVMTGGEPCLYDLTVLTEAFEAIGCHCQIETSGTADVRASAQTWVTVSPKIAMKGRLPVLEGALRRANEIKHPVGTRKDIEQLDHLLHQTPVADDTIIALQPISQKPRATELCIEVCIERNWRLSVQTHKYLAIA

SEQ ID NO: 35172 - protein, 216 aa, Vibrio splendidus
  REGION 1..216: note = tr|A0A1E5B8F1|A0A1E5B8F1_VIBSP 7-carboxy-7-deazaguanine synthase OS=Vibrio splendidus ZS-139 OX=617140 GN=queE PE=3 SV=1
MFETIQGEGVFTGVPAVFVRLQICPVGCSWCDTKQTWEALPEDETSLGDIMVKTEDSPTWSAIDAQGVVNEYIKQGYTAEHIVITGGEPCIYDLVPLTEAFEQHGCRCQIETSGTSEVKATSDTWVTVSPKVAMKAKLEILDSALQRANEIKHPVGTGKDIDQLDGLLERADVSSETVIALQPISQKDRATQLCIDTCIERNWRLSIQTHKYLSIA

SEQ ID NO: 35173 - protein, 216 aa, Vibrio splendidus
  REGION 1..216: note = tr|A0A0P6YHN6|A0A0P6YHN6_VIBSP 7-carboxy-7-deazaguanine synthase OS=Vibrio splendidus; OX = 29497 GN=queE PE=3 SV=1
MFETIQGEGVFTGVPAVFVRLQICPVGCSWCDTKQTWEALPEDETSLGDIMVKTEDSPTWSAIDAQGIVNEYIKQGYTAKHIVITGGEPCIYDLVPLTEAFEQHGCRCQIETSGTSEVKATPDTWVTVSPKVAMKAKLDILDSALVRANEIKHPVGTGKDIEQLDALIARADVPENTVIALQPISQKERATQLCIDTCIERNWRLSIQTHKYLSIA

SEQ ID NO: 35174 - protein, 221 aa, Vibrio superstes
  REGION 1..221: note = tr|A0A511QU40|A0A511QU40_9VIBR 7-carboxy-7-deazaguanine synthase OS=Vibrio superstes NBRC 103154 OX=1219062 GN=ygcF PE=3 SV=1
MLKINEMFETIQGEGFFTGVPSIFIRLQGCPVGCAWCDTKQTWDVNLEDETDFKTVLLKQGDDERWCSTSESALVAYCLEQYSAKHVVITGGEPCQYDLLPLTTELEANGYRCQIETSGTFEVLATPNTWVTVSPKIGMKGKLPIEPSAMSRANEVKHPVGKESDIDDLKALLEVSTLQDGVEVLLQPISQKPRATKLCIDTCIANNWRLSVQTHKYLDIA

SEQ ID NO: 35175 - protein, 225 aa, Vibrio tapetis
  REGION 1..225: note = tr|A0A2N8ZA27|A0A2N8ZA27_9VIBR 7-carboxy-7-deazaguanine synthase OS=Vibrio tapetis subsp. tapetis OX=1671868 GN=ygcF PE=3 SV=1
MTTRYKINEMFETIQGEGSFTGVPSVFVRLQECPVGCAWCDTKQTWTAEPQDEVPLGDIMLKTADTPTWCSVSGQDIVSEYQRQGYTATNIVITGGEPCVYDLIDLCEAFEAIGCQCQLETSGTYEVKVTTTTWVTVSPKVAMKGKLPVLISALERADEIKHPVGTVKDIEQLDELIASANLDSNTSIALQPISQKPRATQLCIDTCIARNWRLSIQTHKYLDIA

SEQ ID NO: 35176 - protein, 222 aa, Vibrio tasmaniensis
  REGION 1..222: note = tr|B7VNE0|B7VNE0_VIBTL 7-carboxy-7-deazaguanine synthase OS=Vibrio tasmaniensis (strain LGP32) OX=575788; GN = queE PE=3 SV=1
MYKINEMFETIQGEGVFTGVPAVFVRLQICPVGCSWCDTKQTWEALPEDETSLGDIMVKTEDSPTWTAIDAQGIVNEYIKQGYTAKHIVITGGEPCIYDLVPLTEAFEQHGCRCQIETSGTSEVKATPDTWVTVSPKVSMKAKLDILDSALVRANEIKHPVGTGKDIEQLDALIARADVPENTVIALQPISQKERATQLCIDTCIERNWRLSIQTHKYLSIA

SEQ ID NO: 35177 - protein, 216 aa, Vibrio tasmaniensis; identical to SEQ ID NO: 35173
  REGION 1..216: note = tr|A0A2N7NNU9|A0A2N7NNU9_9VIBR 7-carboxy-7-deazaguanine synthase OS=Vibrio tasmaniensis; OX = 212663 GN=queE PE=3 SV=1

SEQ ID NO: 35178 - protein, 226 aa, unidentified
  source 1..226: note = Vibrio thalassae
  REGION 1..226: note = tr|A0A240EMW0|A0A240EMW0_9VIBR 7-carboxy-7-deazaguanine synthase OS=Vibrio thalassae; OX = 1243014 GN=queE PE=3 SV=1
MSNTRFRINEMFETIQGEGVFTGVPAVFIRLQICNVGCSWCDTKQTWEAKNEDQRSFGEIIAKQGDSPTWSDVDAAEIVAMYQSQQFNAKHIVITGGEPCEYDLTALCDAFEAIGCRCQIETSGTSEIRVTPATWVTVSPKVAMKGKLPVLPSSLERADEIKHPVATQKNVDQLDELLQGVKLKGDVVIALQPISQKPRATELCIETCIQRNWRLSVQTHKYLSIA

SEQ ID NO: 35179 - protein, 216 aa, unidentified
  source 1..216: note = Vibrio toranzoniae
  REGION 1..216: note = tr|A0A109DAW1|A0A109DAW1_9VIBR 7-carboxy-7-deazaguanine synthase OS=Vibrio toranzoniae; OX = 1194427 GN=queE PE=3 SV=1
MFETIQGEGMFTGVPAVFVRLQVCPVGCSWCDTKQTWDALPKDETSLGNIMVKTEDSPTWSSIDAQGIVNEYIKQGYTAKHIVITGGEPCIYDLVPLTEAFEQHGCRCQIETSGTSEVKATSDTWVTVSPKVAMKAKLDILDSTLQRANEIKHPVGTSKDIEQLDALLERVDVSSDTIIALQPISQKDRATQLCIDTCIERNWRLSIQTHKYLSIA

SEQ ID NO: 35180 - protein, 216 aa, Vibrio tubiashii
  REGION 1..216: note = tr|F9T268|F9T268_9VIBR 7-carboxy-7-deazaguanine synthase OS=Vibrio tubiashii ATCC 19109 OX=1051646 GN=queE; PE = 3 SV=1
MFETIQGEGVFTGVPSVFVRLQECPVGCAWCDTKQTWDATPQDERPLDEILAKKEDSPTWCSVSAMDIVNEYIKQGYTAKHVVITGGEPCIYDLVPLTQAFEAHGCRCQIETSGTSEVKTTDNTWVTVSPKVAMKGKLPVLDSALVRANEIKHPVATQKDIDHLDELLERANVPEETTIALQPISQKPRATQLCIDVCVARNWRLSIQTHKYLSIA

SEQ ID NO: 35181 - protein, 216 aa, Vibrio tubiashii
  REGION 1..216: note = tr|A0A0A5I7Z1|A0A0A5I7Z1_9VIBR 7-carboxy-7-deazaguanine synthase OS=Vibrio tubiashii; OX = 29498 GN=queE PE=3 SV=1
MFETIQGEGIFTGVPAVFVRLQECPVGCAWCDTKQTWDATPSDERPFDEVLAKREDSPTWCSVTALDIVDQYNKQGYTAKHVVITGGEPCIYDLVPLTQAFEEIGCQCQIETSGTSPVLATENTWVTVSPKVAMKGKLPVLDSALVRANEIKHPVATEKDIDHLDELLARASVPKSTIIALQPISQKLRATQLCIDICIARNWRLSVQTHKYLSIA

SEQ ID NO: 35182 - protein, 195 aa, Vibrio variabilis
  REGION 1..195: note = tr|A0A090TF85|A0A090TF85_9VIBR 7-carboxy-7-deazaguanine synthase OS=Vibrio variabilis; OX = 990271 GN=queE PE=3 SV=1
MFVRLQGCPVGCPWCDTKHTWEVKPEQEATFADIPIKSVENEKWGAITESDLVKFCLDNYSARHIVITGGEPCMYDLTNLTRMFQAYEFTCQVETSGTYEVLVSEQTWITVSPKVNMKGGLALVPQALGRANEIKHPVGTHKDIDNLHELLVNYETKSDVVVALQPISQKERATALVWRSALKTIGDSLYKYTNI

SEQ ID NO: 35183 - protein, 226 aa, Vibrio variabilis; identical to SEQ ID NO: 35126
  REGION 1..226: note = tr|A0A090SGH9|A0A090SGH9_9VIBR 7-carboxy-7-deazaguanine synthase OS=Vibrio variabilis; OX = 990271 GN=queE PE=3 SV=1

SEQ ID NO: 35184 - protein, 224 aa, Vibrio vulnificus
  REGION 1..224: note = tr|A0A3Q0L6D6|A0A3Q0L6D6_VIBVU 7-carboxy-7-deazaguanine synthase OS=Vibrio vulnificus (strain CMCP6) OX=216895 GN=queE PE=3 SV=1
MTLYKVNEMFETIQGEGVFTGVPAVFVRLQICPVGCSWCDTKQTWEAAEQDEQSFAEIIVKTGDSPTWCQADAAAIVEQYQRQGYSAKHIVITGGEPCLYDLTELTQAFEAIGCQCQIETSGTYEVKASENTWVTVSPKVAMKGKLPILDSALQRANEIKHPVGTQKDIDQLDALLLRAQVPATTVIALQPISQKERATQLCIDTCIKRNWRLSIQTHKYLSIA

SEQ ID NO: 35185 - protein, 216 aa, Vibrio vulnificus
  REGION 1..216: note = tr|A0A087IUC5|A0A087IUC5_VIBVL 7-carboxy-7-deazaguanine synthase OS=Vibrio vulnificus; OX = 672 GN=queE PE=3 SV=1
MFETIQGEGVFTGVPAVFVRLQICPVGCSWCDTKQTWEAAEQDEQSFAEIIVKTGDSPTWCQADAESIVEQYQRQGYSAKHIVITGGEPCLYDLTELTQAFEAIGCQCQIETSGTYEVKASANTWVTVSPKVAMKGKLPILDSALQRANEIKHPVGTQKDIDQLDALLLRAQVPATTTIALQPISQKERATQLCIDTCIKRNWRLSIQTHKYLSIA

SEQ ID NO: 35186 - protein, 216 aa, unidentified
  source 1..216: note = Vibrio xiamenensis
  REGION 1..216: note = tr|A0A1G7YGH6|A0A1G7YGH6_9VIBR 7-carboxy-7-deazaguanine synthase OS=Vibrio xiamenensis; OX = 861298 GN=queE PE=3 SV=1
MFETIQGEGTFTGVPSVFVRLQVCPVGCAWCDTKQTWTAEPEDERTFEQIIVKTQDSPTWCAMSAEEIVAQYQQQGYHAKHIVITGGEPCIYDLRPLTAAFEHLGCQCQIETSGTSEVLVSAKTWVTVSPKVAMKGKLPVLNSALERANEIKHPVGTQKDIDQLDVLLAGANIAPNTVIALQPISQKPRATQLCIDTCIERNWRLSVQTHKYLSIA

SEQ ID NO: 35187 - protein, 222 aa, unidentified
  source 1..222: note = Vibrionales bacterium
  REGION 1..222: note = tr|A0A366XP63|A0A366XP63_9GAMM 7-carboxy-7-deazaguanine synthase OS=Vibrionales bacterium C3R12 OX=2267228 GN=queE PE=3 SV=1
MYKINEMFETIQGEGVFTGVPAVFVRLQECPVGCAWCDTKQTWDATPQDERPLAEVLAKTSDSPTWCSVSAADIVNQYQASGFTAKHIVITGGEPCIYDLIPLTEAFEVLGCKCQIETSGTSEVKVTPSTWVTVSPKVAMKGKLPILKSAFLRANEIKHPVGTQKDIDHLDDLIETFGTADKAIVALQPISQKDRATQLCIETCVARNWRLSIQTHKYLSIA

SEQ ID NO: 35188 - protein, 216 aa, unidentified
  source 1..216: note = Vibrionales bacterium
  REGION 1..216: note = tr|A5L8U0|A5L8U0_VIBBS 7-carboxy-7-deazaguanine synthase OS=Vibrionales bacterium (strain SWAT-3); OX = 391574 GN=queE PE=3 SV=1
MFETIQGEGVFTGVPAVFVRLQICPVGCSWCDTKQTWEALPEDETSLGDIMVKTEDSPTWSSIDAQGIVNEYIKQGYTAKHIVITGGEPCIYDLVPLTEAFEKHGCRCQIETSGTSEVKATPDTWVTVSPKVAMKAKLEILDSALQRANEIKHPVGTSKDIEQLDGLLERAEVSDDTVIALQPISQKDRATKLCIDTCIERNWRLSIQTHKYLSIA

SEQ ID NO: 35189 - protein, 193 aa, unidentified
  source 1..193: note = Vibrionimonas magnilacihabitans
  REGION 1..193: note = tr|A0A2S8SGP4|A0A2S8SGP4_9BACT 7-carboxy-7-deazaguanine synthase OS=Vibrionimonas magnilacihabitans OX=669455 GN=queE PE=3 SV=1
MESFYTLQGEGFHQGRAAYFIRLGGCDVGCFWCDVKESWDASQHPLLSVEAIVGEAKKYPGRLAVITGGEPLMHSLDELTHALQEAGFETNIETSGSSPLSGNWNWICLSPKKFKAPLPEIVPLAHELKVIIYNKHDFTWAETYAAQVNPTCKLYLQPEWDQSDKVTPLIIDYIKSNPQWELSLQVHKYIHVP

SEQ ID NO: 35190 - protein, 217 aa, unidentified
  source 1..217: note = Vicingus serpentipes
  REGION 1..217: note = tr|A0A5C6RVY9|A0A5C6RVY9_9FLAO 7-carboxy-7-deazaguanine synthase OS=Vicingus serpentipes; OX = 1926625 GN=queE PE=3 SV=1
MINEIDLASLKEKELLEKGLKLPIMEEFYSIQGEGYNSGKAAYFIRVGGCDVGCHWCDVKESWNPNTHPLTDISQIVKNIQKFPAKSIVVTGGEPTIYNLEEITTQLLQIGVELFLETSGAYKLTGKWHWICLSPKKNKLPLKENYSLAHELKVIIHNKHDLRWAEEQAEFVNKKCKLYLQPEWSKVDEIMPIIIDYVMENPKWNVSLQTHKYMKIP

SEQ ID NO: 35191 - protein, 241 aa, unidentified
  source 1..241: note = Victivallales bacterium
  REGION 1..241: note = tr|A0A2S0KU47|A0A2S0KU47_9BACT 7-carboxy-7-deazaguanine synthase OS=Victivallales bacterium CCUG 44730 OX=2094242 GN=queE PE=3 SV=1
MAARSACIGSASANPTTPPSPISRSSIAVRLVESFTSLQGESTHAGRICFFIRLAGCNLDCNYCDTRYGRSFGAGEPASVDELVRRAQESGTKLVEITGGEPLATPETPELCRRLLDAGFEVLLETNCSLPIAEIPREVRKILDCKLPGSGMAERNDFSNYALLAPHDEVKFVISCRADFDAMLEVIRRYDLPSKTANLLASPVWGRVAFTDLAEWVVSSRAPVRMQLQMHKLIWGDRPGV

SEQ ID NO: 35192 - protein, 214 aa, Victivallis vadensis
  REGION 1..214: note = tr|A0A2U1B4H8|A0A2U1B4H8_9BACT 7-carboxy-7-deazaguanine synthase OS=Victivallis vadensis; OX = 172901 GN=queE PE=3 SV=1
MPRLVEAFLSLQGESTHAGRRCIFLRLAGCNLDCNYCDTMYAHSPESGEERSVDELVAAAASFPCRLVEITGGEPLLTPETPELCRRLLALGFEVLIETNGSLPIAPLPAEVRKILDCKLPGSGMSNRNLYDNYALLQPHDEVKFVVSSREDFDFALDVIRRYDLPGKTANLLFSPVWGRVGFADLARWIVDAGAPGRMQLQLHKLIWGDKPGV

SEQ ID NO: 35193 - protein, 374 aa, Virgibacillus dokdonensis
  REGION 1..374: note = tr|A0A2K9IWT5|A0A2K9IWT5_9BACI 7-carboxy-7-deazaguanine synthase OS=Virgibacillus dokdonensis OX=302167 GN=queE PE=4 SV=1
MKQIQAKKQMSPSYDPWEAYLDVEQHGKMTLSNIEFTTTTLCNMRCAHCAVGYTLQTKDPEALPMELLQQRLDEIPHLRTLSITGGEPMMSKKSVREHVVPLLRYAHHRGVKTQMNSNLTLPYSRYEAIIPYLDVLHISHNWGTADEFAETGFAKMERKPSLENRKKYFSRMVENAQRLSKEGVMVSAETMLNRRTYPYLESIHDHVLEMGCARHEIHPMYPVDFASNLETLTLDEIRTGIERLLNHQNQEVWMLFGTLPFYPCSSSQADLELQQRLFTAKNVSVRNDPDGRSRLNVNIFSGDIIVTDFGDEPKLGNVQTTRLPEAYERWLATETASSLNCHCPAVKCLGPNVLVKKTYYKDVDFQQRQAMIKR

SEQ ID NO: 35194 - protein, 240 aa, unidentified
  source 1..240: note = Virgibacillus massiliensis
  REGION 1..240: note = tr|A0A024QEX8|A0A024QEX8_9BACI 7-carboxy-7-deazaguanine synthase OS=Virgibacillus massiliensis OX=1462526 GN=queE PE=3 SV=1
MKIPVIEVFGPTIQGEGMVIGRKTMFVRTAGCDYSCSWCDSKFTWDGTEKHHIQMMEAEEIMQDLREKGADQFGHVTISGGNPGLLPQIDQLIDILHDHDLEVALETQGSRWQTWFTKIDDLTLSPKPPSSGMKTNYQTLDFIIDSLKQKQRGKCSLKVVIFNEDDLGYAENIHQRYPDVSLYLQVGNDEITMDNDQALSLYLLQKYEELIDQVMVSTILKDVRVLPQLHTFLWGNKRGV

SEQ ID NO: 35195 - protein, 240 aa, Virgibacillus necropolis
  REGION 1..240: note = tr|A0A221MA61|A0A221MA61_9BACI 7-carboxy-7-deazaguanine synthase OS=Virgibacillus necropolis OX=163877 GN=queE PE=3 SV=1
MKIPVLEIFGPTIQGEGMVIGRKTMFIRTAGCDYSCSWCDSKFTWDGSEKSNIQLLEPEEIWEALTEEGGDRFGHVTISGGNPGLLAHLNELVKLLHEKNMNIALETQGSKWQPWFIDIDDLTLSPKPPSSGMQTNFEKLDQIIDRLRQDQNGTFSLKVVIFNEDDLTYAVNMHQRYPDVELFLQVGNDDLETMNNEKLLGHMLRNYEQLIDLVMESHVLKDVRVLPQLHTYLWGNKRGV

SEQ ID NO: 35196 - protein, 240 aa, unidentified
  source 1..240: note = Virgibacillus phasianinus
  REGION 1..240: note = tr|A0A220U301|A0A220U301_9BACI 7-carboxy-7-deazaguanine synthase OS=Virgibacillus phasianinus OX=2017483 GN=queE PE=3 SV=1
MKIPVLEIFGPTIQGEGMVIGRKTMFVRTAGCDYSCSWCDSKFTWDGSEKSNIQMMGPEEIWHRLTEQGGDRFGHVTISGGNPALLAHLNELVDLLHKKNIKVALETQGSKWQTWFTSIDDLTLSPKPPSSGMKTNFEILDQIIDGLRRDQKGTFSLKVVIFDQDDLKYAINLHQRYPDVEFFLQVGNDDLETMDNEKLLGQMLRQYEQLIDQVMESNVLKDVRVLPQLHTYLWGNKRGV

SEQ ID NO: 35197 - protein, 240 aa, Virgibacillus soli; identical to SEQ ID NO: 28039
  REGION 1..240: note = tr|A0A0Q9Y9K3|A0A0Q9Y9K3_9BACI 7-carboxy-7-deazaguanine synthase OS=Virgibacillus soli; OX = 480284 GN=queE PE=3 SV=1

SEQ ID NO: 35198 - protein, 243 aa, Virgibacillus sp.
  REGION 1..243: note = tr|A0A268I0M6|A0A268I0M6_9BACI 7-carboxy-7-deazaguanine synthase OS=Virgibacillus sp. 7505 OX=2022548 GN=queE PE=3 SV=1
MASKFPVLEVFGPTVQGEGMVVGQKTMFVRTAGCDYSCSWCDSAFTWDGSAKDDIRQLTAEEIWNRLEEVGGDRFRHVTISGGNPALFKNLGEFTQLLKQKEVKVALETQGSRYQPWFLEIDDLTISPKPPSSLMKTDFHRLDEIINNLREAGRLMHVSLKVVIFDEKDLRYATNVHKRYPDVSFYVQVGNHDTATLDDAALKDALLSKYEWLIDQVSASNELNHVRVLPQLHTLVWGNKRGV

SEQ ID NO: 35199 - protein, 209 aa, unidentified
  source 1..209: note = Vitellibacter aquimaris
  REGION 1..209: note = tr|A0A137REN3|A0A137REN3_9FLAO 7-carboxy-7-deazaguanine synthase OS=Vitellibacter aquimaris OX=1548749 GN=queE PE=3 SV=1
MKKEVQQLVDKGVMLPLMEEFYSIQGEGFHKGTAAYFIRVGGCDVGCHWCDVKESWNAELHPPTAIEAIVENAAKYSKTIVITGGEPLTWDMEPLTEMLKEKGMQTHIETSGAYKLTGIWDWICLSPKKMKLPTEEVYKAANELKVIVFNNDDFRFAEEQAAKVGPDCILYLQPEWSKREKMSPLIVDYVMQNPKWKVSLQTHKYLNIP

SEQ ID NO: 35200 - protein, 230 aa, unidentified
  source 1..230: note = Vitiosangium sp.
  REGION 1..230: note = tr|A0A2T4VRF4|A0A2T4VRF4_9DELT 7-carboxy-7-deazaguanine synthase OS=Vitiosangium sp. GDMCC 1.1324 OX=2138576 GN=queE PE=3 SV=1
MPVARPHIEPRRVPTADSVVVKEIYLSVQGESSHAGLLCSFVRLTGCHLRCTYCDSEFAFHGGSRMKIPEVVAQVKALGAPRVEVTGGEPLLQPGVYPLMEELLASGLIVLLETSGAIDVRLVPPAVHKIVDMKTPSSGESDRNDYRNLTTMNANDELKFVIGSREDYEWSKRLITEHRLLEKPYGLLFSTVFGKLTTKALAEWVIEDRLSVRFQLQMHKYIWDPNERGV

SEQ ID NO: 35201 - protein, 211 aa, Vitreoscilla filiformis
  REGION 1..211: note = tr|A0A221KIE4|A0A221KIE4_VITFI 7-carboxy-7-deazaguanine synthase OS=Vitreoscilla filiformis OX=63 GN=queE PE=3 SV=1
MTYSVKEIFLTLQGEGINAGRVAVFCRFAGCNLWSGREADRAQALCRFCDTDFVGTDGTLGGKYPQATDLAERIAALWPAGAAGPRLVVLTGGEPLLQVDAALIDALHAQGFEIAVETNGTVPAPAGLDWVCVSPKAGNALAITSGDELKVVVPQAGLDLDALAALPFTHHLVQALDGPDAATHQAAAVALCLADPRWRLSVQTHKLLGIR

SEQ ID NO: 35202 - protein, 211 aa, Vogesella indigofera
  REGION 1..211: note = tr|A0A495B1B7|A0A495B1B7_VOGIN 7-carboxy-7-deazaguanine synthase OS=Vogesella indigofera; OX = 45465 GN=queE PE=3 SV=1
MTIYTVKEIFYTLQGEGRQAGRAAVFCRFSGCNLWSGREEDRSKAICQFCDTDFVGTGDDGGKFAGAAALAARIAAEWRGTGGQPYVVFTGGEPLLQLDDALVDAMHAQGFEVAVETNGSLPAPAGIDWICVSPKAGADWVQKSGHELKLVFPQPTLLPSELPDDLQFEHYYLQPMDSPLQRQNTQEAIAWCMAHPEWRLSVQTHKVINIR

SEQ ID NO: 35203 - protein, 209 aa, Vogesella sp.
  REGION 1..209: note = tr|A0A1C6MHR4|A0A1C6MHR4_9NEIS 7-carboxy-7-deazaguanine synthase OS=Vogesella sp. LIG4; OX = 1192162 GN=queE PE=3 SV=1
MYTVKEIFYTLQGEGRQAGRAAVFCRFSGCNLWSGREEDRSKAICQFCDTDFVGTGEDGGKFPTAAELAARIAAEWQGAGGQPYVVFTGGEPLLQLDAALVDAMHAVGFEVAVETNGSLPAPAGIDWICVSPKAGADWVQRSGNELKLVYPQPTLLPSELPADLDFEHRYLQPMDSPLQRQNTREAIAWCMAHPEWRLSVQTHKVVNIR

SEQ ID NO: 35204 - protein, 211 aa, Vogesella sp.
  REGION 1..211: note = tr|A0A0J5GJ03|A0A0J5GJ03_9NEIS 7-carboxy-7-deazaguanine synthase OS=Vogesella sp. EB; OX = 1526735 GN=queE PE=3 SV=1
MTIYTVKEIFYTLQGEGRQAGRAAVFCRFSGCNLWSGREEDRSKAICQFCDTDFVGTGDDGGKFAGAAALAARIAAEWRGTGGQPYVVFTGGEPLLQLDDALVDAMHAQGFEVAVETNGSLPAPAGIDWICVSPKAGADWVQKSGHELKLVFPQPTLLPSELPDDLQFEHYYLQPMDSPLQRQNTQEAIAWCMEHPAWRLSVQTHKVINIR

SEQ ID NO: 35205 - protein, 209 aa, Volucribacter psittacicida
  REGION 1..209: note = tr|A0A4V2PBT2|A0A4V2PBT2_9PAST 7-carboxy-7-deazaguanine synthase OS=Volucribacter psittacicida OX=203482 GN=queE PE=3 SV=1
MPTPALFDPQFNIVEIFESLQGEGFNTGMPSIFIRFGKCNLACPWCDTNYNQYQPYSLSQIMAKVRSFSAKNIIITGGEPTIVPHLSLLLEQLKAEGYFLAIETNGLKPIPPQIDYIATSPKRLYQHKYCQRCIPFAHEVRIVADDDVLAFCEQIETTIEAQHYYLSPCENNGEMNLEQTIRQLGLLNQRPNKPKWQLSIQTHKLVGMR

SEQ ID NO: 35206 - protein, 222 aa, Vulcanibacillus modesticaldus
  REGION 1..222: note = tr|A0A1D2YW87|A0A1D2YW87_9BACI 7-carboxy-7-deazaguanine synthase OS=Vulcanibacillus modesticaldus OX=337097 GN=queE PE=3 SV=1
MKFKVVEKFISINGEGKLSGQLAIFIRFAGCNLDCSYCDTRWANEKDVEYEWMTADQIYEYIKVNGVRNVTLTGGEPLLQKGIMELLTVLSLDPELVIEIETNGSIELGPFTKIEKNRPRFTMDYKLGSSQMESKMLTSNFKYLGALDTVKFVVGNIDDLKRAKHIIDQYQLVDKTSVYISPVFGEIEMVQIVEFMKENKMNGVTLQVQLHKIIWDPEKKGV

SEQ ID NO: 35207 - protein, 225 aa, unidentified
  source 1..225: note = Vulcaniibacterium tengchongense
  REGION 1..225: note = tr|A0A3N4VCC1|A0A3N4VCC1_9GAMM 7-carboxy-7-deazaguanine synthase OS=Vulcaniibacterium tengchongense OX=1273429 GN=queE PE=3 SV=1
MSAVPSDAAAAASERLRITEIFLSLQGEARSIGWPTVFVRLTGCPLRCQYCDTAYAFHGGQWWAIDDILAEVARHGARHVCVTGGEPLAQKRCLGLLRRLCDAGYEVSLETSGALDIAEVDPRVSRVLDIKTPGSREAHRNLWSNLARLTPHDQVKFVICSREDYDWAKGVLAEHRPHDVCDVLFSPSFAQVDPTALADWIVADRLPVRFQLQLHKILWHDAPGR

SEQ ID NO: 35208 - protein, 215 aa, unidentified
  source 1..215: note = Vulgatibacter incomptus
  REGION 1..215: note = tr|A0A0K1P941|A0A0K1P941_9DELT 7-carboxy-7-deazaguanine synthase OS=Vulgatibacter incomptus OX=1391653 GN=queE PE=3 SV=1
MSFAVTEIFFSLQGESTRMGRPCVFIRFTGCDLRCGYCDTAYAFHGGTKRSREEILAEVARHPTRYVTLTGGEPLLQRELPALARDLLERGYEVAIETHGQKRWDSLPEQVIKIVDVKTPASGECATEEHLSWLRTLGPRDELKFVIGSREDFDWSADVVRRLQLEGKHAALLFSPTHGQVELSELAAWILESGLDVRMQIQLHKLIWGTEARGV

SEQ ID NO: 35209 - protein, 228 aa, Waddlia chondrophila
  REGION 1..228: note = tr|D6YWT8|D6YWT8_WADCW 7-carboxy-7-deazaguanine synthase OS=Waddlia chondrophila (strain ATCC VR-1470 / WSU 86-1044) OX=716544 GN=nrdG PE=3 SV=1
MVNSIAMMIERTNNQTLRLIEIFLSIQGETSLTGLPTTFIRLASCNLRCTWCDTPYSFGKGESSSLQSIIETVRSNGASHVCITGGEPLLQSQVYLLMETLCNLDYIVSLETGGSLSTEKVDPRVITILDIKCPGSGMSQKNTWENLERLREQDEVKFVIMNREDYEWSVKICKNRDLFSRSKPPLFSPVHNVLNPQELIQWTLQDTLPVRINLQVHKWVWSPETKGV

SEQ ID NO: 35210 - protein, 222 aa, Waddlia chondrophila
  REGION 1..222: note = tr|F8LDY4|F8LDY4_9BACT 7-carboxy-7-deazaguanine synthase OS=Waddlia chondrophila 2032/99 OX=765953 GN=nrdG; PE = 3 SV=1
MMIERTNNQTLRLIEIFLSIQGETSLTGLPTTFIRLASCNLRCTWCDTPYSFGKGESSSLQSIIETVRSNGASHVCITGGEPLLQSQVYLLMETLCNLDYIVSLETGGSLSTEKVDPRVITILDIKCPGSGMSQKNTWENLERLREQDEVKFVIMNREDYEWSVKICKNRDLFSRSKPPLFSPVHNVLNPQELIQWTLQDTLPVRINLQVHKWVWSPETKGV

SEQ ID NO: 35211 - protein, 224 aa, unidentified
  source 1..224: note = Waddliaceae bacterium
  REGION 1..224: note = tr|A0A2E3LZ81|A0A2E3LZ81_9BACT 7-carboxy-7-deazaguanine synthase OS=Waddliaceae bacterium; OX = 2026802 GN=queE PE=3 SV=1
MSLIQQKSKKSSLFLTELFVSVQGESSLIGLPTTFIRLSACNLRCSWCDSTYSFKRGSSYEIEEIIQEVKDFGAPYICVTGGEPLLQKPVYPLMKALCDEGYNVSIETSGSLPTTDIDPRVRIILDVKCPGSEMEEKNDWTNLDRIRNCDEVKFVLLNREDYEYAKNICIEHHLFHRAGEVLFSPVHGELDNQALVQWILEDRLPVRLNLQIHKFIWTPETKGV

SEQ ID NO: 35212 - protein, 215 aa, Weeksella virosa
  REGION 1..215: note = tr|F0P278|F0P278_WEEVC 7-carboxy-7-deazaguanine synthase OS=Weeksella virosa (strain ATCC 43766 / DSM 16922 / JCM 21250 / NBRC 16016 / NCTC 11634 / CL345/78); OX = 8659 38 GN=queE PE=3 SV=1
MIQISGITNEQQQLANEGRLLPVMEHFYTLQGEGAYAGVAAYFIRLGGCDVGCHWCDVKESWDAEIHPLTDIATLAKEAAAICKTIIITGGEPLMWDLTFLTSELHKHGANIHIETSGAYPLTGEIDWVTLSPKKTKLPVESIYQQANELKMIIYNQHDFTFAEEQAAKVKDNCLLYLQVEWSKRDSMSPKLVEFIKQNPKWRITVQTHKYLDIP

SEQ ID NO: 35213 - protein, 208 aa, unidentified
  source 1..208: note = Wenyingzhuangia fucanilytica
  REGION 1..208: note = tr|A0A1B1Y3Z9|A0A1B1Y3Z9_9FLAO 7-carboxy-7-deazaguanine synthase OS=Wenyingzhuangia fucanilytica OX=1790137 GN=queE PE=3 SV=1
MDNKTKELVNKGVMLPLMEEFYTIQGEGAHTGTAAYFIRVGGCDVGCHWCDVKESWDANLHPPTHADIIVKNASPYKTIVITGGEPLMWDMQYLTSSLQNQGLQTHIETSGAYKLSGQWDWICLSPKKTKLPLEEIYPEAHELKMIIHNKSDFEFAEQQAAKVSDKCGLYLQPEWSKKEIMTPMIVDYVMKNPQWKISLQTHKYLNIP

SEQ ID NO: 35214 - protein, 208 aa, unidentified
  source 1..208: note = Wenyingzhuangia marina
  REGION 1..208: note = tr|A0A1M5W678|A0A1M5W678_9FLAO 7-carboxy-7-deazaguanine synthase OS=Wenyingzhuangia marina OX=1195760 GN=queE PE=3 SV=1
MDNKTNELVNKGIMLPLMEEFYTIQGEGAHTGTAAYFIRVGGCDVGCHWCDVKESWDANLHPPTHADLIVKNASPYKTIVITGGEPLMWDMQYLTSSLQNQGLQTHIETSGAYPLSGQWNWICLSPKKTKLPLEGIYPEAHELKMIIYNKSDFEFAEQQAAKVSDKCGLYLQPEWSKKEIMTPMIVDYVMKNPKWKISLQTHKYLNIP

SEQ ID NO: 35215 - protein, 227 aa, unidentified
  source 1..227: note = Wenzhouxiangella marina
  REGION 1..227: note = tr|A0A0K0XT64|A0A0K0XT64_9GAMM 7-carboxy-7-deazaguanine synthase OS=Wenzhouxiangella marina OX=1579979 GN=queE PE=3 SV=1
MTTTTLSSRSEQARTDQRLKITEIFTSIQGESDLSGWPTVFVRLTGCPLRCSWCDTPYSFHGGDWMQIDDIVDQARSARVRHVCVTGGEPLAQKRCLNLLTALCDAGFVVSLETSGALSVAEVDPRVVKVLDLKAPGSGEVGRNDWGNLDHLQAHDQIKLVLADRVDFDWALRQVEAHRLDRWQVLFSPVWGQLEPRQLAEWIVEARAHVRLQLQMHKYLWGEAQGR

SEQ ID NO: 35216 - protein, 211 aa, unidentified
  source 1..211: note = Wenzhouxiangella sediminis
  REGION 1..211: note = tr|A0A3E1K9W7|A0A3E1K9W7_9GAMM 7-carboxy-7-deazaguanine synthase OS=Wenzhouxiangella sediminis OX=1792836 GN=queE PE=3 SV=1
MTYTVREIFHTLQGEGLNAGRPAVFLRFAGCNLWSGREQHRHLAICKFCDTQFVGTGGPGGGKFEDGESLAAAVSRRWPHDAQGPKLVVCTGGEPLLQLDRAAIDALHERGFEIAVETNGTIPAPSGIDWLCVSPKAGAELVVEHGDELKLVYPQAGIDPADFEGLDFRHFLLQPMDGPELEGNTRRSIEYCMQHPKWRLSVQTHKLLGLP

SEQ ID NO: 35217 - protein, 211 aa, unidentified
  source 1..211: note = Wenzhouxiangella sp.
  REGION 1..211: note = tr|A0A372BVD5|A0A372BVD5_9GAMM 7-carboxy-7-deazaguanine synthase OS=Wenzhouxiangella sp. 15181 OX=2301224 GN=queE PE=3 SV=1
MTYTVREIFHTLQGEGLNAGHPAVFLRFAGCNLWSGREAHRASAICQFCDTEFVGTGGPGGGKFADGQSLATAVARRWPREAQGPKLVVCTGGEPLLQLDEAAIDALHGQGFEVAVETNGTLAAPAGIDWLCVSPKAGADLVLRQGDELKLVFPQAGIEPANLEGLGFRHFLLQPMDGPELKENTRRAIDYCMQHPRWRLSVQTHKLLGLP

SEQ ID NO: 35218 - protein, 265 aa, unidentified
  source 1..265: note = Westiellopsis prolifica
  REGION 1..265: note = tr|A0A4Q9J6V6|A0A4Q9J6V6_9CYAN 7-carboxy-7-deazaguanine synthase OS=Westiellopsis prolifica IICB1 OX=1970206 GN=queE PE=3 SV=1
MTTKIGITPTARLVEVFSAIQGEGLNVGTRQIFIRFALCDLRCQFCDSAHTWNAPTTCRIERSPGKRDFEIYSNPVSLPILLEWIERQNIPCLHDSISLTGGEPLLHAGFLVEFLPQIRAITGLPIYLETGGHRPEQLAMILPYLDSVGMDLKLPSTSGENRWQEHSKFLQLCYESQIEVFVKIIISDQTNPAELERSALLVAQVSPSIPVFLQPVTPLPASEQLTANPVLAPSPEQVLVWQALIKPFVKQVRVIPQTHKMLNQL

SEQ ID NO: 35219 - protein, 208 aa, unidentified
  source 1..208: note = Westiellopsis prolifica
  REGION 1..208: note = tr|A0A4V2JMT5|A0A4V2JMT5_9CYAN 7-carboxy-7-deazaguanine synthase OS=Westiellopsis prolifica IICB1 OX=1970206 GN=queE PE=3 SV=1
MQLQKLESISIHETFQETIQGEGYWFGTPVDFIRLAGCPVGCSWCDTGYSNGGKGLPRIERSFKDLISELKSQRVVISGGEPFIHASLPELVRHVGSTGRQVSIETSGAFWQDIPSWAWVTLSPKEHINPRYPVHSKIWKRANEVKIVIADGKELEFYRKSLLNEPSLVFLQPEWSEREKTIPITLGLLKQYPTYRLSLQLHKMIGVL

SEQ ID NO: 35220 - protein, 208 aa, unidentified
  source 1..208: note = Williamwhitmania taraxaci
  REGION 1..208: note = tr|A0A1G6QC86|A0A1G6QC86_9BACT 7-carboxy-7-deazaguanine synthase OS=Williamwhitmania taraxaci OX=1640674 GN=queE PE=3 SV=1
MSDTDVFMGGRMLPLVEDFYTIQGEGYHSGKPAYFIRLGGCDVCCSWCDARFTWNPKSFPPVSVDEIVARATSFPAQAVVVTGGEPTLYQLSLLSDKLQAAGIKTFIETSGAHTLTGSWDWVCLSPKRNQPPLPSVFKQASELKVIITSLADFEWAEENAAHVSDTCMLYLQPEWSVYQQIIEAVVEYAKANPRWNISIQMHKFMHIP

SEQ ID NO: 35221 - protein, 210 aa, Winogradskyella arenosi
  REGION 1..210: note = tr|A0A368ZGL3|A0A368ZGL3_9FLAO 7-carboxy-7-deazaguanine synthase OS=Winogradskyella arenosi OX=533325 GN=queE PE=3 SV=1
MTRRERQELIDKGLLLPLMEEFYTIQGEGFHKGTAAYFVRIGGCDVGCHWCDVKESWLAELHPPTATEKIVDNAVKYSNTIIVTGGEPLTWDMGPLTAQLKAKGVQTHIETSGAYKLTGEWDWICLSPKKMKLPTKEVYEKAHELKCIIYNNDDFKFAEEQAEKVNGDCILYLQPEWSKRDKVIPKIVDYVMDHPKWKVSLQTHKYLNIP

SEQ ID NO: 35222 - protein, 210 aa, unidentified
  source 1..210: note = Winogradskyella aurantia
  REGION 1..210: note = tr|A0A265UNB6|A0A265UNB6_9FLAO 7-carboxy-7-deazaguanine synthase OS=Winogradskyella aurantia OX=1915063 GN=queE PE=3 SV=1
MTRREQQELIDKGLLLPLMEEFYTIQGEGYHKGTAAYFIRIGGCDVGCHWCDVKESWLAELHPPTATEQIVENAVKYSNTIVVTGGEPLMWDMNPLTDQLKAKGLQTHIETSGAYKLTGVWDWICLSPKKNKLPTEEVYEKAHELKCIIYNKDDFRFAEEQAAKVNSNCILYLQPEWSKRDKMMPQIVDYVMANPKWKVSLQTHKYLNIP

SEQ ID NO: 35223 - protein, 225 aa, Winogradskyella epiphytica
  REGION 1..225: note = tr|A0A2V4XRB7|A0A2V4XRB7_9FLAO 7-carboxy-7-deazaguanine synthase OS=Winogradskyella epiphytica OX=262005 GN=queE PE=3 SV=1
MEQSNNAYLLIYLPTMTRRERQELIDKGLLLPLMEEFYTIQGEGFHKGTAAYFIRIGGCDVGCHWCDVKESWLAELHPPTETEKIVENAVKYSNTIVVTGGEPLTWDMGPLTAQLKAKGVQTHIETSGAYKLTGEWDWICLSPKKMKLPTEEVLAKANELKCIIYNKDDFRFAEEYADKVNENCILYLQPEWSKREKMMPMIVDYVMANPKWKVSLQTHKYLNIP

SEQ ID NO: 35224 - protein, 210 aa, Winogradskyella eximia
  REGION 1..210: note = tr|A0A3D9GYZ0|A0A3D9GYZ0_9FLAO 7-carboxy-7-deazaguanine synthase OS=Winogradskyella eximia OX=262006 GN=queE PE=3 SV=1
MTRRERQELIDKGLLLPLMEEFYTIQGEGFHKGTAAYFVRIGGCDVGCHWCDVKESWLAELHPPTETEKIVENAVKYSNTIVVTGGEPLMWDMGPLTAQLKAKGVQTHIETSGAYELSGTWDWICLSPKKMKLPTERVYEKAHELKCIIYNKDDFRFAEEQAAKVNKDCILYLQPEWSKRDKVVPMIVDYVMANPKWKVSLQTHKYLNIP

SEQ ID NO: 35225 - protein, 210 aa, unidentified
  source 1..210: note = Winogradskyella jejuensis
  REGION 1..210: note = tr|A0A1M5RW91|A0A1M5RW91_9FLAO 7-carboxy-7-deazaguanine synthase OS=Winogradskyella jejuensis OX=1089305 GN=queE PE=3 SV=1
MTRRERQELIDKGLLLPLMEEFYTIQGEGYHKGTAAYFVRIGGCDVGCHWCDVKESWLAELHPPTETEKIVENAVKYSNTIVVTGGEPLMWDMNPLTEQLKAKGVQTHIETSGAYKLSGDWDWICLSPKKNKLPTEEVFAKAHELKCIIYNKDDFRFAEEQAAQVNKDCILYLQPEWSKRDKMMPQIVDYVMANPKWKVSLQTHKYLNIP

SEQ ID NO: 35226 - protein, 210 aa, Winogradskyella pacifica
  REGION 1..210: note = tr|A0A3D9LM91|A0A3D9LM91_9FLAO 7-carboxy-7-deazaguanine synthase OS=Winogradskyella pacifica OX=664642 GN=queE PE=3 SV=1
MTRRERQELIDKGLLLPLMEEFYTIQGEGFHKGTAAYFVRIGGCDVGCHWCDVKESWLAELHPPTETEKIVENAVKYSDTIIVTGGEPLTWDMGPLTAQLKAKGVQTHIETSGAYKLTGQWDWICLSPKKMKLPTEEVYEKAHELKCIIYNNDDFKFAEEQAEKVNDNCILYLQPEWSKRDKVIPKIVDYVMANPRWKVSLQTHKYLNIP

SEQ ID NO: 35227 - protein, 210 aa, unidentified
  source 1..210: note = Winogradskyella psychrotolerans
  REGION 1..210: note = tr|S7VJJ6|S7VJJ6_9FLAO 7-carboxy-7-deazaguanine synthase OS=Winogradskyella psychrotolerans RS-3 OX=641526; GN = queE PE=3 SV=1
MTRRERQELIDKGLLLPLMEEFYTIQGEGFHKGTAAYFIRIGGCDVGCHWCDVKESWLAELHPPTEITKIVENAEKYSKTIVVTGGEPLMWDMDPLTKQLKERGLQTHIETSGAYKLTGDWDWICLSPKKLKLPTEEVLEKAHELKCIIFNKDDFKFAEEQAAKVNKDCILYLQPEWSKSDKMVPQIVDYVMANPKWKVSLQTHKYLNIP

SEQ ID NO: 35228 - protein, 210 aa, Winogradskyella sp.
  REGION 1..210: note = tr|A0A1Y0MFK8|A0A1Y0MFK8_9FLAO 7-carboxy-7-deazaguanine synthase OS=Winogradskyella sp. PC-19 OX=754417 GN=queE PE=3 SV=1
MTRRERQELIDKGQLLPLMEEFYTIQGEGYHKGTAAYFVRIGGCDVGCHWCDVKESWLAELHPPTETEKIVDNAVKYSNTIVVTGGEPLMWDMNPLTEQLKAKGVQTHIETSGAYKLSGQWDWICLSPKKNKLPTEEVYAEAHELKCIIYNKDDFRFAEEQAEKVNDNCILYLQPEWSKRDKMVPQIVDYVMANPKWKVSLQTHKYLNIP

SEQ ID NO: 35229 - protein, 210 aa, Winogradskyella sp.
  REGION 1..210: note = tr|A0A368MHI0|A0A368MHI0_9FLAO 7-carboxy-7-deazaguanine synthase OS=Winogradskyella sp. KYW1333 OX=2282123 GN=queE PE=3 SV=1
MTRREQQELIDKGLLLPLMEEFYTIQGEGYHKGTAAYFVRIGGCDVGCHWCDVKESWLAELHPPTETSKIVENAVKYSNTIVVTGGEPLTWDMGPLTEQLKAKGVQTHIETSGAYKLTGEWDWICLSPKKKKLPTEEIYSKAHELKCIIYNKDDFKFAEEQAAKVNQNCILYLQPEWSKREKMMSQIVDYVMANPKWKVSLQTHKYLNIP

SEQ ID NO: 35230 - protein, 210 aa, Winogradskyella thalassocola
  REGION 1..210: note = tr|A0A1G8IA44|A0A1G8IA44_9FLAO 7-carboxy-7-deazaguanine synthase OS=Winogradskyella thalassocola OX=262004 GN=queE PE=3 SV=1
MTRRERQELIDKGLLLPLMEEFYTIQGEGFHKGTAAYFVRIGGCDVGCHWCDVKESWLAELHPPTETEKIVENAIKYSDTIIVTGGEPLTWDMGPLTAQLKAKGVQTHIETSGAYKLTGQWDWICLSPKKMKLPTEEVYEKAHELKCIIYNNDDFKFAEEQAEKVNDNCILYLQPEWSKRDKVIPKIVDYVMANPRWKVSLQTHKYLNIP

SEQ ID NO: 35231 - protein, 210 aa, unidentified
  source 1..210: note = Winogradskyella wandonensis
  REGION 1..210: note = tr|A0A4R1KTW8|A0A4R1KTW8_9FLAO 7-carboxy-7-deazaguanine synthase OS=Winogradskyella wandonensis OX=1442586 GN=queE PE=3 SV=1
MTRRERQELIDKGLLLPLMEEFYTIQGEGYHKGTAAYFVRIGGCDVGCHWCDVKESWLAELHPPTDTEKIVENAVKYSNTIVVTGGEPLMWDMNPLTTQLKAKGVQTHIETSGAYKLTGNWDWICLSPKKNKLPTEEVSAKANELKCIIYNKDDFRFAEEQAQKVNDKCFLYLQPEWSKRDKMIPQIVDYVMANPKWKVSLQTHKYLNIP

SEQ ID NO: 35232 - protein, 213 aa, unidentified
  source 1..213: note = Woeseia oceani
  REGION 1..213: note = tr|A0A193LFW2|A0A193LFW2_9GAMM 7-carboxy-7-deazaguanine synthase OS=Woeseia oceani; OX = 1548547 GN=queE PE=3 SV=1
MTYSVKELFFTLQGEGAHAGRAAVFLRFAGCNLWSGREKDRERAVCRFCDTDFVGTDGEGGGKFVDADTLGDAVMRCWPTDAGGQRYVVCTGGEPMLQLDVAAIDALHARGFEVGVETNGTLPVPKQVDWICVSPKAGATVVQTRGNELKLVYPQAELSAQPDQFEKMAFEHFYLQPMDSPERAANTRLATEYCLRNPRWKLSLQTHKIIGIP

SEQ ID NO: 35233 - protein, 213 aa, unidentified
  source 1..213: note = Woeseiaceae bacterium
  REGION 1..213: note = tr|A0A2D9M280|A0A2D9M280_9GAMM 7-carboxy-7-deazaguanine synthase OS=Woeseiaceae bacterium; OX = 2026806 GN=queE PE=3 SV=1
  VARIANT 17: note = Xaa can be any naturally occurring amino acid
  VARIANT 40: note = Xaa can be any naturally occurring amino acid
  VARIANT 44..45: note = Xaa can be any naturally occurring amino acid
  VARIANT 55: note = Xaa can be any naturally occurring amino acid
  VARIANT 61: note = Xaa can be any naturally occurring amino acid
  VARIANT 68: note = Xaa can be any naturally occurring amino acid
  VARIANT 75: note = Xaa can be any naturally occurring amino acid
  VARIANT 85: note = Xaa can be any naturally occurring amino acid
  VARIANT 88: note = Xaa can be any naturally occurring amino acid
  VARIANT 91: note = Xaa can be any naturally occurring amino acid
  VARIANT 138: note = Xaa can be any naturally occurring amino acid
  VARIANT 145: note = Xaa can be any naturally occurring amino acid
  VARIANT 163: note = Xaa can be any naturally occurring amino acid
  VARIANT 170: note = Xaa can be any naturally occurring amino acid
  VARIANT 185: note = Xaa can be any naturally occurring amino acid
  VARIANT 197..198: note = Xaa can be any naturally occurring amino acid
  VARIANT 201: note = Xaa can be any naturally occurring amino acid
MLTVNEIFYSIQGESTXTGQPCVFVRLTGCDLRCVWCDTXYAFXXGRKMLIEDVXKEVENXQCGLVEXTGGEPLXQEDVYGLIDXLLXDDXTILVETGGQLSVARLPAKVIKVLDVKCPGSREEKTTHWENFELLTKXDQVKFVXADRADYEYARDTLKRLGXASRCGAXLFSPVHDHLAPQVLXGWVLEDRLPVRXXLQXHKYIWGADVRGV

SEQ ID NO: 35234 - protein, 230 aa, Wohlfahrtiimonas chitiniclastica
  REGION 1..230: note = tr|A0A162VSR7|A0A162VSR7_9GAMM 7-carboxy-7-deazaguanine synthase OS=Wohlfahrtiimonas chitiniclastica OX=400946 GN=queE PE=3 SV=1
MEIFGPTVQGEGMVIGRKTCFIRLAACDYQCVWCDSKFTWDGSVKPDVMTIPMIIDAVNQLHEDQVDHVTISGGNPALYKGLDQLVIALNDAGYQTAIETQGSHWNEGLKFIDEVTISPKPPSSGMNTDFKVLDQMIAELDGRNVSLKVVVFDRMDLLYAEIIHQRYPYVPMFVQAGNDQTLEADEANTSLHLLKRYAVLVDEVMRSTVLKNVRVLPQMHALLWGNRRGV

SEQ ID NO: 35235 - protein, 235 aa, Wohlfahrtiimonas chitiniclastica
  REGION 1..235: note = tr|A0A256BZB0|A0A256BZB0_9GAMM 7-carboxy-7-deazaguanine synthase OS=Wohlfahrtiimonas chitiniclastica OX=400946 GN=queE PE=3 SV=1
MNFPVLEIFGPTVQGEGMVIGRKTCFIRLAACDYQCVWCDSKFTWDGSVKPDVMTIPMIIDAVNQLHEDQVDHVTISGGNPALYKGLDQLVLALNDAGYQTAIETQGSHWNEGLKFIDEVTISPKPPSSGMNTNFKVLDQMIAELEGRNVSLKVVVFDRMDLLYAEMIHQRYPHVPMFVQAGNDQTLEADEANTSLHLLKRYAVLVDEVMRSTVLKNVRVLPQMHALLWGNRRGV

SEQ ID NO: 35236 - protein, 235 aa, Wohlfahrtiimonas sp.
  REGION 1..235: note = tr|A0A256C5L9|A0A256C5L9_9GAMM 7-carboxy-7-deazaguanine synthase OS=Wohlfahrtiimonas sp. G9077 OX=1980118 GN=queE PE=3 SV=1
MNFPVLEIFGPTVQGEGMVIGRKTCFIRLAACDYQCVWCDSKFTWDGSVKPDLMTIEMIIEHVNQLHEDQVDHVTISGGNPALYKGLDQLVLALNAAGYQTAIETQGSHWNDGLKLIDEVTLSPKPPSSGMNTDFTVLDEMITQLEGRHISLKVVVFDRMDLLYAEMIHQRYPHLPMFVQAGNDQTLEADEANTSLHLLKRYAVLVDEVMRSTVLKNVRVLPQMHALLWGNRRGV

SEQ ID NO: 35237 - protein, 193 aa, Wolinella succinogenes; identical to SEQ ID NO: 30615
  REGION 1..193: note = tr|Q7MR57|Q7MR57_WOLSU 7-carboxy-7-deazaguanine synthase OS=Wolinella succinogenes (strain ATCC 29543 / DSM 1740 / LMG 7466 / NCTC 11488 / FDC 602W) OX=273121; GN = que E PE=3 SV=1

SEQ ID NO: 35238 - protein, 211 aa, Xanthobacter autotrophicus
  REGION 1..211: note = tr|A7IK77|A7IK77_XANP2 7-carboxy-7-deazaguanine synthase OS=Xanthobacter autotrophicus (strain ATCC BAA-1158 / Py2) OX=78245 GN=queE PE=3 SV=1
MAYAVKEMFLTLQGEGAQAGRAAVFCRFAGCNLWSGREDDRAEAQCRFCDTDFVGMDGEGGGRFADAATLAAAIAATWGSAAPERRFVVFTGGEPLLQLDTALVDAVHALGFEIAVETNGTVDAPGGIDWICMSPKAGTDLKVTRGHELKLVFPQPGLAPEGLAGLDFTHFFLQPMDGPDRLRNTEAAVAYCLSHPRWRLSLQTHKMIGIP

SEQ ID NO: 35239 - protein, 210 aa, Xanthobacter tagetidis
  REGION 1..210: note = tr|A0A3L7AAL3|A0A3L7AAL3_9RHIZ 7-carboxy-7-deazaguanine synthase OS=Xanthobacter tagetidis OX=60216 GN=queE PE=3 SV=1
MAYSVKEMFKTLQGEGAQAGRAAVFCRFAGCNLWTGREEHRAEAQCRFCDTDFVGTDGEGGGRFADAAELARAIAAAWDGDRARRFVVFTGGEPLLQLDAELIAAVHAEGFEIAVETNGTIAAPDGIDWICVSPKAGTALAQRRGQELKLVFPQPDLMPEAAEELDFAHFFLQPMDGPERAAHTQAAVAYCLGHPRWRLSLQTHKMIGIP

SEQ ID NO: 35240 - protein, 24 aa, unidentified
  source 1..24: note = Xanthomarina gelatinilytica
  REGION 1..24: note = tr|A0A3C0F429|A0A3C0F429_9FLAO 7-carboxy-7-deazaguanine synthase QueE (Fragment); OS = Xanthomarina gelatinilytica OX=1137281 GN=DCM10_09255; PE = 4 SV=1
MTRSERQELIDKGLLLPLMEEFYT

SEQ ID NO: 35241 - protein, 210 aa, unidentified
  source 1..210: note = Xanthomarina gelatinilytica
  REGION 1..210: note = tr|A0A3D6BSC8|A0A3D6BSC8_9FLAO 7-carboxy-7-deazaguanine synthase OS=Xanthomarina gelatinilytica OX=1137281 GN=queE PE=3 SV=1
MTRSERQELIDKGLLLPLMEEFYTIQGEGFHKGTAAYFVRIGGCDVGCHWCDVKESWLAELHPPTETEKIVENAVKYSKTIVVTGGEPLTWNMTPLTTQLKEKGLQTHIETSGAYKLTGVWDWICLSPKKLKLPTEEIYGKAHELKMIIYNKSDFKFAEEQAAKVNKDCILYLQPEWSKRDKVVPEIVEYVMANPKWKVSLQTHKYLNIP

SEQ ID NO: 35242 - protein, 210 aa, unidentified; identical to SEQ ID NO: 35241
  source 1..210: note = Xanthomarina sp.
  REGION 1..210: note = tr|A0A2D8CUJ9|A0A2D8CUJ9_9FLAO 7-carboxy-7-deazaguanine synthase OS=Xanthomarina sp.; OX = 1931211 GN=queE PE=3 SV=1

SEQ ID NO: 35243 - protein, 225 aa, unidentified
  source 1..225: note = Xanthomonadaceae bacterium
  REGION 1..225: note = tr|A0A2M9ECV7|A0A2M9ECV7_9GAMM 7-carboxy-7-deazaguanine synthase OS=Xanthomonadaceae bacterium NML95-0200 OX=2032577 GN=queE PE=3 SV=1
MNQVSSESAATAADRLRITEIFCSLQGESRSVGWPTVFVRLTGCPLRCGYCDTTYSFHGGQWQTIDDIVAEVRSHGVRHVCVTGGEPLAQKRCIPLLQKLCDAGFEVSLETSGAIDISPVDSRVIRVVDVKTPDSGEASRNHWPNLALLQPRDQVKFVICSRDDYDWSRAVLQEYRLAERCEVLFSPSYAQLPPRELAEWIIADRLPVRFQMQLHKQLWGEEQGR

SEQ ID NO: 35244 - protein, 228 aa, unidentified
  source 1..228: note = Xanthomonadaceae bacterium
  REGION 1..228: note = tr|A0A1E4L6G4|A0A1E4L6G4_9GAMM 7-carboxy-7-deazaguanine synthase OS=Xanthomonadaceae bacterium SCN 69-48 OX=1660171 GN=queE PE=3 SV=1
MNAVADAAAASAAGQTERLKLTEIFLSLQGEARDAGWPTVFVRLTGCPLRCQYCDTAYAFHGGQWWEIDAILAEVARLGARHVCVTGGEPLAQKRCLALLERLCDAGYVVSLETSGALDIAGVDARVSRVLDIKTPGSGEAARNLWGNLPLLTAHDQVKFVVCSREDYEWAKAVVAEHGLCAICDVLFSPSAAQVAARELADWIVADRLPVRFQMQLHKLLWNDEPGK

SEQ ID NO: 35245 - protein, 210 aa, unidentified
  source 1..210: note = Xanthomonadales bacterium
  REGION 1..210: note = tr|A0A1M3QJD7|A0A1M3QJD7_9GAMM 7-carboxy-7-deazaguanine synthase OS=Xanthomonadales bacterium 66-474 OX=1895868 GN=queE PE=3 SV=1
MYAIKEIFYTLQGEGFHAGRPAVFCRFSGCNLWSGREQDRATAACDFCDTDFVGTDGANGGKFPDAAVLADVIAGLWPRDRKENRFVVFTGGEPLLQLDTPLLDAMHARGFECAVETNGTLEAPDGLDWITVSPKGTAPVKLKRASELKLVYPQPTALPERFADFAATHFFLQPMDGPHALDNTRAAVDYCKAHPHWRLSLQTHKYLGIP

SEQ ID NO: 35246 - protein, 229 aa, unidentified
  source 1..229: note = Xanthomonadales bacterium
  REGION 1..229: note = tr|A0A1Q4FNE3|A0A1Q4FNE3_9GAMM 7-carboxy-7-deazaguanine synthase OS=Xanthomonadales bacterium 63-13 OX=1895867 GN=queE PE=3 SV=1
MNAIRPLQNETPTPATSRRLRLTEIFCSLQGESDSVGWPTVFVRLTGCPLRCSWCDTEYAFHGGEWHEIDEVVASVAAFGVHRVCVTGGEPLAQKRCLALLEALCNAGHEVSLETSGALDIAEVDPRVRRVMDLKAPGSGEVERNLWSNIAHLQASDQVKIVLADRQDYDWAVARVREHALSARCPVLFSPVQGKLAPRDLADWILADRLPVRFQMQLHKLLWGNEPGR

SEQ ID NO: 35247 - protein, 225 aa, Xanthomonas albilineans
  REGION 1..225: note = tr|D2U9H0|D2U9H0_XANAP 7-carboxy-7-deazaguanine synthase OS=Xanthomonas albilineans (strain GPE PC73 / CFBP 7063) OX=380358 GN=NrdG PE=3 SV=1
MAAVPSEIVQSPLPRLKLTEIFLSLQGEADSAGWPTVFVRLTGCPLRCSYCDTAYAFHGGQWWDIDAILAEVARHGVRHVCVTGGEPLAQKRCLQLLQSLCDTGYDVSLETSGALDIAEVDPRVSRVLDIKTPASHEAQRNRWENLTLLTARDQIKFVLCGRADYEWARALVAEHQLQARCMVWFSPSKSDLDARELADWIVADRLPVRFQMQLHKLLWNDEPGR

SEQ ID NO: 35248 - protein, 227 aa, Xanthomonas alfalfae
  REGION 1..227: note = tr|A0A1S1XI51|A0A1S1XI51_9XANT 7-carboxy-7-deazaguanine synthase OS=Xanthomonas alfalfae; OX = 366650 GN=queE PE=3 SV=1
MNAAAVPSEIVQSPLPRLKITEIFLSLQGEAEAAGWPTVFVRLTGCPLRCLYCDTAYAFHGGQWHDIDAIVAEVASHGVRHVCVTGGEPLAQKRCLVLLEKLCDAGYDVSLETSGALDVSAVDPRVSRVVDIKTPASGEEARNRWENLPLLTARDQIKFVICSRADYEWSREIVAAHALDRRCTVWFSPSKSEVSPRQLADWIVADRLPVRFQMQLHKLLWNDEPGR

SEQ ID NO: 35249 - protein, 227 aa, Xanthomonas arboricola
  REGION 1..227: note = tr|A0A2S7A6L1|A0A2S7A6L1_9XANT 7-carboxy-7-deazaguanine synthase OS=Xanthomonas arboricola pv. guizotiae OX=487867 GN=queE PE=3 SV=1
MNAAAVPSEIVQSPLPRLKITEIFLSLQGEAEAAGWPTVFVRLTGCPLRCHYCDTAYAFHGGEWHDIDAILAEVASHGVRHVCVTGGEPLAQKRCLLLLQKLCDAGFDVSLETSGALDVSAVDPRVSRVVDIKTPASGEEQRNRWENLPLLTARDQIKFVICSRADYEWSRERVAAHALDRRCTVWFSPSKSEVTPRELADWIVADRLPVRFQMQLHKLLWNDEPGR

SEQ ID NO: 35250 - protein, 227 aa, Xanthomonas arboricola
  REGION 1..227: note = tr|A0A2S6Z7S6|A0A2S6Z7S6_9XANT 7-carboxy-7-deazaguanine synthase OS=Xanthomonas arboricola pv. populi OX=487823 GN=queE PE=3 SV=1
MNAAAVPSEIVQSPLPRLKITEIFLSLQGEAEAAGWPTVFVRLTGCPLRCHYCDTAYAFHGGEWHDIDAIVAEVASHGVRHVCVTGGEPLAQKRCLVLLQKLCDAGFDVSLETSGALDVSAVDPRVSRVVDIKTPASGEEQRNRWENLPLLTARDQIKFVICSRADYEWSRKRVAAHALDRRCTVWFSPSKSEVTPRQLADWIVADRLPVRFQMQLHKLLWNDEPGR

SEQ ID NO: 35251 - protein, 226 aa, Xanthomonas axonopodis
  REGION 1..226: note = tr|A0A2S6YG88|A0A2S6YG88_9XANT 7-carboxy-7-deazaguanine synthase OS=Xanthomonas axonopodis pv. begoniae OX=473403 GN=queE PE=3 SV=1
MNAAVPSEIVQSPLPRLKITEIFLSLQGEADAAGWPTVFVRLTGCPLRCLYCDTAYAFHGGQWHDIDAIVAEVASHGVRHVCVTGGEPLAQKRCLVLLEKLCDAGYDVSLETSGALDVSAVDPRVSRVVDIKTPASGEQARNRWENLPLLTARDQIKFVICSRADYEWSREIVAAHGLDRRCTVWFSPSKSEVSPRQLADWIVADRLPVRFQMQLHKLLWNDEPGR

SEQ ID NO: 35252 - protein, 227 aa, Xanthomonas axonopodis
  REGION 1..227: note = tr|M4U0H2|M4U0H2_9XANT 7-carboxy-7-deazaguanine synthase OS=Xanthomonas axonopodis Xac29-1 OX=1304892; GN = queE PE=3 SV=1
MNAAAVPSEIVQSPLPRLKITEIFLSLQGEAEAAGWPTVFVRLTGCPLRCHYCDTAYAFHGGQWHDIDAIVAEVASHGVRHVCVTGGEPLAQKRCLVLLQKLCDAGFDVSLETSGALDVSAVDSRVSRVVDIKTPASGEEARNRWENLPLLTARDQIKFVICSRADYEWSREIVAAHALDRRCTVWFSPSKSEVSPRQLADWIVADRLPVRFQMQLHKLLWNDEPGR

SEQ ID NO: 35253 - protein, 227 aa, Xanthomonas bromi
  REGION 1..227: note = tr|A0A1C3NJD4|A0A1C3NJD4_9XANT 7-carboxy-7-deazaguanine synthase OS=Xanthomonas bromi; OX = 56449 GN=queE PE=3 SV=1
MNAAAVPSEIIQSPLPRLKITEIFLSLQGEADAAGWPTVFVRLTGCPLRCQYCDTAYAFHGGEWHDIDAIVAEVASHGVRHVCVTGGEPLAQKRCLVLLQKLCDAGYDVSLETSGALDVSAVDPRVSRVVDIKTPASGEQARNRWENLPLLTARDQIKFVICSRADYEWSREIVAAHALHRRCTVWFSPSKSEVSPRQLADWIVADRLPVRFQMQLHKLLWNDEPGR

SEQ ID NO: 35254 - protein, 227 aa, Xanthomonas campestris
  REGION 1..227: note = tr|Q3BQG3|Q3BQG3_XANC5 7-carboxy-7-deazaguanine synthase OS=Xanthomonas campestris pv. vesicatoria (strain 85-10) OX=316273 GN=queE PE=3 SV=1
MNAAAVPSEIVQSPLPRLKITEIFLSLQGEAEAAGWPTVFVRLTGCPLRCLYCDTAYAFHGGQWHDIDAIVAEVASHGVRHVCVTGGEPLAQKRCLVLLEKLCDAGYDVSLETSGALDVSAVDPRVSRVVDIKTPASGEEARNRWENLPLLTARDQIKFVICSRVDYEWSREIVAAHTLDRRCTVWFSPSKSEVSPRQLADWIVADRLPVRFQMQLHKLLWNDEPGR

SEQ ID NO: 35255 - protein, 227 aa, Xanthomonas campestris
  REGION 1..227: note = tr|A0A2S4JSM3|A0A2S4JSM3_XANCA 7-carboxy-7-deazaguanine synthase OS=Xanthomonas campestris OX=339 GN=queE PE=3 SV=1
MNAAAVPSEIVQSPLPRLKITEIFLSLQGEAEAAGWPTVFVRLTGCPLRCTYCDTAYAFHGGEWHDIDAIVAEVASHGVRHVCVTGGEPLAQKRCLALLHKLCDAGFDVSLETSGALDVSAVDARVSRVVDIKTPASGEEHRNRWDNLPLLTARDQIKFVICSRADYEWSRDVVATQALDRRCTVWFSPSKGQVSARELADWIVADRLPVRFQMQLHKILWDDEPGR

SEQ ID NO: 35256 - protein, 227 aa, unidentified
  source 1..227: note = Xanthomonas cannabis
  REGION 1..227: note = tr|A0A0B2CUI6|A0A0B2CUI6_9XANT 7-carboxy-7-deazaguanine synthase OS=Xanthomonas cannabis pv. cannabis OX=1885894 GN=queE PE=3 SV=1
MNAAAVPSEIVQSQLPRLKITEIFLSLQGEAETAGWPTVFVRLTGCPLRCQYCDTAYAFHGGQWHDIDAIVADVASHGVRHVCVTGGEPLAQKRCLVLLQKLCDAGFDVSLETSGALDVSEVDARVSRVVDIKTPASGEAHRNRWDNLALLTARDQIKFVICSRADYDWSREIVAAHALDRRCTVWFSPSKSEVTPRQLADWIVADRVPVRFQMQLHKILWNDEPGR

SEQ ID NO: 35257 - protein, 227 aa, Xanthomonas citri
  REGION 1..227: note = tr|A0A2H1SN04|A0A2H1SN04_XANCI 7-carboxy-7-deazaguanine synthase OS=Xanthomonas citri pv. fuscans OX=366649 GN=queE PE=3 SV=1
MNAAAVPSEIVQSSLPRLKITEIFLSLQGEAEAAGWPTVFVRLTGCPLRCLYCDTAYAFHGGQWHDIDAIVAEVASHGVRHVCVTGGEPLAQKRCLVLLEKLCDAGYDVSLETSGALDVSAVDPRVSRVVDIKTPGSGEEARNCWENLPLLTARDQIKFVICSRADYEWSREIVAAHALDRRCTVWFSPSKSEVSPRQLADWIVADRLPVRFQMQLHKLLWNDEPGR

SEQ ID NO: 35258 - protein, 227 aa, Xanthomonas citri
  REGION 1..227: note = tr|A0A220WEV7|A0A220WEV7_XANCI 7-carboxy-7-deazaguanine synthase OS=Xanthomonas citri pv. vignicola OX=473426 GN=queE PE=3 SV=1
MNAAAVPSEIVQSSLPRLKITEIFLSLQGEAEAAGWPTVFVRLTGCPLRCLYCDTAYAFHGGQWHDIDAIVAEVASHGVRHVCVTGGEPLAQKRCLVLLEKLCDAGYDVSLETSGALDVSAVDPRVSRVVDIKTPGSGEEARNRWENLPLLTARDQIKFVICSRADYEWSREIVAAHALDRRCTVWFSPSKSEVSPRQLADWIVADRLPVRFQMQLHKLLWNDEPGR

SEQ ID NO: 35259 - protein, 227 aa, Xanthomonas codiaei
  REGION 1..227: note = tr|A0A2S7CYQ9|A0A2S7CYQ9_9XANT 7-carboxy-7-deazaguanine synthase OS=Xanthomonas codiaei; OX = 56463 GN=queE PE=3 SV=1
MNAAAVPSEIVQSPLPRLKITEIFLSLQGEAEAAGWPTVFVRLTGCPLRCTYCDTAYAFHGGQWHDIDAIVAEVASHGVRHVCVTGGEPLAQKRCLALLQQLCDAGLDVSLETSGALDVAGVDARVSRVVDIKTPESGEAHRNRWDNLPLLTARDQIKFVICSRADYEWARTCVAEHLLDRRCTVWFSPSKGQVSARELADWIVADRLPVRFQMQLHKILWDDEPGR

SEQ ID NO: 35260 - protein, 227 aa, Xanthomonas cucurbitae
  REGION 1..227: note = tr|A0A2S7DSZ1|A0A2S7DSZ1_9XANT 7-carboxy-7-deazaguanine synthase OS=Xanthomonas cucurbitae OX=56453 GN=queE PE=3 SV=1
MNAAAVPSEIVQSPLPRLKITEIFLSLQGEADTAGWPTVFVRLTGCPLRCQYCDTAYAFHGGQWHDIDAIVAEVASHGVRHVCVTGGEPLAQKRCLALLKQLCDAGFDVSLETSGALDVAEVDPRVSRVVDIKTPASGEEHRNRWDNLPLLTARDQIKFVICSRADYQWSRERVASHALDRRCTVWFSPSKSEVTPRQLADWIVADRLPVRFQMQLHKLLWNDEPGR

SEQ ID NO: 35261 - protein, 227 aa, Xanthomonas cynarae
  REGION 1..227: note = tr|A0A2S7AZY3|A0A2S7AZY3_9XANT 7-carboxy-7-deazaguanine synthase OS=Xanthomonas cynarae; OX = 109214 GN=queE PE=3 SV=1
MNAAAVPSEIVQSPLPRLKITEIFLSLQGEAEAAGWPTVFVRLTGCPLRCHYCDTAYAFHGGEWHDIDAIVAEVASHGVRHVCVTGGEPLAQKRCLVLLQKLCDAGFDVSLETSGALDVSAVDPRVSRVVDIKTPASGEEQRNRWENLPLLTARDQIKFVICSRADYEWSREIVAAHALDRRCTVWFSPSKSEVTPRELADWIVADRLPVRFQMQLHKLLWNDEQGR

SEQ ID NO: 35262 - protein, 227 aa, Xanthomonas dyei
  REGION 1..227: note = tr|A0A2S7BZ72|A0A2S7BZ72_9XANT 7-carboxy-7-deazaguanine synthase OS=Xanthomonas dyei; OX = 743699 GN=queE PE=3 SV=1
MNAAAVPSEIVQSPLPRLKITEIFLSLQGEAEAAGWPTVFVRLTGCPLRCNYCDTAYAFHGGQWHDIDAIVAEVASHGVRHVCVTGGEPLAQKRCLVLLQKLCDAGFDVSLETSGALDVSEVDARVSRVVDIKTPASGEEQRNRWDNLALLTARDQIKFVICSRADYEWSREIVATHALDRCCTVWFSPSKSEVTPRQLADWIVADRLPVRFQMQLHKILWDDEPGR

SEQ ID NO: 35263 - protein, 227 aa, Xanthomonas euvesicatoria; identical to SEQ ID NO: 35248
  REGION 1..227: note = tr|A0A2S7EGU1|A0A2S7EGU1_XANEU 7-carboxy-7-deazaguanine synthase OS=Xanthomonas euvesicatoria pv. citrumelonis OX=189396 GN=queE PE=3 SV=1

SEQ ID NO: 35264 - protein, 227 aa, unidentified
  source 1..227: note = Xanthomonas floridensis
  REGION 1..227: note = tr|A0A1A9MA66|A0A1A9MA66_9XANT 7-carboxy-7-deazaguanine synthase OS=Xanthomonas floridensis OX=1843580 GN=queE PE=3 SV=1
MNAAAVPSEIVQSPLPRLKITEIFLSLQGEAEAAGWPTVFVRLTGCPLRCTYCDTAYAFHGGQWHDIDAIVAEVASHGVRHVCVTGGEPLAQKRCLVLLQKLCDAGFDVSLETSGALDVSEVDARVSRVVDIKTPASGEAQRNRWDNLPLLTARDQIKFVICGRADYEWSREIVAAHALERRCTVWFSPSKSEVTPRELADWIVADRLPVRFQMQLHKILWDDEPGR

SEQ ID NO: 35265 - protein, 227 aa, Xanthomonas fragariae
  REGION 1..227: note = tr|A0A1Y6H444|A0A1Y6H444_9XANT 7-carboxy-7-deazaguanine synthase OS=Xanthomonas fragariae; OX = 48664 GN=queE PE=3 SV=1
MNAAAVPSEIVQSPLPRLKITEIFLSLQGEARTAGWPTVFVRLTGCPLRCLYCDTAYAFHGGQWHDIDAIVAEVASHGVRHVCVTGGEPLAQKRCVVLLQKLCDAGFDVSLETSGALDVSAVDSRVSRVVDIKTPASGEEQRNRWENLPLLTARDQIKFVICSRADYEWSREIVAAHALDRRCTVWFSPSKSDVTPRELADWIVADRLPVRFQMQLHKVLWNDEPGR

SEQ ID NO: 35266 - protein, 227 aa, Xanthomonas gardneri; identical to SEQ ID NO: 35261
  REGION 1..227: note = tr|F0CAX9|F0CAX9_9XANT 7-carboxy-7-deazaguanine synthase OS=Xanthomonas gardneri ATCC 19865 OX=925777; GN = queE PE=3 SV=1

SEQ ID NO: 35267 - protein, 227 aa, Xanthomonas gardneri
  REGION 1..227: note = tr|A0A1L5Y5E1|A0A1L5Y5E1_9XANT 7-carboxy-7-deazaguanine synthase OS=Xanthomonas gardneri; OX = 90270 GN=queE PE=3 SV=1
MNAAAVPSEIVQSPLPRLKITEIFLSLQGEAEAAGWPTVFVRLTGCPLRCHYCDTAYAFHGGEWHDIDAIVAEVASHGVRHVCVTGGEPLAQKRCLVLLQKLCDAGFDVSLETSGALDVSAVDPRVSRVVDIKTPASGEEQRNRWDNLPLLTARDQIKFVICSRADYEWSREIVAAHALDRRCTVWFSPSKSEVTPRELADWIVADRLPVRFQMQLHKLLWNDEPGR

SEQ ID NO: 35268 - protein, 227 aa, Xanthomonas hortorum
  REGION 1..227: note = tr|A0A2S7E0E2|A0A2S7E0E2_9XANT 7-carboxy-7-deazaguanine synthase OS=Xanthomonas hortorum pv. hederae OX=453603 GN=queE PE=3 SV=1
MNAAAVPSEIVQSPLPRLKITEIFLSLQGEAEAAGWPTVFVRLTGCPLRCHYCDTVYAFHGGEWHDIDAIVAEVASHGVRHVCVTGGEPLAQKRCLVLLQKLCDAGFDVSLETSGALDASAVDPRVSRVVDIKTPASGEEQRNRWDNLPLLTARDQIKFVICSRADYEWSREIVAAHALDRRCTVWFSPSKSEVTPRQLADWIVADRLPVRFQMQLHKLLWNDEPGR

SEQ ID NO: 35269 - protein, 227 aa, Xanthomonas hortorum; identical to SEQ ID NO: 35267
  REGION 1..227: note = tr|A0A248YFD8|A0A248YFD8_9XANT 7-carboxy-7-deazaguanine synthase OS=Xanthomonas hortorum; OX = 56454 GN=queE PE=3 SV=1

SEQ ID NO: 35270 - protein, 225 aa, unidentified
  source 1..225: note = Xanthomonas hyacinthi
  REGION 1..225: note = tr|A0A2S7ESX9|A0A2S7ESX9_9XANT 7-carboxy-7-deazaguanine synthase OS=Xanthomonas hyacinthi; OX = 56455 GN=queE PE=3 SV=1
MAAVPSDIVQSPLPRLKLTEIFLSLQGEADSAGWPTVFVRLTGCPLRCSYCDTAYAFHGGQWWDIDAILAEVARHGVRHVCVTGGEPLAQKRCLRLLQQLCDAGYDVSLETSGALDIAEVDPRVSRVLDIKTPASREAARNRWENLPLLTARDQIKFVLCGRADYDWARALVAEHRLHERCTVWFSPSKSELAPRELADWIVADRLPVRFQMQLHKLLWNDEPGR

SEQ ID NO: 35271 - protein, 226 aa, unidentified
  source 1..226: note = Xanthomonas manihotis
  REGION 1..226: note = tr|A0A0W7YL80|A0A0W7YL80_XANMN 7-carboxy-7-deazaguanine synthase OS=Xanthomonas manihotis; OX = 43353 GN=queE PE=3 SV=1
MNAAVPSEIVQSPLPRLKITEIFLSLQGEADAAGWPTVFVRLTGCPLRCLYCDTAYAFHGGQWHYIDAIVAEVASHGVRHVCVTGGEPLAQKRCLVLLEKLCDAGYDVSLETSGALDVSAVDPRVSRVVDIKTPASGEQARNRWENLPLLTARDQIKFVICSRADYEWSREIVAAHALDRRCTVWFSPSKSEVSARQLADWIVADRLPVRFQMQLHKLLWNDEPGR

SEQ ID NO: 35272 - protein, 227 aa, Xanthomonas melonis
  REGION 1..227: note = tr|A0A2S7DHP0|A0A2S7DHP0_9XANT 7-carboxy-7-deazaguanine synthase OS=Xanthomonas melonis; OX = 56456 GN=queE PE=3 SV=1
MNAAAVPSEIVQSPLPRLKITEIFLSLQGEAEAAGWPTVFVRLTGCPLRCQYCDTAYAFHGGQWHDIDAILADVARHGVRHVCVTGGEPLAQKRCLVLLQKLCDAGFDVSLETSGALDVSEVDPRVSRIVDIKTPASGEQHRNRWDNLPLLTARDQIKFVICNRADYDWSREIVAAHALDRRCTVWFSPSKSEVTPRELADWIVADRLPVRFQMQLHKILWNDEPGR

SEQ ID NO: 35273 - protein, 227 aa, unidentified
  source 1..227: note = Xanthomonas nasturtii
  REGION 1..227: note = tr|A0A3E1KNL8|A0A3E1KNL8_9XANT 7-carboxy-7-deazaguanine synthase OS=Xanthomonas nasturtii; OX = 1843581 GN=queE PE=3 SV=1
MNAAAVPSEIVQSPLPRLKITEIFLSLQGEAEAAGWPTVFVRLTGCPLRCLYCDTAYAFHGGQWHDIDAIVAEVASHGVRHVCVTGGEPLAQKRCLVLLQKLCDAGFDVSLETSGALDVSAVDPRVSRVVDIKTPASGEEARNRWENLPLLTARDQIKFVICSRADYEWSREIVAAHALDRRCTVWFSPSKSEVTPRQLADWIVADRLPVRFQMQLHKLLWNDEPGR

SEQ ID NO: 35274 - protein, 227 aa, Xanthomonas oryzae
  REGION 1..227: note = tr|A0A346MG41|A0A346MG41_XANOO 7-carboxy-7-deazaguanine synthase OS=Xanthomonas oryzae pv. oryzae OX=64187 GN=queE PE=3 SV=1
MNAAIVPSEIIQSPLPRLKITEIFLSLQGEAEAAGWPTVFVRLTGCPLRCVYCDTAYAFHGGEWHDIDDVLAEVATHGVRHVCVTGGEPLAQKRCLVLLQKLCDAGYDVSLETSGALDVSAVDPRVSRVVDIKTPASGEEARNRWENLLLLTARDQIKFVICSRADYEWSREIVAAHALDRRCTVWFSPSKSEVGPRQLADWIVADRLPVRFQMQLHKLLWNDEPGR

SEQ ID NO: 35275 - protein, 227 aa, Xanthomonas oryzae
  REGION 1..227: note = tr|A0A0C5UX51|A0A0C5UX51_9XANT 7-carboxy-7-deazaguanine synthase OS=Xanthomonas oryzae pv. oryzicola OX=129394 GN=queE PE=3 SV=1
MNAATVPSEIIQSPLLRLKITEIFLSLQGEAEAAGWPTVFVRLTGCPLRCVYCDTAYAFHGGEWHDIDDVLAEVATHGVRHVCVTGGEPLAQKRCLVLLQKLCDAGYDVSLETSGALDVSAVDPRVSRVVDIKTPASGEEARNRWENLPLLTARDQIKFVICSRADYEWSREIVAAHALDRRCTVWFSPSKSEVGPRQLADWIVADRLPVRFQMQLHKLLWNDEPGR

SEQ ID NO: 35276 - protein, 227 aa, Xanthomonas perforans; identical to SEQ ID NO: 35248
  REGION 1..227: note = tr|A0A0G9CWK6|A0A0G9CWK6_9XANT 7-carboxy-7-deazaguanine synthase OS=Xanthomonas perforans; OX = 442694 GN=queE PE=3 SV=1

SEQ ID NO: 35277 - protein, 226 aa, Xanthomonas phaseoli
  REGION 1..226: note = tr|A0A1V9H4B2|A0A1V9H4B2_9XANT 7-carboxy-7-deazaguanine synthase OS=Xanthomonas phaseoli pv. syngonii LMG 9055 OX=1437878 GN=queE PE=3 SV=1
MNAAVPSEIVQSPLPRLKITEIFLSLQGEADAAGWPTVFVRLTGCPLRCLYCDTAYAFHGGQWHDIDAIVAEVASHGVRHVCVTGGEPLAQKRCLILLEKLCDAGYDVSLETSGALDVSAVDPRVSRVVDIKTPASGEQARNRWENLPLLTARDQIKFVICSRADYEWSREIVAAHALDRRCTVWFSPSKSEVSPRQLADWIVADRLPVRFQMQLHKLLWNDEPGR

SEQ ID NO: 35278 - protein, 226 aa, Xanthomonas phaseoli
  REGION 1..226: note = tr|A0A0Q0EHM6|A0A0Q0EHM6_9XANT 7-carboxy-7-deazaguanine synthase OS=Xanthomonas phaseoli pv. dieffenbachiae OX=92828 GN=queE PE=3 SV=1
MNAAVPSEIVQSPLPRLKITEIFLSLQGEADAAGWPTVFVRLTGCPLRCLYCDTAYAFHGGQWHDIDAIVAEVASHGVRHVCVTGGEPLAQKRCLLLLEKLCDAGYDVSLETSGALDVSAVDPRVSRVVDIKTPASGEQARNRWENLPLLTARDQIKLVICSRADYEWSREVVAAHGLDRRCTVWFSPSKSEVSARQLADWIVADRLPVRFQMQLHKLLWNDEAGR

SEQ ID NO: 35279 - protein, 227 aa, Xanthomonas pisi
  REGION 1..227: note = tr|A0A2S7CRG2|A0A2S7CRG2_9XANT 7-carboxy-7-deazaguanine synthase OS=Xanthomonas pisi; OX = 56457 GN=queE PE=3 SV=1
MNAAAVPSEIVQSPLPRLKITEIFLSLQGEAEAAGWPTVFVRLTGCPLRCTYCDTAYAFHGGQWHDIDAIVAEVASHGVRHVCVTGGEPLAQKRCLVLLQKLCDAGFDVSLETSGALDVSEVDARVSRVVDIKTPASGEAQRNRWDNLPLLTARDQIKFVICSRADYEWSREIVATHALERRCTVWFSPSKGEVTPRELADWIVADRLPVRFQMQLHKILWDDEPGR

SEQ ID NO: 35280 - protein, 227 aa, Xanthomonas populi
  REGION 1..227: note = tr|A0A2S7EZG3|A0A2S7EZG3_9XANT 7-carboxy-7-deazaguanine synthase OS=Xanthomonas populi; OX = 53414 GN=queE PE=3 SV=1
MNVAAVPSVIVQSPLPRLKVTEIFLSLQGEADAAGWPTVFVRLTGCPLRCHYCDTAYAFHGGEWNDINAIVAEVASHGVRHVCVTGGEPLAQKRCLVLLQKLCDAGFDVSLETSGALDVSAVDPRVSRVVDIKTPASGEEQRNRWDNVPLLTARDQIKFVICSRTDYEWSRELVAAHALDRRCTVWFSPSKSEVTPRQLADWIVADRLPVRFQMQLHKLLWNDEPGR

SEQ ID NO: 35281 - protein, 227 aa, unidentified
  source 1..227: note = Xanthomonas prunicola
  REGION 1..227: note = tr|A0A2N3RNG7|A0A2N3RNG7_9XANT 7-carboxy-7-deazaguanine synthase OS=Xanthomonas prunicola; OX = 2053930 GN=queE PE=3 SV=1
MNAAAVPSEIIQSPLPRLKITEIFLSLQGEAEAAGWPTVFVRLTGCPLRCLYCDTAYAFHGGEWHDIDAIVAEVASHGVRHVCVTGGEPLAQKRCLVLLQKLCDAGYDVSLETSGALDVSAVDPRVSRVVDVKTPASGEEARNRWENLPLLTARDQIKFVICSRADYDWSREIVAAHALHRRCTVWFSPSKSEVSPRQLADWIVADRLPVRFQMQLHKLLWNDEPGR

SEQ ID NO: 35282 - protein, 225 aa, Xanthomonas sacchari
  REGION 1..225: note = tr|A0A0A8DRT3|A0A0A8DRT3_9XANT 7-carboxy-7-deazaguanine synthase OS=Xanthomonas sacchari; OX = 56458 GN=queE PE=3 SV=1
MAAVPSDIVQSPLPRLKLTEIFLSLQGEAESAGWPTVFVRLTGCPLRCSYCDTAYAFHGGQWWDIDAILEEVARHGVRHVCVTGGEPLAQKRCLQLLQRLCDAGYDVSLETSGALDIAEVDPRVSRVLDIKTPASQEAHRNRWENLPLLTARDQIKFVLCGRADYEWARAVVAEHRLDTRCTVWFSPSKSELTARDLADWIVADRLPVRFQMQLHKLLWNDEPGR

SEQ ID NO: 35283 - protein, 225 aa, Xanthomonas sacchari
  REGION 1..225: note = tr|A0A2P5Z321|A0A2P5Z321_9XANT 7-carboxy-7-deazaguanine synthase OS=Xanthomonas sacchari; OX = 56458 GN=queE PE=3 SV=1
MAAVPSDIVQSPLPRLKLTEIFLSLQGEAESAGWPTVFVRLTGCPLRCSYCDTAYAFHGGQWWYIDAILDEVARHGVRHVCVTGGEPLAQKRCLQLLQRLCDAGYDVSLETSGALDIAEVDPRVSRVLDIKTPASQEAHRNRWENLPLLTARDQIKFVLCGRADYEWARSVVAEHRLETRCTVWFSPSKSELTARDLADWIVADRLPVRFQMQLHKLLWNDEPGR

SEQ ID NO: 35284 - protein, 227 aa, Xanthomonas sp.
  REGION 1..227: note = tr|A0A0Q5GVU4|A0A0Q5GVU4_9XANT 7-carboxy-7-deazaguanine synthase OS=Xanthomonas sp. Leaf131 OX=1736270 GN=queE PE=3 SV=1
MNAAAVPSEIVQSPLPRLKITEIFLSLQGEAEAAGWPTVFVRLTGCPLRCHYCDTAYAFHGGEWHDIDAIVAEVSSHGVRHVCVTGGEPLAQKRCLVLLQKLCDAGFDVSLETSGALDVSAVDPRVSRVVDIKTPASGEEQRNRWDNLPLLTARDQIKFVICSRADYEWSREIVAAHALDRRCTVWFSPSKSEVTPRQLADWIVADRLPVRFQMQLHKLLWNDEPGR

SEQ ID NO: 35285 - protein, 226 aa, Xanthomonas sp.
  REGION 1..226: note = tr|A0A3T0G130|A0A3T0G130_9XANT 7-carboxy-7-deazaguanine synthase OS=Xanthomonas sp. ISO98C4 OX=1680158 GN=queE PE=3 SV=1
MNAAVPSEIVQSPLPRLKITEIFLSLQGEADAAGWPTVFVRLTGCPLRCLYCDTAYAFHGGQWHDIDAIVAEVASHGVRHVCVTGGEPLAQKRCLVLLEKLCDAGYDVSLETSGALDVSAVDPRVSRVVDIKTPASGEQARNRWENLPLLTARDQIKFVICSRADYEWSREIVAAHALDRRCTVWFSPSKSEVSARQLADWIVADRLPVRFQMQLHKLLWNDEPGR

SEQ ID NO: 35286 - protein, 225 aa, Xanthomonas theicola
  REGION 1..225: note = tr|A0A2S6ZLS5|A0A2S6ZLS5_9XANT 7-carboxy-7-deazaguanine synthase OS=Xanthomonas theicola; OX = 56464 GN=queE PE=3 SV=1
MAAVPSDIVQSPLPRLKLTEIFLSLQGEADSAGWPTVFVRLTGCPLRCSYCDTAYAFHGGQWWDIGAILAEVARHGVRHVCVTGGEPLAQKRCLHLLRQLCDAGYDVSLETSGALDIAEVDPRVSRVLDIKTPASQEAQRNRWENLPLLTVRDQIKFVLCSRADYDWARAIVAEHRLHERCTVWFSPSKSELAPRDLADWIVADRLPVRFQMQLHKLLWNDEPGR

SEQ ID NO: 35287 - protein, 225 aa, Xanthomonas translucens
  REGION 1..225: note = tr|A0A1M4IE73|A0A1M4IE73_XANCT 7-carboxy-7-deazaguanine synthase OS=Xanthomonas translucens pv. graminis OX=134874 GN=queE PE=3 SV=1
MAAVPSDIVQSPLPRLKLTEIFLSLQGEADSAGWPTVFVRLTGCPLRCSYCDTAYAFHGGQWWDIDAILAEVARHGVRHVCVTGGEPLAQKRCLRLLEQLCDAGYDVSLETSGALDIADVDPRVSRVLDIKTPASQEAQRNRWENLPLLSARDQIKFVLCGRADYDWARAIVAEHRLHERCTVWFSPSKSELAPRELADWIVADRLPVRFQMQLHKLLWNDEPGR

SEQ ID NO: 35288 - protein, 225 aa, Xanthomonas translucens
  REGION 1..225: note = tr|A0A514E9D1|A0A514E9D1_XANCT 7-carboxy-7-deazaguanine synthase OS=Xanthomonas translucens pv. cerealis OX=152263 GN=queE PE=3 SV=1
MAAVPSEIVQSPLPRLKLTEIFLSLQGEADSAGWPTVFVRLTGCPLRCSYCDTAYAFHGGQWWDIDAILAEVARHGVRHVCVTGGEPLAQKRCLRLLEQLCDAGYDVSLETSGALDIADVDPRVSRVLDIKTPASQEAQRNRWENLPLLSARDQIKFVLCGRADYDWARAIVAEHRLHERCTVWFSPSKSELAPRELADWIVADRLSVRFQMQLHKLLWNDEPGR

SEQ ID NO: 35289 - protein, 227 aa, Xanthomonas vasicola
  REGION 1..227: note = tr|A0A0A3FYP5|A0A0A3FYP5_XANVA 7-carboxy-7-deazaguanine synthase OS=Xanthomonas vasicola; OX = 56459 GN=queE PE=3 SV=1
MNAAAVPSEIIQSPLPRLKITEIFLSLQGEAEAAGWPTVFVRLTGCPLRCLYCDTAYAFHGGEWHDIDAIVAEVARHGVRHVCVTGGEPLAQKRCLVLLQKLCDAGYDVSLETSGALDVSAVDPRVSRVVDIKTPASGEEARNRWENLPLLTARDQIKFVICSRADYEWSREIVAAHALDRRCTVWFSPSKSEVSPRQLADWIVADRLPVRFQMQLHKLLWNDEPGR

SEQ ID NO: 35290 - protein, 227 aa, Xanthomonas vesicatoria
  REGION 1..227: note = tr|F0B8L2|F0B8L2_9XANT 7-carboxy-7-deazaguanine synthase OS=Xanthomonas vesicatoria ATCC 35937 OX=925775; GN = queE PE=3 SV=1
MNAAAVPSEIVQSPLPRLKITEIFLSLQGEAEAAGWPTVFVRLTGCPLRCNYCDTAYAFHGGQWHDIDAIVAEVASHGVRHVCVTGGEPLAQKRCLVLLQKLCDAGFDVSLETSGALDVSEVDTRVSRVVDIKTPASGEEQRNRWDNLALLTARDQIKFVICSRADYEWSRGIVAAHALERRCTVWFSPSKGEVPPRQLADWIVSDRLPVRFQMQLHKILWDDEPGR

SEQ ID NO: 35291 - protein, 227 aa, Xanthomonas vesicatoria; identical to SEQ ID NO: 35290
  REGION 1..227: note = tr|A0A1L5QQS1|A0A1L5QQS1_9XANT 7-carboxy-7-deazaguanine synthase OS=Xanthomonas vesicatoria OX=56460 GN=queE PE=3 SV=1

SEQ ID NO: 35292 - protein, 208 aa, Xenococcus sp.
  REGION 1..208: note = tr|L8LZ56|L8LZ56_9CYAN 7-carboxy-7-deazaguanine synthase OS=Xenococcus sp. PCC 7305 OX=102125 GN=queE PE=3; SV = 1
MSGQNAIATNNRNYPIVETFHSVQGEGYWTGANAFFIRLGGCDVHCPWCDTKESWNPERHPQYYVADLAKIAQQTKTEIVIVTGGEPLMHDLLPLTTAIKELGMAVHLETSGAYPYTGSFDWVTFSPKQFKSPHPSIYKHANEIKVVITSEYDLKWAEQQSALVPTQTLKYLQPEWNTPKSKEIIFNYVRNNPQWRISLQTHKMLHIK

SEQ ID NO: 35293 - protein, 211 aa, Xenophilus sp.
  REGION 1..211: note = tr|A0A254VF28|A0A254VF28_9BURK 7-carboxy-7-deazaguanine synthase OS=Xenophilus sp. AP218F; OX = 2014876 GN=queE PE=3 SV=1
MSTYTVKEIFYTLQGEGRQAGRAAVFCRFAGCNLWSGREEDRAKAVCRFCDTDFVGVGPDGGKFASAAELAARIAGEWPEDAGGARYVVCTGGEPLLQLDEALIDALHAEGFEVAVETNGTVAAPRGLDWICVSPKAGAELKLLAGDELKLVYPQAAQLPESVAHLDFATFYLQPMDGPELAANTRAAIAYCLAHPKWRLSVQTHKVVNIR

SEQ ID NO: 35294 - protein, 223 aa, Xenorhabdus beddingii
  REGION 1..223: note = tr|A0A1Y2SS62|A0A1Y2SS62_9GAMM 7-carboxy-7-deazaguanine synthase OS=Xenorhabdus beddingii; OX = 40578 GN=queE PE=3 SV=1
MIYPINEIFQTLQGEGVFTGVPSVFIRLQGCPVGCSWCDTKHTWEKEADKQQPMENILLKSQDSDIWGIATARQLLNIFTRQGYSARHIVITGGEPCLYDLRPLTETLESEGYRCQIETSGTHAIQCTDKTWVTVSPKVKMRGGYRVLPEAMKRADEIKHPVGRERDIEALDELLKMLDGSPVPIIALQPISQKEEATRLCIETCIARNWRFSMQTHKYLNIA

SEQ ID NO: 35295 - protein, 223 aa, Xenorhabdus bovienii
  REGION 1..223: note = tr|D3V503|D3V503_XENBS 7-carboxy-7-deazaguanine synthase OS=Xenorhabdus bovienii (strain SS-2004); OX = 406818 GN=ygcF PE=3 SV=1
MIYPINEIFQTLQGEGVFTGVPSVFIRLQGCPVGCSWCDTKHTWEKEADKQQPMENILVKSQDSDTWGAATARQIINLFIRQGYTARHIVVTGGEPCLYNLRPLTETLESEGYQCQIETSGTHAIQCSEKTWVTVSPKVKMRGGYQVLPEAMNRANEIKHPVGRERDIEALDELLTMLDEKADPVIALQPISQKEEATRLCIETCIARNWRFSMQTHKYLNIA

SEQ ID NO: 35296 - protein, 223 aa, Xenorhabdus bovienii
  REGION 1..223: note = tr|A0A077P6H1|A0A077P6H1_XENBV 7-carboxy-7-deazaguanine synthase OS=Xenorhabdus bovienii str. oregonense OX=1398202 GN=ygcF PE=3 SV=1
MIYPINEIFQTLQGEGVFTGVPSVFIRLQGCPVGCSWCDTKHTWEKEADKQQPMENILVKSQDSDTWGAATARQIINLFIRQGYTARHIVVTGGEPCLYDLRPLTEILESEGYQCQIETSGTHAIWCSEKTWVTVSPKVKMRGGYQVLPEAMNRANEIKHPVGRERDIEALDELLTMLDEKADPVIALQPISQKEEATRLCIETCIARNWRFSMQTHKYLNIA

SEQ ID NO: 35297 - protein, 223 aa, Xenorhabdus budapestensis
  REGION 1..223: note = tr|A0A2D0J116|A0A2D0J116_XENBU 7-carboxy-7-deazaguanine synthase OS=Xenorhabdus budapestensis OX=290110 GN=queE PE=3 SV=1
MIYPINEMFQTLQGEGVFTGVPSVFIRLQGCPVGCSWCDTKHTWEKEADKQQPMENILVKSQDSDIWGVATPRQIINLFIRQGYTARHVVITGGEPCLYDLRSLTETLEREGYQCQIETSGTHAIYCSDKTWVTVSPKVKMRGGYKVLPDAMKRANEIKHPVGRERDIEALDELLAMLNEGNAPIIALQPISQKEEATRLCIETCIARNWRFSMQTHKYLNIA

SEQ ID NO: 35298 - protein, 223 aa, Xenorhabdus cabanillasii
  REGION 1..223: note = tr|W1JB74|W1JB74_9GAMM 7-carboxy-7-deazaguanine synthase OS=Xenorhabdus cabanillasii JM26 OX=1427517; GN = ygcF PE=3 SV=1
MIYPINEMFQTLQGEGVFTGVPSVFIRLQGCPVGCSWCDTKHTWEKEADKQQPMENILVKSQDSDIWGVATPRQLINLFTRQGYTARHVVITGGEPCLYDLRPLTETLEREGYQCQIETSGTHAIYCSDKTWVTVSPKVKMRGGYKVLPEAMKRANEVKHPVGRERDIEALDELLAMLNEDNAPVIALQPISQKEEATRLCIETCIARNWRFSMQTHKYLNIA

SEQ ID NO: 35299 - protein, 223 aa, Xenorhabdus cabanillasii; identical to SEQ ID NO: 35298
  REGION 1..223: note = tr|A0A3D9UCD1|A0A3D9UCD1_9GAMM 7-carboxy-7-deazaguanine synthase OS=Xenorhabdus cabanillasii OX=351673 GN=queE PE=3 SV=1

SEQ ID NO: 35300 - protein, 223 aa, Xenorhabdus doucetiae
  REGION 1..223: note = tr|A0A068QYH5|A0A068QYH5_9GAMM 7-carboxy-7-deazaguanine synthase OS=Xenorhabdus doucetiae; OX = 351671 GN=ygcF PE=3 SV=1
MIYPINEIFQTLQGEGVFTGVPAVFIRLQGCPVGCSWCDTKHTWEKEADKQQPMENILLKSQDSDRWGVANARQLLSIFTRQGYSAKHIVITGGEPCLYDLRPLTETLESAGYQCQIETSGTHVIQCSDNTWVTVSPKVKMRGGYQVLPEAMKRANEIKHPVGRQRDIEALDELLTMLDGNPAPVIALQPISQKEEATRLCIETCIARNWRFSMQTHKYLNIA

SEQ ID NO: 35301 - protein, 223 aa, unidentified
  source 1..223: note = Xenorhabdus eapokensis
  REGION 1..223: note = tr|A0A1Q5TSG9|A0A1Q5TSG9_9GAMM 7-carboxy-7-deazaguanine synthase OS=Xenorhabdus eapokensis OX=1873482 GN=queE PE=3 SV=1
MIYPINEIFQTLQGEGVFTGVPSVFIRLQGCPVGCSWCDTKHTWEKEADKQQPMENILLKSQDSDLWGVASAKQLLNIFTRQGYSAKHIVITGGEPCLYDLRPLTETLESEGYQCQIETSGTHAIQCSDKTWVTVSPKVKMRGGYQVLPEAMKRANEIKHPVGRQRDIEVLDELLIMLDGNPSPVIALQPISQKEDATRLCIETCIARNWRFSMQTHKYLNIA

SEQ ID NO: 35302 - protein, 223 aa, Xenorhabdus ehlersii
  REGION 1..223: note = tr|A0A2D0IVH5|A0A2D0IVH5_9GAMM 7-carboxy-7-deazaguanine synthase OS=Xenorhabdus ehlersii; OX = 290111 GN=queE PE=3 SV=1
MIYPINEIFQTLQGEGVFTGVPSVFIRLQGCPVGCSWCDTKHTWEKEADKQQPMENILLKSQDSDLWGIATARQLLSIFTRQGYSAKHIVITGGEPCLYDLCPLTETLESEGYQCQIETSGTHTIQCSDKTWVTVSPKVKMRGGYQVLPEAIKRADEIKHPVGRRRDIEALDELLTMLDGNPTPVIALQPISQKEDATRLCIETCIARNWRFSMQTHKYLNIA

SEQ ID NO: 35303 - protein, 223 aa, Xenorhabdus hominickii
  REGION 1..223: note = tr|A0A2G0Q4E8|A0A2G0Q4E8_9GAMM 7-carboxy-7-deazaguanine synthase OS=Xenorhabdus hominickii OX=351679 GN=queE PE=3 SV=1
MIYPINEIFQTLQGEGVFTGVPSIFVRLQGCPVGCSWCDTKHTWEKAADKQQPMDNILLKSQDSDIWGVATARQLLNIFTRQNYSARHVVITGGEPCLYDLRPLTETLESEGYQCQIETSGTHTIQCSDKTWVTVSPKVKMRGGYQVLPEAMKRADEIKHPVGRERDIEALDELLTMLDGNPVPVIALQPISQKEEATRLCIETCIARNWRFSMQTHKYLNIA

SEQ ID NO: 35304 - protein, 223 aa, Xenorhabdus innexi
  REGION 1..223: note = tr|A0A1N6MTB8|A0A1N6MTB8_9GAMM 7-carboxy-7-deazaguanine synthase OS=Xenorhabdus innexi; OX = 290109 GN=ygcF PE=3 SV=1
MIYPINEMFQTLQGEGVFTGVPAVFIRLQGCPVGCSWCDTKHTWEKEADKQQTMENILVKTQDSDTWGVATPQQIINLFARQGYTARHIVITGGEPCLYDLRPLTEALENAGYQCQIETSGTHAILCSDNTWVTVSPKVKMRGGYKVLPEAMNRANEIKHPVGRERDIESLDDLLTMLDESNKPVIALQPISQKEEATRLCIETCIARNWRFSMQTHKYLNIA

SEQ ID NO: 35305 - protein, 223 aa, unidentified
  source 1..223: note = Xenorhabdus ishibashii
  REGION 1..223: note = tr|A0A2D0KEL2|A0A2D0KEL2_9GAMM 7-carboxy-7-deazaguanine synthase OS=Xenorhabdus ishibashii OX=1034471 GN=queE PE=3 SV=1
MIYPINEIFQTLQGEGVFTGVPSVFIRLQGCPVGCSWCDTKHTWEKEADKQQPMENILLKSQESNLWGVASAKQLLSIFTRQGYSAKHIVITGGEPCLYDLRPLTETLESEGYQCQIETSGTHAIQCSDKTWVTVSPKVKMRGGYRVLPEAMKRANEIKHPVGRQRDIEALDELLTMLDGNPTPVIALQPISQKEDATRLCIETCIARNWRFSMQTHKYLNIA

SEQ ID NO: 35306 - protein, 223 aa, Xenorhabdus japonica
  REGION 1..223: note = tr|A0A1I5A7J7|A0A1I5A7J7_9GAMM 7-carboxy-7-deazaguanine synthase OS=Xenorhabdus japonica; OX = 53341 GN=queE PE=3 SV=1
MIYPINEIFQTLQGEGVFTGVPSVFIRLQGCPVGCSWCDTKHTWEKETDKQQSMDNILLKSQDSDLWGVATARQLLSIFTRQGYSAKHIVITGGEPCLYDLRPLTETLESEGYQCQVETSGTHTIQCTDKTWVTVSPKVKMRGGYQVLPEAMKRADEIKHPVGRQRDIEALDELLTMLDGNPIPFIALQPISQKEDATRLCIETCIARNWRFSMQTHKYLNIA

SEQ ID NO: 35307 - protein, 223 aa, unidentified
  source 1..223: note = Xenorhabdus khoisanae
  REGION 1..223: note = tr|A0A0J5FN26|A0A0J5FN26_9GAMM 7-carboxy-7-deazaguanine synthase OS=Xenorhabdus khoisanae; OX = 880157 GN=queE PE=3 SV=1
MIYPINEIFQTLQGEGVFTGVPSVFIRLQGCPVGCSWCDTKHTWEKEADKQQPMENILLKSQDSDIWGVATAKQLLGIFTRQGYSARHIVITGGEPCLYDLRPLTETLESEGYQCQIETSGTHEIQCSEKTWVTVSPKVKMRGGYRVLPEAMKRANEIKHPVGRERDIEALDELLTMLDGNSAPIIALQPISQKEEATRLCIETCIARNWRFSMQTHKYLNIA

SEQ ID NO: 35308 - protein, 223 aa, Xenorhabdus koppenhoeferi
  REGION 1..223: note = tr|A0A1I7ESN3|A0A1I7ESN3_9GAMM 7-carboxy-7-deazaguanine synthase OS=Xenorhabdus koppenhoeferi OX=351659 GN=queE PE=3 SV=1
MIYPINEIFQTLQGEGVFTGVPSVFIRLQGCPVGCSWCDTKHTWEKEADKQQPMQNILLKTQDSDLWGVATARQLINIFTRQGYSARHIVITGGEPCLYDLRPLTETLESEGYQCQIETSGTHTILCSDKTWVTISPKVKMRGGCQVLPEAMKRADEIKHPVGRERDIEALDELLTMLDGNPVPIIALQPISQKEEATRLCIETCIARNWRFSMQTHKYLNIA

SEQ ID NO: 35309 - protein, 223 aa, Xenorhabdus kozodoii
  REGION 1..223: note = tr|A0A2D0LCH8|A0A2D0LCH8_9GAMM 7-carboxy-7-deazaguanine synthase OS=Xenorhabdus kozodoii; OX = 351676 GN=queE PE=3 SV=1
MIYPINEIFQTLQGEGVFTGVPSVFIRLQGCPIGCSWCDTKHTWEKETDKQRPMENILLKSQDSELWGVATAKQLLNIFTRQGYSANHIVITGGEPCLYDLRPLTETLESEGYQCQIETSGTHVIQCSDKTWVTVSPKVKMRGGYHVLPEAIKRANEIKHPVGRQRDIEALDELLTMLDGNSTPVIALQPISQKEEATRLCIETCIARNWRFSMQTHKYLNIA

SEQ ID NO: 35310 - protein, 223 aa, Xenorhabdus mauleonii
  REGION 1..223: note = tr|A0A1I3WMZ5|A0A1I3WMZ5_9GAMM 7-carboxy-7-deazaguanine synthase OS=Xenorhabdus mauleonii; OX = 351675 GN=queE PE=3 SV=1
MIYPINEIFQTLQGEGVFTGVPSVFIRLQGCPVGCSWCDTKHTWEKEPDKQQPMENIILKTQDSDIWGVATAKQLLNLFAQQGYSARHVVITGGEPCLYDLRPLTELFENEGYGCQIETSGTHTILCSDKTWVTVSPKVKMRGGYKVLPEAMKRADEIKHPVGRARDIEALDELLTMLDGNPTPIVALQPISQKEEATRLCIETCIARNWRFSMQTHKYLNIA

SEQ ID NO: 35311 - protein, 223 aa, Xenorhabdus miraniensis
  REGION 1..223: note = tr|A0A2D0JTA0|A0A2D0JTA0_9GAMM 7-carboxy-7-deazaguanine synthase OS=Xenorhabdus miraniensis OX=351674 GN=queE PE=3 SV=1
MIYPINEIFQTLQGEGVFTGVPSVFIRLQGCPVGCSWCDTKHTWEKEADKQQPMENILLKSQDSDTWGMATAKQLLGIFTRQGYSARHIVITGGEPCLYDLRPLTETLENEGYQCQIETSGTHEIQCSEKTWVTVSPKVKMRGGYRVLPEAMKRANEIKHPVGRERDIEALDELLTMLDGSSAPIIALQPISQKEEATRLCIETCIARNWRFSMQTHKYLNIA

SEQ ID NO: 35312 - protein, 223 aa, Xenorhabdus nematophila
  REGION 1..223: note = tr|D3VBQ4|D3VBQ4_XENNA 7-carboxy-7-deazaguanine synthase OS=Xenorhabdus nematophila (strain ATCC 19061 / DSM 3370 / LMG 1036 / NCIB 9965 / AN6) OX=406817 GN=ygcF; PE = 3 SV=1
MIYPINEIFQTLQGEGVFTGVPSVFVRLQGCPVGCSWCDTKHTWEKDADKQQVMENILLKTRDSDLWGVATAKQLINIFTRQGYSARHIVITGGEPCLYDLRPLTETLEREGYQCQIETSGTHSIQCSDKTWVTVSPKVKMRGGYKVLPEAMKRADEIKHPVGRERDIEALDELLVMLDGKSSPVIALQPISQKEEATRLCIETCIARNWRFSMQTHKYLHIA

SEQ ID NO: 35313 - protein, 223 aa, Xenorhabdus nematophila; identical to SEQ ID NO: 35312
  REGION 1..223: note = tr|A0A0A8NWY8|A0A0A8NWY8_XENNE 7-carboxy-7-deazaguanine synthase OS=Xenorhabdus nematophila str. Websteri OX=1437826 GN=ygcF PE=3 SV=1

SEQ ID NO: 35314 - protein, 223 aa, Xenorhabdus poinarii
  REGION 1..223: note = tr|A0A068R582|A0A068R582_9GAMM 7-carboxy-7-deazaguanine synthase OS=Xenorhabdus poinarii G6 OX=1354304 GN=ygcF PE=3 SV=1
MIYPINEIFQTLQGEGVFTGVPSVFIRLQGCPVGCSWCDTKHTWEKEADKQQPIENILLKSQESDLWGVATAKQLLNIFIHQGYSAKHIVITGGEPCLYDLRPLTATLESEGYQCQIETSGTHVIQCTDKTWVTVSPKVKMRGGYQVLPEALKRADEIKHPVGRQRDIEALDELLTMLDGNPIPVIALQPISQKEDATRLCIETCIARNWRFSMQTHKYLNIA

SEQ ID NO: 35315 - protein, 223 aa, Xenorhabdus sp.
  REGION 1..223: note = tr|A0A2D0KYK7|A0A2D0KYK7_9GAMM 7-carboxy-7-deazaguanine synthase OS=Xenorhabdus sp. KJ12.1 OX=1851571 GN=queE PE=3 SV=1
MIYPINEMFQTLQGEGVFTGVPAVFIRLQGCPVGCSWCDTKHTWEKEADKQQSMENILVKSQDSDTWGAATPEQIINLFTRQGYTARHIVITGGEPCLYDLRPLTESLENAGYQCQIETSGTHAIHCTDKTWVTVSPKVKMRGGYKVLPEAMNRANEIKHPVGRERDIESLDDLLTMLDENNRPVIALQPISQKEEATRLCIETCIARNWRFSMQTHKYLNIA

SEQ ID NO: 35316 - protein, 223 aa, Xenorhabdus sp.
  REGION 1..223: note = tr|A0A0M0T679|A0A0M0T679_9GAMM 7-carboxy-7-deazaguanine synthase OS=Xenorhabdus sp. GDc328 OX=742178 GN=queE PE=3 SV=1
MIYPINEIFQTLQGEGVFTGVPSVFIRLQGCPIGCSWCDTKHTWEKEADKQQPMENILLKSQDSDLWGVATARQLLNIFTRQGYSAKHIVITGGEPCLYDLRPLTETLETEGYQCQLETSGTHAIQCSDKTWVTVSPKVKMRGGYQVLPEAMKRANEIKHPVGRQRDIEALDELLTMLDGNPTPVIALQPISQKEDATRLCIETCIARNWRFSMQTHKYLNIA

SEQ ID NO: 35317 - protein, 223 aa, Xenorhabdus stockiae; identical to SEQ ID NO: 35315
  REGION 1..223: note = tr|A0A2D0KVX2|A0A2D0KVX2_9GAMM 7-carboxy-7-deazaguanine synthase OS=Xenorhabdus stockiae; OX = 351614 GN=queE PE=3 SV=1

SEQ ID NO: 35318 - protein, 223 aa, Xenorhabdus szentirmaii
  REGION 1..223: note = tr|W1IX10|W1IX10_9GAMM 7-carboxy-7-deazaguanine synthase OS=Xenorhabdus szentirmaii DSM 16338 OX=1427518; GN = ygcF PE=3 SV=1
MIYPINEIFQTLQGEGVFTGVPSIFIRLQGCPVGCSWCDTKHTWEKESDKQRPMESILLKSEESDLWGVATVTQLLNIFTRQGYSARHIVITGGEPCLYDLRPLTETLENNGYQCQIETSGTHSILCSEKTWVTLSPKVKMRGGYRVLPESMKRADEIKHPVGRERDIEALDELLMMLNDDHKPVIALQPISQKEDATRLCIETCIARNWRFSMQTHKYLNIA

SEQ ID NO: 35319 - protein, 223 aa, unidentified
  source 1..223: note = Xenorhabdus thuongxuanensis
  REGION 1..223: note = tr|A0A1Q5U5Z3|A0A1Q5U5Z3_9GAMM 7-carboxy-7-deazaguanine synthase OS=Xenorhabdus thuongxuanensis OX=1873484 GN=queE PE=3 SV=1
MIYPINEIFQTLQGEGVFTGVPSVFIRLQGCPVGCSWCDTKHTWEKEADKQQPMENILLKSQDSDLWGVANAKQLLSIFTRQGYSAKHIVITGGEPCLYDLRPLTETLESEGYQCQIETSGTHVIQCSDRTWVTVSPKVKMRGGYQVLPEAIKRADEIKHPVGRQRDIEALDELLTMLDGNPTPVIALQPISQKEDATRLCIETCIARNWRFSMQTHKYLNIA

SEQ ID NO: 35320 - protein, 223 aa, Xenorhabdus vietnamensis
  REGION 1..223: note = tr|A0A1Y2SG72|A0A1Y2SG72_9GAMM 7-carboxy-7-deazaguanine synthase OS=Xenorhabdus vietnamensis OX=351656 GN=queE PE=3 SV=1
MIYPINEIFQTLQGEGVFTGVPSVFIRLQGCPVGCSWCDTKYTWEKVADKQQPIENILLKSQDSDLWGVATARQLLSIFTRQGYSAKHIVITGGEPCLYDLRPLTETLESEGYQCQIETSGTHVIQCTDKTWVTVSPKVKMRGGYKVLPEAMKRADEIKHPVGRQRDIEALDELLTMLDGNPIPVIALQPISQKEDATRLCIETCISRNWRFSMQTHKYLNIA

SEQ ID NO: 35321 - protein, 217 aa, Xylella fastidiosa
  REGION 1..217: note = tr|B2I4T9|B2I4T9_XYLF2 7-carboxy-7-deazaguanine synthase OS=Xylella fastidiosa (strain M23) OX=405441; GN = queE PE=3 SV=1
MNATRSQLKISEIFLSLQGEANSVGWPTVFVRLTGCPLRCQYCDTSYAFHGGEWRSIDTIVNEVRSYGVRHVCVTGGEPLAQKRCLLLLEKLCDAGFEVSLETSGALDIAAVDSRVSRVVDIKTPGSGEAHRNHWPNLTLLTPNDQIKFVLCSRVDYEWARTCVAEHELERRCMVWFSPSKQDIAPTLLADWIISDRLGVRFQLQLHKLLWNDEPGR

SEQ ID NO: 35322 - protein, 217 aa, Xylella fastidiosa; identical to SEQ ID NO: 35321
  REGION 1..217: note = tr|A0A060HHH4|A0A060HHH4_XYLFS 7-carboxy-7-deazaguanine synthase OS=Xylella fastidiosa MUL0034 OX=1401256 GN=queE PE=3 SV=1

SEQ ID NO: 35323 - protein, 226 aa, unidentified
  source 1..226: note = Xylella taiwanensis
  REGION 1..226: note = tr|Z9JGG0|Z9JGG0_9GAMM 7-carboxy-7-deazaguanine synthase OS=Xylella taiwanensis OX=1444770 GN=queE PE=3; SV = 1
MKSTRSGEIADCALPQLKISEIFLSLQGEANSVGWPTVFVRMTGCPLRCQYCDTAYAFHGGEWRSIDDIVTEVRGYCVRHVCVTGGEPLAQKRCLLLLEKLCDANFEVSLETSGALDIAAVDSRVSRVVDIKTPGSGEVHRNYWPNLTLLTPHDQVKFVLCNRADYEWARACVAKHDLERRCMVWFSPSKQDLAPTVLADWIISDRLGVRFQLQLHKLLWNDEPGR

SEQ ID NO: 35324 - protein, 212 aa, Xylophilus ampelinus
  REGION 1..212: note = tr|A0A318SFD2|A0A318SFD2_9BURK 7-carboxy-7-deazaguanine synthase OS=Xylophilus ampelinus; OX = 54067 GN=queE PE=3 SV=1
MSYAVKEIFYTLQGEGGQAGTPAVFCRFAGCNLWSGREQDRDTAVCRFCDTDFVGTDGTLGGKFATPEALAAQIAALWPAHDRGHRLVVLTGGEPLLQIDAALVDALHAQDFRIAVESNGTLAAPEGIDWLCISPKAGAPWVQTRGQELKLVWPQPGFDLEVLESRTDFRHRFLQPMDGPDQAANIERCIATCLARPAWRLSLQTHKLTGIR

SEQ ID NO: 35325 - protein, 212 aa, Xylophilus sp.
  REGION 1..212: note = tr|A0A0Q4H1Z4|A0A0Q4H1Z4_9BURK 7-carboxy-7-deazaguanine synthase OS=Xylophilus sp. Leaf220 OX=1735686 GN=queE PE=3 SV=1
MSYAVKEIFYTLQGEGGQAGTPAVFCRFAGCNLWSGREQDRDTAVCRFCDTDFVGTDGTLGGRFATAEALAAQIAALWPAHDRGHRLVVLTGGEPLLQVDAALVDALHAQDFRIAVESNGTLAAPEGIDWLCISPKAGAPWVQRSGQELKLVWPQPGFDLAMLESQTDFRHRFLQPMDGPDQAANIERCIATCLARPAWRLSLQTHKLTGIR

SEQ ID NO: 35326 - protein, 235 aa, Yangia pacifica
  REGION 1..235: note = tr|A0A2U8HEL1|A0A2U8HEL1_9RHOB 7-carboxy-7-deazaguanine synthase OS=Yangia pacifica; OX = 311180 GN=queE PE=3 SV=1
MVLRIAEIFGPTIQGEGALIGEPTVFVRAGGCDYRCSWCDSLHAVDSAWRHTWTPMSDDEVWAEVTRLSGGRPITVSLSGGNPAIQDFGPVIEMGRAEGYRFACETQGSVARPWFARLDTLVLSPKPPSSGETVDWDIFAACVAAGQGARQVVMKIVIFDAADYVWAKDAHARHPELPLYLQPGNPEVDPQVPVDPQGLAERLLWLTETATADGWFAARILPQLHVLLWGNKRGV

SEQ ID NO: 35327 - protein, 235 aa, Yangia pacifica
  REGION 1..235: note = tr|A0A1I6TQJ6|A0A1I6TQJ6_9RHOB 7-carboxy-7-deazaguanine synthase OS=Yangia pacifica; OX = 311180 GN=queE PE=3 SV=1
MGLRIAEIFGPTIQGEGVLIGEPTVFVRAGGCDYRCSWCDSLHAVDSAYRHSWIPMSDEEVWGEVTRLSGGRPITVSLSGGNPAIQDFGPMIEMGRAEGYRFACETQGSVARPWFGRLDTLVLSPKPPSSGETVDWDAFAACVAAGRGARQVVMKIVIFDQRDYDWAKDAHARHPELPLYLQPGNPEVDPDVPVDPQSLADRLLWLTETATADHWFAPRILPQLHVLLWGNKRGV

SEQ ID NO: 35328 - protein, 235 aa, Yangia sp.
  REGION 1..235: note = tr|A0A2A3JVD9|A0A2A3JVD9_9RHOB 7-carboxy-7-deazaguanine synthase OS=Yangia sp. SAOS 153D; OX = 1779329 GN=queE PE=3 SV=1
MVLRIAEIFGPTIQGEGALIGEPTVFVRAGGCDYRCSWCDSLHAVDSAFRHSWTPMSDAEVWAEVTRLSGGRPITVSLSGGNPAIQDFGPVVEMGRAEGYRFACETQGSVARPWFGRLDTLVLSPKPPSSGETVDWDSFADCVAAGQAARQVVMKIVIFDAADYAWAKDAHARHPELPLYLQPGNPEVDPEVPVDPQSLADRLLWLTETATADGWFTPRILPQLHVLLWGNKRGV

SEQ ID NO: 35329 - protein, 235 aa, Yangia sp.
  REGION 1..235: note = tr|A0A1B1PMI4|A0A1B1PMI4_9RHOB 7-carboxy-7-deazaguanine synthase OS=Yangia sp. CCB-MM3; OX = 1792508 GN=queE PE=3 SV=1
MGLRIAEIFGPTIQGEGALIGEPTVFVRAGGCDYRCSWCDSLHAVDSAFRHTWTPMSDAEVWAEVTRLSGGRPITVSLSGGNPAIQDFGPVIEMGRAEGYRFACETQGSVARGWFGRLDTLVLSPKPPSSGETVDWSAFADCVQAGQGARQTVMKIVIFDEADYAWAKDAHARHPDLPLYLQPGNPEVDPDVPVDPQSLADRLLWLTECATADGWFTPRILPQLHVLLWGNKRGV

SEQ ID NO: 35330 - protein, 225 aa, Yersinia aldovae
  REGION 1..225: note = tr|A0A0T9TZD0|A0A0T9TZD0_YERAL 7-carboxy-7-deazaguanine synthase OS=Yersinia aldovae; OX = 29483 GN=queE PE=3 SV=1
MQMQYPINEMFQTLQGEGYFTGVPAIFVRLQGCPVGCSWCDTKHTWEKEADREVDMQRIMVKTAESDAWGSASEQQLLDLFIQQGYTARHVVITGGEPAIYDLFPLTSQLEQAGYRCQIETSGTHEVRCSATTWVTVSPKVNMRGGLKVLPQALERADEIKHPVGRLRDIEALEALLETLTDDKKRIIALQPISQKDEATKLCIETCIARNWRLSMQTHKYLNIA

SEQ ID NO: 35331 - protein, 223 aa, Yersinia bercovieri
  REGION 1..223: note = tr|A0A2G4U799|A0A2G4U799_YERBE 7-carboxy-7-deazaguanine synthase OS=Yersinia bercovieri; OX = 634 GN=queE PE=3 SV=1
MLYPINEMFQTLQGEGYFTGVPAIFVRLQGCPVGCSWCDTKHTWEKEADREVDMQRIMVKTAESDAWGSASEQQLLAIFSQQGYTARHVVITGGEPAIYDLLPLTSVLEQAGYSCQIETSGTHEVQCSAATWVTVSPKVKMRGGLKILPQALQRADEIKHPVGRLRDIEALEVLLATLHDDKKRIIALQPISQKDDATKLCIETCIARNWRLSMQTHKYLNIA

SEQ ID NO: 35332 - protein, 223 aa, Yersinia enterocolitica
  REGION 1..223: note = tr|A1JJS0|A1JJS0_YERE8 7-carboxy-7-deazaguanine synthase OS=Yersinia enterocolitica serotype O:8 / biotype 1B (strain NCTC 13174 / 8081) OX=393305 GN=queE PE=3 SV=1
MQYPINEMFQTLQGEGYFTGVPAIFVRLQGCPVGCSWCDTKHTWEKEADREVDMQRIMVKTVESDAWATASEQQLLNIFSQQGYTARHVVITGGEPAIYDLFPLTTQLEQAGYSCQIETSGTHEVQCSAATWVTVSPKVNMRGGLKVLPQALQRADEIKHPVGRLRDIEALEQLLETLTDDKKRIIALQPISQKDEATKLCIETCIAKNWRLSMQTHKYLNIA

SEQ ID NO: 35333 - protein, 223 aa, Yersinia enterocolitica
  REGION 1..223: note = tr|A0A3S4IYA5|A0A3S4IYA5_YEREN 7-carboxy-7-deazaguanine synthase OS=Yersinia enterocolitica subsp. enterocolitica OX=150052 GN=queE; PE = 3 SV=1
MQYPINEMFQTLQGEGYFTGVPAIFVRLQGCPVGCSWCDTKHTWEKAADREVDMQRIMVKTVENDAWGTASEQQLLDIFLQQGYTARHVVITGGEPAIYDLLPLTSQLEQAGYSCQIETSGTHEVQCSAATWVTVSPKVNMRGGLKILPQALQRADEIKHPVGRLRDIEALEALLATLADDKKRIIALQPISQKEEATKLCIETCIAKNWRLSMQTHKYLNIA

SEQ ID NO: 35334 - protein, 223 aa, Yersinia entomophaga
  REGION 1..223: note = tr|A0A3S6F2T7|A0A3S6F2T7_YERET 7-carboxy-7-deazaguanine synthase OS=Yersinia entomophaga; OX = 935293 GN=queE PE=3 SV=1
MLYPINEMFQTLQGEGFFTGVPAIFVRLQGCPVGCSWCDTKHTWEKNVDREVDVQRILVKTEESDAWGNASEQQLLTLLRQQGYTARHVVITGGEPCIYDLLPLTTLLEQEGFSCQIETSGTYEVQCSEKTWVTVSPKVNMRGGLKVLEQALTRADEVKHPVGRMRDIEALEALLATLHDNKQRIIALQPISQKEEATRLCIETCIARNWRLSMQTHKYLNIA

SEQ ID NO: 35335 - protein, 223 aa, Yersinia frederiksenii
  REGION 1..223: note = tr|A0A0T9TVW5|A0A0T9TVW5_YERFR 7-carboxy-7-deazaguanine synthase OS=Yersinia frederiksenii OX=29484 GN=queE PE=3 SV=1
MQYPINEMFQTLQGEGYFTGVPAIFVRLQGCPVGCSWCDTKHTWEKDADREVDMQRIMVKTAESDAWGTATEQQLLDIFIQQGYTARHVVITGGEPAIYDLFPLTSHLEQAGYSCQIETSGTHEVQCSATTWVTVSPKVNMRGGLKVLPQALQRADEIKHPVGRLRDIEALEALLATLEDDKKRIIALQPISQKEDATKLCIETCIAKNWRLSMQTHKYLNIA

SEQ ID NO: 35336 - protein, 223 aa, Yersinia frederiksenii
  REGION 1..223: note = tr|A0A380PY45|A0A380PY45_YERFR 7-carboxy-7-deazaguanine synthase OS=Yersinia frederiksenii OX=29484 GN=queE PE=3 SV=1
MQYPINEMFQTLQGEGYFTGVPAIFVRLQGCPVGCSWCDTKHTWEKDANREVDMQRIMVKTAESDAWGTATEQQLLDIFIQQGYTARHVVITGGEPAIYDLFPLTSHLEQAGYSCQIETSGTHEVQCSATTWVTVSPKVNMRGGLKVLPQALQRADEIKHPVGRLRDIEALEALLATLDDDKKRIIALQPISQKEDATKLCIETCIVKNWRLSMQTHKYLNIA

SEQ ID NO: 35337 - protein, 223 aa, unidentified
  source 1..223: note = Yersinia hibernica
  REGION 1..223: note = tr|A0A481QJI9|A0A481QJI9_9GAMM 7-carboxy-7-deazaguanine synthase OS=Yersinia hibernica; OX = 2339259 GN=queE PE=3 SV=1
MLYPINEMFQTLQGEGYFTGVPAIFVRLQGCPVGCSWCDTKHTWEKAADREVDMQRIMVKTAESDAWGAASEQQLLDIFHQQGYTARHVVITGGEPAIYDLFPLTSLLEHAGYSCQIETSGTHQVQCSAATWVTVSPKVNMRGGLKILPQALQRADEIKHPVGRLRDIEALEALLVTLTDNKKRIIALQPISQKEEATKLCIETCIAKNWRLSMQTHKYLNIA

SEQ ID NO: 35338 - protein, 223 aa, Yersinia intermedia
  REGION 1..223: note = tr|A0A0T9TNP1|A0A0T9TNP1_YERIN 7-carboxy-7-deazaguanine synthase OS=Yersinia intermedia; OX = 631 GN=queE PE=3 SV=1
MQYPINEMFQTLQGEGYFTGVPAIFVRLQGCPVGCSWCDTKHTWEKEADREVDMQRIMVKTAESDAGETASEQQLLDIFSQQGYTARHVVITGGEPAIYDLFPLTSQLEQAGYSCQIETSGTHEVQCSAATWVTVSPKVNMRGGLKVLPQALQRADEIKHPVGRLRDIEALEQLLETLTDDKKRIIALQPISQKDEATRLCIETCIARNWRLSMQTHKYLNIA

SEQ ID NO: 35339 - protein, 223 aa, Yersinia intermedia
  REGION 1..223: note = tr|A0A0U1ERS5|A0A0U1ERS5_YERIN 7-carboxy-7-deazaguanine synthase OS=Yersinia intermedia; OX = 631 GN=queE PE=3 SV=1
MLYPINEMFQTLQGEGYFTGVPAIFVRLQGCPVGCSWCDTKHTWEKEADREVDMQRIMVKTAESDAWGSASEQQLLDLFAQQGYTARHVVITGGEPSIYDLQPLTSLLEQAGFSCQIETSGTHEVRCSAQTWVTVSPKVNMRGGLKILSQALQRADEIKHPVGRLRDIEALEALLATLDDDKKRIIALQPISQKEDATKLCIETCIAKNWRLSMQTHKYLNIA

SEQ ID NO: 35340 - protein, 223 aa, Yersinia kristensenii
  REGION 1..223: note = tr|A0A0T9PJ52|A0A0T9PJ52_YERKR 7-carboxy-7-deazaguanine synthase OS=Yersinia kristensenii; OX = 28152 GN=queE PE=3 SV=1
MQYPINEMFQTLQGEGYFTGVPAIFVRLQGCPVGCSWCDTKHTWEKEADREVDMQRIMVKTAESDLWGTASEQQLLDIFRQQGYTARHVVITGGEPAIYDLLPLTSQLEQAGYSCQIETSGTHEVQCSATTWVTVSPKVNMRGGLKVLPQALQRADEIKHPVGRLRDIEALEALLVTLTDDKKRIIALQPISQKEEATKLCIETCIAKNWRLSMQTHKYLNIA

SEQ ID NO: 35341 - protein, 223 aa, Yersinia kristensenii
  REGION 1..223: note = tr|A0A0T9LIM7|A0A0T9LIM7_YERKR 7-carboxy-7-deazaguanine synthase OS=Yersinia kristensenii; OX = 28152 GN=queE PE=3 SV=1
MQYPINEMFQTLQGEGYFTGVPAIFVRLQGCPVGCSWCDTKHTWEKEADREVDMQRIMVKTAESDLWGTASEQQLLDIFRQQGYTARHVVITGGEPAIYDLLPLTSQLEQAGYSCQIETSGTHEVQCSATTWVTVSPKVNMRGGLKVLPQALQRADEIKHPVGRLRDIEALEVLLVTLTDDKKRIIALQPISQKEDATKLCIETCIAKNWRLSMQTHKYLNIA

SEQ ID NO: 35342 - protein, 223 aa, Yersinia massiliensis
  REGION 1..223: note = tr|A0A2R4NTH9|A0A2R4NTH9_9GAMM 7-carboxy-7-deazaguanine synthase OS=Yersinia massiliensis; OX = 419257 GN=queE PE=3 SV=1
MLYPINEMFQTLQGEGYFTGVPAIFVRLQGCPVGCSWCDTKHTWEKEADREVDMQRIMVKTAESDAWGSATEQQLLDIFAQQGYTARHVVITGGEPSIYDLLPLTFALEQAGYSCQIETSGTHEVRCSAETWVTVSPKVNMRGGLKILPQALQRADEIKHPVARLRDIEALEVLLATLHDDKKRVVALQPISQKDEATKLCIETCIAKNWRLSMQTHKYLNIA

SEQ ID NO: 35343 - protein, 223 aa, Yersinia massiliensis
  REGION 1..223: note = tr|A0A0T9NPI1|A0A0T9NPI1_9GAMM 7-carboxy-7-deazaguanine synthase OS=Yersinia massiliensis; OX = 419257 GN=queE PE=3 SV=1
MLYPINEMFQTLQGEGYFTGVPAIFVRLQGCPVGCSWCDTKHTWEKEADREVDMQRIMVKTAESDAWGSATEQQLLDIFAQQGYTARHVVITGGEPSIYDLLPLTSALEQAGYSCQIETSGTHEVRCSAETWVTVSPKVNMRGGLKILPQALQRADEIKHPVARLRDIEALEVLLATLHDDKKRVVALQPISQKDEATKLCIETCIAKNWRLSMQTHKYLNIA

SEQ ID NO: 35344 - protein, 229 aa, Yersinia mollaretii
  REGION 1..229: note = tr|C4SCB4|C4SCB4_YERMW 7-carboxy-7-deazaguanine synthase OS=Yersinia mollaretii (strain ATCC 43969 / DSM 18520 / CIP 103324 / CNY 7263 / WAIP 204) OX=349967; GN = queEPE=3 SV=1
MTIEILMLYPINEMFQTLQGEGYFTGVPAIFVRLQGCPVGCSWCDTKHTWEKEADREVDMQRIMVKTAESDAWGSATEQQLLDIFSQQGYTARHVVITGGEPSIYDLRPLTSLLEQGGYSCQIETSGTHEVQCSATTWVTVSPKVNMRGGLKVLPQALQRADEIKHPVGRLRDIEALEALLATLHDDKKRIIALQPISQKEDATKLCIETCIAKNWRLSMQTHKYLNIA

SEQ ID NO: 35345 - protein, 223 aa, Yersinia mollaretii
  REGION 1..223: note = tr|A0A0U1I5A4|A0A0U1I5A4_YERMO 7-carboxy-7-deazaguanine synthase OS=Yersinia mollaretii; OX = 33060 GN=queE PE=3 SV=1
MLYPINEMFQTLQGEGYFTGVPAIFVRLQGCPVGCSWCDTKHTWEKEADREVDMQRIMVKTTESDAWGSATEQQLLDIFSQQGYTARHVVITGGEPSIYDLRPLTSLLEQAGYSCQIETSGTHEVQCSAATWVTVSPKVNMRGGLKVLPQALQRADEIKHPVGRLRDIEALEALLATLHDDKKRIIALQPISQKEDATKLCIETCIAKNWRLSMQTHKYLNIA

SEQ ID NO: 35346 - protein, 223 aa, Yersinia nurmii
  REGION 1..223: note = tr|A0A0T9LMZ5|A0A0T9LMZ5_9GAMM 7-carboxy-7-deazaguanine synthase OS=Yersinia nurmii; OX = 685706 GN=queE PE=3 SV=1
MLYPINEMFQTLQGEGFFTGVPAIFVRLQGCPVGCSWCDTKHTWEKNVDREVDVQRILVKTEESDAWGNASEQQLLTILRQQGYTARHVVITGGEPCIYDLLPLTTLLEQEGFSCQIETSGTYEVQCSEKTWVTVSPKVNMRGGLKVLEQALTRADEVKHPVGRMRDIEALDALLATLHDDKQRIIALQPISQKEEATRLCIETCIARNWRLSMQTHKYLNIA

SEQ ID NO: 35347 - protein, 223 aa, Yersinia pekkanenii
  REGION 1..223: note = tr|A0A0T9PY24|A0A0T9PY24_9GAMM 7-carboxy-7-deazaguanine synthase OS=Yersinia pekkanenii; OX = 1288385 GN=queE PE=3 SV=1
MRYPINEMFQTLQGEGYFTGVPAIFVRLQGCPVGCSWCDTKHTWEKDADREVDMQRIMVKTAESDVWGEASAQQLLDIFSQQGYTARHVVITGGEPAIYDLFPLTSLLEQAGYSCQIETSGTHDVRCSATTWVTVSPKVNMRGGLKVLSQALQRADEIKHPVGRMRDIEALEVLLATLDDDKKRIIALQPISQKDDATKLCIETCIAKNWRLSMQTHKYLNIA

SEQ ID NO: 35348 - protein, 223 aa, Yersinia pestis; identical to SEQ ID NO: 35339
  REGION 1..223: note = tr|Q0WBS2|Q0WBS2_YERPE 7-carboxy-7-deazaguanine synthase OS=Yersinia pestis OX=632 GN=queE PE=3 SV=1

SEQ ID NO: 35349 - protein, 223 aa, Yersinia pestis; identical to SEQ ID NO: 35339
  REGION 1..223: note = tr|A0A380PGS3|A0A380PGS3_YERPE 7-carboxy-7-deazaguanine synthase OS=Yersinia pestis; OX = 632 GN=queE PE=3 SV=1

SEQ ID NO: 35350 - protein, 223 aa, Yersinia pseudotuberculosis; identical to SEQ ID NO: 35339
  REGION 1..223: note = tr|Q66ED6|Q66ED6_YERPS 7-carboxy-7-deazaguanine synthase OS=Yersinia pseudotuberculosis serotype I (strain IP32953) OX=273123 GN=ygcF PE=3 SV=1

SEQ ID NO: 35351 - protein, 223 aa, Yersinia pseudotuberculosis; identical to SEQ ID NO: 35339
  REGION 1..223: note = tr|A0A0H3B6V4|A0A0H3B6V4_YERPY 7-carboxy-7-deazaguanine synthase OS=Yersinia pseudotuberculosis serotype O:3 (strain YPIII) OX=502800; GN = queE PE=3 SV=1

SEQ ID NO: 35352 - protein, 223 aa, Yersinia rohdei
  REGION 1..223: note = tr|A0A0U1HTS6|A0A0U1HTS6_YERRO 7-carboxy-7-deazaguanine synthase OS=Yersinia rohdei; OX = 29485 GN=queE PE=3 SV=1
MQYPINEMFQTLQGEGYFTGVPAIFVRLQGCPVGCSWCDTKHTWEKAANREVDLQRILVKTAESDAWGNASEQQVLDIFIQQGYTARHVVITGGEPAIYDLRPLTSHLEQAGYSCQIETSGTHAVQCSPTTWVTVSPKVNMRGGMKVLPQALQRADEIKHPVGRLRDIEALELLLQTLDDDKKRIIALQPISQKEDATKLCIETCIAKNWRLSMQTHKYLNIA

SEQ ID NO: 35353 - protein, 223 aa, Yersinia ruckeri
  REGION 1..223: note = tr|A0A380QND1|A0A380QND1_YERRU 7-carboxy-7-deazaguanine synthase OS=Yersinia ruckeri; OX = 29486 GN=queE PE=3 SV=1
MLYPINEMFQTLQGEGFFTGVPAIFVRLQGCPVGCSWCDTKHTWEKNVDREVDVQRILVKTEESDAWGNASEQQLLAIFRQQGYTARHVVITGGEPCIYDLSPLTTLLEQEGFSCQIETSGTHEVHCSATTWVTVSPKVNMRGGLTVLDQALIRADEIKHPVGRIRDIEALDILLERLHDDKARIIALQPISQKEEATRLCIETCIARNWRLSMQTHKYLNIA

SEQ ID NO: 35354 - protein, 170 aa, Yersinia ruckeri
  REGION 1..170: note = tr|A0A0A8VAA1|A0A0A8VAA1_YERRU Queuosine Biosynthesis QueE Radical SAM OS=Yersinia ruckeri OX=29486; GN = CSF007_3555 PE=4 SV=1
MQRILVKTEESDAWGNASEQQLLAIFRQQGYTARHVVITGGEPCIYDLSPLTTLLEQEGFSCQIETSGTHEVHCSATTWVTVSPKVNMRGGLTVLDQALIRADEIKHPVGRIRDIEALDILLERLHDDKARIIALQPISQKEEATRLCIETCIARNWRLSMQTHKYLNIA

SEQ ID NO: 35355 - protein, 223 aa, Yersinia similis
  REGION 1..223: note = tr|A0A0T9NSU9|A0A0T9NSU9_9GAMM 7-carboxy-7-deazaguanine synthase OS=Yersinia similis; OX = 367190 GN=queE PE=3 SV=1
MLYPINEMFQTLQGEGYFTGVPAIFVRLQGCPVGCSWCDTKHTWEKEADREVDMQRIMVKTAESDAWGSASEQQLLDLFAQQGYTARHVVITGGEPSIYDLLPLTSLLEQAGFSCQIETSGTHEVRCSAQTWVTVSPKVNMRGGLKILPQALQRADEIKHPVGRLRDIEALEALLATLDDDKKRIIALQPISQKEDATKLCIETCIAKNWRLSMQTHKYLNIA

SEQ ID NO: 35356 - protein, 223 aa, unidentified
  source 1..223: note = Yersinia wautersii
  REGION 1..223: note = tr|A0A0E8XEP9|A0A0E8XEP9_9GAMM 7-carboxy-7-deazaguanine synthase OS=Yersinia wautersii; OX = 1341643 GN=queE PE=3 SV=1
MLYPINEMFQTLQGEGYFTGVPAIFVRLQGCPVGCSWCDTKHTWEKEADREVDMQRIMVKTAESDAWGSASEQQLLDLFAQQGYTARHVVITGGEPSIYDLLPLTSLLEQAGFSCQIETSGTHEVRCSAHTWVTVSPKVNMRGGLKILPQALQRADEIKHPVGRLRDIEALEALLATLDDDKKRIIALQPISQKEDATKLCIETCIAKNWRLSMQTHKYLNIA

SEQ ID NO: 35357 - protein, 223 aa, unidentified
  source 1..223: note = Yersiniaceae bacterium
  REGION 1..223: note = tr|A0A2N5EKA9|A0A2N5EKA9_9GAMM 7-carboxy-7-deazaguanine synthase OS=Yersiniaceae bacterium 2016Iso3 OX=2060066 GN=queE PE=3 SV=1
MQYPINEMFQTLQGEGYFTGVPAIFVRLQGCPVGCSWCDTKHTWDKLADREVALDEILVKTTETDAWGAASTEDLLAVIERNGYTARHIVITGGEPCIHDLGPLTLLMEKSGFTCQIETSGTHEVRCSPNTWVTVSPKVNMRGGMEVLDQALKRADEIKHPVARERDIEALDALLAKLHDDKYRVVALQPISQKEDATRLCIETCIARNWRLSMQTHKYLNIA

SEQ ID NO: 35358 - protein, 223 aa, unidentified
  source 1..223: note = Yersiniaceae bacterium
  REGION 1..223: note = tr|A0A2N5E9J3|A0A2N5E9J3_9GAMM 7-carboxy-7-deazaguanine synthase OS=Yersiniaceae bacterium 2016Iso4 OX=2060068 GN=queE PE=3 SV=1
MQYPINEMFQTLQGEGYFTGVPAIFIRLQGCPVGCSWCDTKHTWDKLADREVALDEILVKTTETDAWGAATTEDLLAVIERNGYTARHIVITGGEPCIHDLGPLTLLLEKSGFTCQIETSGTHDVRCSPNTWVTVSPKVNMRGGMEVLDQALKRADEIKHPVARERDIEALDALLARLHDDKYRVVALQPISQKEDATRLCIETCIARNWRLSMQTHKYLNIA

SEQ ID NO: 35359 - protein, 223 aa, Yokenella regensburgei
  REGION 1..223: note = tr|A0A2X2QC34|A0A2X2QC34_9ENTR 7-carboxy-7-deazaguanine synthase OS=Yokenella regensburgei OX=158877 GN=queE PE=3 SV=1
MQYPINEMFQTLQGEGYFTGVPAIFIRLQGCPVGCAWCDTKHTWDKLSDREVSLFSILAKTKESDKWGAGSADDLLAIIGRQGWTARHVVITGGEPCIHDLTPLTTLLEQNGYSCQIETSGTHEVRCSPETWVTVSPKVNMRGGYDVLEQALLRADEIKHPVGRVRDIEALDELLATLRDDKARIIALQPISQKEDATRLCIETCIARNWRLSMQTHKYLNIA

SEQ ID NO: 35360 - protein, 225 aa, Yokenella regensburgei
  REGION 1..225: note = tr|G9Z3N2|G9Z3N2_9ENTR 7-carboxy-7-deazaguanine synthase OS=Yokenella regensburgei ATCC 43003 OX=1002368; GN = queE PE=3 SV=1
MTMQYPINEMFQTLQGEGYFTGVPAIFIRLQGCPVGCAWCDTKHTWDKLSDREVSLFSILAKTKESDKWGAGSADDLLAIIGRQGWTARHVVITGGEPCIHDLTPLTTLLEQNGYSCQIETSGTHEVRCSPETWVTVSPKVNMRGGYDVLEQALLRADEIKHPVGRVRDIEALDELLATLRDDKARIIALQPISQKEDATRLCIETCIARNWRLSMQTHKYLNIA

SEQ ID NO: 35361 - protein, 235 aa, unidentified
  source 1..235: note = Yoonia maritima
  REGION 1..235: note = tr|A0A2T0VT72|A0A2T0VT72_9RHOB 7-carboxy-7-deazaguanine synthase OS=Yoonia maritima; OX = 1435347 GN=queE PE=3 SV=1
MTLRIAEIFGPTIQGEGALIGEPTVFIRAGGCDYRCVWCDSMHAVDSANRHDWHVMEPVEVWKEVAQLSGGRPLTVSISGGNPAIQDFGPVIALGKADGYKFACETQGSIAKPWFGDLDTLVLSPKPPSSEETVDWAAFDKCLSAAEGGPEIVMKIVIFDDEDYAWAKAASEKYPYLPLYLQPGNSEVDPNEPVDLTATIDRLHWLIEKVTADRWFTPRVLPQLHVLVWGNKRGV

SEQ ID NO: 35362 - protein, 236 aa, unidentified
  source 1..236: note = Yoonia sediminilitoris
  REGION 1..236: note = tr|A0A2T6KC29|A0A2T6KC29_9RHOB 7-carboxy-7-deazaguanine synthase OS=Yoonia sediminilitoris OX=1286148 GN=queE PE=3 SV=1
MSQLRIAEIFGPTIQGEGALIGEPTVFVRTGGCDYRCTWCDSLHAVDTAYRQTWAVMPTDAVWQEVQRLSKGNPLTVSLSGGNPAIQDFTQLIALGHAKGYRFACETQGSIAKPWFSVLDTLVLSPKPPSSGETVDWTAFNACLQAATGAGKIVMKIVVFDDTDYAWARAAADKYPDLPLYLQPGNLEVDPEIAVDPQNLADKLLWLVDKTIADNWFVPRVLPQLHVLLWGNKRGV

SEQ ID NO: 35363 - protein, 239 aa, unidentified
  source 1..239: note = Yoonia vestfoldensis
  REGION 1..239: note = tr|A0A1Y0E734|A0A1Y0E734_9RHOB 7-carboxy-7-deazaguanine synthase OS=Yoonia vestfoldensis; OX = 245188 GN=queE PE=3 SV=1
MTALRIAEIFGPTIQGEGALIGAPTVFVRAGGCDYRCSWCDSLHAVDSEYRHDWAKMTTDDIWAKVWDLSGGTPLTVSLSGGNPAIQNFGPLMSMGHAQGYKFALETQGSVAQDWFENLDLLVLSPKPPSSGETVDWDKFDDCLAQAKTARTVLKIVIFDEVDYNWARDVAGRYAALPLYLQPGNHTPPPPDAQDAVIDIDGIIDRMQWLVDKTLGDRWFTPHILPQLHTLIWGNKRGV

SEQ ID NO: 35364 - protein, 217 aa, Zavarzinia sp.
  REGION 1..217: note = tr|A0A317ECD5|A0A317ECD5_9PROT 7-carboxy-7-deazaguanine synthase OS=Zavarzinia sp. HR-AS; OX = 2211142 GN=queE PE=3 SV=1
MPYAVKELFPTLQGEGAQAGRAAVFCRFAGCNLWSGREADRAEATCRFCDTDFVGTDGEGGGKFPDAETLAAAIEACWGEERAYRYVVFTGGEPLLQLDEELIEAMHGRGFEIAIETNGTTRPPSGIDWICVSPKAGANWSLRRGDELKLVFPQAGLMPEAVEEILKPASGNAFRHYFLQPMDGPDQQRNIAAAADYCRRHPRWRLSLQTHKLIGIP

SEQ ID NO: 35365 - protein, 210 aa, Zeaxanthinibacter enoshimensis
  REGION 1..210: note = tr|A0A4R6TIP6|A0A4R6TIP6_9FLAO 7-carboxy-7-deazaguanine synthase OS=Zeaxanthinibacter enoshimensis OX=392009 GN=queE PE=3 SV=1
MVTTTILEQVDKGLMLPLMEEFYTIQGEGFHKGTAAYFIRVGGCDVGCHWCDVKESWNAETHPPTAIEQIVENAAKYSKTIVVTGGEPLTWDMGPLTRALKDKGLQIHIETSGAYELTGQWDWICLSPKKNKLPEGPVYDKANELKVIVYNKHDLIFAEEQAAKVNKDCILYLQPEWSVRDKVTPMIVDYVMANPKWKVSLQTHKYLNIP

SEQ ID NO: 35366 - protein, 195 aa, unidentified
  source 1..195: note = Zetaproteobacteria bacterium
  REGION 1..195: note = tr|A0A2A5F7H9|A0A2A5F7H9_9PROT 7-carboxy-7-deazaguanine synthase OS=Zetaproteobacteria bacterium OX=2026807 GN=queE PE=3 SV=1
MPCTFVRLAGCPLRCTYCDTLQAIPFDSGTAMSLDSIVEQVAALSNPLVLVTGGEPLAQKSCISLLQRLCDVMPMVQLETSGALDTSWVPKQVRKIIDVKTPGSGEVKRNRWANLESLQPDDEIKFVLTSRDDYEWSRHLVQTRLQHLPTICLFSPSWGKLDAADLCRWILEDHLPVRLQIQMHKVIWGADKQGV

SEQ ID NO: 35367 - protein, 207 aa, unidentified
  source 1..207: note = Zetaproteobacteria bacterium
  REGION 1..207: note = tr|A0A3M1I0Q6|A0A3M1I0Q6_9PROT 7-carboxy-7-deazaguanine synthase OS=Zetaproteobacteria bacterium OX=2026807 GN=queE PE=3 SV=1
MPCTLVRLAGCPLRCRYCDTPEALPVRSGTEVAIDAIVEEIERRNRPSVLITGGEPLAQKHTRTLLARLAERPRPVLLETAGAHPIADLPRPVHVILDIKTPGSGEVSRNRWENIEHLKPGDEIKFVLTDREDFDWMCRVIAERRLDRLGVPILASPAMPMLSPAQLARWILDARAPVRLQLQLHKYIWPTGEEGSAHLKPRSFAHR

SEQ ID NO: 35368 - protein, 216 aa, unidentified
  source 1..216: note = Zhongshania aliphaticivorans
  REGION 1..216: note = tr|A0A127M3L8|A0A127M3L8_9GAMM 7-carboxy-7-deazaguanine synthase OS=Zhongshania aliphaticivorans OX=1470434 GN=queE PE=3 SV=1
MKANTLRITEIFYSLQGESRTLGLPTVFVRLTGCPLRCVYCDTEYAFHGGERRELDDILAEVAQYSPRYICVTGGEPLAQPECLSLLTALCDAGYEVSLETSGALPIEKVDARVSRVMDLKTPASGEMHRNLMDNIPFLTDHDQVKFVLCNREDYDWARFQLDSYQLNKRAGEVLFSPSFGQLSATDLANWIVTDNLPVRFQMQLHKILWNDAAGH

SEQ ID NO: 35369 - protein, 216 aa, Zhongshania sp.
  REGION 1..216: note = tr|A0A3N0CSS2|A0A3N0CSS2_9GAMM 7-carboxy-7-deazaguanine synthase OS=Zhongshania sp. DSW25-10 OX=2304603 GN=queE PE=3 SV=1
MNANTLRITEIFYSLQGESRTLGLPTVFVRLTGCPLRCVYCDTEYAFHGGERRQLDDILKEVASYKPRYVCVTGGEPLAQPECHTLLSALCDAGYQVSLETSGALSVAQVDPRVSKVMDLKTPASGEVHRNLMDNIAFITAHDQIKFVLCDREDYDWARFQLDTHKLSEKAGEVLFSPSFGQLSATDLANWIVEDNLPVRFQMQLHKLLWNDAAGH

SEQ ID NO: 35370 - protein, 216 aa, Zhongshania sp.; identical to SEQ ID NO: 35369
  REGION 1..216: note = tr|A0A2S4HC79|A0A2S4HC79_9GAMM 7-carboxy-7-deazaguanine synthase OS=Zhongshania sp. ZX-21; OX = 2067667 GN=queE PE=3 SV=1

SEQ ID NO: 35371 - protein, 210 aa, Zhouia amylolytica
  REGION 1..210: note = tr|A0A1I6U1T1|A0A1I6U1T1_9FLAO 7-carboxy-7-deazaguanine synthase OS=Zhouia amylolytica; OX = 376730 GN=queE PE=3 SV=1
MITTATMELVEKGEMLPLMEEFYTIQGEGHHTGTAAYFIRVGGCDVGCHWCDVKESWNAETHPPTEITSIVDNAVKYANTIVITGGEPLTWNMDPLTQRLKERGLKTHIETSGAYPLTGVWDWICLSPKKMKLPKEEVYNAADELKVIVYNQHDFKFAEEQAAKVRESCELYLQPEWSRREKMMPEIVDYVMTHPKWKISLQTHKYLNIP

SEQ ID NO: 35372 - protein, 204 aa, Zhouia amylolytica
  REGION 1..204: note = tr|W2US77|W2US77_9FLAO 7-carboxy-7-deazaguanine synthase OS=Zhouia amylolytica AD3 OX=1286632 GN=queE PE=3; SV = 1
MELVEKGEMLPLMEEFYTIQGEGHHTGTAAYFIRVGGCDVGCHWCDVKESWNAETHPPTEITSIVDNAVKYANTIVITGGEPLTWNMDPLTQRLKERGLKTHIETSGAYPLTGVWDWICLSPKKMKLPKEEVYNAADELKVIVYNQHDFKFAEEQAAKVSESCELYLQPEWSRREKMMPEIVDYVMTHPKWKISLQTHKYLNIP

SEQ ID NO: 35373 - protein, 238 aa, Zobellella denitrificans
  REGION 1..238: note = tr|A0A231MVE8|A0A231MVE8_9GAMM 7-carboxy-7-deazaguanine synthase OS=Zobellella denitrificans OX=347534 GN=queE PE=3 SV=1
MIAISEIFGPTIQGEGALIGVPTVFVRTGGCDFRCSWCDTLYAVEPRFKADWQPMDASAILAEVNRLSGGAPLLVTLSGGNPALQPLDALLALGHQQGHTFAMETQGSKAQPWFGMLDHLTLSPKPPSSGMAFNRERFEACLAAAGADTQVSLKLVIADEADYRWARALADDYPQLPLYLQPCNPAPATPEQPERETDTQELNARLRWLVDKVTGDRWYRARVLPQLHVLIWNNERGV

SEQ ID NO: 35374 - protein, 245 aa, Zobellella denitrificans
  REGION 1..245: note = tr|A0A291HV23|A0A291HV23_9GAMM 7-carboxy-7-deazaguanine synthase OS=Zobellella denitrificans OX=347534 GN=queE PE=3 SV=1
MGGVPAVSIAISEIFGPTIQGEGALIGVPTVFVRTGGCDFRCSWCDTLYAVEPRFKADWQPMAASAILAEVNRLSGGAPLLVTLSGGNPALQPLDALLALGHQQGHTFAMETQGSKAQPWFRMLDHLTLSPKPPSSGMAFNRERFEACLAAAGADTQVSLKLVIADEADYRWARALADDYPQLPLYLQPCNPAPATPEQPERETDTQELNARLRWLVDKVTGDRWYRARVLPQLHVLIWNNERGV

SEQ ID NO: 35375 - protein, 239 aa, unidentified
  source 1..239: note = Zobellella endophytica
  REGION 1..239: note = tr|A0A2P7RBJ1|A0A2P7RBJ1_9GAMM 7-carboxy-7-deazaguanine synthase OS=Zobellella endophytica OX=2116700 GN=queE PE=3 SV=1
MSIAISEIFGPTIQGEGRLIGMPTVFVRTGGCDFRCSWCDTLYAVEPRFKADWRPMDAGGVLAEVNRLSGGEPILVTLSGGNPALQPLTELLRLGHGQGHAFAMETQGSKAQAWFGMLDHLTLSPKPPSSGMAFNRERFEACLAAAGADTQVSLKLVIADEADYRWARALAADYPQLPLVLQPCNPTPATPEQPELTTDPERLNARLRWLVEKVTADRWYRARVLPQLHVLIWNNERGV

SEQ ID NO: 35376 - protein, 238 aa, Zobellella taiwanensis
  REGION 1..238: note = tr|A0A2P7RE18|A0A2P7RE18_9GAMM 7-carboxy-7-deazaguanine synthase OS=Zobellella taiwanensis OX=347535 GN=queE PE=3 SV=1
MIAISEIFGPTIQGEGALTGVPTVFVRTGGCDFRCSWCDTLYAVEPRFKADWAPMSAEAIMAEVERLSGGRPLLVTLSGGNPALQPLGELLTLGHAKGYTFAIETQGSKVQDWFTELDHLTLSPKPPSAGMAFSQHRFDACLAAAGAHTQVTLKLVIADEADYQWARDFAARYPQLPLTLQPCNPAPATPDEPERATDLDALNARLRWLVDRVTADGWFEARVLPQLHVIIWNNERGV

SEQ ID NO: 35377 - protein, 210 aa, Zobellia galactanivorans
  REGION 1..210: note = tr|G0L659|G0L659_ZOBGA 7-carboxy-7-deazaguanine synthase OS=Zobellia galactanivorans (strain DSM 12802 / CCUG 47099 / CIP 106680 / NCIMB 13871 / Dsij) OX=63186; GN = qu eE PE=3 SV=1
MVKDEVLQEVEKGMMLPLMEEFYTIQGEGFHKGTAAYFIRVGGCDVGCHWCDVKESWNAETHPPTDIRQITENASKYSDTIVITGGEPLTWNMQPLTDALKAKNLKIHIETSGAYPLTGTWDWICLSPKKNKLPVDEIYEVAHELKVIVYNKHDLIFAEQEAAKVNGKCILYLQPEWSVRDKVTPMIVDYVMQNPKWKVSLQTHKYLNIP

SEQ ID NO: 35378 - protein, 210 aa, Zobellia uliginosa; identical to SEQ ID NO: 35377
  REGION 1..210: note = tr|A0A1N7MGL6|A0A1N7MGL6_9FLAO 7-carboxy-7-deazaguanine synthase OS=Zobellia uliginosa; OX = 143224 GN=queE PE=3 SV=1

SEQ ID NO: 35379 - protein, 219 aa, Zoogloea ramigera
  REGION 1..219: note = tr|A0A4Y4CW51|A0A4Y4CW51_ZOORA 7-carboxy-7-deazaguanine synthase OS=Zoogloea ramigera; OX = 350 GN=queE PE=3 SV=1
MTQSGRTTSLRITEIFHSLQGETSRSGLPTVFVRLTGCPLRCSWCDTEYSFTGGTTRALDDILTEVASHHCPTVCVTGGEPLAQKGCLALLTALCDAGYSVSLETSGALDIAGVDPRVSRIVDLKAPGSGEEARNLLSNIPLLSPHDELKLVLASEADYEWAKARIAEHRLTERCPVLMAPVQGQLKPAELAAWILRDRLPVRMQVQLHKVIWGNEPGR

SEQ ID NO: 35380 - protein, 219 aa, Zoogloea sp.
  REGION 1..219: note = tr|A0A5C7KEP3|A0A5C7KEP3_9RHOO 7-carboxy-7-deazaguanine synthase OS=Zoogloea sp. OX=49181; GN = queE PE=3 SV=1
MPSTGRLPTLRITEIFHSLQGETSRAGLPTVFVRLTGCPLRCSWCDTEYAFNGGTTRSLADILSEVASHHCQTVCVTGGEPLSQKNCLPLLTALCDAGYSVSLETSGAIDIAGVDPRVSRIMDLKAPGSGEEARNLLSNIPLLTLRDELKLVLASEADYEWAKARIAEYGLTERCPVLLAPVQGQLRPAELAAWILRDRLPVRMQVQLHKIIWGNEPGR

SEQ ID NO: 35381 - protein, 220 aa, unidentified
  source 1..220: note = Zoogloeaceae bacteirum
  REGION 1..220: note = tr|A0A2S0QQL5|A0A2S0QQL5_9RHOO 7-carboxy-7-deazaguanine synthase OS=Zoogloeaceae bacteirum Par-f-2 OX=2080469 GN=queE PE=3 SV=1
MNTAPGRNTRLRLTEIFASVQGESTRVGLPTVFVRLTGCPLRCVWCDTAYAFSGGQFYPIDDIVRQVAAFGLRHVCVTGGEPLAQQGCPTLLTALCDAEFDVSLETSGALDISTVDPRVARIMDLKAPGSGEAAKNRWANIDQLRRGDEIKIVIADEADYAWAREQIATHRLTERCEVLFSPVAGQLDPAQLAEWIVRDRLPVRFQLQLHKVLWGDARGK

SEQ ID NO: 35382 - protein, 216 aa, Zooshikella ganghwensis
  REGION 1..216: note = tr|A0A4P9VW79|A0A4P9VW79_9GAMM 7-carboxy-7-deazaguanine synthase OS=Zooshikella ganghwensis OX=202772 GN=queE PE=3 SV=1
MSEKQLRLTEIFYSLQGETRTAGLPTVFIRLTGCPLRCGYCDTAYAFSGGQLWSFETIMAEVQQYHPHYVTVTGGEPLAQPNCLPLLKLLADAGYEVSLETSGAMPIEHVDSRIVVVMDLKTPSSGELQRNSYSNIKYLKPQDQVKFVIGSQEDYQWAVFKLDEYNLADRVSDVLFSPVHHQLEPRQLAEWILADRLPVRMQLQLHKYLWNDEPGH

SEQ ID NO: 35383 - protein, 210 aa, unidentified
  source 1..210: note = Zunongwangia atlantica
  REGION 1..210: note = tr|A0A1Y1T5C9|A0A1Y1T5C9_9FLAO 7-carboxy-7-deazaguanine synthase OS=Zunongwangia atlantica 22II14-10F7 OX=1185767 GN=queE PE=3 SV=1
MITEETQELVDRGIMLPLMEEFYTIQGEGFHKGTAAYFIRIGGCDVGCHWCDVKESWDAGLHPPTHVGEIVENAVKYSKTIVVTGGEPLTWDMTMLTDNLKKQGCQIHIETSGAYPVTGTWDWICLSPKKIKLPEPDIYPIANELKVIIFNKHDFKFAEEQAAQVGEDCILYMQPEWSNRDKMIPLIVDYVMKNPRWKVSLQTHKYLNIP

SEQ ID NO: 35384 - protein, 210 aa, unidentified
  source 1..210: note = Zunongwangia mangrovi
  REGION 1..210: note = tr|A0A1I1K1H7|A0A1I1K1H7_9FLAO 7-carboxy-7-deazaguanine synthase OS=Zunongwangia mangrovi; OX = 1334022 GN=queE PE=3 SV=1
MITEETQELVDRGIMLPLMEEFYTIQGEGFHKGTAAYFIRIGGCDVGCHWCDVKESWDAGLHPPTHVGEIVEKAVKYSKTIVVTGGEPLTWDMTTLTDNLKKQGCQIHIETSGAYPVTGTWDWICLSPKKIKLPEPDIYPIANELKVIIFNKHDFKFAEEQAAQVGEGCILYMQPEWSNRDKMIPLIVDYVMKNPRWKVSLQTHKYLNIP

SEQ ID NO: 35385 - protein, 223 aa, Zunongwangia profunda
  REGION 1..223: note = tr|D5BLH5|D5BLH5_ZUNPS 7-carboxy-7-deazaguanine synthase OS=Zunongwangia profunda (strain DSM 18752 / CCTCC AB 206139 / SM-A87) OX=655815 GN=queE PE=3 SV=1
MHHKVKDYISLQAMITEETQELVDRGIMLPLMEEFYTIQGEGYHKGTAAYFIRIGGCDVGCHWCDVKESWNAGLHPPTHVGEIVENALKYSKTIVITGGEPLTWDMTTLTDSLKKQGCQIHIETSGAYPLTGIWDWICLSPKKIKLPEPEIYPVANELKVIIFNKHDFKFAEEQAAQVGEHCILYLQPEWSNREKMIPLIVDYVMRNPKWKVSLQTHKYLNIP

SEQ ID NO: 35386 - protein, 210 aa, Zunongwangia profunda
  REGION 1..210: note = tr|A0A3D5J398|A0A3D5J398_9FLAO 7-carboxy-7-deazaguanine synthase OS=Zunongwangia profunda; OX = 398743 GN=queE PE=3 SV=1
MITEETQELVDRGIMLPLMEEFYTIQGEGYHKGTAAYFIRIGGCDVGCHWCDVKESWNAGLHPPTHVGEIVENALKYSKTIVITGGEPLTWDMTTLTDSLKKQGCQIHIETSGAYPLTGIWDWICLSPKKIKLPEPEIYPVANELKVIIFNKHDFKFAEEQAAQVGEHCILYLQPEWSNREKMIPLIVDYVMRNPKWKVSLQTHKYLNIP

SEQ ID NO: 35387 - protein, 210 aa, Zunongwangia sp.
  REGION 1..210: note = tr|A0A2E0P3L1|A0A2E0P3L1_9FLAO 7-carboxy-7-deazaguanine synthase OS=Zunongwangia sp.; OX = 1965325 GN=queE PE=3 SV=1
  VARIANT 124: note = Xaa can be any naturally occurring amino acid
MITEETQELVDRGIMLPLMEEFYTIQGEGYHKGTAAYFIRIGGCDVGCHWCDVKESWNAGLHPPTHVGEIVENALKYSKTIVITGGEPLTWDMTTLTDSLKKQGCQIHIETSGAYPLTGIWDWXCLSPKKIKLPEPEIYPVANELKVIIFNKHDFKFAEEQAAQVGEHCILYLQPEWSNREKMIPLIVDYVMRNPKWKVSLQTHKYLNIP

SEQ ID NO: 35388 - protein, 214 aa, Zymobacter palmae
  REGION 1..214: note = tr|A0A348HE36|A0A348HE36_9GAMM 7-carboxy-7-deazaguanine synthase OS=Zymobacter palmae; OX = 33074 GN=queE PE=3 SV=1
MYAIKEAFYSLQGEGARAGRASVFCRFTGCNLWSGRPQDREKSACRFCDTDFIGTDGQNGGKFVTADQLADHLDALWPYLAASGKRYVVFTGGEPLLQLDKALIEAMHARDFEIAVETNGTLPAPEGIDWICVSPKGATTLVQTSGHELKLVYPQADALPERFETLDFQHFYLQPMDLIPLGQQGTTQARALTYCLQHPQWQLSLQMHKIIGID

SEQ ID NO: 35389 - protein, 217 aa, Zymomonas mobilis
  REGION 1..217: note = tr|A0A2R9NSX6|A0A2R9NSX6_ZYMMB 7-carboxy-7-deazaguanine synthase OS=Zymomonas mobilis subsp. mobilis NRRL B-12526 OX=1194424 GN=queE PE=3 SV=1
MSRHYAVKESFLTLQGEGIQAGRRAVFIRFAGCNLWNGREDDREQATCRFCDTDFVGIDGENGGRFTAEELAEQAIRLWKEAIESRYQSVRPFVVLTGGEPLLQVDEALLLALKNQAFEIAIETNGTQPVPSAIDWVCMSPKAGSQIILEKGNEIKLVWPQKGIDIEALEKLDFDHYLIQPMDNEYQKENIQKAIAFVMQRPLWRLSIQSHKLIGVK

SEQ ID NO: 35390 - protein, 217 aa, Zymomonas mobilis
  REGION 1..217: note = tr|Q5NMZ1|Q5NMZ1_ZYMMO 7-carboxy-7-deazaguanine synthase OS=Zymomonas mobilis subsp. mobilis (strain ATCC 31821 / ZM4 / CP4) OX=264203 GN=queE PE=3 SV=1
MSRHYAVKESFLTLQGEGIQAGRRAVFIRFAGCNLWNGREDDREQATCRFCDTDFVGIDGENGGRFTAEELAEQAIRLWKEAIESRYQSVRPFVVLTGGEPLLQVDEALLLALKNQAFEIAIETNGTQPVPSAIDWVCMSPKAGSQIILEKGNEIKLVWPQKGIDIEALEKLDFDHYLIQPMDDEYQKENIQKAIAFVMQRPLWRLSIQSHKLIGVK

SEQ ID NO: 35391 - protein, 223 aa, Escherichia coli
  REGION 1..223: note = tr|A0A0B1HUD1|A0A0B1HUD1_ECOLX 7-carboxy-7-deazaguanine synthase OS=Escherichia coli; OX = 562 GN=queE PE=3 SV=1
MQYPINEMFQTLQGEGYFTGVPAIFIRLQGCPVGCAWCDTKHTWEKLEDREVSLFSILAKTKESDKWGSASSEDLLAVIGRQGYTARHVVITGGEPCIHDLLPLTDLLEKNGFSCQIETSGTHEVRCTPNTWVTVSPKLNMRGGYDVLSQALERANEIKHPVGRVRDIEALDELLATLTDDKPRVIALQPISQKDDATRLCIETCIARNWRLSMQTHKYLNIA

SEQ ID NO: 35392 - protein, 223 aa, Escherichia coli; identical to SEQ ID NO: 29987
  REGION 1..223: note = sp|P64554|QUEE_ECOLI 7-carboxy-7-deazaguanine synthase OS=Escherichia coli (strain K12) OX=83333 GN=queE; PE = 3 SV=1

SEQ ID NO: 35393 - protein, 223 aa, unidentified
  source 1..223: note = Abditibacterium utsteinense
  REGION 1..223: note = tr|A0A2S8SSM7|A0A2S8SSM7_9BACT 7-cyano-7-deazaguanine synthase OS=Abditibacterium utsteinense OX=1960156 GN=queC PE=3 SV=1
MKKAIAIVSGGLDSVTLAHLLAAQGYELQILSFNYGQKHLKELDFARDCANRLNARFNIVDLTSLTPLIGGNALTDASVAVPHGHYAQENMSVTVVPNRNAIFLSLAYGAAVAQNAQVVGFGVHSGDHFIYPDCRPAFVEAFELMQKKAIEGFGDADLKLYTPFLKTDKSGIVTQGAKIGVPFERTWSCYEGGALHCGQCGTCVERKEAFIKAGVKDPTSYAA

SEQ ID NO: 35394 - protein, 217 aa, Abiotrophia defectiva
  REGION 1..217: note = tr|W1Q3C4|W1Q3C4_ABIDE 7-cyano-7-deazaguanine synthase OS=Abiotrophia defectiva ATCC 49176 OX=592010; GN = queC PE=3 SV=1
MKCVLLSGGADSSTALALALSRDPQVVAVSIAYNQQHAQAELAAAKAVAQHYGVDHRILDLAAIFADSRSALNAANDLVASQGDYADQEAPNTEVEFRNGVFIAILTSLAMQLGADALYFGAHLDDSGVIYPDCSPDFVAAMDQAVRLGTGGKVRLETPFGQMTKADIVKLGLELGVPYHLTYSCYAGSQPPCGQCGTCIDRRKAFEANGVFETYDQ

SEQ ID NO: 35395 - protein, 229 aa, unidentified
  source 1..229: note = Abyssibacter profundi
  REGION 1..229: note = tr|A0A363UPW6|A0A363UPW6_9GAMM 7-cyano-7-deazaguanine synthase OS=Abyssibacter profundi; OX = 2182787 GN=queC PE=3 SV=1
MSARAVVLVSGGLDSATTLAIARHEGFECHGLSVHYGQRHLSELQAAKRVCSHLGAVDHREVAVGLDALGGSALTDPNIDVPTRQTDGIPVTYVPARNTVMLSIAMAHAEVIGANAVFIGVNAVDYSGYPDCRPAFIDAFANLSRWATRQGVETGQGLAVHAPLIQLTKADIIRRGVALGVDYAMTVSCYQADAGGAACGVCDSCRIRRDGFAQAGVLDPTLYQSGASG

SEQ ID NO: 35396 - protein, 218 aa, unidentified
  source 1..218: note = Abyssicoccus albus
  REGION 1..218: note = tr|A0A3N5BR20|A0A3N5BR20_9STAP 7-cyano-7-deazaguanine synthase OS=Abyssicoccus albus; OX = 1817405 GN=queC PE=3 SV=1
MLNDNRALVVFSGGQDSTTCLFWALEQYDHVEVITFDYGQRHLKEIEVAKEIANELNVKQHLLNTEILTSYNANSLTNNDIEIDSSNDVPNTFVPGRNMLFLNIASIVAYQIGAKHIVTGVCDTDFSGYPDCRRDFVQSMNETMNLAMDLEFVIDTPLMTLNKKETWQLADELGQLDYIRYRTLTCYNGIVGDGCGVCPSCKLRADGLEAYLNEVGRK

SEQ ID NO: 35397 - protein, 228 aa, unidentified
  source 1..228: note = Acaryochloris marina
  REGION 1..228: note = sp|B0C253|QUEC_ACAM1 7-cyano-7-deazaguanine synthase; OS = Acaryochloris marina (strain MBIC 11017) OX=329726; GN = queC PE=3 SV=1
MKAVVLLSGGLDSSTALYKAKADGADCYAISFDYRQRHRQELDSAVAIAQSAQVTQHQIVAFDLTLWGGSALTDTQIDLPSRSIEEMADHIPVTYVPARNSIFLSFALAYAETISAEQVYIGVNQLDYSGYPDCRPDFIQAMQEVFRLGTKLGREGQAIEICTPLINLHKSAIIELGNDLGVPWEQTWSCYSDGGGSPPLACGQCDSCQLRLAAFAQLGLSDPLSYAT

SEQ ID NO: 35398 - protein, 235 aa, unidentified
  source 1..235: note = Acaryochloris sp.
  REGION 1..235: note = tr|A0A2W1K1B5|A0A2W1K1B5_9CYAN 7-cyano-7-deazaguanine synthase OS=Acaryochloris sp. RCC1774 OX=1764569 GN=queC_1 PE=3 SV=1
MKAVILLSGGLDSSTVLYRAKAEGLDCYTLSFDYQQRHRQELESAIATAKAANATEHQIINFDLRLWGGSALTDQNIDLPAHRSLDEMSEQIPVTYVPARNTIFLSFALAYAEAISAQQVHIGVNQLDYSGYPDCRPDYIQAMGEVFRLGTKQGREGQPIEIVSPLINLTKVEIIELGNQLGVPWQKTWSCYSDGGGQSPPIACGECDSCQLRLAAFAKLGLQDPLPYRSTQVKN

SEQ ID NO: 35399 - protein, 233 aa, unidentified
  source 1..233: note = Accumulibacter phosphatis
  REGION 1..233: note = tr|C7RIC1|C7RIC1_ACCPU 7-cyano-7-deazaguanine synthase OS=Accumulibacter phosphatis (strain UW-1); OX = 522306 GN=queC PE=3 SV=1
MDNKPTSSGGKPAVVLLSGGLDSATTLAIARADGFACHCLSIDYGQRHRAELAAAALLAEALGAREHRQLRLTLEVFGGSALTDERIAVPVDGVHSGIPITYVPARNTVMLSLALAWAEVLGSRDIFVGVNAVDYSGYPDCRPEYIAAYEKMANLATRAAVQGASLTIHAPLMGLGKAEIIQRGITLGVDYGLTVSCYQADRDGRACGVCDSCRLRRAGFSAAGMADPTRYAG

SEQ ID NO: 35400 - protein, 201 aa, unidentified
  source 1..201: note = Accumulibacter phosphatis
  REGION 1..201: note = tr|C7RWC1|C7RWC1_ACCPU 7-cyano-7-deazaguanine synthase OS=Accumulibacter phosphatis (strain UW-1); OX = 522306 GN=CAP2UW1_4516 PE=3 SV=1
MTAALLLSGGMDSISIAWWKHPDIAITIDYGQLPAAAEITASQAICRRLRIPHHVLQVDCHSLGSGDMAGLEPNALAPATDWWPYRNQLLITLAAMKAVTLEVRQLWLGTVASDASHRDGTPNFLSAMSALLAVQEGGLTVSAPAIGMSTVDLVRQSGVPLEILAWAHSCHKADVACGACRGCNKYFEVLRELGNELVRSG

SEQ ID NO: 35401 - protein, 229 aa, Acetitomaculum ruminis
  REGION 1..229: note = tr|A0A1I0YUQ9|A0A1I0YUQ9_9FIRM 7-cyano-7-deazaguanine synthase OS=Acetitomaculum ruminis DSM 5522 OX=1120918 GN=queC PE=3 SV=1
MKAMVLSSGGVDSTTALALAISKYGKENVFALSVSYGQKHDKEIQAAKKVANYYGVEQLFLDLSKIFQFSNCSLLKQSDTEIPKESYSEQIKETKGETPVSTYVPFRNGLFLSSAASIALSKECNVIYYGAHADDACGFAYPDCSSAFNNAMKEAIYEGSGHQLTIEAPFIDKTKAEVVKLGLELKVPYELTWSCYEGGDEPCGECGTCIDRAEAFKLNNVKDPALIKD

SEQ ID NO: 35402 - protein, 249 aa, Acetobacter aceti
  REGION 1..249: note = tr|A0A0D6MZ00|A0A0D6MZ00_ACEAC 7-cyano-7-deazaguanine synthase OS=Acetobacter aceti NBRC 14818 OX=887700 GN=queC PE=3 SV=1
MSFQPSSTDGALVVFSGGQDSATCLAWALDRFSRVETLGFDYGQRHAVELTCRDTLRDGMAALQGDWKERLGPDHTLELDALGKVSDTALTRDTEIQMTESGLPSTFVPGRNLIFLSFAAALAYRRGLRHIVTGVCETDYSGYPDCRDDTIKALQVALNLGMDSRFVLHTPLMWIDKAQTWQLAESLGGEPLVTLINHESHSCYLGTRGTLHAWGHGCGVCPACELRKAGWTAYEALREARTCGNDGHG

SEQ ID NO: 35403 - protein, 249 aa, Acetobacter aceti
  REGION 1..249: note = tr|A0A1U9KJQ2|A0A1U9KJQ2_ACEAC 7-cyano-7-deazaguanine synthase OS=Acetobacter aceti; OX = 435 GN=queC PE=3 SV=1
MTLQLSASDGALVVFSGGQDSATCLAWALDRFPRVETLGFDYGQRHAVELTCRDTLRDGMVALQEDWKDRLGPDHTLELDALGKVSDTALTRDTEIRMTATGLPSTFVPGRNLVFLTFAAALAYRRGLRHIVTGVCETDYSGYPDCRDDTIKALQVALNLGMDTRFVLHTPLMWIDKAQTWQLAESLGGEPLVTLINHESHSCYLGTRGTLHAWGHGCGVCPACELRKAGWSAYEALSEDTRSGSDSHG

SEQ ID NO: 35404 - protein, 246 aa, unidentified
  source 1..246: note = Acetobacter ascendens
  REGION 1..246: note = tr|A0A1D8QUN1|A0A1D8QUN1_9PROT 7-cyano-7-deazaguanine synthase OS=Acetobacter ascendens; OX = 481146 GN=queC PE=3 SV=1
MPLPARDKQESALVLFSGGQDSATCLAWALERYGRVETLGFDYGQRHAVELECRASIRQGLAHQNPVWAERLEEDHTLPLHALGEVSETSLTRDAEISMAENGLPNTFVPGRNLIFLTFAAALAARRGIKHIVTGVCETDYSGYPDCRDDTIKALQVALNLGMESRYVLHTPLMWLDKAETWELAEELGGQPLVELINKESHTCYLGERGTLHAWGHGCGTCPACQLRKSGWDEYIVHKKGTQTHA

SEQ ID NO: 35405 - protein, 242 aa, Acetobacter cerevisiae
  REGION 1..242: note = tr|A0A149UZ22|A0A149UZ22_9PROT 7-cyano-7-deazaguanine synthase OS=Acetobacter cerevisiae; OX = 178900 GN=queC PE=3 SV=1
MSTPARASEEAALVLFSGGQDSATCLAWALARFGRVETLGFDYGQRHAVELECRETLRDGLRVQNPLWKERLGMDHTLALGALGDISDTALTRNAEIAMEKDGLPNTFVPGRNIIFLTFAAALAARRGIRHIVTGVCETDYSGYPDCRDDTIKAVQVALNLGMDSRYVLHTPLMWIDKAETWKLAEDLGGAPLVSLINQASHTCYLGDRGTLHPWGHGCGECPACALRRAGWEEYVAEKTNA

SEQ ID NO: 35406 - protein, 242 aa, Acetobacter cerevisiae
  REGION 1..242: note = tr|A0A149Q377|A0A149Q377_9PROT 7-cyano-7-deazaguanine synthase OS=Acetobacter cerevisiae; OX = 178900 GN=queC PE=3 SV=1
MSTPARASDEAALVLFSGGQDSATCLAWALARFGRVETLGFDYGQRHAVELECRETLRDGLRAQNPLWKERLGMDHTLALGALGDISDTALTRNAEIAMEKDGLPNTFVPGRNIIFLTFAAALAARRGIRHIVTGVCETDYSGYPDCRDDTIKAVQVALNLGMDSRYVLHTPLMWIDKAETWKLAEDLGGAPLVSLINEASHTCYLGDRGTLHPWGHGCGECPACALRRAGWEEYVAEKTNA

SEQ ID NO: 35407 - protein, 245 aa, Acetobacter cibinongensis
  REGION 1..245: note = tr|A0A0D6N5K9|A0A0D6N5K9_9PROT 7-cyano-7-deazaguanine synthase OS=Acetobacter cibinongensis 4H-1 OX=1231339 GN=queC PE=3 SV=1
MAFPEHAQTESALVLFSGGQDSATCLAWALARFGRVETLGFDYGQRHGIELTCRETLREGLKTQNALWADKLGMDHTLALDALGQVSETALTRDAEIAMADGGLPNTFVPGRNIIFLTFAAALAARRGIRHIVTGVCETDYSGYPDCRDDTIKAVQVALNLGMDTRFVLHTPLMWINKAETWALAEELGGDDLVTLVNRESHTCYLGDRTTPVHPWGHGCGHCPACELRRAGWEDYCAKKAGQHA

SEQ ID NO: 35408 - protein, 245 aa, Acetobacter cibinongensis
  REGION 1..245: note = tr|A0A1Z5YS34|A0A1Z5YS34_9PROT 7-cyano-7-deazaguanine synthase OS=Acetobacter cibinongensis OX=146475 GN=queC PE=3 SV=1
MAFPEHAQTESALVLFSGGQDSATCLAWALARFGRVETLGFDYGQRHGIELTCRETLREGLKTQNALWAEKLGMDHTLALDALGQVSETALTRDAEIAMADGGLPNTFVPGRNIIFLTFAAALAARRGIRHIVTGVCETDYSGYPDCRDDTIKAVQVALNLGMDTRFVLHTPLMWINKAETWALAEELGGDDLVTLINRESHTCYLGDRTTPVHPWGHGCGHCPACELRRAGWEDYCAKRADQHA

SEQ ID NO: 35409 - protein, 242 aa, Acetobacter fabarum
  REGION 1..242: note = tr|A0A269Y113|A0A269Y113_9PROT 7-cyano-7-deazaguanine synthase OS=Acetobacter fabarum; OX = 483199 GN=queC PE=3 SV=1
MPLSSKEQTESALVLFSGGQDSATCLAWALARFKHVETVGFDYGQRHAIELECRQSIREGLAALNPQWKERLGPDHTLPLHALNDISDTALTRDAEIAMTQNGLPNTFVPGRNLIFLTFSAALAARRSMRHIVTGVCETDYSGYPDCRDDTIKALQVALNLGMDSRYVLHTPLMWLDKAETWTLADELGGEPLVTLINHESHTCYMGDRTVRHAWGYGCGTCPACQLRRAGWEAYIAEDQHA

SEQ ID NO: 35410 - protein, 242 aa, Acetobacter ghanensis
  REGION 1..242: note = tr|A0A0U5F5R1|A0A0U5F5R1_9PROT 7-cyano-7-deazaguanine synthase OS=Acetobacter ghanensis; OX = 431306 GN=exsB PE=3 SV=1
MPLSSKEQTESALVLFSGGQDSATCLAWALSRFGHVETVGFDYGQRHAIELECRQSIRDGLAAANPQWKQRLGPDHTLPLHALNDISDTALTRDAEISMTQSGLPNTFVPGRNLIFLTFSAALAARRGIRHIVTGVCETDYSGYPDCRDDTIKALQVALNLGMDSRYVLHTPLMWLDKAETWTLAEELGGEAVVTLINHESHTCYMGERSTRHAWGYGCGTCPACQLRRAGWEAYKAENQNA

SEQ ID NO: 35411 - protein, 242 aa, Acetobacter indonesiensis
  REGION 1..242: note = tr|A0A252AVI8|A0A252AVI8_9PROT 7-cyano-7-deazaguanine synthase OS=Acetobacter indonesiensis OX=104101 GN=queC PE=3 SV=1
MPLSSHAQKESALVLFSGGQDSATCLAWALTRFERVETMGFDYGQRHAVELDCREALRDGMRGQNPLWAERLGMDHTIALGALGEISETALTRDAEIALAEGGLPNTFVPGRNIIFLTFAAALAARRGIRHIITGVCETDYSGYPDCRDDTIKAVQVALNLGMDSRYVLHTPLMWINKAETWALAEEIGGEKLVTLINQESHTCYLGDRNTIHPWGHGCGKCPACDLRRTGWEDYQAGKANA

SEQ ID NO: 35412 - protein, 242 aa, Acetobacter indonesiensis; identical to SEQ ID NO: 35411
  REGION 1..242: note = tr|A0A0D6NE40|A0A0D6NE40_9PROT 7-cyano-7-deazaguanine synthase OS=Acetobacter indonesiensis 5H-1 OX=1231340 GN=queC PE=3 SV=1

SEQ ID NO: 35413 - protein, 54 aa, Acetobacter malorum
  REGION 1..54: note = tr|A0A149VIQ8|A0A149VIQ8_9PROT 7-cyano-7-deazaguanine synthase (Fragment) OS=Acetobacter malorum OX=178901 GN=AD953_00995 PE=3 SV=1
MSTPARASEEAALVLFSGGQDSATCLAWALARFGRVETLGFDYGQRHAVELECR

SEQ ID NO: 35414 - protein, 242 aa, Acetobacter malorum
  REGION 1..242: note = tr|A0A087PMQ4|A0A087PMQ4_9PROT 7-cyano-7-deazaguanine synthase OS=Acetobacter malorum; OX = 178901 GN=queC PE=3 SV=1
MSTPARASEEAALVLFSGGQDSATCLAWALARFGRVETLGFDYGQRHAVELECRETLRDGLRAQNPLWKDRLGMDHTLALGALGDISETALTRNAEIAMEKDGLPNTFVPGRNIIFLTFAAALAARRGIRHIVTGVCETDYSGYPDCRDDTIKAVQVALNLGMDSRYVLHTPLMWIDKAETWKLAEDLGGTPLVSLINQESHTCYLGDRGTMHPWGHGCGECPACALRRAGWEDYVAEKTDA

SEQ ID NO: 35415 - protein, 268 aa, Acetobacter nitrogenifigens
  REGION 1..268: note = tr|A0A511X7N0|A0A511X7N0_9PROT 7-cyano-7-deazaguanine synthase OS=Acetobacter nitrogenifigens DSM 23921 = LMG 23498 OX=1120919 GN=queC; PE = 3 SV=1
MTRATTTGASTKGTTGASPAATGGAHEAARNKGALVVFSGGQDSATCLAWALDRFERVETLGFDYGQRHVVELACRDALRDGMGTIDPVWKARLEEDHTLSLDALGAVSDTALTRETEITMSESGLPSTFVPGRNLIFLTFAAALAYRRGLRHIVTGVCETDYSGYPDCRDDTIKSLQATLNLGMETRFVLHTPLMWIDKARTWELARSLGGEALVDLINRDSHSCYLGQRGELHPWGYGCGECPACKLRRAGWEQYQTLRAESAGNV

SEQ ID NO: 35416 - protein, 247 aa, Acetobacter oeni
  REGION 1..247: note = tr|A0A511XLU2|A0A511XLU2_9PROT 7-cyano-7-deazaguanine synthase OS=Acetobacter oeni; OX = 304077 GN=queC PE=3 SV=1
MTASANTPASLNSALVVFSGGQDSATCLAWALDRFDRVETLGFDYGQRHAVELTCRDTLRTGMEQIDPTWKTALGPDHTIALDALGKVSETALTRETEITMSESGLPSTFVPGRNLIFLTFAAALAYRRGLRHIVTGVCETDYSGYPDCRDDTIKAMQVALNLGMDTRFVLHTPLMWIDKAQTWALAESLGGEKLVTLINHESHSCYLGTRGTMHPWGHGCGTCPACNLRRSGWEQYEATLTGHPHG

SEQ ID NO: 35417 - protein, 242 aa, unidentified
  source 1..242: note = Acetobacter okinawensis
  REGION 1..242: note = tr|A0A252BWW3|A0A252BWW3_9PROT 7-cyano-7-deazaguanine synthase OS=Acetobacter okinawensis; OX = 1076594 GN=queC PE=3 SV=1
MPLSSKEQTESALVLFSGGQDSATCLAWALSRFGHVETVGFDYGQRHAIELECRQSIRDGLAAQNPEWKKRLGPDHTLPLHALNDISDTALTRDAEISMTQSGLPNTFVPGRNLIFLTFSAALAARRSIRHIVTGVCETDYSGYPDCRDDTIKALQVALNLGMESRYVLHTPLMWLDKAETWTLAEELGGAPLVTLINHESHTCYMGERTQRHAWGYGCGTCPACQLRRAGWEAYRAEDQHA

SEQ ID NO: 35418 - protein, 243 aa, Acetobacter orientalis
  REGION 1..243: note = tr|A0A0D6NM45|A0A0D6NM45_9PROT 7-cyano-7-deazaguanine synthase OS=Acetobacter orientalis 21F-2 OX=1231341 GN=queC PE=3 SV=1
MPLPTQAQNEAALVLFSGGQDSATCLAWALARFGRVETLGFDYGQRHAIELACRATLRAGLQAQNRTWSDRLGMDHTLNLAALGEISDTALTSEAEIAMAEGGLPNTFVPGRNIIFLNFAAALAARRGIRHIVTGVCETDYSGYPDCRDDTIKAVQVALNLGMESRFVVHTPLMWINKAETWQLAEELGGQKLVSLINQESHTCYMGERGTMHPWGHGCGHCPACDLRRNGWEEYQAKVTPNA

SEQ ID NO: 35419 - protein, 243 aa, Acetobacter orientalis; identical to SEQ ID NO: 35418
  REGION 1..243: note = tr|A0A252C964|A0A252C964_9PROT 7-cyano-7-deazaguanine synthase OS=Acetobacter orientalis; OX = 146474 GN=queC PE=3 SV=1

SEQ ID NO: 35420 - protein, 242 aa, Acetobacter orleanensis
  REGION 1..242: note = tr|A0A4Y3TJL1|A0A4Y3TJL1_9PROT 7-cyano-7-deazaguanine synthase OS=Acetobacter orleanensis; OX = 104099 GN=queC PE=3 SV=1
MSKPLRALDEAALVLFSGGQDSATCLAWALARFGRVETLGFDYGQRHAVELDCRETLREGLRKQNPLWKERLGMDHTLALGALGDISETALTRNAEITMEKDGLPNTFVPGRNIIFLTFAAALAARRGIRHIVTGVCETDYSGYPDCRDDTIKAVQVALNLGMDSRYVLHTPLMWIDKAETWKLAEELGGPALVSLINQESHTCYLGDRGTMHPWGHGCGECPACALRRAGWEEYVAEKARA

SEQ ID NO: 35421 - protein, 246 aa, Acetobacter pasteurianus
  REGION 1..246: note = tr|A0A401X2G3|A0A401X2G3_ACEPA 7-cyano-7-deazaguanine synthase OS=Acetobacter pasteurianus NBRC 3278 OX=1226660 GN=queC PE=3 SV=1
MPLPARDKQESALVLFSGGQDSATCLAWALERYGRVETLGFDYGQRHAVELECRASIRQGLVHQNPVWAERLGEDHTLPLHALGEVSETSLTRDAEISMAENGLPNTFVPGRNLIFLTFAAALAARRGIKHIVTGVCETDYSGYPDCRDDTIKALQVALNLGMESRYVLHTPLMWLDKAETWELAEELGGQPLVELINKESHTCYLGERGTLHAWGHGCGTCPACQLRKSGWDDYVAHKKGTQTHA

SEQ ID NO: 35422 - protein, 246 aa, Acetobacter pasteurianus
  REGION 1..246: note = tr|A0A1A0DDD0|A0A1A0DDD0_ACEPA 7-cyano-7-deazaguanine synthase OS=Acetobacter pasteurianus OX=438 GN=queC PE=3 SV=1
MPLPARDKQESALVLFSGGQDSATCLAWALERYGRVETLGFNYGQRHAVELECRASIRQGLVHQNPVWAERLGEDHTLPLHALGEVSETSLTRDAEISMAENGLPNTFVPGRNLIFLTFAAALAARRGIKHIVTGVCETDYSGYPDCRDDTIKALQVALNLGMESRYVLHTPLMWLDKAETWELAEELGGQPLVELINKESHTCYLGERGTLHAWGHGCGTCPACQLRKSGWDDYVAHKKGTQTHA

SEQ ID NO: 35423 - protein, 243 aa, unidentified
  source 1..243: note = Acetobacter peroxydans
  REGION 1..243: note = tr|A0A4Y3TNG3|A0A4Y3TNG3_9PROT 7-cyano-7-deazaguanine synthase OS=Acetobacter peroxydans; OX = 104098 GN=queC PE=3 SV=1
MPLAERDQHESALVLFSGGQDSATCLAWALARFNRVETLGFDYGQRHAVELECRTVLREGMAACNPLWRERLGADHTLPLDALHMVSETALTREAEITITENGLPNTFVPGRNLLFLTFAAALAARRTIRHLITGVCETDYSGYPDCRDDTIKSLQVSLNLGMERRYVIHTPLMWLSKAETWLLAEELGGQALVSLINRESHTCYTGQREVLHPWGYGCGTCPACHLRQTGWEAYQAKKADHA

SEQ ID NO: 35424 - protein, 242 aa, unidentified
  source 1..242: note = Acetobacter persici
  REGION 1..242: note = tr|A0A252AP70|A0A252AP70_9PROT 7-cyano-7-deazaguanine synthase OS=Acetobacter persici; OX = 1076596 GN=queC PE=3 SV=1
MSTPLRALDEAALVLFSGGQDSATCLAWALARFGWVETLGFDYGQRHAVELECRETLREGLRTQNPLWKERLGMDHTLALGALGDISETALTRNAEIAMEKDGLPNTFVPGRNIIFLTFAAALAARRGIRHIVTGVCETDYSGYPDCRDDTIKAVQVALNLGMDSRYVLHTPLMWIDKAETWALAEELGGAALVSLINQESHTCYLGDRESLHPWGHGCGQCPACDLRRAGWDEYVASKTHA

SEQ ID NO: 35425 - protein, 242 aa, unidentified
  source 1..242: note = Acetobacter persici
  REGION 1..242: note = tr|A0A1U9LC50|A0A1U9LC50_9PROT 7-cyano-7-deazaguanine synthase OS=Acetobacter persici; OX = 1076596 GN=queC PE=3 SV=1
MSTPLRAADEAALVLFSGGQDSATCLAWALTRFGRVETLGFDYGQRHTVELECRETLREGLRAQNPLWKERLGMDHTLALGALGDISETALTRNAEIAMEKDGLPNTFVPGRNIIFLTFAAALAARRGIRHIVTGVCETDYSGYPDCRDDTIKAVQVALNLGMDSRYVLHTPLMWIDKAETWALAEELGGAALVSLINQESHTCYLGDRESKHPWGHGCGQCPACDLRRAGWDEYVVSKTHA

SEQ ID NO: 35426 - protein, 246 aa, Acetobacter pomorum
  REGION 1..246: note = tr|A0A2G4RAU7|A0A2G4RAU7_9PROT 7-cyano-7-deazaguanine synthase OS=Acetobacter pomorum; OX = 65959 GN=queC PE=3 SV=1
MPLPARDKQESALVLFSGGQDSATCLAWALERYGRVETLGFDYGQRHAVELECRASIRQGLAEQNPVWAQRLGPDHTLPLHALGEVSETSLTRDAEISMAENGLPNTFVPGRNLIFLTFAAALAARRGIKHIVTGVCETDYSGYPDCRDDTIKALQVALNLGMESRYVLHTPLMWLDKAETWELAEELGGQALVELINQKSHTCYLGERGTLHAWGHGCGTCPACQLRKSGWDAYIAHKKGTQTHA

SEQ ID NO: 35427 - protein, 262 aa, Acetobacter pomorum
  REGION 1..262: note = tr|F1YQL8|F1YQL8_9PROT 7-cyano-7-deazaguanine synthase OS=Acetobacter pomorum DM001 OX=945681 GN=queC; PE = 3 SV=1
MGAFAPDPQAYRNTLIMPLPARDKQESALVLFSGGQDSATCLAWALERYGRVETLGFDYGQRHAVELECRASIRQGLVNQNPTWASRLGDDHTLPLHALGEVSETSLTRDAEISMAENGLPNTFVPGRNLIFLTFAAALAARRGIKHIVTGVCETDYSGYPDCRDDTIKALQVALNLGMESRYVLHTPLMWLDKAETWELAEELGGHPLVELINKESHTCYLGERGILHAWGHGCGTCPACQLRKSGWDDYVAHKKGTQTHA

SEQ ID NO: 35428 - protein, 242 aa, Acetobacter senegalensis
  REGION 1..242: note = tr|A0A252EKC3|A0A252EKC3_9PROT 7-cyano-7-deazaguanine synthase OS=Acetobacter senegalensis OX=446692 GN=queC PE=3 SV=1
MAFPLNAQKESALVLFSGGQDSATCLAWALARFGRVETMGFDYGQRHAVELECREALREGMRAQNPAWAERLGMDHTLALGALGDISETALTRDAEIAMAEGGLPNTFVPGRNIIFLTFAAALAARRGIRHIVTGVCETDYSGYPDCRDDTIKAVQVALNLGMDARYVLHTPLMWINKAETWKLAEELGGDDLVTLINRESHTCYLGERTAFHAWGHGCGKCPACDLRRAGWEDYEAEKAHA

SEQ ID NO: 35429 - protein, 242 aa, Acetobacter senegalensis
  REGION 1..242: note = tr|A0A0U5EYR1|A0A0U5EYR1_9PROT 7-cyano-7-deazaguanine synthase OS=Acetobacter senegalensis OX=446692 GN=exsB PE=3 SV=1
MAFPLNAQKESALVLFSGGQDSATCLAWALARFSRVETMGFDYGQRHAVELECREALREGMRAQNPVWAERLGMDHTLALGALGDISETALTRDAEIAMAEGGLPNTFVPGRNIIFLTFAAALAARRGIRHIVTGVCETDYSGYPDCRDDTIKAVQVALNLGMDARYVLHTPLMWINKAETWKLAEELGGDDLVTLINRESHTCYLGERTALHAWGHGCGKCPACDLRRAGWEDYEAEKAHA

SEQ ID NO: 35430 - protein, 234 aa, Acetobacter sp.
  REGION 1..234: note = tr|A0A252BXE2|A0A252BXE2_9PROT 7-cyano-7-deazaguanine synthase OS=Acetobacter sp. DsW_063; OX = 1514894 GN=queC PE=3 SV=1
MVVFSGGQDSATCLAWALDRFERVETLGFDYGQRHVVELACRDALRDGMGALDPVWKARLGEDHTLSLDALGAVSDTALTRETEITMSESGLPSTFVPGRNLIFLTFAAALAYRRGLRHIVTGVCETDYSGYPDCRDDTIKSLQATLNLGMETRFVLHTPLMWIDKAQTWDLARSLGGDALVGLINRDSHSCYLGQRGELHPWGYGCGECPACKLRRTGWEQYQTLRAESVGNV

SEQ ID NO: 35431 - protein, 242 aa, Acetobacter sp.
  REGION 1..242: note = tr|A0A252B605|A0A252B605_9PROT 7-cyano-7-deazaguanine synthase OS=Acetobacter sp. DsW_54; OX = 1670660 GN=queC PE=3 SV=1
MPLSSKEQTESALVLFSGGQDSATCLAWALARFKHVETVGFDYGQRHAIELECRQSIREGLAALNPQWKERLGPDHTLPLHALNDISDTALTRDAEIAMTQNGLPNTFVPGRNLIFLTFSAALAARRSMRHIVTGVCETDYSGYPDCRDDTIKALQVALNLGMDSRYVLHTPLMWLDKAETWTLADELGGEPLVTLINHESHTCYMGDRTVRHAWGYGCGTCPACQLRRAGWDAYIAEDQHA

SEQ ID NO: 35432 - protein, 242 aa, Acetobacter syzygii
  REGION 1..242: note = tr|A0A270BW61|A0A270BW61_9PROT 7-cyano-7-deazaguanine synthase OS=Acetobacter syzygii; OX = 146476 GN=queC PE=3 SV=1
MPLSSKEQTESALVLFSGGQDSATCLAWALSRFGHVETVGFDYGQRHAIELECRQSIRDGLSALNPAWKKRLGPDHTLPLHALNDISDTALTRNAEIAMTQSGLPNTFVPGRNLIFLTFSAALAARRSIRHIVTGVCETDYSGYPDCRDDTIKALQVALNLGMDSRYVLHTPLMWLDKAETWILAEELGGAPLVTLINHESHTCYMGERNQRHPWGYGCGTCPACQLRRAGWEAYKAEDQHA

SEQ ID NO: 35433 - protein, 242 aa, Acetobacter tropicalis
  REGION 1..242: note = tr|A0A252A9K4|A0A252A9K4_9PROT 7-cyano-7-deazaguanine synthase OS=Acetobacter tropicalis; OX = 104102 GN=queC PE=3 SV=1
MPFPANAQKESALVLFSGGQDSATCLAWALAHFGRVETIGFDYGQRHAVELDCREALREGMRHQNPLWAERLGMDHTLALGALGDISETALTRDAEIAMAEGGLPNTFVPGRNIIFLTFAAALAARRGIRHIVTGVCETDYSGYPDCRDDTIKAVQVALNLGMDARYVLHTPLMWINKAETWNLAEELGGHDLVTLINRESHTCYLGERTALHSWGHGCGKCPACELRRTGWEEYEAEKAHA

SEQ ID NO: 35434 - protein, 242 aa, Acetobacter tropicalis
  REGION 1..242: note = tr|A0A094YJ14|A0A094YJ14_9PROT 7-cyano-7-deazaguanine synthase OS=Acetobacter tropicalis; OX = 104102 GN=queC PE=3 SV=1
MPFPANAQKESALVLFSGGQDSATCLAWALAHFGRVETMGFDYGQRHAVELDCREALREGMRHQNPLWAERLGMDHTLALGALGDISETALTRDAEIAMAEGGLPNTFVPGRNIIFLTFAAALAARRGIRHIVTGVCETDYSGYPDCRDDTIKAVQVALNLGMDARYVLHTPLMWINKAETWNLAEELGGHDLVTLINRESHTCYLGERTALHSWGHGCGKCPACELRRTGWEEYEAEKAHA

SEQ ID NO: 35435 - protein, 198 aa, unidentified
  source 1..198: note = Acetobacteraceae bacterium
  REGION 1..198: note = tr|A0A327LV08|A0A327LV08_9PROT 7-cyano-7-deazaguanine synthase OS=Acetobacteraceae bacterium DB1506 OX=2230885 GN=DOO78_25580 PE=3 SV=1
MSTALLLSGGMDSVAIAWWRRPEIAVTIDYGQRAAAAEVRAAAAVCAELGIEHLVQRVDLAALGSGDMAGRPRLAEAPVPEWWPFRNQMLVTLAAMAVIPRGARRLLIGCLATDGAHADGRAAFVEAMDGLLAMQEGGMRLEAPAIGLTAVELIRASGVPPETLAWAHSCHVAEHACGMCRGCQKHYETLEALGHAPY

SEQ ID NO: 35436 - protein, 234 aa, unidentified
  source 1..234: note = Acetobacteraceae bacterium
  REGION 1..234: note = tr|A0A327M815|A0A327M815_9PROT 7-cyano-7-deazaguanine synthase OS=Acetobacteraceae bacterium DB1506 OX=2230885 GN=queC PE=3 SV=1
MREDAALVLFSGGQDSATCLAWALDRFAHVETIGFDYGQRHHVEMLVRGGFRARLRRENPGWAPRLGPDHVLSLDALRAVSDTALTRETEIAMQADGLPNTFVPGRNLLFVTFAAALAYRRGLKHLVAGMCETDYSGYPDCRDDTLKALQVAINLGMQTRFVLHTPLMWRDKAATWALAERLGGTPLVEAIREDTHSCYLGNRQQRHVWGYGCGTCPACELRRHGWEAWRAEHV

SEQ ID NO: 35437 - protein, 233 aa, unidentified
  source 1..233: note = Acetobacteroides hydrogenigenes
  REGION 1..233: note = tr|A0A4R2ECQ1|A0A4R2ECQ1_9BACT 7-cyano-7-deazaguanine synthase OS=Acetobacteroides hydrogenigenes OX=979970 GN=queC PE=3 SV=1
MTALEMYEKSVTGKKALVIFSGGQDSTTCLLWALKRFDEVRAISYRYGQRHDVELDLAADICAQLGVVQTVVDLSAQFAELNESALLTATEDVNEETSRGLPASFVPNRNLIFLVYAHTFAQKIGFDTLVTGVCQTDYSGYPDCRYDFVQAAKSTMNMASEVNIEVETPIMWLNKAETFMLADLCGGIDIIVGKTLTCYNAELTMNRYGFGCGKCNACLLREKGYDEYVAMKR

SEQ ID NO: 35438 - protein, 223 aa, Acetohalobium arabaticum
  REGION 1..223: note = tr|D9QQY0|D9QQY0_ACEAZ 7-cyano-7-deazaguanine synthase OS=Acetohalobium arabaticum (strain ATCC 49924 / DSM 5501 / Z-7288) OX=574087 GN=queC PE=3 SV=1
MKKAVVLFSGGLDSTTALYLAKSKGYQVYALSFKYGQSHSRELEAAKRIADQVGVAEHVVVETSLSAWGGSALTDQEMDIPQGEKEREEIPTTYVPARNMIFLSYAASYAEAVGAHDIFIGVSEVDYSGYVDCRQEFIDAMEEAINQGTVCGAEEDNPIKIQAPFINLTKAEEIELGMELGVDYSLTWSCYRGEELACGNCDSCMLRLKAFEEAGYDDPIEYK

SEQ ID NO: 35439 - protein, 272 aa, unidentified
  source 1..272: note = Acetomicrobium mobile
  REGION 1..272: note = tr|I4BZH3|I4BZH3_ACEMN TIGR00268 family protein; OS = Acetomicrobium mobile (strain ATCC BAA-54 / DSM 13181 / JCM 12221 / NGA) OX=891968 GN=Anamo_2098 PE=4 SV=1
MSKWVCLLDYISNFSNTVVLLSGGTDSSFLTYACTKAKTNVIAVTFSSMLVSKEEVDAASKVARAFGVPHHIIDSDDLNVTEIRQNHPRRCYFCRKHRDELVKSWLKNLEPEKFVVMDGVTASDVGEYRPGLEAAEEDGVLHPLKEVGLEKWEIRRLAQEFGLPFWDKPSSPCLATRFPYLTTLDEDEIARIAEAESCLMSMGLSNVRVRSYHSGVAVVEVAPDDMEKAWALKDNIKNALFSVGFSVVALDLDGHKSGKMDLLMGGVRHDSV

SEQ ID NO: 35440 - protein, 221 aa, Acetonema longum
  REGION 1..221: note = tr|F7NNG9|F7NNG9_9FIRM 7-cyano-7-deazaguanine synthase OS=Acetonema longum DSM 6540 OX=1009370 GN=queC; PE = 3 SV=1
MANTKHEGAMVVFSGGQDSTTCLFWAMERFQPVTAITFNYNQRHKAEIECAQEICRDLGVEQTILDMALLNQLTANALTRSEIEVKAGAGGTLPSTFVDGRNLLFLSFAAIAAKQKGLRHIITGVCETDFSGYPDCRDMFVKSLNVTLNLAMDYQFVLHTPLMWINKAQTWAMADQLGRLEYVRKNTLTCYNGIMGDGCGECPACQLRNKGLVQYLEQKGK

SEQ ID NO: 35441 - protein, 223 aa, Achromatium sp.
  REGION 1..223: note = tr|A0A0M1J3K5|A0A0M1J3K5_9GAMM 7-cyano-7-deazaguanine synthase OS=Achromatium sp. WMS2; OX = 1604835 GN=queC PE=3 SV=1
MQRAVVLLSGGLDSATTLAMAINAGYVCYALSIDYGQRQRAELDAATRIAIMLQVVEHRIIHLDLGAMGGSALTDPDVAVPTVPSVGIPVTYVPARNTVLLALALGWAEVLKIKHIFVGVNAVDYSGYPDCRPDFIRAFENLANVATKAGVEGTRFEIHAPLLHLSKGEIIHHGVSLGLDYSLTVSCYQADPQGRACGCCDACRLRRQGFIDARIVDPTCYVE

SEQ ID NO: 35442 - protein, 103 aa, Achromatium sp.
  REGION 1..103: note = tr|A0A0M1J3R1|A0A0M1J3R1_9GAMM 7-cyano-7-deazaguanine synthase (Fragment) OS=Achromatium sp. WMS1 OX=1604834 GN=TI03_05805 PE=3 SV=1
NAVDYSGYPDCRPDFIRAFENLANVATKAGVEGTRFEIHAPLLHLSKGEIIHHGVSLGLDYSLTVSCYQADPQGRACGCCDACRLRRQGFIDARIVDPTCYVE

SEQ ID NO: 35443 - protein, 421 aa, unidentified
  source 1..421: note = Achromobacter agilis
  REGION 1..421: note = tr|A0A446CDA5|A0A446CDA5_9BURK 7-cyano-7-deazaguanine synthase OS=Achromobacter agilis; OX = 1353888 GN=queC_1 PE=4 SV=1
MTKVLCTSVSHLPATLADGERAFTLFKSAKRAGVGTIAQGWRGSLKRKGFAPSAQAWDFVQFCLSVCAADLCCLRNTSADGWTRTIELTVGLHEPLRWAPWKAHVEQMLKVLTGDYWTLHFVEGGVAPPNGRLQPLAHDCISLLSGGLDSLVGGIDLVTSGRQPAFVSQLAHEDSERQRRYATLLGGGATHMQWSHGINFTGRREPSTRGRSLAFYGFAVMAASKIAGQPVQVFVPENGFICVNPPLVPGRVSSLSTRTTHPLFMAMLQELLEVLDIDVRLELPYRFKTKGEMLRECANQTLLDTVASDSTSCGRYRTYNRTHCGRCVPCMIRRAAFLAWGHGRDRTTYTFPSLAGSDKSSGPDDPMAAALAVLSVREQGLDRFLGATLAFAAPGERGSYRGVLQAGLGELEALLQADGLL

SEQ ID NO: 35444 - protein, 239 aa, unidentified
  source 1..239: note = Achromobacter agilis
  REGION 1..239: note = tr|A0A446CX10|A0A446CX10_9BURK 7-cyano-7-deazaguanine synthase OS=Achromobacter agilis; OX = 1353888 GN=queC_2 PE=3 SV=1
MQNHQRRALVLFSGGQDSTTCLAWALDRYAHVETVAFDYGQRHHIELSARLNVLRDIRENFPDWAPRLGEDHLLDLKVLGQVGDTAMTSDRAIEMQANGLPNTFVPGRNLLFLTLAAALGYRRQLDVLVGGMCETDFSGYPDCRDDTIKAQQVALGLGLGSRVTIETPLMWIDKSETWALAHRLGGDALVETIVEESHTCYLGERGARHDWGYGCGECPACKLRKIGWEKWVIASAAQE

SEQ ID NO: 35445 - protein, 242 aa, unidentified
  source 1..242: note = Achromobacter aloeverae
  REGION 1..242: note = tr|A0A4Q1HKE6|A0A4Q1HKE6_9BURK 7-cyano-7-deazaguanine synthase OS=Achromobacter aloeverae; OX = 1750518 GN=queC PE=3 SV=1
MLNHQRRALVLFSGGQDSTTCLAWALDRYAHVETVAFDYGQRHRIELDARLRVLEEFRARLPGPAARLGEDHLLDLSVLGQVADTALTSDRAIEMQANGLPNTFVPGRNLLFLTLAAALGYRRELDVLVGGMCETDFSGYPDCRDDTIKAQQVALGLGLGSRLTIETPLMWLDKAQTWELAQRLGGDDLVDIIVEQSHTCYLGERGARHGWGYGCGKCPACVLRKAGWERWQAGLAAADKSA

SEQ ID NO: 35446 - protein, 239 aa, unidentified
  source 1..239: note = Achromobacter arsenitoxydans
  REGION 1..239: note = tr|H0FFQ7|H0FFQ7_9BURK 7-cyano-7-deazaguanine synthase OS=Achromobacter arsenitoxydans SY8 OX=477184; GN = queC PE=3 SV=1
MQNHQRRALVLFSGGQDSTTCLAWALDRYAHVETVAFDYGQRHHIELSARLNVLREIRANFPDWAPRLGEDHLLDLKVLGQVGDTAMTSDRAIEMQANGLPNTFVPGRNLLFLTLAAALGYRRQLDVLVGGMCETDFSGYPDCRDDTIKAQQVALGLGLGSRVTIETPLMWIDKSETWALAYQLGGDALVETIVEESHTCYLGERGARHDWGYGCGECPACKLRKIGWEKWVVASAAEG

SEQ ID NO: 35447 - protein, 239 aa, Achromobacter denitrificans
  REGION 1..239: note = tr|A0A427WVG0|A0A427WVG0_ACHDE 7-cyano-7-deazaguanine synthase OS=Achromobacter denitrificans OX=32002 GN=queC PE=3 SV=1
MQNHQRRALVLFSGGQDSTTCLAWALDRYAHVETVAFDYGQRHHIELSARLNVLRDIRANFPDWAPRLGEDHLLDLKVLGQVGDTAMTSDRAIEMQANGLPNTFVPGRNLLFLTLAAALGYRRQLDVLVGGMCETDFSGYPDCRDDTIKAQQVALGLGLGARVTIETPLMWIDKSETWALAYQLGGDALVETIVEESHTCYLGERGARHDWGYGCGECPACKLRKIGWEKWVVASAAEG

SEQ ID NO: 35448 - protein, 239 aa, Achromobacter insolitus
  REGION 1..239: note = tr|A0A167BKM0|A0A167BKM0_9BURK 7-cyano-7-deazaguanine synthase OS=Achromobacter insolitus; OX = 217204 GN=queC PE=3 SV=1
MQNHQRRALVLFSGGQDSTTCLAWALDRYAHVETVAFDYGQRHHIELSARLNVLREIRGNFPDWAPRLGEDHLLDLKVLGQVGDTAMTSDRAIEMQANGLPNTFVPGRNLLFLTLAAALGYRRQLDVLVGGMCETDFSGYPDCRDDTIKAQQVALGLGLGSRVTIETPLMWIDKSETWALAHQLGGDALVETIVEESHTCYLGERGARHDWGYGCGECPACKLRKIGWEKWVVASAAEG

SEQ ID NO: 35449 - protein, 237 aa, unidentified
  source 1..237: note = Achromobacter insuavis
  REGION 1..237: note = tr|F7SY36|F7SY36_9BURK 7-cyano-7-deazaguanine synthase OS=Achromobacter insuavis AXX-A OX=1003200; GN = queC PE=3 SV=1
MLNHQRRALVLFSGGQDSTTCLAWALDRYAHVETVAFDYGQRHRIELDARLNVLRDIRARFPQWAPRLGEDHLLDLKVLGQVGDTAMTSDRAIEMQANGLPNTFVPGRNLLFLTLAAALGYRRQLDVLVGGMCETDFSGYPDCRDDTIKAQQVALGLGLGSRVTIETPLMWIDKSETWALAKQLGGDALVDTIVEESHTCYLGERGARHAWGYGCGECPACKLRRAGWDKWQAQGAV

SEQ ID NO: 35450 - protein, 236 aa, Achromobacter marplatensis
  REGION 1..236: note = tr|J4J6A4|J4J6A4_9BURK 7-cyano-7-deazaguanine synthase OS=Achromobacter marplatensis OX=470868 GN=queC; PE = 3 SV=1
MQNHQRRALVLFSGGQDSTTCLAWALDRYAHVETVAFDYGQRHRIELDARLNVLRDIRARFPQWAARLGEDHLLDLKVLGQVGDTAMTSDRAIEMQANGLPNTFVPGRNLLFLTLAATLGYRRQLDVLVGGMCETDFSGYPDCRDDTIKAQQVALGLGLGSRVTIETPLMWIDKSETWALAQTLGGDALVETIVEESHTCYLGERGARHGWGYGCGTCPACKLRRAGWEKWTAARA

SEQ ID NO: 35451 - protein, 361 aa, Achromobacter marplatensis
  REGION 1..361: note = tr|J4J8X6|J4J8X6_9BURK N-acetyl sugar amidotransferase OS=Achromobacter marplatensis OX=470868; GN = QWC_04958 PE=4 SV=1
MDTSDPDIVFNDEGCNHCTRYFSRVANEVHRGAQGESMLAQVVERIRAEGKGKDYDCVTGVSGGVDSTYVIYKLKELGLRPLAVHFDNGWNSELAVNNIKNALDKLGIDLHTYVVDWEEFKDLQMSFLRASVPNCEIPTDHAITATLLNTAKRVGTPYVINGSNVVTEGILPISWVYYSHDLKHIRAIHSRFGKTRLKTFPQIGLPAFTLRILTGKYRMVNLLNYLDYDKAAAMHVMQDELGWQYYGGKHYESIYTRWYQGYYLPTKFGFDKRRAHLSALVCAGQITRQQGLEEMEQDPYASNDLASDTEFVLKKFGITRAELDAIIAAPNHKHTDYPNQSQFIEGLSGLRTYIRRRAKSI

SEQ ID NO: 35452 - protein, 239 aa, Achromobacter piechaudii
  REGION 1..239: note = tr|A0A0L6IDU0|A0A0L6IDU0_9BURK 7-cyano-7-deazaguanine synthase OS=Achromobacter piechaudii OX=72556 GN=queC PE=3 SV=1
MQNHQRRALVLFSGGQDSTTCLAWALDRYAHVETVAFDYGQRHHIELSARLNVLRDIRANFPDWAPRLGEDHLLDLKVLGQVGDTAMTSDRAIEMQANGLPNTFVPGRNLLFLTLAAALGYRRQLDVLVGGMCETDFSGYPDCRDDTIKAQQVALGLGLGSRVTIETPLMWIDKSETWALAYQLGGDALVETIVEESHTCYLGERGARHDWGYGCGECPACKLRKIGWEKWVVASAAEG

SEQ ID NO: 35453 - protein, 239 aa, Achromobacter piechaudii; identical to SEQ ID NO: 35452
  REGION 1..239: note = tr|D4X3V7|D4X3V7_9BURK 7-cyano-7-deazaguanine synthase OS=Achromobacter piechaudii ATCC 43553 OX=742159; GN = exsB PE=3 SV=1

SEQ ID NO: 35454 - protein, 239 aa, unidentified
  source 1..239: note = Achromobacter pulmonis
  REGION 1..239: note = tr|A0A2N8KJ88|A0A2N8KJ88_9BURK 7-cyano-7-deazaguanine synthase OS=Achromobacter pulmonis; OX = 1389932 GN=queC PE=3 SV=1
MQNHQRRALVLFSGGQDSTTCLAWALDRYAHVETVAFDYGQRHHIELSARLNVLREIRENFPDWAPRLGEDHLLDLKVLGQVGDTAMTSDRAIEMQANGLPNTFVPGRNLLFLTLAAALGYRRQLDVLVGGMCETDFSGYPDCRDDTIKAQQVALGLGLGSRVTIETPLMWIDKSETWALAHQLGGDALVEIVVEQSHTCYLGERGARHDWGYGCGDCPACKLRKIGWEKWVVASAAEG

SEQ ID NO: 35455 - protein, 237 aa, Achromobacter ruhlandii
  REGION 1..237: note = tr|A0A1D8IGK6|A0A1D8IGK6_9BURK 7-cyano-7-deazaguanine synthase OS=Achromobacter ruhlandii; OX = 72557 GN=queC PE=3 SV=1
MLNHQRRALVLFSGGQDSTTCLAWALDRYAHVETVAFDYGQRHRIELDARLNVLREIRARFPQWAPRLGEDHLLDLKVLGQVGDTAMTSDRAIEMQENGLPNTFVPGRNLLFLTLAAALGYRRQLDVLVGGMCETDFSGYPDCRDDTIKAQQVALGLGLGSRVTIETPLMWIDKSETWALAKQLGGDALVETIVEESHTCYLGERGARHAWGYGCGECPACKLRRAGWDKWQAQGAA

SEQ ID NO: 35456 - protein, 237 aa, Achromobacter ruhlandii
  REGION 1..237: note = tr|A0A2M9H1T4|A0A2M9H1T4_9BURK 7-cyano-7-deazaguanine synthase OS=Achromobacter ruhlandii; OX = 72557 GN=queC PE=3 SV=1
MLNHQRRALVLFSGGQDSTTCLAWALDRYAHVETVAFDYGQRHRIELDARLNVLREIRARFPQWAPRLGEDHLLDLKVLGQVGDTAMTSDRTIEMQENGLPNTFVPGRNLLFLTLAAALGYRRQLDVLVGGMCETDFSGYPDCRDDTIKAQQVALGLGLGSRVTIETPLMWIDKSETWALAKQLGGDALVETIVEESHTCYLGERGARHAWGYGCGECPACKLRRAGWDKWQAQGAA

SEQ ID NO: 35457 - protein, 231 aa, Achromobacter sp.
  REGION 1..231: note = tr|A0A0M7MQL5|A0A0M7MQL5_9BURK 7-cyano-7-deazaguanine synthase OS=Achromobacter sp. ATCC35328 OX=1806490 GN=queC PE=3 SV=1
MKRAVVVFSGGQDSTTCLVQALQQYDEVHCVTFDYGQRHRAEIDVARELALKLGARAHKVLDVTLLNELAVSSLTRDSIPVPDYEPEADGIPNTFVPGRNILFLTLAAIYAYQVKAEAVITGVCETDFSGYPDCRDEFVKALNHAVSLGMAKDIRFETPLMWIDKAETWALADYYGKLDLVRNETLTCYNGFKGDGCGHCAACNLRANGLNHYLADKPTVMAAMKQKTGLR

SEQ ID NO: 35458 - protein, 239 aa, Achromobacter sp.
  REGION 1..239: note = tr|A0A1N7PYC1|A0A1N7PYC1_9BURK 7-cyano-7-deazaguanine synthase OS=Achromobacter sp. MFA1 R4 OX=1881016 GN=queC PE=3 SV=1
MQNHQRRALVLFSGGQDSTTCLAWALDRYAHVETVAFDYGQRHHIELSARLNVLRDIRANFPDWAPRLGEDHLLDLKVLGQVGDTAMTSDRAIEMQANGLPNTFVPGRNLLFLTLAAALGYRRQLDVLVGGMCETDFSGYPDCRDDTIKAQQVALGLGLGSRVTIETPLMWIDKSETWALAHALGGDALVETIVEESHTCYLGERGARHDWGYGCGECPACKLRKIGWEKWVVASAAEG

SEQ ID NO: 35459 - protein, 239 aa, Achromobacter spanius
  REGION 1..239: note = tr|A0A448C3H1|A0A448C3H1_9BURK 7-cyano-7-deazaguanine synthase OS=Achromobacter spanius; OX = 217203 GN=queC PE=3 SV=1
MQNHQRRALVLFSGGQDSTTCLAWALDRYAHVETVAFDYGQRHHIELSARLNVLREIRTNFPDWAPRLGEDHLLDLKVLGQVGDTAMTSDRAIEMQANGLPNTFVPGRNLLFLTLAAALGYRRQLDVLVGGMCETDFSGYPDCRDDTIKAQQVALGLGLGSRITIETPLMWIDKSETWALAHQLGGDALVDIVVEDSHTCYLGERGARHDWGYGCGECPACKLRKIGWEKWMVASAAEG

SEQ ID NO: 35460 - protein, 239 aa, Achromobacter spanius
  REGION 1..239: note = tr|A0A3S9Z274|A0A3S9Z274_9BURK 7-cyano-7-deazaguanine synthase OS=Achromobacter spanius; OX = 217203 GN=queC PE=3 SV=1
MQNHQRRALVLFSGGQDSTTCLAWALDRYAHVETVAFDYGQRHHIELSARLNVLREIRANFPDWAPRLGEDHLLDLKVLGQVGDTAMTSDRAIEMQANGLPNTFVPGRNLLFLTLAAALGYRRQLDVLVGGMCETDFSGYPDCRDDTIKAQQVALGLGLGSRITIETPLMWIDKSETWALAHQLGGDALVDIVVEDSHTCYLGERGARHDWGYGCGECPACKLRKIGWEKWVVASAAEG

SEQ ID NO: 35461 - protein, 239 aa, Achromobacter xylosoxidans
  REGION 1..239: note = tr|E3HJK6|E3HJK6_ACHXA 7-cyano-7-deazaguanine synthase OS=Achromobacter xylosoxidans (strain A8); OX = 762376 GN=queC PE=3 SV=1
MQNHQRRALVLFSGGQDSTTCLAWALERYAHVETVAFDYGQRHHIELSARLNVLRDIRNNFPDWAPRLGEDHLLDLKVLGQVGDTAMTSDRAIEMQANGLPNTFVPGRNLLFLTLAAALGYRRQLDVLVGGMCETDFSGYPDCRDDTIKAQQVALGLGLGSRVTIETPLMWIDKSETWALAHQLGGDALVETIVEESHTCYLGERGARHDWGYGCGECPACKLRKIGWEKWVVASAAEG

SEQ ID NO: 35462 - protein, 245 aa, Acidaminobacter hydrogenoformans
  REGION 1..245: note = tr|A0A1G5RZA9|A0A1G5RZA9_9FIRM 7-cyano-7-deazaguanine synthase OS=Acidaminobacter hydrogenoformans DSM 2784 OX=1120920 GN=queC PE=3 SV=1
MRKVFNQQRYAEMKKDGKKMKALVLLSGGVDSTTCLGLAVDRHGSENVTALSIAYGQKHLKEIEAAQKITEYYKVEWTHLDLKKIFEYSDSTLMAHSKNEIPKESYAKQLEQLDGKPVSTYVPFRNGLFLSCAASIALSKGCSLIYYGPHRDDAAGNAYPDCSDAFNEAMNQAIFIGSGEQLKVEAPFIAMTKAQVVKTGLDLNVPYALTWSCYEGTDKPCGQCGTCLDRIAAFEKNGVRDPLMD

SEQ ID NO: 35463 - protein, 232 aa, Acidaminococcus fermentans
  REGION 1..232: note = tr|A0A1I5GQU4|A0A1I5GQU4_ACIFE 7-cyano-7-deazaguanine synthase OS=Acidaminococcus fermentans OX=905 GN=queC PE=3 SV=1
MNKKALVLSSGGVDSTTCVSVAVEEFGKENVSTVSIFYGQKHRKELECARKVAEYYGLSHYELDLSKIFQYSNCSLLDHSTEEIVHESYEQQIAENGEGKVSTYVPFRNGLMLSAVASLAMSIYEKDDVSIFIGAHADDAAGNAYADCSEAFIGAMGKAISLGTYNQCHIVAPFASCSKAGVVKRGLELHTPYELTWSCYEGGDKPCGTCGTCIDRARAFAANGVKDPALED

SEQ ID NO: 35464 - protein, 275 aa, Acidaminococcus fermentans
  REGION 1..275: note = tr|D2RJX1|D2RJX1_ACIFV PP-loop domain protein; OS = Acidaminococcus fermentans (strain ATCC 25085 / DSM 20731 / VR4) OX=591001 GN=Acfer_1002 PE=4 SV=1
MQNSEDTAKLKQLQAILRDLGSVAVAFSGGVDSTFLLKVAHDTLGDKVLAVTARSCSFPERELKEAKAFCEKEGIRHLVVDSEELSIPGFSHNPTNRCYLCKHELFEKILEVAKENHLAAVVEGSNLDDEGDYRPGLQAIAELKIASPLRRAGLYKKEIRALSKELGLPTWNKQSFACLSSRFVYGEEITPRRLGMVDKAEQLLLDMGFHQLRVRIHGGNLARIEVMPEELRKVLDHRLEITEKLKGYGFAYVTLDLLGYRTGSMNETLSPEKKA

SEQ ID NO: 35465 - protein, 233 aa, Acidaminococcus intestini
  REGION 1..233: note = tr|C0WAE7|C0WAE7_9FIRM 7-cyano-7-deazaguanine synthase OS=Acidaminococcus intestini OX=187327 GN=queC; PE = 3 SV=1
MSKKALVLSSGGVDSTTCVSVAVHELGRENVATVSIFYGQKHRKELDAAQKVADFYHVPHYELDLSKIFQYSNCSLLSHSTEEIIHESYEDQIAQNGEGKVSTYVPFRNGLMLSAVASLAMSLFEKDDVDIYLGAHADDAAGNAYADCSEAFTDAMGKAISIGTYEQCHLVAPFVEVNKAGIVKKGLELGTPYELTWSCYEGGDRPCGTCGTCIDRARAFAANGVPDPALEEK

SEQ ID NO: 35466 - protein, 233 aa, Acidaminococcus intestini; identical to SEQ ID NO: 35465
  REGION 1..233: note = tr|G4Q905|G4Q905_ACIIR 7-cyano-7-deazaguanine synthase OS=Acidaminococcus intestini (strain RyC-MR95); OX = 568816 GN=queC PE=3 SV=1

SEQ ID NO: 35467 - protein, 232 aa, Acidaminococcus sp.
  REGION 1..232: note = tr|R7LU44|R7LU44_9FIRM 7-cyano-7-deazaguanine synthase OS=Acidaminococcus sp. CAG:542 OX=1262687 GN=queC; PE = 3 SV=1
MNKKALVLSSGGVDSTTCVSVAVEEFGKENVSTVSIFYGQKHRKELECARKVADYYGLPHYELDLSKIFQYSNCSLLDHSTEKIVHKSYEQQIAENGEEKVSTYVPFRNGLMLSAVASLAMSIYEKDDVSIFIGAHADDAAGNAYADCSEAFLDAMGRAISLGTYSQCHIVAPFASCSKAGVVKRGLELYTPYELTWSCYEGGDKPCGTCGTCIDRARAFAANGVKDPALED

SEQ ID NO: 35468 - protein, 249 aa, Acidaminococcus sp.
  REGION 1..249: note = tr|A0A415EKY1|A0A415EKY1_9FIRM ATP-dependent sacrificial sulfur transferase LarE OS=Acidaminococcus sp. AM05-11 OX=2291997 GN=larE PE=4 SV=1
MELAEFFKDHPKVALAFSGGVDSSYLLYAALQNGADVHAYYVKSAFQPQFELEDAQKLAKQVGAKLTIMQANVLANETVVANPKNRCYYCKQVIFTGIGKQAAQDGYTTLLDGTNASDDAADRPGMKALQELSVLSPLRLCGLTKTEIRKRSKAAGLFTWDKPSYACLATRIPTGETITAEKLARTEQAENYLFSLGFTDFRVRSLGNTAKLQLPADQLEKLLAHRLAIVKQLKTLYTDVLLDLEARHE

SEQ ID NO: 35469 - protein, 423 aa, unidentified
  source 1..423: note = Acidibacillus ferrooxidans
  REGION 1..423: note = tr|A0A162SLX6|A0A162SLX6_9BACL Uncharacterized protein OS=Acidibacillus ferrooxidans OX=1765683; GN = AYJ22_03385 PE=4 SV=1
MPENNLFAADLSNDHNDLEIVLYGRRSELTQASVGAAIQHIVQRNRLNPAPRAWDLLSIVLSVITADMHVLRSESPDGWTREIELCVSVSDPEFWMSQQKLLEEQLQFLTTDVWKLSFVKCSLPLLPASQIFKPDQDCIVLLSGGLDSLIGAIDLVALDKHPYAVSQVAQGDTNQQRLFASRIGGGLAHLQLNHNAKCRGPHERSQRPRSLAFLAYGVLLATALKRYEEDANVNLYICENGFISINPPLTVSRLGSLSTRTTHPYFLQLFQELLSNAELRVTIANPYQFITKGEMLLGCKDQSLLHQHAHESTSCGRYARNGYKHCGRCVPCLIRRAAFHKWDIDDHTDYVYEDLSIPDRNHAEYDDVRAAAMAVQSVQSVGLENWAGPALSSAILHQADPYKSMVQRGLDELAAFLKTVGVA

SEQ ID NO: 35470 - protein, 240 aa, unidentified
  source 1..240: note = Acidibacillus ferrooxidans
  REGION 1..240: note = tr|A0A162TX40|A0A162TX40_9BACL 7-cyano-7-deazaguanine synthase OS=Acidibacillus ferrooxidans OX=1765683 GN=queC PE=3 SV=1
MTTGRDKEQRREGQAGAVVILSGGLDSATCLGIACAEGHHVTALSFDYGQRHHRELAAAARLAAHYGVAHHIYELPFFRQLGGSALTDDAISVPTEGVDKAHIPSTYVPGRNLIFLSIATALAEVTRSEWIYIGVNALDYSGYPDCRPEFMDAFANVATVATRAGVEGMHIEVKTPLLHLTKGEIVARGTALLVPYEMTTSCYVGEEEACGVCDSCRLRLAGFAEAGRVDPIRYQLRAKN

SEQ ID NO: 35471 - protein, 330 aa, unidentified
  source 1..330: note = Acidibacillus sulfuroxidans
  REGION 1..330: note = tr|A0A2U3CVX4|A0A2U3CVX4_9BACL Glutamine amidotransferase type-2 domain-containing protein (Fragment) OS=Acidibacillus sulfuroxidans OX=1765684; GN = BM613_13970 PE=4 S V=1
MCSIFGVITNGQPESLIIRNDIEDLIKASINRGRDGLGVRFTHGDHSMHPQRIVSVGKKTSLERLVKVGRIVSHAGAIGSFTMIGNARAEPTTEWVVDKNEWDQQPYHMDGWTIVHNGTIANDKDLRTYALQTKIDSAAIVEQLAECTLSADETCLSDSDYLYNVFHEVIRKLKGSYAILATHDSLPGYVFTACNYRPIWIGKSDTGMYFASQEDMLPTRAIKQMLKPYSCNVVTSTDVCNEVDLIPNKQTQRALVVASGGMDSTVAAQMCKSNGLDVTLINFQYGCRAETNELKAIRKIAEVMEVPLVEFPIPIYDKKDSPLFDQDAAI

SEQ ID NO: 35472 - protein, 232 aa, unidentified
  source 1..232: note = Acidibacillus sulfuroxidans
  REGION 1..232: note = tr|A0A2U3D6S5|A0A2U3D6S5_9BACL 7-cyano-7-deazaguanine synthase OS=Acidibacillus sulfuroxidans OX=1765684 GN=queC PE=3 SV=1
MKQYEKAVVILSGGLDSTTCLGVAVQEGEEVYALTFDYGQRHRIEIESAKKVAEYYRVKEHQIATLPFLRAIGGSALTDKEIAVPHSGVIANEIPVTYVPGRNLIFLSIATAYAEVVGANAIYLGVNALDYSGYPDCRPAFIESFARTATLATKAGAMGATLQIKTPLLYLSKAEIVTLGTKLGVPYELTSSCYEGGSVACGVCDSCRLRRKGFAEAGLTDPIAYSERIDVV

SEQ ID NO: 35473 - protein, 130 aa, Acidiferrobacter sp.
  REGION 1..130: note = tr|A0A2D7VK56|A0A2D7VK56_9GAMM 7-cyano-7-deazaguanine synthase (Fragment); OS = Acidiferrobacter sp. OX=1872107 GN=CL386_02795 PE=3 SV=1
MNRVYLLSGGIDSALVLAEADRDRMRHNFEDSLALTFDYGQPHVAEIHAAEQIASHFGVPWRCVDLRDAFAIAPSGLLVGDDQTASGSVVSLRNGIFLSVAASLGPREIFIGSNKGDWEYYPDCRPEFLG

SEQ ID NO: 35474 - protein, 227 aa, Acidiferrobacter sp.
  REGION 1..227: note = tr|A0A2Z3R2H3|A0A2Z3R2H3_9GAMM 7-cyano-7-deazaguanine synthase OS=Acidiferrobacter sp. SPIII_3 OX=1281578 GN=queC PE=3 SV=1
MSVADDKKAVVLLSGGLDSATTLALAREQGFQCHALSFDYGQRHKGELKAAASVAVAGGAHEHRVATLGVGFIGGSALTDLGLAVPQAPTTGIPVTYVPARNTVFLAVALGWAEVLGARDLFIGVNAVDYSGYPDCRPEYLAAFETLANLATRAGVEGGRFHIRAPLLRLTKAEIIRAGLDLGVDYGLTLSCYAPNDAGRVCGTCDACRLRAKGFAEAGVPDPAIVI

SEQ ID NO: 35475 - protein, 189 aa, Acidiferrobacter thiooxydans
  REGION 1..189: note = tr|A0A1C2G4X6|A0A1C2G4X6_9GAMM 7-cyano-7-deazaguanine synthase OS=Acidiferrobacter thiooxydans OX=163359 GN=A9R16_00200 PE=3 SV=1
MSVLLLSGGIESATLLHERGRAGNLRALFLDYGQRAARAERSAATALCETTGTPLTVLSLRGLGKALAPPGPFSPHVPLNARNLLAVALAANQALALKTHAVLLGVQRDDRGHNEGALPFITALSDTLAALGLALETPYRDLRKSEVVARGRALGIDYTRTYSCLLGRRAPCGRCPQCRARAQALGPDA

SEQ ID NO: 35476 - protein, 189 aa, Acidiferrobacter thiooxydans
  REGION 1..189: note = tr|A0A368HDT3|A0A368HDT3_9GAMM 7-cyano-7-deazaguanine synthase OS=Acidiferrobacter thiooxydans OX=163359 GN=C4900_12400 PE=3 SV=1
MSVLLLSGGIESTTLLHERSGTGDLRALFLDYGQRAARAERSAAIALCETTGTPLTVLSLRGVGKALAPPGPFRPHLPLNARNLLAVALAANQALALKTDAVLLGVQRDDRGHSEGALPFIMALSDTLAALGLTLETPYRDLRKTEVVARGRALGIDYARTYSCLLGRRTPCGHCPQCRARAQALAPGA

SEQ ID NO: 35477 - protein, 226 aa, unidentified
  source 1..226: note = Acidihalobacter ferrooxidans
  REGION 1..226: note = tr|A0A1P8UHU8|A0A1P8UHU8_9GAMM 7-cyano-7-deazaguanine synthase OS=Acidihalobacter ferrooxidans OX=1765967 GN=queC PE=3 SV=1
MKKAVILLSGGLDSATVLAMARAQGYACYALSFDYGQRHNAELRAAQRVATAGHATEHRLVRLDLSAIGGSALTDVTIAVPETAEEGIPVTYVPARNTVFLSVALGWAEVLGARDIFIGVNAVDYSGYPDCRPAFIEAFEQLANLATKVGVQGGRMTIQAPLIALSKAQIIQTGLALGVDYAQTVSCYQADSDGRACGRCDACRLRAQGFAEAGVNDPTPYQGLAG

SEQ ID NO: 35478 - protein, 198 aa, unidentified
  source 1..198: note = Acidihalobacter ferrooxidans
  REGION 1..198: note = tr|A0A1P8UL40|A0A1P8UL40_9GAMM 7-cyano-7-deazaguanine synthase OS=Acidihalobacter ferrooxidans OX=1765967 GN=BW247_06040 PE=3 SV=1
MVLLSGGIDSATALHLEYRRGAVLPLYIDYGQRAAACERAAAEALCADLGLSLDALELGALGTAFRRGHEWQAHVPLPHRNLAVLGLAFSYAADRHARRLCVALNRDDTTAYASAATPFLDAFRRLAATLDDIEIATPLIAWDKAEVIRQGRSLGVNYAHTYSCLLGRSLPCGGCPQCAKRRAGFAEAGHTDPALAGE

SEQ ID NO: 35479 - protein, 215 aa, unidentified
  source 1..215: note = Acidihalobacter prosperus
  REGION 1..215: note = tr|A0A1D8KB09|A0A1D8KB09_9GAMM 7-cyano-7-deazaguanine synthase OS=Acidihalobacter prosperus OX=160660 GN=BJI67_14535 PE=3 SV=1
MKRPIFDDKNRPTLLLLSGGIESGTLLHMLADEGPLIPLFVDYAQRAASRERAAATAQCAVLDLELETLELGSVGETFRRGLSWQPHVPLPQRNLVLLALALSLAEARRATRICLALNREDTADYPSATTGFVHDFAALAGRISGIAVETPLIELDKAAIIRLGVDLGVDYSLTYSCLLGRPAPCGGCPQCLKRHTAFAAAGVTDPATNLPENPP

SEQ ID NO: 35480 - protein, 223 aa, unidentified
  source 1..223: note = Acidihalobacter prosperus
  REGION 1..223: note = tr|A0A1A6C6U1|A0A1A6C6U1_9GAMM 7-cyano-7-deazaguanine synthase OS=Acidihalobacter prosperus OX=160660 GN=queC PE=3 SV=1
MNKAVILLSGGLDSATVLAIARAAGFECYALSFDYGQRHAAELHAAHEVAMRGGAAAHRVIKLDLGAIGGSALTDASIDVPELPGEGIPVTYVPARNTVFLSVALGWAEVLEAQDIFVGVNAVDYSGYPDCRPAFVESFERLANVATKAGVEGRRIHVHAPLIEDTKAEIIRRGMALGVDYAQTVSCYQADDAGRACGRCDACRLRAAGFDDAGVPDPTRYQG

SEQ ID NO: 35481 - protein, 236 aa, unidentified
  source 1..236: note = Acidimicrobiaceae bacterium
  REGION 1..236: note = tr|A0A357ZXN4|A0A357ZXN4_9ACTN 7-cyano-7-deazaguanine synthase OS=Acidimicrobiaceae bacterium OX=2024894 GN=queC PE=3 SV=1
MNKPNAIVLLSGGLDSTTCLAIAKNEGFTPIALSFRYGQRHTGELDCAAAIAHAAGVEHLIADIDLAAFGGSALVDESLEVPKHESVDDLSADSVPITYVPARNTIFLSFATAVAETRGAHDVFIGVNAVDYSGYPDCRPEFIEAFEVMANLATREGVEGGRLRIRTPLIDLTKAEIIQLGLSLGVDYGATMSCYDPAADGGACGHCDACLLRARGFADAAVVDPTRYSNSSTSDL

SEQ ID NO: 35482 - protein, 218 aa, unidentified
  source 1..218: note = Acidimicrobiaceae bacterium
  REGION 1..218: note = tr|A0A2E9JA31|A0A2E9JA31_9ACTN 7-cyano-7-deazaguanine synthase OS=Acidimicrobiaceae bacterium OX=2024894 GN=queC PE=3 SV=1
MPRIVVVYSGGLDSFTLLNHSMDLGHEVFPITFDYGQKHKKEISYAEDFCQDESLALKVVDITEINSLLKGSALTDNIEVPKGHYEDESMKTTVVPNRNMILISMATAYAVTVNAEEVWYGAHGGDHAIYPDCRPEFVNKINEATLVANYSPISVKAPFIDLSKHEILSIGLKLGLDYSKAWTCYEGKELACGVCGSCAERLEAFKINGSEDPLEYSN

SEQ ID NO: 35483 - protein, 228 aa, unidentified
  source 1..228: note = Acidimicrobiales bacterium
  REGION 1..228: note = tr|A0A2W6C5R4|A0A2W6C5R4_9ACTN 7-cyano-7-deazaguanine synthase OS=Acidimicrobiales bacterium OX=2201156 GN=queC PE=3 SV=1
MEGPRVQHVVLASGGLDSTVCLALAQRDGGTAPLALSFDYGQRHAVELERAAAVCARYGAEQLVVSIDARAWGGSALTDPDIEVPAPTGSVSSVPIPTTYVPARNSIFLAVALGVAEARGAEAVYLGVNAVDYSGYPDCRPVFVEAFRRVAEVGQRRGLEGHPVDIRAPLIEASKADIVRLGTELGAPLELTWSCYREGPRPCRGCDACDLRARGFAAAGLADPALAV

SEQ ID NO: 35484 - protein, 237 aa, unidentified
  source 1..237: note = Acidimicrobiales bacterium
  REGION 1..237: note = tr|A0A520XKT6|A0A520XKT6_9ACTN 7-cyano-7-deazaguanine synthase OS=Acidimicrobiales bacterium OX=2201156 GN=queC PE=3 SV=1
MNIKIKALVLFSGGQDSATCLAWALSRFDHVETVGFDYEQRHMVEMQCRMDVLAHIKAEFPQWAPKMGKDHIIDIPALGGISETSLTRDIDIDDTGDGLPNTFVPGRNLIFLNFAAAVAYNRGITQLVAGMCEADFSGYPDCRKETLDAAMKAINLGMDADYSLSTPLMHLSKAGAWKLAEDLGGKALVDLIVQKSHTCYTGERGDLHAWGHGCGACPACELRANGWANYVTGTFNR

SEQ ID NO: 35485 - protein, 1822 aa, unidentified
  source 1..1822: note = Acidimicrobiia bacterium
  REGION 1..1822: note = tr|A0A520XWJ1|A0A520XWJ1_9ACTN Amino acid adenylation domain-containing protein OS=Acidimicrobiia bacterium OX=2080302 GN=EX267_05005 PE=4 SV=1
MTEQLGLTSAQRLMLASQNFNPGDPLYNSAFLFVIEGAIDVFAFRLAFAQLVDDAEALRTVIRDPQGAAWQEVRPRVDFNLPVIDVSDRPDPETSAFAWAQEQAKQALDIEATTFDSALLKCADNQFAWYLNQHHLVTDARSVEVLFRRLEERYIAARSGLEDGIEPLPSVAAYVEYESGAAEKRDTNPNLTVVPPPLYGRPTGAAGTDNERIEIELSQRLSDEIGHLIDRPGNGALTRDLGLLQIFATATFAFLKRIGGQETITVVAPAHNRVNRRFASSAGLLMELFPIEVTTDRDETFASLHRKAQSATLDYLRLARPGHADPDINRHVNVVLNYLTMEFASFAGNRVATRWLHPDSVDAHHQLRIQVFDFDRTGRFTVAFDVATGVLGPEQRAALAAHFQSILNAMVEDWDATIEEVDLLGDTERIEVLAHAAGEAPGAAPLDVVAMFLDQVARMPDSAAVREGDITWTYAELDTATERLAARIEPKSVIGVALPRSARAVIAMLGILRAGATYVPIDPAWPVERISYVAADAGCSMIIADESLDVDSSIETLETLLEATAPVGSRPHAAPEDLAYILYTSGSTGEPKGVMVERGSLVNYISWAAGFYGPGLTFPLFTPLTFDLTITSIFVPLASGGSIVAYPSTTEAADLAVLEVFGEDEVDIVKLTPSHLALLADRDLAGSRIRQLILGGEDLPTATAARIHASAGGAIRIHNEYGPTEATVGCIVHTYDPATDQGVSVPIGRPIAGMRAYVLDAAARPVPMGVPGELWLAGTGLARGYVGKPDLTETRFPAVTGLGESKLYITGDLARLRHDGTIEYLGRRDDQVKIKGIRVELGEIEAALASHPDVTATAARLWEHGDPVASEDLIHCVRCGLASDYPGVSFDAERVCNECRAFEDYSGKARVYFKPEGELATVLTSQRGERGKYDCVALLSGGKDSTYVLCRLVDMGLRVLALTLDNGYISDQAKGNIGRVVEALGVEHRYMTTPAMNDIFVDSLQRFGNVCNGCYKTIYTLSMQTALDEDIPYIVTGLSRGQFFETRLTAELFTELTVSSDQIDANVLEARKAYHRVDDAVQRLLDVSMFEDDDVFEKVQFVDFYRFVDVGLDELYTYLDERVPWSRPTDTGRSTNCLINDVGIYYHRKVRGYHNYALPYSWDVRMGHKTRDDALAELDDDIDVAEVARMLDEIGFPEDVTSSESGRMLVLYYVAPEEIPAPELKKHMAATLPRQLVPNKFVRLDVLPLTQNGKVDRRELPSPDHQRPEMETTFIAPRTDNEVALTGIWEQVLGVDGIGIRDNYFDLGGDSISAVQIIARAHRQGLPITMNQLAEQLTIENLAMAVNADALRAERIVGTVSLTPIQHWFFEEVDDVERFHHAVRIATGSGVDLEAVRSALDALVVHHDALRQSFRWNGNGWESSVADQVPSIRLEVLELDDDGPSRQIPLDSPLLAPFDLALAPLMRAALVVSPDGTTELALVAHHLIVDSVSWSHIVDDLGHLTRTVDGARSPVLPAVTTSLRDWTERLSASAPDLDAGQWENIAATDVMGWPSADPGSAERTGHHRIDPDTTSRILAHATEAGLGVDEVLIAGLTSALCASLDTGRTRLFLEGHGRESDSADMDVTRTMGWFTSLFPVVAEVPDASDPKAVAVAVRDQLSTALRSGRDYGVLRYLHPEERVRASVALDHREHLVFNYLGRTTHAGAEEGELVLAGPLQLVRPPESNRIFGAEVNAYIDGEALTIEWATHGAAAERLESIVEQAVDQLLRFVDQPGDDSEAFPLAGLDEAGLGKLASILDSSRGENRQCARRCRTSTMSTR

SEQ ID NO: 35486 - protein, 246 aa, Acidiphilium multivorum
  REGION 1..246: note = tr|F0J1M4|F0J1M4_ACIMA 7-cyano-7-deazaguanine synthase OS=Acidiphilium multivorum (strain DSM 11245 / JCM 8867 / NBRC 100883 / AIU301) OX=926570 GN=queC PE=3; SV = 1
MTTSPPAASGAALVLFSGGQDSGTCLAWALDRYDRVETIGFFYGQRHAVELECRAPLRAAIAGLRPWRATLGADTMLDISAALATLGATAMTAEIEIETTEAGLPNTFVPGRNLLFLTYAAALAYRRGIGTLVGGMCETDYSGYPDCRNTTMQAMQLALSLGLDRAVTVETPLMYRDKAATWELAAELGGAALVEALRTGSHSCYRGERATLHDWGYGCGTCPACELRAAGWQRWRAARADFVDGA

SEQ ID NO: 35487 - protein, 243 aa, Acidiphilium rubrum
  REGION 1..243: note = tr|A0A1N6QPC1|A0A1N6QPC1_ACIRU 7-cyano-7-deazaguanine synthase OS=Acidiphilium rubrum; OX = 526 GN=queC PE=3 SV=1
MTSQAALVLFSGGQDSATCLADALDRFDRVETIGFFYGQRHAVELECRAPLRRTIAALQPWRATLGPDHMLDIAAALAALGETAMTADIEIATTAAGLPNTFVPGRNLLFLTYAAALAYRRGLGVLVGGMCETDYSGYPDCRNDTMRAMQSALGLGLDRPIIIDTPLMYRDKAATWRLAETLGGAALVETIRTESHSCYKGDRAVLHDWGYGCAACPACDLRAAGWARYRAGAAPGGDTMDGT

SEQ ID NO: 35488 - protein, 246 aa, Acidiphilium sp.; identical to SEQ ID NO: 35486
  REGION 1..246: note = tr|F7S6S6|F7S6S6_9PROT 7-cyano-7-deazaguanine synthase OS=Acidiphilium sp. PM OX=1043206 GN=exsB PE=3; SV = 1

SEQ ID NO: 35489 - protein, 246 aa, Acidiphilium sp.
  REGION 1..246: note = tr|A0A257S7I1|A0A257S7I1_9PROT 7-cyano-7-deazaguanine synthase OS=Acidiphilium sp. 21-60-14 OX=1970292 GN=queC PE=3 SV=1
MPHQNPPPHATAALVLFSGGQDSATCLADALARYQRVETIGFFYGQRHEIEIDCRAPLRSAIAAASPFGDRLGADHMLNIEPALTALGATAMTSAMEITVTESGLPSTFVPGRNLLFLTYAAALAYRRDLHALVGGMCETDYSGYPDCRATTMAAMQSALTLGLDRPILIDTPLMGLDKAATWRLAERLGGPAMIEAIRVLSHSCYRGDRSHLHGWGYGCDDCPACALRKSGWMRYRNSSNAEAGQ

SEQ ID NO: 35490 - protein, 230 aa, unidentified
  source 1..230: note = Acidipila dinghuensis
  REGION 1..230: note = tr|A0A4Q1SI75|A0A4Q1SI75_9BACT 7-cyano-7-deazaguanine synthase OS=Acidipila dinghuensis; OX = 1560006 GN=queC PE=3 SV=1
MSFPRTRAVVCLSGGMDSVVCAALTARDHDAYALHFSYGQRTEERELKSARAVAETLGFKDFLHVKFDFFRRIGGSALTDDSIAVPKAPEEEPIGHSVPVTYVPFRNAHFLSAAVSWAEVLGARHIVIGAVEQDSSGYPDCRPAYYEAFQTLIERGTKDGDIKVSTPLIHMRKKEIVALGLELNAPFHLTWSCYSGAEAACGECDSCVLRLRAFREAGLTDPIPYVSSKG

SEQ ID NO: 35491 - protein, 227 aa, unidentified
  source 1..227: note = Acidipila rosea
  REGION 1..227: note = tr|A0A4R1L3H9|A0A4R1L3H9_9BACT 7-cyano-7-deazaguanine synthase OS=Acidipila rosea; OX = 768535 GN=queC PE=3 SV=1
MMTGLKPRAVICLSGGMDSAVCAALAARECEVYALHFSYGQRTEARELKSARGVAEAVGAKQFLHLEIDLFRRIGGSALTDETIAVPAAVEEGIGASVPVTYVPFRNAHFLSAAVSWAEVVGARKIYIGAVEQDSSGYPDCRPAYYEAFQELIRRGTKEGDIEVATPLIHMRKREIVALGLELGAPFNLTWSCYSEQGRACGVCESCVLRLRAFAEAGTVDPVPYAA

SEQ ID NO: 35492 - protein, 242 aa, unidentified
  source 1..242: note = Acidipila sp.
  REGION 1..242: note = tr|A0A372IMB4|A0A372IMB4_9BACT 7-cyano-7-deazaguanine synthase OS=Acidipila sp. 4G-K13; OX = 2303751 GN=queC PE=3 SV=1
MSTPRTRAVVCLSGGMDSCVCAALAARDYDAYAVHFSYGQRTEERELRAALDVAKALQLEDFLHLRIGLFRTIGGSALTDTKIEVPKASAEAAIGSEIPVTYVPFRNAHFLSAAVSWAEVLEAKKIFIGAVEQDSSGYPDCRPAYYEAFQQLIRTGTRNGDIEVETPLIHMRKSGIVALGLELRAPLHLTWSCYSGTREACGECESCVLRLRAFAQAGAEDPIPYAVRNLQDFRRQLEPSGG

SEQ ID NO: 35493 - protein, 223 aa, unidentified
  source 1..223: note = Acidisarcina polymorpha
  REGION 1..223: note = tr|A0A2Z5FS44|A0A2Z5FS44_9BACT 7-cyano-7-deazaguanine synthase OS=Acidisarcina polymorpha; OX = 2211140 GN=queC PE=3 SV=1
MDSAVCAALAARESEAFGLHFSYGQRTERRELESARNVAKSLGFAEFLPLKIDIFRQIGGSALTDSSIDVPAAPEAEPIGESIPVTYVPFRNAHFLSAAVSWAEVLGAKKVFIGAVEQDSSGYPDCRPAYYEAFQQLIRTGTRDADIEVLTPLIHMRKSEIVLLGLELSAPLHLTWSCYSGEEEACGVCDSCALRLRGFAQAGVEDQIPYRGRRMAGAFSQSV

SEQ ID NO: 35494 - protein, 233 aa, Acidisphaera rubrifaciens
  REGION 1..233: note = tr|A0A0D6P4M4|A0A0D6P4M4_9PROT 7-cyano-7-deazaguanine synthase OS=Acidisphaera rubrifaciens HS-AP3 OX=1231350 GN=queC PE=3 SV=1
MSDGGALVLFSGGQDSATCLAWALSRFDRVETIGFDYGQRHRIELDVRTRFLGEIRTAFPQWGQRLGNDHLLDLSSLGRISDTALTTGATIAFAKSGLPNTFVPGRNLLFLTYAGAIAYRREIKHLVTGVCETDYSGYPDCRDDTIKVVQVALNLGMDKRFVIHTPLMLIDKAATWSLATQLGGLPLVELIVEHSHTCYEGDRTQRHAWGYGCGACPACNLRAQGYAIWASDA

SEQ ID NO: 35495 - protein, 240 aa, Acidisphaera rubrifaciens
  REGION 1..240: note = tr|A0A0D6P909|A0A0D6P909_9PROT 7-cyano-7-deazaguanine synthase OS=Acidisphaera rubrifaciens HS-AP3 OX=1231350 GN=queC PE=3 SV=1
MTQPSDRTDAALVLFSGGQDSATCLAWALARYARVETIGFDYGQRHAVELSCRAPLRAGLAGLRDWGARLGPDHLIDLTAGIGALGATAMTAEQAIVMTDEGLPNTFVPGRNLLFLTYAAALAWRRGLRRIVAGVCETDYSGYPDCRDDTIKAMQLPLNLGMQRRFVLETPLMWRDKAATWALADRLGGAPLVSLIVEGTHTCYLGDRTRRHDWGYGCAACPACDLRAGGWARWRSGQGE

SEQ ID NO: 35496 - protein, 228 aa, unidentified
  source 1..228: note = Acidithiobacillales bacterium
  REGION 1..228: note = tr|A0A0S8L0K4|A0A0S8L0K4_9PROT 7-cyano-7-deazaguanine synthase OS=Acidithiobacillales bacterium SM1_46 OX=1703384 GN=queC PE=3 SV=1
MRVGADLPRAVVLVSGGLDSATTLAIARRDGFACYALTFDYGQRHRVELEAARRVAQQLAAADHRIVPLDLSWIGGSALTDRSIAVPTVPGEGIPVTYVPARNTVFLAIALGWAEVLGARALYIGVNAVDYSGYPDCRPEYIEAFQRLANVATRAGVEGQPVSLHAPLIQMTKAQIIQAGTGLGVDFSLTTSCYDPGPGGEACGRCDSCRLRREGFAEAGVADPTRYR

SEQ ID NO: 35497 - protein, 228 aa, unidentified; identical to SEQ ID NO: 35496
  source 1..228: note = Acidithiobacillales bacterium
  REGION 1..228: note = tr|A0A0S8G3X0|A0A0S8G3X0_9PROT 7-cyano-7-deazaguanine synthase OS=Acidithiobacillales bacterium SM23_46 OX=1703385 GN=queC PE=3 SV=1

SEQ ID NO: 35498 - protein, 228 aa, Acidithiobacillus caldus
  REGION 1..228: note = tr|A0A060A309|A0A060A309_ACICK 7-cyano-7-deazaguanine synthase OS=Acidithiobacillus caldus (strain ATCC 51756 / DSM 8584 / KU) OX=637389; GN = queC PE=3 SV=1
MGDSEKAAIVLLSGGLDSATVLAIAREAGFALHALSFDYGQRHATELQFARKLAEAAGVRSHRVLKMDLRIFGASALTDERIAVPEEPAAAGIPITYVPARNTLFLSYALALAEVLGVLDIFIGVNSQDYSGYPDCRPEFIQRFQELAQVATVLGTEKGQKLSIHAPLQYLSKAQIIRRGLELGVDYAHTRSCYQLDTQGRSCGRCDSCRLRLAGFAELDLRDPAPYI

SEQ ID NO: 35499 - protein, 228 aa, Acidithiobacillus caldus; identical to SEQ ID NO: 35498
  REGION 1..228: note = tr|A0A1E7YMY3|A0A1E7YMY3_9PROT 7-cyano-7-deazaguanine synthase OS=Acidithiobacillus caldus OX=33059 GN=queC PE=3 SV=1

SEQ ID NO: 35500 - protein, 229 aa, unidentified
  source 1..229: note = Acidithiobacillus ferridurans
  REGION 1..229: note = tr|A0A2Z6IM63|A0A2Z6IM63_9PROT 7-cyano-7-deazaguanine synthase OS=Acidithiobacillus ferridurans OX=1232575 GN=queC PE=3 SV=1
MPMPATPAIVLLSGGLDSATVLALMRRDGFAVHALSFDYGQRHKEELRYAALLAQSMGAASHRVLRIDLAAFGGSALTDPQLSVPESGLAPGIPITYVPARNTVFLSLALALAEVLGARDIFLGVNSQDYSGYPDCRPEFVHAFEALAQVATRLGDEARGPRIHAPLQFLNKSEIIRLGSRLGVDYGMTRSCYQLDAEGRSCGRCDSCRLRREGFRQAGIADPTPYQSS

SEQ ID NO: 35501 - protein, 197 aa, unidentified
  source 1..197: note = Acidithiobacillus ferridurans
  REGION 1..197: note = tr|A0A2Z6IKH5|A0A2Z6IKH5_9PROT 7-cyano-7-deazaguanine synthase OS=Acidithiobacillus ferridurans OX=1232575 GN=AFERRID_23860 PE=3 SV=1
MSFVNLVSGGLDSTLVGVMAKEDHIDHFPLFIDYGQRAANKEWATCQAVHKQLGLPEPTKMDLSGFGRVIVSGLTSTELDIKNEAFTPGRNLMFLLMGSAYAYQLGASSVAIGLLAEQFSLFPDQRPPFLANAGEAIEAAMGRRIKILTPLIEFGKADVVRLANEKGVSGTYSCHTGDSLPCGRCIACLEFQFNEGE

SEQ ID NO: 35502 - protein, 226 aa, Acidithiobacillus ferrivorans
  REGION 1..226: note = tr|A0A257TB41|A0A257TB41_9PROT 7-cyano-7-deazaguanine synthase OS=Acidithiobacillus ferrivorans OX=160808 GN=queC PE=3 SV=1
MPTPAVVLLSGGLDSATVLALMRRDGFAVHAISFDYGQRHKEELHYAGLLAQAMGAASHRVVNIDLAAFGGSALTDPEISVPETGLTPGIPITYVPARNTVFLALALALAEVLRARDIFLGVNSQDYSGYPDCRPEFVQAFEALAQVATRLGDEARGPRIHAPLQFLNKSEIIRLGSRLGVDYGMTRSCYQLDAEGRSCGRCDSCRLRREGFQKAGIADPTPYQGS

SEQ ID NO: 35503 - protein, 231 aa, Acidithiobacillus ferrivorans
  REGION 1..231: note = tr|A0A060UT68|A0A060UT68_9PROT 7-cyano-7-deazaguanine synthase OS=Acidithiobacillus ferrivorans OX=160808 GN=queC PE=3 SV=1
MTMPTPAIPAIVLLSGGLDSATVLALMRRDGFAVHAISFDYGQRHKEELHYAALLAQAMGAASHRVVNIDLAAFGGSALTDPEISVPETGLTPGIPITYVPARNTVFLALALALAEVLRARDIFLGVNSQDYSGYPDCRPEFVQAFEALAQVATRLGDEARGPRIHAPLQFLNKSEIIRLGSSLGVDYGMTRSCYQLDAEGRSCGRCDSCRLRRDGFQKAGVADPTPYQDV

SEQ ID NO: 35504 - protein, 229 aa, Acidithiobacillus ferrooxidans
  REGION 1..229: note = tr|A0A2W1KDK1|A0A2W1KDK1_ACIFR 7-cyano-7-deazaguanine synthase OS=Acidithiobacillus ferrooxidans OX=920 GN=queC PE=3 SV=1
MPTPATPAIVLLSGGLDSATVLALMRRDGFAVHALSFDYGQRHKEELRYAALLAQSMGAASHRVLRIDLAAFGGSALTDPQLSIPETGLAPGIPITYVPARNTVFLSLALALAEVLGARDIFLGVNSQDYSGYPDCRAEFVQAFEALAQVATRLGDEARGPRIHAPLQFLNKSEIIRLGSRLGVDYGMTRSCYQLDAEGRSCGRCDSCRLRREGFRQAGIADPTPYQDS

SEQ ID NO: 35505 - protein, 229 aa, Acidithiobacillus ferrooxidans; identical to SEQ ID NO: 35504
  REGION 1..229: note = tr|B7J3G9|B7J3G9_ACIF2 7-cyano-7-deazaguanine synthase OS=Acidithiobacillus ferrooxidans (strain ATCC 23270 / DSM 14882 / CIP 104768 / NCIMB 8455) OX=243159; GN = queCPE=3 SV=1

SEQ ID NO: 35506 - protein, 227 aa, Acidithiobacillus sp.
  REGION 1..227: note = tr|A0A2I1DMY1|A0A2I1DMY1_9PROT 7-cyano-7-deazaguanine synthase OS=Acidithiobacillus sp. SH OX=187490 GN=B1757_05315 PE=3 SV=1
MLSLAPMNTRSETATIIRQPESMSPDRRCLLLMSGGIESSTLLFQLAQKENPQPVFLDYAQRAARQEWQAVQTLSLQLHIDPQRYDLSAFGNAVGALRTARYHVPLPHRNFVAIAAVAAIASNLNIKRIVIGLSADDAAVDTCSRPAFQNAIHDTLGSLGLQLETPLIHLGKDAIIQYGNALGVPWAKTYSCLLGRTPACGFCPQCLKREAAFALAGVNDPDMGYDN

SEQ ID NO: 35507 - protein, 101 aa, Acidithiobacillus sp.
  REGION 1..101: note = tr|A0A3M8RK60|A0A3M8RK60_9PROT 7-cyano-7-deazaguanine synthase OS=Acidithiobacillus sp. CJ-2 OX=1867749 GN=EC580_02670 PE=3 SV=1
MLHTPRSAISTKAEVIGQGRNFGVPWQKTYSCLTGRAYHCGICPQCRKRRAAFAQAVPMWMSITPPTSNNRVEEKIPCPQIARAPSGPWRTFPMAPLISRK

SEQ ID NO: 35508 - protein, 238 aa, Acidithiobacillus thiooxidans
  REGION 1..238: note = tr|A0A1C2IJ04|A0A1C2IJ04_ACITH 7-cyano-7-deazaguanine synthase OS=Acidithiobacillus thiooxidans OX=930 GN=A6M23_10070 PE=3 SV=1
MLSSISMNTHTETAAIIRQPDPMSPDPMSLEVARPKTANCLLLMSGGIESSTLLFQLAQTECPQPVFLDYAQRAAQQEWEAVQRLSENQQVQAQRYDLSAFGNAVGALRAERYHVPLPHRNFFAIAAIATIASNLNIQRIVIGLSADDAQVDTCSRPAFQNAITNTLGTLNLQLETPLIQLSKASIILEGNRLHVPWKKTYSCLLGREKHCGFCPQCKKRREAFAQAGANDQDLGYNP

SEQ ID NO: 35509 - protein, 226 aa, Acidithiobacillus thiooxidans
  REGION 1..226: note = tr|A0A1C2J309|A0A1C2J309_ACITH 7-cyano-7-deazaguanine synthase OS=Acidithiobacillus thiooxidans OX=930 GN=queC PE=3 SV=1
MIETKPAIVLLSGGLDSATVMALMRRDGYAIHAMSFDYGQRHKQELHYAGLVAQAMGVASHRTVHIDLAAFGGSALTDAQLAVPESGIAPGIPITYVPARNTIFLSFALALAEVTGAQDIFIGVNSQDYSGYPDCRPEFISAFEKLAQVATRLGDESRGPRIHAPLQYLDKSEIIQLGTQLGVDYGLTRSCYQLDDQGRSCGRCDSCRLRHAGFLSAGIADPTPYQ

SEQ ID NO: 35510 - protein, 82 aa, unidentified
  source 1..82: note = Acidithrix ferrooxidans
  REGION 1..82: note = tr|A0A0D8HF99|A0A0D8HF99_9ACTN 7-cyano-7-deazaguanine synthase OS=Acidithrix ferrooxidans; OX = 1280514 GN=queC2 PE=3 SV=1
MANLASKAAVERRAHTAINTPLIKLAKVQIIELGIKLNVDYDITHSCYNLKDDGTMCGVCDSCVLSDRGFPAHGMLDPAVLR

SEQ ID NO: 35511 - protein, 229 aa, unidentified
  source 1..229: note = Acidithrix ferrooxidans
  REGION 1..229: note = tr|A0A0D8HI31|A0A0D8HI31_9ACTN 7-cyano-7-deazaguanine synthase OS=Acidithrix ferrooxidans; OX = 1280514 GN=queC1 PE=3 SV=1
MANCVVLLSGGLDSTTVAAFAMSQGFDVHALSFNYGQRHLVELDAARRVARELGLHSHVVCDIDLRVFGGSALTASIDVPHRQSGEAVDFGASKEIPVTYVPARNTIFLSFALALAETISASDIFIGANSIDYSGYPDCRPEYLAAFEAMANLATKASVEKGQKTTIHAPLLTLTKVGIIELGLSLGVDYSITHSCYDPVDFNKPCGSCDSCLIRMGAFESLGMVDPLF

SEQ ID NO: 35512 - protein, 235 aa, unidentified
  source 1..235: note = Acidobacteria bacterium
  REGION 1..235: note = tr|A0A1F2S414|A0A1F2S414_9BACT 7-cyano-7-deazaguanine synthase OS=Acidobacteria bacterium RIFCSPLOWO2_02_FULL_60_20 OX=1797179 GN=queC PE=3 SV=1
MESNRPKAVVLMSGGMDSCLTAAIAAQQFQLAALHISYGQLTEARERQAFQEIAEFYQIRQRLVIEQPYLARIGGSALTDPRIPLREANLEATDIPTSYVPFRNAHFLAAAVSWGEVIGAEKIFIGAVEPDSSGYPDCRPAYYRIFNELIAVGTRPETRLEIVTPLIQLRKHEIVKKGIELGAPLHLSWSCYRSSEKACGTCDSCALRLRAFEQAGVEDVIPYRFRPKFHLHSAV

SEQ ID NO: 35513 - protein, 238 aa, unidentified
  source 1..238: note = Acidobacteria bacterium
  REGION 1..238: note = tr|A0A1Q7L364|A0A1Q7L364_9BACT 7-cyano-7-deazaguanine synthase OS=Acidobacteria bacterium 13_1_40CM_4_58_4 OX=1803453 GN=queC PE=3 SV=1
MTDSRKAVVLLSGGMDSCVCTAMARERHDAENVALLHAGYGQRTQRRERRAFEEIAEFYSVRERLVVQLDHFRAIGGSALTDEKIAVPANELGAPGPHGSAIPVTYVPFRNAHILSVAVSWAEVIGAGAIYIGAVAEDSSGYPDCRPEYYRVFQELIRVGTRPETQIEMVTPIIRMKKSEIIRRGLELRAPLHLTWSCYQEEEVACGVCDSCLLRLRAFAEAGGTDAVAYRRAASARR

SEQ ID NO: 35514 - protein, 234 aa, unidentified
  source 1..234: note = Acidobacteriales bacterium
  REGION 1..234: note = tr|A0A1Q6XEG6|A0A1Q6XEG6_9BACT 7-cyano-7-deazaguanine synthase OS=Acidobacteriales bacterium 13_2_20CM_55_8 OX=1803470 GN=queC PE=3 SV=1
MGKSKQSAVVLLSGGMDSCVCAALANRDYATAAVHVSYGQRTEQRERLAFSAICERLGISDRLVVRTEALRAVGGSALTDALIAVPEAAGTVFGEQRAQIPVTYVPFRNAHFLAVAVSWAEVLGAEKIYIGAVEQDSSGYPDCRPAYYRAYNEVIKAGTKEGQIEVVTPLIGLRKRDIVRLGLELNAPFDLTWSCYSREDSACGVCDSCVLRLRAFHEAGAADPIRYAELAQRA

SEQ ID NO: 35515 - protein, 229 aa, unidentified
  source 1..229: note = Acidobacteriales bacterium
  REGION 1..229: note = tr|A0A1Q7N4K5|A0A1Q7N4K5_9BACT 7-cyano-7-deazaguanine synthase OS=Acidobacteriales bacterium 13_1_40CM_3_55_5 OX=1803468 GN=queC PE=3 SV=1
MRDGKHRAVVLLSGGMDSCVCAALARRDYATAAVHISYGQRTEQRERLAFDRVCERLGISDRLVARNEALRAVGGSALTDPRIAVPEAAEIGREVPVTYVPFRNAHLLAVAVSWAEVLGAEKIYIGAVEQDSSGYPDCRPAYYRAYNEVIKAGTKEGRIEIVTPLIGMRKSEIVRLGLELNAPFDLTWSCYSREDSACGVCDSCVLRLQAFHQVGAADPIPYAELVQRA

SEQ ID NO: 35516 - protein, 234 aa, unidentified
  source 1..234: note = Acidobacteriia bacterium
  REGION 1..234: note = tr|A0A321L527|A0A321L527_9BACT 7-cyano-7-deazaguanine synthase OS=Acidobacteriia bacterium AA117 OX=2169412 GN=queC PE=3 SV=1
MAGTKPKSVVLLSGGMDSCVCVTLAARDTEAAALHISYGQRTEQREQRAFDGICDRLGIRKRLKVRNEVFPAIGGSALTDEHIAVPEAREEIGFSGIPVTYVPFRNAHFLAAAVSWAEVLGATRVYIGAVEQDSSGYPDCRPAYYRAFNEVIRAGTRAGDIEIVTPLIALRKAEIVKLGLDLGAPFDLTWSCYSREDEACGTCESCMLRLAAFGAAGAQDPLPYAAQVISHTQV

SEQ ID NO: 35517 - protein, 581 aa, unidentified
  source 1..581: note = Acidobacteriia bacterium
  REGION 1..581: note = tr|A0A317J5W7|A0A317J5W7_9BACT Uncharacterized protein OS=Acidobacteriia bacterium OX=2081523; GN = C5B51_08300 PE=4 SV=1
MNRGRTLAGEHVIVCGEAPLPSRVKAHDALRLKLSGDDRNIDLEIVDISRKLATNVPDFVADLVEIAAYIYCADQQIPRGGEGVMDVGASWRRPFVFHIPVRAPGMWSAHPIVEALRRTLTFLSEDTYDFHFSKLTNPIPMQQYLKFEDGHVPAPGVDEVILFSGGLDSLGGAVKEAVREQRRLALVSHRSTPKIFSRQKELVKRLQDVCKTCPPIHVPVWVHKRGLSAREYTQRTRSFLYAVLAFAVAHVFQLQRIRFYENGVVSLNLPISEQAIGARATRTTHPQTLAGFAELFSNLIGADFSVENPFLWNTKAQVVNLIGEAGCGDLISQSVSCMHTHEQTAEHPHCGRCSQCVWRRFATLASAYAEDDCSSLYGVDLLTGMRLEEKDRTLVESFIRVATDLGRMNELQLVQTYGEISRVLRHLAPLSSNQVAENLVGLFSEHASEVCRVMDKAIAEHASEIREGRLPASCAIVLAVAERYRTANSPEITSSKPKLRRSAVNLKPRRKQPEKSIQEIRARIRQMKGENMSAQMMCKSLGNAPRPPAAAWAHLSWPEAWKSVHQNSVKVWLSRNSKIVK

SEQ ID NO: 35518 - protein, 229 aa, Acidobacterium capsulatum
  REGION 1..229: note = sp|C1F844|QUEC_ACIC5 7-cyano-7-deazaguanine synthase; OS = Acidobacterium capsulatum (strain ATCC 51196 / DSM 11244 / JCM 7670 / NBRC 15755 / NCIMB 13165 / 161) OX=2400 15 GN=queC PE=3 SV=1
MTPKRERAVVCLSGGMDSCVCAAIAARDYEPYAIHFSYGQRTEARELVSARSVAERLGFKDLLHLKIDLFRRIGGSALTDTSIDVPKAPAEEAAIGAEIPVTYVPFRNAHFLAAAVSWAEVLGASKIVIGAVEQDSSGYPDCRPAYYEAFQHLIETGTKEGSIRVETPLIQLRKREIVRLGLELGAPLDLTWSCYSGAEEACGECESCVLRLRAFEEADAVDPIPYAHR

SEQ ID NO: 35519 - protein, 241 aa, Acidobacterium sp.
  REGION 1..241: note = tr|A0A2G4JIX1|A0A2G4JIX1_9BACT 7-cyano-7-deazaguanine synthase OS=Acidobacterium sp.; OX = 1872119 GN=queC PE=3 SV=1
MWRPASAGPRAVVLLSGGLDSYTAAAVAKRDGFALSALSINYGQRHVRELAASRAVAAALGVERHLELALDLSQIGGSSLTSSAMAVPKDSTFAQATVDKPPTVIPNTYVPARNTIFLSMALGWAEVLGAADIVIGVNALDYSGYPDCRPEFIQAFEQLARLATRAGVEGRPLTIQTPLISLSKADIIRLGLSLGLDYGLTHSCYDPPSSGRPCGHCDSCLLRAAGFAEAGATDPLITAAG

SEQ ID NO: 35520 - protein, 227 aa, Acidobacterium sp.
  REGION 1..227: note = tr|A0A2G4JJR6|A0A2G4JJR6_9BACT 7-cyano-7-deazaguanine synthase OS=Acidobacterium sp.; OX = 1872119 GN=CK533_06930 PE=3 SV=1
MNTLVLLSGGLDSAVLVAHEAQHATVQPVYVSVGLAWEAGELAMVDRLLSAPAFGGRVLPLARVAFTMRDVYPPTHWAIRGVPPAYDTPDQDVYLAGRNLVLLTTAAVLATQSQAHRIALGPLAGNPFPDARPEFFSAMATALSLGLGHTIEIATPFLEWQKAEVIQRGAELGVPLELTLSCMNPSAGAAGAPPMHCGLCSKCRERRDAFAAAGVADPSVYDHPSPR

SEQ ID NO: 35521 - protein, 234 aa, Acidocella aminolytica
  REGION 1..234: note = tr|A0A0D6PHW6|A0A0D6PHW6_9PROT 7-cyano-7-deazaguanine synthase OS=Acidocella aminolytica 101 = DSM 11237 OX=1120923 GN=queC PE=3 SV=1
MDQNAALVLFSGGQDSATCLAWALARFERVETLGFDYGQRHRVELDVRAPLRTDIASLTPDWTDKLGEDHIIDLTVLGQISETALTQNAAIAMQANGLPNTFVPGRNLLFFTFAAAIAYRRGIKHIITGVCETDYSGYPDCRDDTVKALQVALNLGMESRFVLHTPLMWIDKAQTWALARDLGGAALVEAIRTGSHSCYQGTRETLHPWGYGCGTCPACELRAQGWGRFQASPV

SEQ ID NO: 35522 - protein, 239 aa, Acidocella sp.
  REGION 1..239: note = tr|A0A257NRT5|A0A257NRT5_9PROT 7-cyano-7-deazaguanine synthase OS=Acidocella sp. 20-63-7; OX = 1970304 GN=queC PE=3 SV=1
MDKHRKALVLFSGGQDSATCLAWALSRFEAVETVGFAYGQRHAVEMTVRVPLLAAVRGLNPEWAARLGEDHVVDLSVLGQISESSLTKDTEIAMAASGLPNTFVPGRNLVFLTFAAMLAYRRGARHIVGGMCETDYSGYPDCRDDSVKAMQLALNVGMGADFVLHTPLMWIDKAQTWGLAQSLGGKALVELIIEGSHTCYYGDREHRHDWGYGCGVCPSCVLRAQGFAAFSSTESRENK

SEQ ID NO: 35523 - protein, 238 aa, Acidocella sp.
  REGION 1..238: note = tr|A0A257Q9A3|A0A257Q9A3_9PROT 7-cyano-7-deazaguanine synthase OS=Acidocella sp. 20-57-95; OX = 1970301 GN=queC PE=3 SV=1
MVFSVLDDCKALVLFSGGQDSTTCLGWALQNFTTVETIGFAYGQRHAVEMTCREPVRQAIRDINPVWHNRLAEDHVVDLSVLGALGDSALTKDIEIAMTAEGLPTTFVPGRNLAFLTFAAMVAYRRGAKHIVGGMCETDFSGYPDCRDDSVKAMQLALNIGMARQFVLHTPLMWIDKAATWNLAKDLGGQALVDIIINGTHTCYYGDRSTKHAWGFGCGTCPSCALRAQGFQKFSAGT

SEQ ID NO: 35524 - protein, 234 aa, Acidomonas methanolica
  REGION 1..234: note = tr|A0A023D1C5|A0A023D1C5_ACIMT 7-cyano-7-deazaguanine synthase OS=Acidomonas methanolica NBRC 104435 OX=1231351 GN=queC PE=3 SV=1
MAHADDTALVLFSGGQDSATCLAWALDRFARVETLGFDYGQRHAVELECRATLRADMATLSPDWAARLGPDHTLDLPVLGALSETALTREADIVMTESGLPSTFVPGRNLIFLSLAAALAVRRHARHIVTGVCETDYSGYPDCRDDTIKALQVALNLGMAQRFVLHTPLMWLDKAQTWRLAEALGGAALVEAINRHSHSCYLGDRRHAHDWGYGCGTCPACELRAKGWAAYVEG

SEQ ID NO: 35525 - protein, 236 aa, Acidovorax anthurii
  REGION 1..236: note = tr|A0A328ZKA4|A0A328ZKA4_9BURK 7-cyano-7-deazaguanine synthase OS=Acidovorax anthurii; OX = 78229 GN=queC PE=3 SV=1
MRAGHALVLFSGGQDSTTCLAWALERFERVETIGFDYGQRHHVELQARTTVLAALRAQFPAWDARLGDDHMVDLAVLGQISDTALTRDTAIQMTEAGLPNTFVPGRNLLFFQLAAAVGYRRGLHTLVGGMCETDFSGYPDCRDDTLKALQVALSLGMGQRFTIDTPLMWIDKADTWELAHQLGGDALVRLIVQDTHTCYHGVRGTLHAWGHGCGECPACALRRAGHERWVAQRAAP

SEQ ID NO: 35526 - protein, 236 aa, Acidovorax avenae
  REGION 1..236: note = tr|F0Q1W9|F0Q1W9_ACIAP 7-cyano-7-deazaguanine synthase OS=Acidovorax avenae (strain ATCC 19860 / DSM 7227 / JCM 20985 / NCPPB 1011) OX=643561 GN=queC PE=3 SV=1
MRAGHALVLFSGGQDSTTCLAWALERFERVETIGFDYGQRHHVELEARTAVLAALRERFPRWRERLGEDHMVDLAVLGQISDTALTRDTAIQMTEAGLPNTFVPGRNLLFFQLAAAVGYRRGLHTLVGGMCETDFSGYPDCRDDTLKALQVALSLGMGQRFTIETPLMWIDKAATWEMARQLGGDELVRLIVEDTHTCYHGVRGALHAWGHGCGECPACALRRAGYERWTGHATQG

SEQ ID NO: 35527 - protein, 239 aa, Acidovorax avenae
  REGION 1..239: note = tr|A0A2R4DK03|A0A2R4DK03_9BURK 7-cyano-7-deazaguanine synthase OS=Acidovorax avenae subsp. avenae OX=80870 GN=queC PE=3 SV=1
MRAGHALVLFSGGQDSTTCLAWALERFERVETIGFDYGQRHHVELEARTAVLAALRERFPQWRERLGEDHMVDLAVLGQISDTALTRDTAIQMTEAGLPNTFVPGRNLLFFQLAAAVGYRRGLHTLVGGMCETDFSGYPDCRDDTLKALQVALSLGMGQRFTIETPLMWIDKAATWEMAHELGGDALVDVVVRQSHTCYHGVRDTLHAWGYGCGECPACELRRAGHAQWMEQVTDRRDR

SEQ ID NO: 35528 - protein, 239 aa, Acidovorax caeni
  REGION 1..239: note = tr|A0A1I7I3M8|A0A1I7I3M8_9BURK 7-cyano-7-deazaguanine synthase OS=Acidovorax caeni; OX = 343013 GN=queC PE=3 SV=1
MSRRALVLFSGGQDSATCLAWALAHYTHVETLGFDYGQRHRVELDCRARLREGLLGMPWPGHLGEDHLLNVDVLGQLGASAMTDDVAIAMQADGLPNTFVPGRNLLFFTLGAALAYRRGLDVLVGGMSQTDYSGYPDCRDNTLKALQVALSLGVDRPLTVETPLMWCDKAATWALAQELGGEALVELVRRESHTCYLGQREQLHAWGYGCGTCPACELRAKGWAQWRHALAGGRSAQGA

SEQ ID NO: 35529 - protein, 234 aa, unidentified
  source 1..234: note = Acidovorax carolinensis
  REGION 1..234: note = tr|A0A240U7Q8|A0A240U7Q8_9BURK 7-cyano-7-deazaguanine synthase OS=Acidovorax carolinensis; OX = 553814 GN=queC PE=3 SV=1
MRSGHALVLFSGGQDSTTCLAWALEHFAHVETIGFDYGQRHQVELQARQEVLSALRAGFPQWRERLGEDHMIDLAVLGQISDTALTRDTAIVMDAAGLPNTFVPGRNLLFFQLAAAVGYRRGLHTLVGGMCETDFSGYPDCRDDTLKALQVAVSLGMGQRFTFETPLMWLDKADTWQLAHTLGGQALVDIVLEQSHTCYHGVRDTRHAWGYGCGTCPACTLRKAGYERWRATQA

SEQ ID NO: 35530 - protein, 234 aa, unidentified
  source 1..234: note = Acidovorax carolinensis
  REGION 1..234: note = tr|A0A2C9NTH3|A0A2C9NTH3_9BURK 7-cyano-7-deazaguanine synthase OS=Acidovorax carolinensis; OX = 553814 GN=queC PE=3 SV=1
MRPGHALVLFSGGQDSSTCLAWALEHFAHVETIGFDYGQRHQVELQARQEVLSALRAGFPQWRERLGEDHMIDLAVLGQISDTALTRDTAIVMDAAGLPNTFVPGRNLLFFQLAAAVGYRRGLHTLVGGMCETDFSGYPDCRDDTLKALQVAVSLGMGQRFTFETPLMWLDKADTWQLAHTLGGQALVDIVLEQSHTCYHGVRDTRHAWGYGCGTCPACTLRKAGYERWRATQA

SEQ ID NO: 35531 - protein, 239 aa, Acidovorax cattleyae
  REGION 1..239: note = tr|A0A1H0VI85|A0A1H0VI85_9BURK 7-cyano-7-deazaguanine synthase OS=Acidovorax cattleyae; OX = 80868 GN=queC PE=3 SV=1
MRAGHALVLFSGGQDSTTCLAWALERFERVETIGFDYGQRHHVELEARTAVLAALREHFPQWRERLGEDHMVDLAVLGQISDTALTRDTAIQMTEAGLPNTFVPGRNLLFFQLAAAVGCRRGLHTLVGGMCETDFSGYPDCRDDTLKALQVALSLGMGQRFTIDTPLMWIDKAATWEMARQLGGNDLVRIIVEDTHTCYHGERGALYAWGHGCGECPACELRRAGFERWTAGANARPYA

SEQ ID NO: 35532 - protein, 237 aa, unidentified
  source 1..237: note = Acidovorax cavernicola
  REGION 1..237: note = tr|A0A3A1W4Z0|A0A3A1W4Z0_9BURK 7-cyano-7-deazaguanine synthase OS=Acidovorax cavernicola; OX = 1675792 GN=queC PE=3 SV=1
MPLHTTALVLFSGGQDSATCLAEALSKYQRVETLGFDYGQRHRVELDVRGTVLAKMRERFPEWAPRLGEDHVLTLAALAQLGGSSLTEEVAFAMQADGLPNTFVPGRNLLFLTLAGALAYRRGLQVIVTGVCETDFSGYPDCRDDTMKAMQLALSLGLERRLVIETPLMWIDKAETWALAHRLGGQPLVDLIVEETHTCYLGDREHRQAWGYGCGECPACDLRKKGWARYSGQAAAG

SEQ ID NO: 35533 - protein, 235 aa, Acidovorax citrulli
  REGION 1..235: note = sp|A1TIG3|QUEC_ACIAC 7-cyano-7-deazaguanine synthase; OS = Acidovorax citrulli (strain AAC00-1) OX=397945 GN=queC; PE = 3 SV=1
MRAGHALVLFSGGQDSTTCLAWALERFERVETIGFDYGQRHHVELEARTAVLAALRGRFPAWSARLGDDHMVDLAVLGQISDTALTRDTAIQMTEAGLPNTFVPGRNLLFFQLAAAVGYRRGLHTLVGGMCETDFSGYPDCRDDTLKALQVALSLGMGQRFTIETPLMWIDKAETWEMARQLGGDELVQLIVEDTHTCYHGVRGALHAWGHGCGECPACALRRAGHERWTAQHTA

SEQ ID NO: 35534 - protein, 235 aa, Acidovorax delafieldii
  REGION 1..235: note = tr|A0A561XTS6|A0A561XTS6_ACIDE 7-cyano-7-deazaguanine synthase OS=Acidovorax delafieldii; OX = 47920 GN=queC PE=3 SV=1
MRPGHALVLFSGGQDSTTCLAWALENFAHVETIGFDYGQRHHIELQARQTVLSSLRAQFPQWNARLGDDHMLDLAVLGHISDTALTSDTEIQMTAAGLPNTFVPGRNLLFFQLAAAVGYRRGLHTLVGGMCETDFSGYPDCRDDTLKALQVAVSLGMGQRFTFDTPLMWLDKAETWELARALGGKALVDLIVNDSHTCYHGVRDTLHAWGYGCGTCPACALRKSGYERWSGATTA

SEQ ID NO: 35535 - protein, 234 aa, Acidovorax delafieldii
  REGION 1..234: note = tr|C5T5E3|C5T5E3_ACIDE 7-cyano-7-deazaguanine synthase OS=Acidovorax delafieldii 2AN OX=573060 GN=queC; PE = 3 SV=1
MRPGHALVLFSGGQDSTTCLAWALAHFEHVETIGFDYGQRHQVELQARQQVLTALRTAFPQWRERLGDDHMIDLAVLGQISDTALTRETEIVMDAAGLPNTFVPGRNLLFFQLAAAVGYRRGLHTLVGGMCETDFSGYPDCRDDTLKALQVAVSLGMGQRFTFETPLMWLDKAATWEMAHTLGGPALVDIILEQSHTCYHGVREVRHAWGYGCGTCPACALRKAGYERWQAAQT

SEQ ID NO: 35536 - protein, 239 aa, unidentified
  source 1..239: note = Acidovorax ebreus
  REGION 1..239: note = sp|B9MBJ3|QUEC_ACIET 7-cyano-7-deazaguanine synthase; OS = Acidovorax ebreus (strain TPSY) OX=535289 GN=queC PE=3; SV = 1
MSRLPQRRALVLLSGGQDSATCLAWALARYGHVETLGFDYGQRHRVELDCRQRLIDGVRALPWPGQLGPDHMLTVDVLAQLGGSAMTDDVAIAMQADGLPNTFVPGRNLLFFTLAAALAYRRGLDVLVGGMSETDYSGYPDCRDSTLKALQVALSLGVDRPLTLETPLMWRSKADTWALAQRLGGDALVELIRCESHTCYLGQRGDLHAWGHGCGGCPACELRAQGWEQWTAQRSLNGA

SEQ ID NO: 35537 - protein, 236 aa, unidentified
  source 1..236: note = Acidovorax kalamii
  REGION 1..236: note = tr|A0A235ELH3|A0A235ELH3_9BURK 7-cyano-7-deazaguanine synthase OS=Acidovorax kalamii; OX = 2004485 GN=queC PE=3 SV=1
MRPGHALVLFSGGQDSTTCLAWALENFTHVETIGFDYGQRHHIELQARQTVLTSLRARFPQWNARLGDDHMLDLAVLGHISDTALTSDAEIQMTAAGLPNTFVPGRNLLFFQLAAAVGYRRGLHTLVGGMCETDFSGYPDCRDDTLKALQVAVSLGMGQRFTFDTPLMWLDKAETWELARALGGQALVDLIVNDSHTCYHGVRDTLHAWGYGCGTCPACALRKSGYERWKGSPTSP

SEQ ID NO: 35538 - protein, 240 aa, Acidovorax konjaci
  REGION 1..240: note = tr|A0A1I1USV1|A0A1I1USV1_9BURK 7-cyano-7-deazaguanine synthase OS=Acidovorax konjaci; OX = 32040 GN=queC PE=3 SV=1
MRAGHALVLFSGGQDSTTCLAWALERFERVETIGFDYGQRHHVELQARTAVLAALRAQFPAWAARLGDDHMVDLAVLGQISDTALTRDTAIQMTEAGLPNTFVPGRNLLFFQMAAAVGYRRGLHTLVGGMCETDFSGYPDCRDDTLKALQVALSLGMGQRFTIDTPLMWIDKADTWELARQLGGDALVRLIVQDTHTCYHGVRGALHAWGHGCGECPACALRQAGYERWAARRPAHAASG

SEQ ID NO: 35539 - protein, 235 aa, Acidovorax radicis
  REGION 1..235: note = tr|A0A561D1K7|A0A561D1K7_9BURK 7-cyano-7-deazaguanine synthase OS=Acidovorax radicis; OX = 758826 GN=queC PE=3 SV=1
MRPGSALVLFSGGQDSTTCLAWALTHFAHVETVGFDYGQRHHIELTARQTVLAAMRERFPEWAGRLGEDHMLDLAVLGRISDTALTSETEIQMTAAGLPNTFVPGRNLLFFNLAAAVGYRRGLHTLVGGMCETDFSGYPDCRDDTLKALQVAVSLGMGQRFTFETPLMWLDKADTWQLAKDLGGQALVDVVLEESHTCYHGVRGERHAWGYGCGTCPACALRKAGYERWTGNGRS

SEQ ID NO: 35540 - protein, 234 aa, Acidovorax soli
  REGION 1..234: note = tr|A0A1H3XU68|A0A1H3XU68_9BURK 7-cyano-7-deazaguanine synthase OS=Acidovorax soli; OX = 592050 GN=queC PE=3 SV=1
MRSGHALVLFSGGQDSTTCLAWALEHFAHVETIGFDYGQRHQVELQARHAVLAALRAGFPQWRERLGEDHMIDLSVLGQISDTALTRETEIVMDAAGLPNTFVPGRNLLFFQLAAAVGYRRGLHTLVGGMCETDFSGYPDCRDDTLKALQVAVSLGMGQRFTFETPLMWLDKAETWQLARTLGGRALVDIVLEQSHTCYHGVRDTRHAWGYGCGTCPACALRKAGYERWQASQA

SEQ ID NO: 35541 - protein, 119 aa, Acidovorax sp.
  REGION 1..119: note = tr|A0A0A1VJP2|A0A0A1VJP2_9BURK 7-cyano-7-deazaguanine synthase OS=Acidovorax sp. MR-S7; OX = 1268622 GN=AVS7_03169 PE=3 SV=1
MSVKLDVLVGGMCETDFSGYPDCRDDTIKAQQVALGLGLGARVTIETPLMWIDKSETWALAYQLGGDALVETIVEESHTCYLGERGARHDWGYGCGECPACKLRKIGWEKWVVASAAEG

SEQ ID NO: 35542 - protein, 239 aa, Acidovorax sp.; identical to SEQ ID NO: 35536
  REGION 1..239: note = sp|A1W9G0|QUEC_ACISJ 7-cyano-7-deazaguanine synthase; OS = Acidovorax sp. (strain JS42) OX=232721 GN=queC PE=3 SV=1

SEQ ID NO: 35543 - protein, 235 aa, Acidovorax temperans
  REGION 1..235: note = tr|A0A0D7KAL2|A0A0D7KAL2_9BURK 7-cyano-7-deazaguanine synthase OS=Acidovorax temperans; OX = 80878 GN=queC PE=3 SV=1
MRSGHALVLFSGGQDSTTCLAWALSQFAQVETIGFDYGQRHHVELQARHAVLDAMRAQFPQWSSKLGDDHMLDLSVLGHISDTALTSETEIQMTAAGLPNTFVPGRNLLFFQLAAAVGYRRGLHTLVGGMCETDFSGYPDCRDDTLKALQVAVSLGMGQRFTFETPLMWLDKSQTWDLARTLGGDALVDIVLEQSHTCYHGVREERHAWGYGCGTCPACALRKAGFERWNATQAR

SEQ ID NO: 35544 - protein, 235 aa, Acidovorax temperans
  REGION 1..235: note = tr|A0A543KVV4|A0A543KVV4_9BURK 7-cyano-7-deazaguanine synthase OS=Acidovorax temperans; OX = 80878 GN=queC PE=3 SV=1
MRSGHALVLFSGGQDSTTCLAWALSQFAHVETIGFDYGQRHHVELQARHAVLEAMRSQFPQWSSKLGDDHMLDLSVLGHISDTALTSETEIQMTAAGLPNTFVPGRNLLFFQLAAAVGYRRGLHTLVGGMCETDFSGYPDCRDDTLKALQVAVSLGMGQRFTIETPLMWLDKAQTWDLARTLGGDALVDIVLEQSHTCYHGVREERHAWGYGCGTCPACALRKAGFERWNATLAR

SEQ ID NO: 35545 - protein, 234 aa, Acidovorax valerianellae
  REGION 1..234: note = tr|A0A1G6XPH1|A0A1G6XPH1_9BURK 7-cyano-7-deazaguanine synthase OS=Acidovorax valerianellae OX=187868 GN=queC PE=3 SV=1
MRVGHALVLFSGGQDSTTCLAWALTHFKRVETIGFDYGQRHHVELQARQDVLDGLRAEFPQWADRLGEDHMVDLAVLGQISDTALTRDTAIQMTEAGLPNTFVPGRNLLFFQLAAAVGYRRGLHTLVGGMCETDFSGYPDCRDDTLKALQVAVSLGMGQRFTFETPLMWIDKAATWEMARQLGGDVLVDLIVQRSHTCYHGVRDTLHAWGYGCGTCPACELRRTGYERWKAGYQ

SEQ ID NO: 35546 - protein, 235 aa, unidentified
  source 1..235: note = Acidovorax wautersii
  REGION 1..235: note = tr|A0A1I2AZE5|A0A1I2AZE5_9BURK 7-cyano-7-deazaguanine synthase OS=Acidovorax wautersii; OX = 1177982 GN=queC PE=3 SV=1
MRPGHALVLFSGGQDSTTCLAWALTHFEHVETIGFDYGQRHQVELQARTEVLAAVRERFPQWAGRLGEDHMVDLAVLGQISDTALTRDTAIQMTAAGLPNTFVPGRNLLFFQLAAAVGYRRGLHTLVGGMCETDFSGYPDCRDDTLKALQVAVSLGMGQRFTFETPLMWIDKAATWELARELGGDALVDIIVRQSHTCYHGVRDTLHSWGYGCGECPACALRRAGHEQWAARSGA

SEQ ID NO: 35547 - protein, 223 aa, unidentified
  source 1..223: note = Acinetobacter albensis
  REGION 1..223: note = tr|A0A1C4GW33|A0A1C4GW33_9GAMM 7-cyano-7-deazaguanine synthase OS=Acinetobacter albensis; OX = 1673609 GN=queC PE=3 SV=1
MRARAIVLLSGGLDSTTCLAWAQARYECIAVSFMYGQRSTTELDAARALTQGAGVEHRVIKIDLGNLGGSALTDLSIDIPEQEQEGIPVTYVPARNTIFLSYALAAAEVFGAEAIVIGINAVDYSGYPDCRPEFIDAFERMARLATKVGVEGKPLKFETPLLHLSKANIIRLGIEHGVDYSQTVSCYQADDQGRACGKCDSCRLRKQGFADASVEDPTRYIPS

SEQ ID NO: 35548 - protein, 221 aa, unidentified
  source 1..221: note = Acinetobacter apis
  REGION 1..221: note = tr|A0A217EFW7|A0A217EFW7_9GAMM 7-cyano-7-deazaguanine synthase OS=Acinetobacter apis; OX = 1229165 GN=queC PE=3 SV=1
MRTRAIVLLSGGLDSTTCLAWAQANYDCVALSFQYGQRSSTELEAAKKLAEQSNVPHHIINIDLGRLGGSALTDHSIDVPEQLNEGIPVTYVPARNTIFLSYALAAAEVYEAQAIVIGVNAVDYSGYPDCRPEYIDAFAKLATLATKAGVEGTPLKIETPLLHLSKANIIRLGLEHGVDYSQTVSCYQADSQGQACGKCDSCRLRKDGFAEAGVEDPTRYV

SEQ ID NO: 35549 - protein, 434 aa, Acinetobacter baumannii; identical to SEQ ID NO: 27312
  REGION 1..434: note = tr|A0A3D5C6B5|A0A3D5C6B5_ACIBA Multifunctional fusion protein OS=Acinetobacter baumannii OX=470 GN=queC; PE = 3 SV=1
  VARIANT 214: note = Xaa can be any naturally occurring amino acid

SEQ ID NO: 35550 - protein, 223 aa, Acinetobacter baumannii
  REGION 1..223: note = tr|A0A062FBL6|A0A062FBL6_ACIBA 7-cyano-7-deazaguanine synthase OS=Acinetobacter baumannii 754286 OX=1310668 GN=queC PE=3 SV=1
MRPRAIVLLSGGLDSTTCLAWAQARYECIAISFMYGQRSTTELDAAKALAQRAGVEHRVINIDLANLGGSALTDHNIAVPEQLQEGIPVTYVPARNTIFLSYALAASEVFNAEAIVIGINAVDYSGYPDCRPEFIDAFANMARLATKAGVEGKPLKFETPLLHLSKANIIRLGIEHGVDYSQTVSCYQADAQGRACGKCDSCRLRKEGFIDAGVTDPTRYIPQ

SEQ ID NO: 35551 - protein, 229 aa, Acinetobacter baylyi
  REGION 1..229: note = sp|Q6F9A3|QUEC_ACIAD 7-cyano-7-deazaguanine synthase; OS = Acinetobacter baylyi (strain ATCC 33305 / BD413 / ADP1); OX = 62977 GN=queC PE=3 SV=1
MNGEFGMRPRAIVLLSGGLDSTTCLAWAQARYECMALSFMYGQRSTTELDAAKAIAQNAGVEHRVINIDLANLGGSALTDHNIDVPEQLQEGIPVTYVPARNTIFLSYALAAAEVFGAEAIVIGVNAVDYSGYPDCRPEYIQAFTNMARLATKAGVEGKPLTFETPLLHLSKANIIRLGIEHGVDYSQTVSCYQADAQGRACGKCDSCRLRKQGFIEAGVTDPTRYIPQ

SEQ ID NO: 35552 - protein, 226 aa, Acinetobacter beijerinckii
  REGION 1..226: note = tr|N9E0I8|N9E0I8_9GAMM 7-cyano-7-deazaguanine synthase OS=Acinetobacter beijerinckii CIP 110307; OX = 1217648 GN=queC PE=3 SV=1
MENNMRSRAIVLLSGGLDSTTCLAWAQANYECIALSFMYGQRSTTELDAARALAQRAGVEHRVINIDLGNLGGSALTDHNIDVPEQLQEGIPVTYVPARNTIFLSYALAAAEVFDAKAIVIGINAVDYSGYPDCRPEFIDAFANLARLATKAGVEGKPLKIETPLLHLSKANIIRLGIEHGVDYSQTVSCYQADAQGRACGKCDSCRLRQQGFIEAGIADPTRYAE

SEQ ID NO: 35553 - protein, 226 aa, Acinetobacter beijerinckii
  REGION 1..226: note = tr|N9E283|N9E283_9GAMM 7-cyano-7-deazaguanine synthase OS=Acinetobacter beijerinckii ANC 3835 OX=1217649; GN = queC PE=3 SV=1
MENNMRSRAIVLLSGGLDSTTCLAWAQANYECIALSFMYGQRSTTELDAARALAQRAGVEHRVINIDLGNLGGSALTDHNIDVPEQLQEGIPVTYVPARNTIFLSYALAAAEVFDAKAIVIGINAVDYSGYPDCRPEFIDAFANLARLATKAGVEGKPLKIETPLLHLSKANIIRLGIEHGVDYSQTVSCYQADAQGRACSKCDSCRLRQQGFIEAGIADPTRYAE

SEQ ID NO: 35554 - protein, 223 aa, Acinetobacter bereziniae
  REGION 1..223: note = tr|N9EPM1|N9EPM1_ACIBZ 7-cyano-7-deazaguanine synthase OS=Acinetobacter bereziniae LMG 1003 = CIP 70.12; OX = 981324 GN=queC PE=3 SV=1
MRPRAIVLLSGGLDSTTCLAWAQANYDCIALSFMYGQRSTTELDAARALTKNAGVEHRVINIDLGNLGGSALTDHNIDVPDHETDGIPVTYVPARNTIFLSYALAAAEVFDAQAIVIGINAVDYSGYPDCRPEFIEAFANMARLATKVGVEGKPLKFETPLLHLSKANIIRLGIEHGVDYSQTVSCYQADDQGRACGKCDSCRLRKEGFKDAGIADPTRYIPQ

SEQ ID NO: 35555 - protein, 223 aa, Acinetobacter bereziniae; identical to SEQ ID NO: 35554
  REGION 1..223: note = tr|A0A0A8TNG8|A0A0A8TNG8_ACIBZ 7-cyano-7-deazaguanine synthase OS=Acinetobacter bereziniae OX=106648 GN=queC PE=3 SV=1

SEQ ID NO: 35556 - protein, 223 aa, unidentified
  source 1..223: note = Acinetobacter bohemicus
  REGION 1..223: note = tr|A0A1I6U4I8|A0A1I6U4I8_9GAMM 7-cyano-7-deazaguanine synthase OS=Acinetobacter bohemicus; OX = 1435036 GN=queC PE=3 SV=1
MRPRAIVLLSGGLDSTTCLAWAQARYECIAISFMYGQRSTTELDAARALTQRAGVEHRVINIDLGNLGGSALTDLSIDVPEQEQVGIPVTYVPARNTIFLSYALAAAEVFGAEAIVIGINAVDYSGYPDCRPEFIDAFATMARLATKVGVEGKPLKFETPLLHLSKANIIRLGIEHGVDYSQTVSCYQADDLGRACGKCDSCRLRKQGFVDAGITDPTRYIPS

SEQ ID NO: 35557 - protein, 223 aa, unidentified; identical to SEQ ID NO: 35556
  source 1..223: note = Acinetobacter bohemicus
  REGION 1..223: note = tr|N8QCS0|N8QCS0_9GAMM 7-cyano-7-deazaguanine synthase OS=Acinetobacter bohemicus ANC 3994 OX=1217715; GN = queC PE=3 SV=1

SEQ ID NO: 35558 - protein, 232 aa, unidentified
  source 1..232: note = Acinetobacter boissieri
  REGION 1..232: note = tr|A0A1G6GUW4|A0A1G6GUW4_9GAMM 7-cyano-7-deazaguanine synthase OS=Acinetobacter boissieri; OX = 1219383 GN=queC PE=3 SV=1
MNRALVLFSGGQDSTTCLMWALENFDEVYTVGFEYGQKHHVEMQCRSQILQSIESLKPTWKNKLKLDHIFNLDFLSQVNTTSLTHEVNIEQTEKYPNTFVPGRNLIFLNVASTVAYKHDIEHIVTGVCETDFSGYPDCRDNTMKALQVALSLGLDKKLVIHTPLMWIDKCETWAMTQSLGSQSAVDYVITETHTCYNGDRTHLYPWGYGCNACPACELRKNGFDAFIANKTT

SEQ ID NO: 35559 - protein, 223 aa, Acinetobacter bouvetii
  REGION 1..223: note = tr|A0A4V2DP62|A0A4V2DP62_9GAMM 7-cyano-7-deazaguanine synthase OS=Acinetobacter bouvetii; OX = 202951 GN=queC PE=3 SV=1
MRPRAIVLLSGGLDSTTCLAWAQSQYECIALSFMYGQRSTTELDAARALTAKAGVEHRVINIDLGNLGGSALTDHTIDVPDHEQEGIPVTYVPARNTIFLSYALAAAEVFGAEAIVIGINAVDYSGYPDCRPEFIEAFANMARLATKVGVEGKPLKFETPLLHLSKANIIRLGIEHGVDYSQTVSCYQADDQGRACGTCDSCRLRKQGFADAGVEDPTRYIPK

SEQ ID NO: 35560 - protein, 223 aa, Acinetobacter bouvetii; identical to SEQ ID NO: 35559
  REGION 1..223: note = tr|N9DSJ9|N9DSJ9_9GAMM 7-cyano-7-deazaguanine synthase OS=Acinetobacter bouvetii DSM 14964 = CIP 107468; OX = 1120925 GN=queC PE=3 SV=1

SEQ ID NO: 35561 - protein, 223 aa, Acinetobacter brisouii
  REGION 1..223: note = tr|V2VTW0|V2VTW0_9GAMM 7-cyano-7-deazaguanine synthase OS=Acinetobacter brisouii CIP 110357 OX=1341683; GN = queC PE=3 SV=1
MRPRAIVLLSGGLDSTTCLAWAQARYECIALSFQYGQRSSTELDAAKALAQRSGVEHRIINIDLGNLGGSALTDHNIAVPEQAQEGIPVTYVPARNTIFLSYALAAAEVFGAEAIVIGVNAVDYSGYPDCRPEFIDAFAQLASLATKAGVEGKPLKIETPLLHLSKGNIIRLGLEHGVDYSQTVSCYQADDQGRACGKCDSCRLRKEGFAQAGVEDPTRYVPQ

SEQ ID NO: 35562 - protein, 198 aa, Acinetobacter calcoaceticus
  REGION 1..198: note = tr|A0A380VJD9|A0A380VJD9_ACICA 7-cyano-7-deazaguanine synthase OS=Acinetobacter calcoaceticus OX=471 GN=NCTC7412_00254 PE=3 SV=1
MKKCLLLSGGIDSFCLAFLQRPDIAITIDYGQSAAEAEIRSSEFVCKKLGIIHEIIKVDCSHLGMGDLSNNPMSKYNEFSDWWPYRNQLLITLCAMKAIQLNINEIMIASVANDSSHIDGSQRFINCIDNLISLQEGNLRITAPVNHLTTAELIKASKVNLNVLKSWSHSCHKANYPCGKCRGCYKHYESLELAENLM

SEQ ID NO: 35563 - protein, 223 aa, Acinetobacter calcoaceticus
  REGION 1..223: note = tr|A0A1C4HLC7|A0A1C4HLC7_ACICA 7-cyano-7-deazaguanine synthase OS=Acinetobacter calcoaceticus OX=471 GN=queC PE=3 SV=1
MRPRAIVLLSGGLDSTTCLAWAQARYECIAISFMYGQRSTTELDAAKALAQRAGVEHRVINIDLANLGGSALTDHNIAVPEQLQEGIPVTYVPARNTIFLSYALAAAEVFNAEAIVIGINAVDYSGYPDCRPEFIDAFANMARLATKAGVEGKPLKFETPLLHLSKANIIRLGIEHGVDYSQTVSCYQADAQGRACGKCDSCRLRKEGFIDAGVTDPTRYIPQ

SEQ ID NO: 35564 - protein, 227 aa, Acinetobacter calcoaceticus
  REGION 1..227: note = tr|A0A2S4T6Q9|A0A2S4T6Q9_9GAMM 7-cyano-7-deazaguanine synthase OS=Acinetobacter calcoaceticus/baumannii complex sp. ABNIH27 OX=2080673; GN = queC PE=3 SV=1
MEKNMRPRAIVLLSGGLDSTTCLAWAQARYECIAISFMYGQRSTTELDAAKALAQRAGVEHRVINIDLANLGGSALTDHNIAVPEQLQEGIPVTYVPARNTIFLSYALAAAEVFNAEAIVIGINAVDYSGYPDCRPEFIDAFANMARLATKAGVEGKPLKFETPLLHLSKANIIRLGIEHGVDYSQTVSCYQADAQGRACGKCDSCRLRKEGFIDAGVTDPTRYIPQ

SEQ ID NO: 35565 - protein, 223 aa, unidentified
  source 1..223: note = Acinetobacter celticus
  REGION 1..223: note = tr|A0A1C3CWZ7|A0A1C3CWZ7_9GAMM 7-cyano-7-deazaguanine synthase OS=Acinetobacter celticus; OX = 1891224 GN=queC PE=3 SV=1
MRRRAIVLLSGGLDSTTCLAWAQAQYECIALSFMYGQRSTTELDAARILTKQAGVEHRVINIDLGNLGGSALTDLSIDIPDHEQEGIPITYVPARNTIFLSYALAAAEVFDAEAIVIGINAVDYSGYPDCRPEFIEAFANMARLATKVGVEGKPLKFETPLLHLSKANIIRLGIEHGVNYSQTVSCYQADDQGRACGTCDSCRLRKQGFADAEVQDPTRYIPK

SEQ ID NO: 35566 - protein, 226 aa, unidentified
  source 1..226: note = Acinetobacter colistiniresistens
  REGION 1..226: note = tr|N9R369|N9R369_9GAMM 7-cyano-7-deazaguanine synthase OS=Acinetobacter colistiniresistens OX=280145; GN = queC PE=3 SV=1
MENNMRSRAIVLLSGGLDSTTCLAWAQANYECIALSFMYGQRSTTELDAAKALAQRAGVEHRIINIDLGNLGGSALTDHNIEVPEQLQEGIPVTYVPARNTIFLSYALAAAEVFDAEAIVIGVNAVDYSGYPDCRPEFIDAFANLARLATKAGVEGKPLKIETPLLHLSKANIIRLGIEHGVDYSQTVSCYQADAQGRACGKCDSCRLRQQGFIEAGIADPTRYAE

SEQ ID NO: 35567 - protein, 223 aa, unidentified
  source 1..223: note = Acinetobacter cumulans
  REGION 1..223: note = tr|A0A3A8GIC7|A0A3A8GIC7_9GAMM 7-cyano-7-deazaguanine synthase OS=Acinetobacter cumulans; OX = 2136182 GN=queC PE=3 SV=1
MRPRAIVLLSGGLDSTTCLAWAQSNYECIALSFMYGQRSTTELVAAQQLTKQAGVEHRVINIDLGNLGGSALTDHSIEVPDHEQEGIPVTYVPARNTIFLSYALAAAEVFGAEAIVIGINAVDYSGYPDCRPEFIEAFANMARLATKVGVEGKPLKFETPLLHLSKANIIRLGIEHGVDYSQTVSCYQADDQGRACGKCDSCRLRKQGFADAGVADPTRYIPV

SEQ ID NO: 35568 - protein, 222 aa, unidentified
  source 1..222: note = Acinetobacter defluvii
  REGION 1..222: note = tr|A0A2S2FGV3|A0A2S2FGV3_9GAMM 7-cyano-7-deazaguanine synthase OS=Acinetobacter defluvii; OX = 1871111 GN=queC PE=3 SV=1
MRPRAVVLLSGGLDSTTCLAWAQARYDCIALSFMYGQRSTTELDAARAITQNAGVEHRVINIDLGNLGGSALTDHNIDVPDHETEGIPVTYVPARNTIFLSYALAAAEVFGAEAIVIGINAVDYSGYPDCRPEYIEAFANMARLATKVGIEGKPLKFETPLLHLSKANIIRLGIEHGVDYSQTVSCYQADDQGRACGKCDSCRLRKQGFSDAGVTDPTRYIQ

SEQ ID NO: 35569 - protein, 440 aa, unidentified
  source 1..440: note = Acinetobacter defluvii
  REGION 1..440: note = tr|A0A2S2FA80|A0A2S2FA80_9GAMM Uncharacterized protein OS=Acinetobacter defluvii OX=1871111; GN = DJ533_01460 PE=4 SV=1
MIELYFDTDTTQLPALSDSLIPVHLYGPPAQNGEYASIGRPLLNEIKRIKEDLDETALDFLTIAMAITAADTFVERNKQAEDGWCREFKLSIPLINPSVWIPQIELLKEILHFLSGDLWHFQFRTGNFVWPDKIKRGRKIPLVGHDSACLFSGGLDSAIGIIDLTSKKINPVLISHAYARDKSKQDNLYNLLGLKNSKFQVIAYPRKAGDIPTDVQMRTRSFNFIAFGTLISTAISQHYQAGKLTTLYVPENGLISINPPLTPRRIGSLSTRTTHPHYMSLLNELFHRVHLPVILDNPYQFMTKGEMMKNCSNTIVLEQIAKDTVSCGKWKRTGIQCGKCVPCIIRRASFHSAAMPDQTVNYVYNDLGLVIKDPDNRDDLMSMILAIRKLKKVKNPKIWISKSGALPTDLKIRRQILDTVVRGFKEVEDYLKSQSLGVNI

SEQ ID NO: 35570 - protein, 224 aa, unidentified
  source 1..224: note = Acinetobacter equi
  REGION 1..224: note = tr|A0A0N7GY78|A0A0N7GY78_9GAMM 7-cyano-7-deazaguanine synthase OS=Acinetobacter equi; OX = 1324350 GN=queC PE=3 SV=1
MRPRAVVLLSGGLDSTTCLAWAQARYDCIALSFRYGQRSSTELDAAKALAERSGVEHRIINIDLGNLGGSALTDHNIDVPDHEQEGIPITYVPARNTIFLSYALAAAEVFGAEAIVIGINAVDYSGYPDCRPEFIDAFANMARLATKVGVEGKPLKFETPLLHLSKANIIRLGVEHGVDYSQTVSCYQADQEGRACGKCDSCRLRKQGFVEAGIEDPTRYIPNN

SEQ ID NO: 35571 - protein, 223 aa, unidentified
  source 1..223: note = Acinetobacter gandensis
  REGION 1..223: note = tr|A0A1A7R9I0|A0A1A7R9I0_9GAMM 7-cyano-7-deazaguanine synthase OS=Acinetobacter gandensis; OX = 1443941 GN=queC PE=3 SV=1
MRPRAIVLLSGGLDSTTCLAWAQARYECIALSFMYGQRSTTELDAAHVLTQQAGVEHRVINIDLGNLGGSALTDHSIEVPDHEQTGIPVTYVPARNTIFLSYALAAAEVFGAEAIVIGINAVDYSGYPDCRPEFIDAFANMARLATKVGVEGKPLKFETPLLHLSKANIIRLGIEHGVDYSQTVSCYQADDQGRACGKCDSCRLRKQGFADAGVEDPTRYIPK

SEQ ID NO: 35572 - protein, 227 aa, unidentified; identical to SEQ ID NO: 35564
  source 1..227: note = Acinetobacter genomosp.
  REGION 1..227: note = tr|A0A1V2UUY3|A0A1V2UUY3_9GAMM 7-cyano-7-deazaguanine synthase OS=Acinetobacter genomosp. 33YU OX=1675530 GN=queC PE=3 SV=1

SEQ ID NO: 35573 - protein, 223 aa, Acinetobacter gerneri
  REGION 1..223: note = tr|N8ZI67|N8ZI67_9GAMM 7-cyano-7-deazaguanine synthase OS=Acinetobacter gerneri DSM 14967 = CIP 107464; OX = 1120926 GN=queC PE=3 SV=1
MRPRAIVLLSGGLDSTTCLAWAQARYECIAISFMYGQRSTTELDAAKALTARAGVEHRVINIDLGNLGGSALTDHNIDVPEEQQEGIPVTYVPARNTIFLSYALAAAEVFDAEAIVIGINAVDYSGYPDCRPEFIEAFANMARLATKVGVEGKPLKFETPLLHLSKANIIRLGIEHGVDYSHTVSCYQADDQGRACGKCDSCRLRKQGFIDAGIADPTRYIPQ

SEQ ID NO: 35574 - protein, 223 aa, Acinetobacter guillouiae
  REGION 1..223: note = tr|A0A077L2L8|A0A077L2L8_ACIGI 7-cyano-7-deazaguanine synthase OS=Acinetobacter guillouiae OX=106649 GN=queC PE=3 SV=1
MRPRAVVLLSGGLDSTTCLAWAQANYDCIALSFMYGQRSTTELDAARALTQRAGVEHRVINIDLGNLGGSALTDLNIDVPDHETDGIPVTYVPARNTIFLSYALAAAEVFDAQAIVIGINAVDYSGYPDCRPEFIEAFANMARLATKVGVEGKPLKFETPLLHLSKANIIRLGIEHGVDYSQTVSCYQADDQGRACGKCDSCRLRKEGFKDAGIADPTRYIPQ

SEQ ID NO: 35575 - protein, 223 aa, Acinetobacter guillouiae; identical to SEQ ID NO: 35574
  REGION 1..223: note = tr|N8Y6U7|N8Y6U7_ACIGI 7-cyano-7-deazaguanine synthase OS=Acinetobacter guillouiae NIPH 991 OX=1217656; GN = queC PE=3 SV=1

SEQ ID NO: 35576 - protein, 226 aa, Acinetobacter gyllenbergii
  REGION 1..226: note = tr|V2U8M1|V2U8M1_9GAMM 7-cyano-7-deazaguanine synthase OS=Acinetobacter gyllenbergii NIPH 230 OX=1217658; GN = queC PE=3 SV=1
MENNMRSRAIVLLSGGLDSTTCLAWAQANYECIALSFMYGQRSTTELDAAKALAQRAGVEHRIINIDLGNLGGSALTDHNIEVPEQLQEGIPVTYVPARNTIFLSYALAAAEVFDAAAIVIGINAVDYSGYPDCRPEFIDAFANLARLATKAGVEGKPLKIETPLLHLSKANIIRLGIEHGVDYSQTVSCYQADAQGRACGKCDSCRLRQQGFIEAGIADPTRYAE

SEQ ID NO: 35577 - protein, 226 aa, Acinetobacter gyllenbergii; identical to SEQ ID NO: 35576
  REGION 1..226: note = tr|A0A1B8UHK2|A0A1B8UHK2_9GAMM 7-cyano-7-deazaguanine synthase OS=Acinetobacter gyllenbergii OX=134534 GN=queC PE=3 SV=1

SEQ ID NO: 35578 - protein, 226 aa, Acinetobacter haemolyticus
  REGION 1..226: note = tr|D4XS98|D4XS98_ACIHA 7-cyano-7-deazaguanine synthase OS=Acinetobacter haemolyticus ATCC 19194; OX = 707232 GN=exsB PE=3 SV=1
MENNMRSRAIVLLSGGLDSTTCLAWAQARYDCVAISFMYGQRSTTELDAAKALAQRAGVEHRVINIDLGNLGGSALTDHNIDVPEQLQEGIPVTYVPARNTIFLSYALAAAEVFDAEAIVIGVNAVDYSGYPDCRPEFIDAFANLARLATKAGVEGKPLKIETPLLHLSKANIIRLGIEHGVDYSQTVSCYQADAQGRACGKCDSCRLRQQGFIEAGIADPTRYTN

SEQ ID NO: 35579 - protein, 226 aa, Acinetobacter haemolyticus; identical to SEQ ID NO: 35578
  REGION 1..226: note = tr|N9FF17|N9FF17_ACIHA 7-cyano-7-deazaguanine synthase OS=Acinetobacter haemolyticus NIPH 261 OX=1217986; GN = queC PE=3 SV=1

SEQ ID NO: 35580 - protein, 229 aa, unidentified
  source 1..229: note = Acinetobacter halotolerans
  REGION 1..229: note = tr|A0A4Q6XJ63|A0A4Q6XJ63_9GAMM 7-cyano-7-deazaguanine synthase OS=Acinetobacter halotolerans OX=1752076 GN=queC PE=3 SV=1
MENNMRSRAIVLLSGGLDSTTCLAWAQARYECVAISFMYGQRSTTELDAAKTLAQNAGVEHRVINIDLGNLGGSALTDHNIDIPEQLQEGIPVTYVPARNTIFLSYALAAAEVFDAEAIVIGVNAVDYSGYPDCRPEFIDAFANLARLATKAGVEGKPLKIETPLLHLSKANIIRLGIEHGVDYSQTVSCYQADAQGRACGKCDSCRLRHQGFIEAGIADPTRYTEQTI

SEQ ID NO: 35581 - protein, 222 aa, unidentified
  source 1..222: note = Acinetobacter idrijaensis
  REGION 1..222: note = tr|A0A098YEZ0|A0A098YEZ0_9GAMM 7-cyano-7-deazaguanine synthase OS=Acinetobacter idrijaensis OX=1507807 GN=queC PE=3 SV=1
MRPRAIVLLSGGLDSTTCLAWAQARYECIALSFRYGQRSTTELDAAKALTQRAGVEHRVINIDLGNLGGSALTDHSIEVPDHEQAGIPITYVPARNTIFLSYALAAAEVFEAEAIVIGINAVDYSGYPDCRPEFIDAFANMARLATKVGVEGQALKFETPLLHLSKANIIRLGIEHGVDYSQTVSCYQADDQGRACGKCDSCRLRKQGFADAGVEDPTRYIP

SEQ ID NO: 35582 - protein, 222 aa, unidentified
  source 1..222: note = Acinetobacter indicus
  REGION 1..222: note = tr|V2VP54|V2VP54_9GAMM 7-cyano-7-deazaguanine synthase OS=Acinetobacter indicus CIP 110367 OX=1341679; GN = queC PE=3 SV=1
MRPRAIVLLSGGLDSTTCLAWAQARYECIALSFRYGQRSTTELDAAKALTQRAGVEHRVINIDLGNLGGSALTDHNIEVPEQEQDGIPVTYVPARNTIFLSYALAAAEVFDAEAIVIGINAVDYSGYPDCRPEFIEAFANMARLATKVGVEGKPLKFETPLLHLSKANIIRLGLDHGVDYSQTVSCYQADDQGRACGKCDSCRLRKQGFLDAGVADPTRYIP

SEQ ID NO: 35583 - protein, 222 aa, unidentified; identical to SEQ ID NO: 35582
  source 1..222: note = Acinetobacter indicus
  REGION 1..222: note = tr|A0A0F3LQL3|A0A0F3LQL3_9GAMM 7-cyano-7-deazaguanine synthase OS=Acinetobacter indicus; OX = 756892 GN=queC PE=3 SV=1

SEQ ID NO: 35584 - protein, 222 aa, Acinetobacter johnsonii
  REGION 1..222: note = tr|A0A0U3SRR2|A0A0U3SRR2_ACIJO 7-cyano-7-deazaguanine synthase OS=Acinetobacter johnsonii XBB1 OX=1242245 GN=queC PE=3 SV=1
MRPRAIVLLSGGLDSTTCLAWAQAQYDCTALSFMYGQRSTTELDAARELAKKAGVEHRVINIDLGNLGGSALTDHSIDVPDHEQDGIPVTYVPARNTIFLSYALAAAEVLDAEAIVIGINAVDYSGYPDCRPEFIEAFANMARLATKVGVEGKPLKFETPLLHLSKANIIRLGIEHGVDYSQTVSCYQADDQGRACGKCDSCRLRKEGFADAGVTDPTRYIP

SEQ ID NO: 35585 - protein, 222 aa, Acinetobacter johnsonii
  REGION 1..222: note = tr|A0A0W8H1F0|A0A0W8H1F0_ACIJO 7-cyano-7-deazaguanine synthase OS=Acinetobacter johnsonii; OX = 40214 GN=queC PE=3 SV=1
MRPRAIVLLSGGLDSTTCLAWAQAQYDCTALSFMYGQRSTTELDAARELTKKAGVEHRVINIDLGNLGGSALTDHSIDVPDHEQVGIPVTYVPARNTIFLSYALAAAEVLDAEAIVIGINAVDYSGYPDCRPEFIEAFANMARLATKVGVEGKPLKFETPLLHLSKANIIRLGIEHGVDYSQTVSCYQADDQGRACGKCDSCRLRKEGFADAGVTDPTRYIP

SEQ ID NO: 35586 - protein, 226 aa, Acinetobacter junii
  REGION 1..226: note = tr|D0SK35|D0SK35_ACIJU 7-cyano-7-deazaguanine synthase OS=Acinetobacter junii SH205 OX=575587 GN=queC; PE = 3 SV=1
MENNMRSRAIVLLSGGLDSITCLAWAQANYDCIALSFMYGQRSTTELDAAKALAQRAGVEHRVINIDLGNLGGSALTDHNIDVPEQLQEGIPVTYVPARNTIFLSYALAAAEVFDAEAIVIGVNAVDYSGYPDCRPEFIDAFANLARLATKAGVEGKPLKIETPLLHLSKANIIRLGIEHGVDYSKTVSCYQADAQGRACGKCDSCRLRQQGFIEAGVADPTRYAE

SEQ ID NO: 35587 - protein, 226 aa, Acinetobacter junii
  REGION 1..226: note = tr|A0A3R9GS35|A0A3R9GS35_ACIJU 7-cyano-7-deazaguanine synthase OS=Acinetobacter junii; OX = 40215 GN=queC PE=3 SV=1
MENNMRSRAIVLLSGGLDSTTCLAWAQAKYDCIALSFMYGQRSTTELDAAKALAQRAGVEHRVINIDLGHLGGSALTDHNIDVPEQLQEGIPVTYVPARNTIFLSYALAAAEVFDAAAIVIGVNAVDYSGYPDCRPEFIDAFANLARLATKAGVEGKPLKIETPLLHLSKANIIRLGIEHGVDYSQTVSCYQADAQGRACGKCDSCRLRQQGFIEAGVADPTRYAE

SEQ ID NO: 35588 - protein, 223 aa, unidentified
  source 1..223: note = Acinetobacter kookii
  REGION 1..223: note = tr|A0A1G6H0T5|A0A1G6H0T5_9GAMM 7-cyano-7-deazaguanine synthase OS=Acinetobacter kookii; OX = 1226327 GN=queC PE=3 SV=1
MRPRAIVLLSGGLDSTTCLAWAQARYECIALSFMYGQRSTTELDAARALTQRAGVEHRVINIDLGNLGGSALTDHNIDVPEHEQEGIPVTYVPARNTIFLSYALAAAEVFGAEAIVIGINAVDYSGYPDCRPEFIEAFANMARLATKVGVEGKPLKFETPLLHLSKANIIRLGIEHGVDYSQTVSCYQADDQGRACGKCDSCRLRKQGFADAGIADPTRYIPS

SEQ ID NO: 35589 - protein, 223 aa, unidentified
  source 1..223: note = Acinetobacter kyonggiensis
  REGION 1..223: note = tr|A0A1H3HHT0|A0A1H3HHT0_9GAMM 7-cyano-7-deazaguanine synthase OS=Acinetobacter kyonggiensis OX=595670 GN=queC PE=3 SV=1
MRPRAIVLLSGGLDSTTCLAWAQARYECIAISFMYGQRSTTELDAARALTQRAGVEHRVINIDLGNLGGSALTDLSIDVPEQEQVGIPVTYVPARNTIFLSYALAAAEVFGAEAIIIGINAVDYSGYPDCRPEFIDAFATMARLATKVGVEGKPLKFETPLLHLSKANIIRLGIEHGVDYSQTVSCYQADDLGRACGKCDSCRLRKQGFVDAGITDPTRYIPS

SEQ ID NO: 35590 - protein, 222 aa, unidentified
  source 1..222: note = Acinetobacter lactucae
  REGION 1..222: note = tr|R8YW94|R8YW94_9GAMM 7-cyano-7-deazaguanine synthase OS=Acinetobacter lactucae OX=1785128 GN=queC PE=3; SV = 1
MRPRAIVLLSGGLDSTTCLAWAQARYECIAISFMYGQRSTTELDAAKALAQRSGVEHRVINIDLANLGGSALTDHNIAVPEQLQEGIPVTYVPARNTIFLSYALAAAEVFNAEAIVIGINAVDYSGYPDCRPEFIDAFANMARLATKAGVEGKPLKFETPLLHLSKANIIRLGIEHGVDYSQTVSCYQADAQGRACGKCDSCRLRKEGFIDAGVTDPTRYIP

SEQ ID NO: 35591 - protein, 226 aa, unidentified
  source 1..226: note = Acinetobacter lactucae
  REGION 1..226: note = tr|A0A3R9Y6Z4|A0A3R9Y6Z4_9GAMM 7-cyano-7-deazaguanine synthase OS=Acinetobacter lactucae; OX = 1785128 GN=queC PE=3 SV=1
MEKNMRSRAIVLLSGGLDSTTCLAWAQARYECIAISFMYGQRSTTELDAAKALAQRSGVEHRVINIDLANLGGSALTDHNIAVPEQLQEGIPVTYVPARNTIFLSYALAAAEVFNAEAIVIGINAVDYSGYPDCRPEFIDAFANMARLATKAGVEGKPLKFETPLLHLSKANIIRLGIEHGVDYSQTVSCYQADAQGRACGKCDSCRLRKEGFIDAGVTDPTRYIP

SEQ ID NO: 35592 - protein, 224 aa, unidentified
  source 1..224: note = Acinetobacter larvae
  REGION 1..224: note = tr|A0A1B2LXK0|A0A1B2LXK0_9GAMM 7-cyano-7-deazaguanine synthase OS=Acinetobacter larvae; OX = 1789224 GN=queC PE=3 SV=1
MRARAIVLLSGGLDSTTCLAWAQARYECIALSFLYGQRSTTELDAAKAMCQDLGVEHRTIQIDLGQLGGSALTDHSIDVPEQEQSGIPITYVPARNTIFLSYALAAAEVYAAQAIVIGINAVDYSGYPDCRPEFIAAFEQLAQLATKVGVEGNALKIETPLLHLSKANIIRLGLEHGVDYSKTVSCYQADNQGRACGKCDSCRLRKQGFTDAGIADPTRYIPNK

SEQ ID NO: 35593 - protein, 222 aa, Acinetobacter lwoffii
  REGION 1..222: note = tr|N9HIS4|N9HIS4_ACILW 7-cyano-7-deazaguanine synthase OS=Acinetobacter lwoffii ATCC 9957 = CIP 70.31; OX = 1311804 GN=queC PE=3 SV=1
MRPRAIVLLSGGLDSTTCLAWAQACYECIALSFRYGQRSTTELDAAKALTQRAGVEHRVINIDLGNLGGSALTDHSIEVPDHEQAGIPITYVPARNTIFLSYALAAAEVFEAEAIVIGINAVDYSGYPDCRPEFIDAFANMARLATKVGVEGQALKFETPLLHLSKANIIRLGIEHGVDYSQTVSCYQADDQGRACGKCDSCRLRKQGFADAGVEDPTRYIP

SEQ ID NO: 35594 - protein, 222 aa, Acinetobacter lwoffii
  REGION 1..222: note = tr|N9G9H3|N9G9H3_ACILW 7-cyano-7-deazaguanine synthase OS=Acinetobacter lwoffii NIPH 478 OX=1217668; GN = queC PE=3 SV=1
MRPRAIVLLSGGLDSTTCLAWAQARYECIALSFRYGQRSTTELDAAKALTQRAGVEHRVINIDLGNLGGSALTDHSIEVPDHEQAGIPITYVPARNTIFLSYALAAAEVFEAEAIVIGINAVDYSGYPDCRPEFIEAFANMARLATKVGVEGQALKFETPLLHLSKANIIRLGIEHGVDYSQTVSCYQADDQGRACGKCDSCRLRKQGFADAGVEDPTRYIP

SEQ ID NO: 35595 - protein, 222 aa, unidentified
  source 1..222: note = Acinetobacter marinus
  REGION 1..222: note = tr|A0A1G6J642|A0A1G6J642_9GAMM 7-cyano-7-deazaguanine synthase OS=Acinetobacter marinus; OX = 281375 GN=queC PE=3 SV=1
MRQRAVVLLSGGLDSSTCLAWAASQYDCYAISFMYGQRSTSELEAAKTIAEKYALDHRIINIDLGNIGGSALTDHNLDVPDQLQDGIPITYVPARNTIFLSYALALAEVKDAQAIVIGVNAVDYSGYPDCRPEYIDAFTKMANLATKAGVEGHPIKIETPLLHLSKANIIRLGVEHGLDYAQTVSCYQADADGRACGKCDSCRLRHQGFIEAEIADPTRYVN

SEQ ID NO: 35596 - protein, 222 aa, unidentified
  source 1..222: note = Acinetobacter nectaris
  REGION 1..222: note = tr|V2TS61|V2TS61_9GAMM 7-cyano-7-deazaguanine synthase OS=Acinetobacter nectaris CIP 110549 OX=1392540; GN = queC PE=3 SV=1
MRPRAIVLLSGGLDSTTCLAWAQSSYDCIALSFQYGQRSSTELEAAKNLAQQANIPHRVINIDLGNLGGSALTDHTIDVPEQAQTGIPITYVPARNTIFLSYALAAAEVFQAEAIVIGVNAVDYSGYPDCRPEFVEAFANLAALATKAGVEGKPLKIETPLLHLSKGNIIRLGIEHGVDYSQTVSCYQADEQGRACGKCDSCRLRKEGFLEAKVDDPTRYVS

SEQ ID NO: 35597 - protein, 223 aa, Acinetobacter nosocomialis; identical to SEQ ID NO: 35563
  REGION 1..223: note = tr|A0A0E2GC81|A0A0E2GC81_ACINO 7-cyano-7-deazaguanine synthase OS=Acinetobacter nosocomialis NIPH 386 OX=1217985 GN=queC PE=3 SV=1

SEQ ID NO: 35598 - protein, 227 aa, Acinetobacter nosocomialis; identical to SEQ ID NO: 35564
  REGION 1..227: note = tr|A0A1V0YWZ5|A0A1V0YWZ5_ACINO 7-cyano-7-deazaguanine synthase OS=Acinetobacter nosocomialis OX=106654 GN=queC PE=3 SV=1

SEQ ID NO: 35599 - protein, 442 aa, unidentified
  source 1..442: note = Acinetobacter oleivorans
  REGION 1..442: note = tr|A0A2T5QCA1|A0A2T5QCA1_9GAMM 7-cyano-7-deazaguanine synthase OS=Acinetobacter oleivorans OX=1148157 GN=DBL02_09425 PE=3 SV=1
MIELYFDTDNTKLPAMTDTLLPVYMFGKSAVSGKYNSIGGAALLEFRRLQEEADETAFDLMMLSLAVTAADTFVERDSRAEDAWCRRFKINLPLLNPTLWDRQKNLLKEVLHFLSGDLWDFEFRQSDFVIPRMMNGGIRTKKIYIKGHDSVCLFSGGLDSTIGAIDLKAQGKKSVLVSHAYPKDRQKQDHVYHDLKLNNARFQVVANPRKVKEFPADVQMRTRSFNFIAFGALIATALSKNHFSNKIIKLYIPENGLISINPPLTPRRIGALSTRTTHPYFLQKLNILFKNVGLPVEIENPYQYKTKGEMMLECKDQSSLKKIAATTVSCGKWKRSGMQCGKCLPCLIRRASFDKFQYKDSTQYQYSHLSDVVKHANKRDDLMSMVMAIHKIRGSSNTNLWVAKSGFLPTEPNERQLIIDTVLRGFKEVEQYLKKENLGINI

SEQ ID NO: 35600 - protein, 222 aa, unidentified
  source 1..222: note = Acinetobacter oleivorans
  REGION 1..222: note = tr|D8JEE0|D8JEE0_ACISD 7-cyano-7-deazaguanine synthase OS=Acinetobacter oleivorans (strain JCM 16667 / KCTC 23045 / DR1) OX=436717 GN=queC PE=3 SV=1
MRPRAIVLLSGGLDSTTCLAWAQARYECIAISFMYGQRSTTELDAAKALAQRAGVEHRVINIDLANLGGSALTDHNIAVPEQLQEGIPVTYVPARNTIFLSYALAAAEVFNAEAIVIGINAVDYSGYPDCRPEFIDAFANMARLATKAGVEGKPLKFETPLLHLSKANIIRLGIEHGVDYSQTVSCYQADAQGRACGKCDSCRLRKEGFIEAGVADPTRYIP

SEQ ID NO: 35601 - protein, 226 aa, Acinetobacter parvus
  REGION 1..226: note = tr|N8RH14|N8RH14_9GAMM 7-cyano-7-deazaguanine synthase OS=Acinetobacter parvus NIPH 1103 OX=1217671; GN = queC PE=3 SV=1
MENNMRSRAIVLLSGGLDSTTCLAWAQANYDCIALSFMYGQRSTTELDAAKSLAQRAGVEHRVINIDLGNLGGSALTDHNIDVPEQLQEGIPVTYVPARNTIFLSYALAAAEVFDAEAIVIGVNAVDYSGYPDCRPEFIDAFANLARLATKAGVEGKPLKIETPLLHLSKANIIRLGIEHGVDYSQTVSCYQADAQGRACSKCDSCRLRQQGFIEAGIADPTRYTE

SEQ ID NO: 35602 - protein, 226 aa, Acinetobacter parvus
  REGION 1..226: note = tr|N8QBP4|N8QBP4_9GAMM 7-cyano-7-deazaguanine synthase OS=Acinetobacter parvus DSM 16617 = CIP 108168; OX = 981333 GN=queC PE=3 SV=1
MENNMRSRAIVLLSGGLDSTTCLAWAQANYDCIAISFMYGQRSTTELDAAKALAQRAGVEHRVINIDLGNLGGSALTDHNIDVPEQLQEGIPVTYVPARNTIFLSYALAAAEVFDAEAIVIGVNAVDYSGYPDCRPEFIDAFANLARLATKAGVEGKPLKIETPLLHLSKANIIRLGIEHGVDYSQTVSCYQADAQGRACSKCDSCRLRQQGFIEAGIADPTRYTE

SEQ ID NO: 35603 - protein, 222 aa, unidentified
  source 1..222: note = Acinetobacter piscicola
  REGION 1..222: note = tr|A0A4Q4H542|A0A4Q4H542_9GAMM 7-cyano-7-deazaguanine synthase OS=Acinetobacter piscicola; OX = 2006115 GN=queC PE=3 SV=1
MRPRAVVLLSGGLDSTTCLAWAQANYDCIALSFMYGQRSTTELDAARAITKNAGIEHRVINIDLGNLGGSALTDHNIDVPDHETDGIPVTYVPARNTIFLSYALAAAEVFDAQAIVIGINAVDYSGYPDCRPEFIEAFANMARLATKVGIEGKPLKFETPLLHLSKANIIRLGIEHGVDYSQTVSCYQADDQGRACGKCDSCRLRKQGFNDAGVADPTRYIQ

SEQ ID NO: 35604 - protein, 222 aa, Acinetobacter pittii
  REGION 1..222: note = tr|R8YNS5|R8YNS5_ACIPI 7-cyano-7-deazaguanine synthase OS=Acinetobacter pittii ANC 4050 OX=1217691; GN = queC PE=3 SV=1
MRSRAIVLLSGGLDSTTCLAWAQARYECIAISFMYGQRSTTELDAAKALAQHSGVEHRVINIDLANLGGSALTDHNIAVPEQLQEGIPVTYVPARNTIFLSYALAAAEVFNAEAIVIGINAVDYSGYPDCRPEFIDAFANMARLATKAGVEGKPLKFETPLLHLSKANIIRLGIEHGVDYSQTVSCYQADAQGRACGKCDSCRLRKEGFKEAGVADPTRYIP

SEQ ID NO: 35605 - protein, 226 aa, Acinetobacter pittii; identical to SEQ ID NO: 35591
  REGION 1..226: note = tr|A0A1C2QQM9|A0A1C2QQM9_ACIPI 7-cyano-7-deazaguanine synthase OS=Acinetobacter pittii; OX = 48296 GN=queC PE=3 SV=1

SEQ ID NO: 35606 - protein, 222 aa, unidentified
  source 1..222: note = Acinetobacter populi
  REGION 1..222: note = tr|A0A1Z9Z140|A0A1Z9Z140_9GAMM 7-cyano-7-deazaguanine synthase OS=Acinetobacter populi; OX = 1582270 GN=queC PE=3 SV=1
MRPKAVVLLSGGLDSSTCLAWAAAHYDCYAISFMYGQRSTSELKAAQILAQQFALEHRIINIDLGNIGGSALTDHNLDVPEQLQDGIPITYVPARNTIFLSYALALAEVKEAEAIVIGVNAVDYSGYPDCRPEYIDAFTKMANLATKAGIEGHPIKIETPLLHLSKANIIQLGLKHGLDYSQTVSCYQADDQGRACGKCDSCRLRHQGFIEANVADPTRYIM

SEQ ID NO: 35607 - protein, 223 aa, unidentified
  source 1..223: note = Acinetobacter pragensis
  REGION 1..223: note = tr|A0A151Y1W1|A0A151Y1W1_9GAMM 7-cyano-7-deazaguanine synthase OS=Acinetobacter pragensis; OX = 1806892 GN=queC PE=3 SV=1
MRPRAIVLLSGGLDSTTCLAWAQSQYECIALSFMYGQRSTTELDAARELTAKAGVEHRVINIDLGNLGGSALTDHTIDVPDHEQEGIPVTYVPARNTIFLSYALAAAEVFGAEAIVIGINAVDYSGYPDCRPEFIEAFANMARLATKVGVEGKPLKFETPLLHLSKANIIRLGIEHGVDYSQTVSCYQADDQGRACGKCDSCRLRKQGFADAGVEDPTRYIPK

SEQ ID NO: 35608 - protein, 226 aa, unidentified
  source 1..226: note = Acinetobacter proteolyticus
  REGION 1..226: note = tr|A0A2N0WFT8|A0A2N0WFT8_9GAMM 7-cyano-7-deazaguanine synthase OS=Acinetobacter proteolyticus OX=1776741 GN=queC PE=3 SV=1
MENNMRSRAIVLLSGGLDSTTCLAWAQANYECIALSFMYGQRSTTELDAAKALAQRAGVEHRIINIDLGNLGGSALTDHNIEVPEQLQEGIPVTYVPARNTIFLSYALAAAEVFDAAAIVIGINAVDYSGYPDCRPEFIDAFANLACLATKAGVEGKPLKIETPLLHLSKANIIRLGIEHGVDYSQTVSCYQADAQGRACGKCDSCRLRQQGFIEAGIADPTRYAE

SEQ ID NO: 35609 - protein, 226 aa, unidentified
  source 1..226: note = Acinetobacter proteolyticus
  REGION 1..226: note = tr|A0A1E7RAG8|A0A1E7RAG8_9GAMM 7-cyano-7-deazaguanine synthase OS=Acinetobacter proteolyticus OX=1776741 GN=queC PE=3 SV=1
MENNMRSRAIVLLSGGLDSTTCLAWAQANYECIALSFMYGQRSTTELDAAKALAQRAGVEHRVINIDLGNLGGSALTDHNIEVPEQLQEGIPVTYVPARNTIFLSYALAAAEVFDAAAIVIGINAVDYSGYPDCRPEFIDAFANLARLATKAGVEGKPLKIETPLLHLSKANIIRLGIEHGVDYSQTVSCYQADAQGRACGKCDSCRLRQQGFIEAGIADPTRYAE

SEQ ID NO: 35610 - protein, 222 aa, unidentified
  source 1..222: note = Acinetobacter puyangensis
  REGION 1..222: note = tr|A0A240E7D4|A0A240E7D4_9GAMM 7-cyano-7-deazaguanine synthase OS=Acinetobacter puyangensis OX=1096779 GN=queC PE=3 SV=1
MRPKAVVLLSGGLDSSTCLAWAAAQYDCYAISFMYGQRSTSELKAAQTLAQQFALEHRIINIDLGNIGGSALTDHNLDVPEQLEDGIPITYVPARNTIFLSYALALAEVKEAEAIVIGVNAVDYSGYPDCRPEYIDAFTKMANLATKAGIEGHPIKIETPLLHLSKANIIQLGLKHGLDYSQTVSCYQADDQGRACGKCDSCRLRHQGFVEANVTDPTRYIM

SEQ ID NO: 35611 - protein, 222 aa, unidentified
  source 1..222: note = Acinetobacter qingfengensis
  REGION 1..222: note = tr|A0A1E7RDT1|A0A1E7RDT1_9GAMM 7-cyano-7-deazaguanine synthase OS=Acinetobacter qingfengensis OX=1262585 GN=queC PE=3 SV=1
MRPRAVVLLSGGLDSSTCLAWASAHYDCYAISFMYGQRSTSELKAAQNLAKKYALEHRIINIDLGNIGGSALTDHNLEVPDHAQEGIPITYVPARNTIFLSYALALAEVKEAQAIVIGVNAVDYSGYPDCRPEYIDAFTKMANLATKAGVEGHPVKIETPLLHLSKGNIIRLGLEHGLDYAQTVSCYQADDQGYACGKCDSCRLRHQGFIEAGVADPTRYIN

SEQ ID NO: 35612 - protein, 201 aa, Acinetobacter radioresistens
  REGION 1..201: note = tr|A0A3F3GXW0|A0A3F3GXW0_ACIRA 7-cyano-7-deazaguanine synthase OS=Acinetobacter radioresistens NIPH 2130 OX=1217674 GN=F940_00706 PE=3 SV=1
MKSVLLLSGGMDSTAIAWWKRPDYALTIDYGQLAAKAEIAASQSICRYLNIPHEILTVDCRNIGSGDMAGTIESKHAPASDWWPYRNQLLITLAGMKMLPFNISKILIGTVKTDNGHTDGSHEFIDAMNQLMFLQEGHITVEAPAINLSTKELIQLSNIPAELLAWSHSCHKSEVTCGNCRGCNKYFEIFEQVGYDLGKLG

SEQ ID NO: 35613 - protein, 222 aa, Acinetobacter radioresistens
  REGION 1..222: note = tr|A0A2T1J1W8|A0A2T1J1W8_ACIRA 7-cyano-7-deazaguanine synthase OS=Acinetobacter radioresistens OX=40216 GN=queC PE=3 SV=1
MRSRAIVLLSGGLDSTTCLAWAQARYECIAISFMYGQRSTTELDAAKALTQRAGVEHRVINIDLGNLGGSALTDHNIDVPVQEQSGIPVTYVPARNTIFLSYALAAAEVFDAEAIVIGINAVDYSGYPDCRPEFIEAFANMARLATKVGVEGKPLKFETPLLHLSKANIIRLGIEHGVDYSQTVSCYQADDQGRACGQCDSCRLRKQGFQEAGIEDPTRYIP

SEQ ID NO: 35614 - protein, 223 aa, Acinetobacter rudis
  REGION 1..223: note = tr|S3NB68|S3NB68_9GAMM 7-cyano-7-deazaguanine synthase OS=Acinetobacter rudis CIP 110305 OX=421052; GN = queC PE=3 SV=1
MRPRAIVLLSGGLDSTTCLAWAQARYECIAISFMYGQRSNTELDAAKALTKAAGVEHRVINIDLGQLGGSALTDHSIDVPVQEQEGIPVTYVPARNTIFLSYALAAAEVYQADAIVIGINAVDYSGYPDCRPEFIEAFAQLAALATKAGVEGKPLKIETPLLHLSKAAIIGLGLEHGVDYAQTVSCYQADNQGRACGQCDSCRLRKQGFIDAGVTDPTRYIPQ

SEQ ID NO: 35615 - protein, 441 aa, Acinetobacter schindleri
  REGION 1..441: note = tr|N8Z8V0|N8Z8V0_9GAMM 7-cyano-7-deazaguanine synthase OS=Acinetobacter schindleri CIP 107287 OX=1217988; GN = F955_00353 PE=3 SV=1
MIELYFETDSAKLPPLSDRLLPVLMFGKSAVSGKYNSIGGAALIEFRRLQEESDETAFDLMMLSLAVTAADTFVERDSRAEDAWCRQLKINLPMLNPTLWDKQKPLLKETLHFLSGDLWDFEFRQSDFQIPEMMKGMKARKIFINKHDSVCLFSGGLDSTIGAIDLQFQGKKSVLVSHAYPKDRQKQDGVYHKLRLSNARFQVVANPRKVKEIPADVQMRTRSFNFIAFGALIATALSKNHHSNKIIPLYIPENGLISINPPLTPRRIGSLSTRTTHPYFLKKLNELFSSIDLPVELLNPYQFKTKGEMMLECKDQKLLKKVATDTVSCGKWKRSGVQCGKCLPCLIRRASFNASQFKDLTDYQYSVLSDVIKRDKQRDDLMSMVMAISKIKNTGNTNLWVAKSGFLPIEPKERQQIIDTVLRGFAEVEQYLKKENLGVNI

SEQ ID NO: 35616 - protein, 222 aa, Acinetobacter schindleri
  REGION 1..222: note = tr|A0A1P8PLA8|A0A1P8PLA8_9GAMM 7-cyano-7-deazaguanine synthase OS=Acinetobacter schindleri OX=108981 GN=queC PE=3 SV=1
MRPRAIVLLSGGLDSTTCLAWAQARYECIALSFMYGQRSTTELDAARALTGRAGVEHRVINIDLGNLGGSALTDHSIDVPDQLQEGIPVTYVPARNTIFLSYALAAAEVFGAEAIVIGINAVDYSGYPDCRPEFIEAFANMAHLATKVGVEGQALKFETPLLHLSKANIIRLGLDHGVDYSQTVSCYQADDQGRACGTCDSCRLRKQGFADAGVEDPTRYIP

SEQ ID NO: 35617 - protein, 227 aa, unidentified; identical to SEQ ID NO: 35564
  source 1..227: note = Acinetobacter seifertii
  REGION 1..227: note = tr|A0A2M8MIJ1|A0A2M8MIJ1_9GAMM 7-cyano-7-deazaguanine synthase OS=Acinetobacter seifertii; OX = 1530123 GN=queC PE=3 SV=1

SEQ ID NO: 35618 - protein, 442 aa, unidentified
  source 1..442: note = Acinetobacter seifertii
  REGION 1..442: note = tr|N8SAC9|N8SAC9_9GAMM 7-cyano-7-deazaguanine synthase OS=Acinetobacter seifertii OX=1530123; GN = F985_03631 PE=3 SV=1
MIELYFDTDNTKLPLMTDKLLPVYMFGRSAVSGKYNSIGGAALLEFRRLQEEADETAFDLMMLSLAVTAADTFVERDSRAEDAWCRQFKINLPLLNPTLWDGQKNLLKEVLHFLSGDLWDFEFRQSDFVIPRMMNGGIRTKKIYIKGHDSVCLFSGGLDSTIGAIDLKAQGKKSVLVSHAYPKDRQKQDHVYHDLKLNNARFQVVANPRKVKEIPADVQMRTRSFNFIAFGALIATALSKNHFSNKIIKLYIPENGLISINPPLTPRRIGALSTRTTHPYFLQKLNILFKNVGLPVEIENPYQYKTKGEMMLECKDQSSLKKIAATTVSCGKWKRFGMQCGKCLPCLIRRASFDKFQYKDLTQYQYSHLSDVVKHANKRDDVMSMVMAIHKIRGSSNTNLWVAKSGFLPTEPNERQLIIDTVLRGFKEVEQYLKKENLGINI

SEQ ID NO: 35619 - protein, 223 aa, Acinetobacter soli
  REGION 1..223: note = tr|N9BSM0|N9BSM0_9GAMM 7-cyano-7-deazaguanine synthase OS=Acinetobacter soli NIPH 2899 OX=1217677; GN = queC PE=3 SV=1
MRPRAIVLLSGGLDSTTCLAWAQARYECMALSFMYGQRSSTELDAAKALTQRAGVEHRVINIDLGNLGGSALTDHNIDVPEQQQDGIPVTYVPARNTIFLSYALAAAEVFGAEAIVIGVNAVDYSGYPDCRPEYIEAFTNMARLATKAGVEGKPLTFETPLLHLSKANIIRLGIEHGVDYSQTVSCYQADTQGRACGKCDSCRLRKEGFIEAGVADPTRYIPQ

SEQ ID NO: 35620 - protein, 223 aa, Acinetobacter soli; identical to SEQ ID NO: 35619
  REGION 1..223: note = tr|A0A1P8EEZ2|A0A1P8EEZ2_9GAMM 7-cyano-7-deazaguanine synthase OS=Acinetobacter soli; OX = 487316 GN=queC PE=3 SV=1

SEQ ID NO: 35621 - protein, 222 aa, Acinetobacter sp.
  REGION 1..222: note = tr|A0A241V0F0|A0A241V0F0_9GAMM 7-cyano-7-deazaguanine synthase OS=Acinetobacter sp. ANC 4204 OX=1977884 GN=queC PE=3 SV=1
MRPRAIVLLSGGLDSTTCLAWAQAQYDCTALSFMYGQRSTTELDAARELTKKAGVEHRVINIDLGNLGGSALTDHSIDVPDHEQVGIPVTYVPARNTIFLSYALAAAEVLDAEAIVIGINAVDYSGYPDCRPEFIEAFANMARLATKVGVEGKPLKFETPLLHLSKANIIRLGIEHGVDYSQTVSCYQADDQGRACGKCDSCRLRKEGFADAGVEDPTRYIP

SEQ ID NO: 35622 - protein, 222 aa, Acinetobacter sp.; identical to SEQ ID NO: 35594
  REGION 1..222: note = tr|A0A1E3GMB7|A0A1E3GMB7_9GAMM 7-cyano-7-deazaguanine synthase OS=Acinetobacter sp. 51m; OX = 1856846 GN=queC PE=3 SV=1

SEQ ID NO: 35623 - protein, 222 aa, Acinetobacter tandoii
  REGION 1..222: note = tr|A0A515BDL7|A0A515BDL7_9GAMM 7-cyano-7-deazaguanine synthase OS=Acinetobacter tandoii; OX = 202954 GN=queC PE=3 SV=1
MRTRAIVLLSGGLDSTTCLAWAQARYECMAISFMYGQRSTTELDAAKALAQRAGVEHRIINIDLSNLGGSALTDHSIDVPEQLQEGIPVTYVPARNTIFLSYALAAAEVFGAEAIVIGVNAVDYSGYPDCRPEYIEAFANMARLATKVGVEGKPLKFETPLLHLSKANIIRLGIEHGVDYSQTVSCYQADDQGRACGKCDSCRLRKQGFEDAGVADPTRYIP

SEQ ID NO: 35624 - protein, 222 aa, Acinetobacter tandoii
  REGION 1..222: note = tr|R9AXI6|R9AXI6_9GAMM 7-cyano-7-deazaguanine synthase OS=Acinetobacter tandoii DSM 14970 = CIP 107469; OX = 1120927 GN=queC PE=3 SV=1
MRPRAIVLLSGGLDSTTCLAWAQARYECMAISFMYGQRSTTELDAAKALTQRVGVEHRIINIDLGNLGGSALTDHSIDVPEQLQEGIPVTYVPARNTIFLSYALAAAEVFGAEAIVIGINAVDYSGYPDCRPEYIEAFANMARLATKVGVEGKALKFETPLLHLSKANIIRLGIEHGVDYSQTVSCYQADDQGRACGKCDSCRLRKQGFEDAGVADPTRYIP

SEQ ID NO: 35625 - protein, 226 aa, Acinetobacter tjernbergiae
  REGION 1..226: note = tr|V2V6M6|V2V6M6_9GAMM 7-cyano-7-deazaguanine synthase OS=Acinetobacter tjernbergiae DSM 14971 = CIP 107465 OX=1120928 GN=queC PE=3 SV=1
MENNMRSRAIVLLSGGLDSTTCLAWAQANYACIALSFMYGQRSTTELDAARALAQRAGVEHRVINIDLGNLGGSALTDHNIDVPEQLQEGIPVTYVPARNTIFLSYALAAAEVFDAAAIVIGINAVDYSGYPDCRPEFIDAFANLARLATKAGVEGKPLKIETPLLHLSKANIIRLGIEHGVDYSQTVSCYQADAQGRACGKCDSCRLRQQGFIEAGITDPTRYTE

SEQ ID NO: 35626 - protein, 223 aa, Acinetobacter towneri
  REGION 1..223: note = tr|N9BBD1|N9BBD1_9GAMM 7-cyano-7-deazaguanine synthase OS=Acinetobacter towneri DSM 14962 = CIP 107472; OX = 1120929 GN=queC PE=3 SV=1
MRPRAIVLLSGGLDSTTCLAWAQARYECIALSFMYGQRSTTELDAARALTKNAGIEHRVINIDLGNLGGSALTDHSIEVPDYEQEGIPVTYVPARNTIFLSYALAAAEVFDAEAIVIGINAVDYSGYPDCRPEFIDAFANMARLATKVGVEGKPLKFETPLLHLSKANIIRLGIEHGVDYSQTVSCYQADDQGRACGKCDSCRLRKQGFADAGVADPTRYIPS

SEQ ID NO: 35627 - protein, 223 aa, Acinetobacter towneri
  REGION 1..223: note = tr|A0A1E8E227|A0A1E8E227_9GAMM 7-cyano-7-deazaguanine synthase OS=Acinetobacter towneri; OX = 202956 GN=queC PE=3 SV=1
MRHRAIVLLSGGLDSTTCLAWAQARYECIALSFMYGQRSTTELDAARALTKYAGIEHRVINIDLGNLGGSALTDHSIEVPDHEQEGIPVTYVPARNTIFLSYALAAAEVFDAEAIVIGINAVDYSGYPDCRPEFIDAFANMARLATKVGVEGKPLKFETPLLHLSKANIIRLGIEHDVDYSQTVSCYQADDQGRACGTCDSCRLRKQGFADAGVADPTRYIPS

SEQ ID NO: 35628 - protein, 222 aa, Acinetobacter ursingii
  REGION 1..222: note = tr|N9DFB4|N9DFB4_9GAMM 7-cyano-7-deazaguanine synthase OS=Acinetobacter ursingii ANC 3649 OX=1257043; GN = queC PE=3 SV=1
MRPRAIVLLSGGLDSTTCLAWAQARYECMALSFMYGQRSTTELDAAKAIAQNAGVEHRVINIDLGNLGGSALTDHNIDVPDHEQEGIPITYVPARNTIFLSYALAAAEVFGAEAIVIGVNAVDYSGYPDCRPEYIEAFTNMARLATKAGVEGKPLTFETPLLHLSKANIIRLGIEHCVDYSQTVSCYQADAEGRACGKCDSCRLRKQGFMEAGIADPTRYIP

SEQ ID NO: 35629 - protein, 222 aa, Acinetobacter ursingii
  REGION 1..222: note = tr|N9SAV1|N9SAV1_9GAMM 7-cyano-7-deazaguanine synthase OS=Acinetobacter ursingii NIPH 706 OX=1217716; GN = queC PE=3 SV=1
MRPRAIVLLSGGLDSTTCLAWAQARYECMALSFMYGQRSTTELDAAKAIAQNAGVEHRVINIDLGNLGGSALTDHNIDVPDHEQEGIPITYVPARNTIFLSYALAAAEVFGAEAIVIGVNAVDYSGYPDCRPEYIEAFTNMARLATKAGVEGKPLTFETPLLHLSKANIIRLGIEHGVDYSQTVSCYQADAEGRACGKCDSCRLRKQGFMEAGIADPTRYIP

SEQ ID NO: 35630 - protein, 222 aa, unidentified
  source 1..222: note = Acinetobacter variabilis
  REGION 1..222: note = tr|A0A427LLE7|A0A427LLE7_9GAMM 7-cyano-7-deazaguanine synthase OS=Acinetobacter variabilis OX=70346 GN=queC PE=3 SV=1
MRPRAIVLLSGGLDSTTCLAWAQARYECIALSFMYGQRSTTELDAARALAQRSGVEHRVINIDLGNLGGSALTDHSIEVPDQLQEGIPVTYVPARNTIFLSYALAAAEVFGAEAIVIGINAVDYSGYPDCRPEFIEAFANMARLATKVGVEGQALKFETPLLHLSKANIIRLGLEHGVDYSQTVSCYQADDQGRACGTCDSCRLRKQGFADAGVEDPTRYYL

SEQ ID NO: 35631 - protein, 222 aa, unidentified
  source 1..222: note = Acinetobacter variabilis
  REGION 1..222: note = tr|N9MEC0|N9MEC0_9GAMM 7-cyano-7-deazaguanine synthase OS=Acinetobacter variabilis OX=70346 GN=queC PE=3; SV = 1
MRPRAIVLLSGGLDSTTCLAWAQARYECIALSFMYGQRSTTELDAARALAQRSGVEHRVINIDLGNLGGSALTDHSIEVPDQLQEGIPVTYVPARNTIFLSYALAAAEVFSAEAIVIGINAVDYSGYPDCRPEFIEAFANMARLATKVGVEGQALKFETPLLHLSKANIIRLGLEHGVDYSQTVSCYQADDQGRACGTCDSCRLRKQGFADAGVEDPTRYYL

SEQ ID NO: 35632 - protein, 226 aa, Acinetobacter venetianus
  REGION 1..226: note = tr|N8YMB5|N8YMB5_ACIVR 7-cyano-7-deazaguanine synthase OS=Acinetobacter venetianus (strain ATCC 31012 / CIP 110063 / RAG-1) OX=1191460 GN=queC PE=3 SV=1
MENNMRSRAIVLLSGGLDSTTCLAWAQANYECIALSFMYGQRSTTELDAAKALAKRAGVEHRVINIDLGNLGGSALTDHNIDVPEQLQEGIPVTYVPARNTIFLSYALAAAEVFDAEAIVIGVNAVDYSGYPDCRPEFIDAFANLARLATKAGVEGKPLKIETPLLHLSKANIIRLGIEHGVDYSQTVSCYQADAQGRACGKCDSCRLRQQGFIEAGIADPTRYTE

SEQ ID NO: 35633 - protein, 226 aa, Acinetobacter venetianus; identical to SEQ ID NO: 35632
  REGION 1..226: note = tr|A0A150I0Y8|A0A150I0Y8_9GAMM 7-cyano-7-deazaguanine synthase OS=Acinetobacter venetianus OX=52133 GN=queC PE=3 SV=1

SEQ ID NO: 35634 - protein, 222 aa, unidentified
  source 1..222: note = Acinetobacter wuhouensis
  REGION 1..222: note = tr|A0A3G2T489|A0A3G2T489_9GAMM 7-cyano-7-deazaguanine synthase OS=Acinetobacter wuhouensis OX=1879050 GN=queC PE=3 SV=1
MRPRAIVLLSGGLDSTTCLAWAQANYECIALSFMYGQRSTTELDAARALAQRAGVEHRGINIDLGNLGGSALTDHNIDIPDHETDGIPVTYVPARNTIFLSYALAAAEVFDAQAIVIGINAVDYSGYPDCRPEFIDAFANMARLATKVGVEGKPLKFETPLLHLSKANIIRLGIEHGVDYSQTVSCYQADDQGRACGKCDSCRLRKQGFMDAGVADPTRYIP

SEQ ID NO: 35635 - protein, 223 aa, unidentified
  source 1..223: note = Acinetobacter wuhouensis
  REGION 1..223: note = tr|A0A385C5K4|A0A385C5K4_9GAMM 7-cyano-7-deazaguanine synthase OS=Acinetobacter wuhouensis OX=1879050 GN=queC PE=3 SV=1
MRPRAIVLLSGGLDSTTCLAWAQANYECIALSFMYGQRSTTELDAARALAQRAGVEHRVINIDLGNLGGSALTDHNIDIPDHETDGIPVTYVPARNTIFLSYALAAAEVFDAQAIVIGINAVDYSGYPDCRPEFIDAFANMARLATKVGVEGKPLKFETPLLHLSKANIIRLGIEHGVDYSQTVSCYQADDQGRACGKCDSCRLRKQGFMDAGVADPTRYIPQ

SEQ ID NO: 35636 - protein, 245 aa, unidentified
  source 1..245: note = Actinoalloteichus hoggarensis
  REGION 1..245: note = tr|A0A221W7H0|A0A221W7H0_9PSEU 7-cyano-7-deazaguanine synthase OS=Actinoalloteichus hoggarensis OX=1470176 GN=queC PE=3 SV=1
MLDGVVAVFAEAYMLRPPRHAVLVASGGLDSTVLAYWLVACNSEVTMLSFDYGQRHRIELRHAAGIADLLAVEHQVVDLTSLASLLSGSALTDEAVTVPDGHYTEESMKATVVPNRNAIMLAVAVGLAVVRQADAVAFGAHAGDHTVYPDCRPAFVERFTEAARRGNEGFLPENFTVLAPFLSQSKTDIVKLGAALGVPFGKTWSCYRGATVHCGTCGTCVERAEAFAFAGVADPTCYAAGRCEE

SEQ ID NO: 35637 - protein, 222 aa, Actinobacillus delphinicola
  REGION 1..222: note = tr|A0A448TSY4|A0A448TSY4_9PAST 7-cyano-7-deazaguanine synthase OS=Actinobacillus delphinicola OX=51161 GN=queC PE=3 SV=1
MNFLNPNHNRKALVIFSGGQDSTTCLLQAIADYGVENVETVTFAYGQRHAIELEKAKWIAQDLGVKQTFIDTSLMKAITHNALMSEQEIKTGDNGLPNTFVDGRNALFLLYAAIYAKGQGISDIITGVCETDFSGYPDCRDVFIKSMNVTLNLAMAYDFRIITPLMYLTKAQTWQMADELGQLDYVRHHTHTCYMGVEGGCGECPSCKLREKGLAEYLASKK

SEQ ID NO: 35638 - protein, 53 aa, Actinobacillus equuli
  REGION 1..53: note = tr|A0A448QTP0|A0A448QTP0_ACTEU 7-cyano-7-deazaguanine synthase OS=Actinobacillus equuli; OX = 718 GN=queC_1 PE=3 SV=1
MNSTPKAVVIFSGGQDSTTCLFQAIQEFGVENVEVVTFQYGQRHAIELEKPHG

SEQ ID NO: 35639 - protein, 222 aa, Actinobacillus equuli
  REGION 1..222: note = tr|A0A0A7MFW9|A0A0A7MFW9_ACTEU 7-cyano-7-deazaguanine synthase OS=Actinobacillus equuli subsp. equuli OX=202947 GN=queC PE=3 SV=1
MNSTPKAVVIFSGGQDSTTCLFQAIQEFGVENVEVVTFQYGQRHAIELEKAAWIAKDLGVKQTLIDTSVIKAITSNAMMEEREIKQEGNTPNTFVDGRNALFLLYTAIYAKGQGIQTIFTGVCETDFSGYPDCRDVFVKSMNVTLNLAMDYNFNIRTPLMYLTKKQTWELADKLGAFDYIRQHTHTCYLGVEGGCHTCPSCVLREKGLNEYLSEKTSGQKNV

SEQ ID NO: 35640 - protein, 219 aa, Actinobacillus indolicus
  REGION 1..219: note = tr|A0A4P7CEB9|A0A4P7CEB9_9PAST 7-cyano-7-deazaguanine synthase OS=Actinobacillus indolicus OX=51049 GN=queC PE=3 SV=1
MNKNKKAIVIFSGGQDSTTCLFLTIQAFGKSNVEAITFQYGQRHAIELEKAQWIAQDLGIKQTIVDTSVIKTITSNALMDEQSEIRQIGNTPNTFVDGRNALFLLYTAIYAKSQGIQTIYTGVCETDFSGYPDCRDVFVKSMNVTLNLAMDYNFNILTPLMYLTKKETWALADQLEVFDYIQAYTHTCYLGVEDGCHTCPSCLLREKGLNEYLEEKQNS

SEQ ID NO: 35641 - protein, 222 aa, Actinobacillus lignieresii
  REGION 1..222: note = tr|A0A380TXU4|A0A380TXU4_ACTLI 7-cyano-7-deazaguanine synthase OS=Actinobacillus lignieresii OX=720 GN=queC PE=3 SV=1
MNSTPKAVVIFSGGQDSTTCLFQAIQEFGVENVEVVTFQYGQRHAIELEKAAWIAKDLGVKQTLIDTSVIKAITSNAMMEERKIKQEGNTPNTFVDGRNALFLLYTAIYAKGQGIRTIFTGVCETDFSGYPDCRDVFVKSMNVTLNLAMDYNFNIRTPLMYLTKKQTWALADKLGAFDYIRQHTHTCYLGVEGGCHTCPSCVLREKGLNEYLSEKTSGQKNV

SEQ ID NO: 35642 - protein, 221 aa, Actinobacillus minor
  REGION 1..221: note = tr|C5S1U1|C5S1U1_9PAST 7-cyano-7-deazaguanine synthase OS=Actinobacillus minor NM305 OX=637911 GN=queC; PE = 3 SV=1
MQQPQKAIVIFSGGQDSTTCLFQAIAEFGKENVEVITFQYGQRHAIELEKAQWIAQDLGIKQTLIDTSLIKAITSNALMDDQAKIEQQGDKPNTFVDGRNALFLLYAAIYAKGQGIQTIFTGVCETDFSGYPDCRDVFVKSMNVTLNLAMDYNFNIRTPLMYFTKKETWRLADQLGAFDYIRQHTHTCYLGVEGGCHTCPSCLLREKGLNEYLAERGEKHV

SEQ ID NO: 35643 - protein, 222 aa, Actinobacillus pleuropneumoniae
  REGION 1..222: note = sp|A3N1A3|QUEC_ACTP2 7-cyano-7-deazaguanine synthase; OS = Actinobacillus pleuropneumoniae serotype 5b (strain L20) OX=416269 GN=queC PE=3 SV=1
MNSTPKAVVIFSGGQDSTTCLFQAIQEFGVENVEVVTFQYGQRHAIELEKAAWIAKDLGVKQTLIDTSVIKAITSNAMMEEHEIKQEGNTPNTFVDGRNALFLLYTAIYAKGQGIRTIFTGVCETDFSGYPDCRDVFVKSMNVTLNLAMDYNFNIRTPLMYLTKKQTWALADKLGAFDYIRQHTHTCYLGVEGGCHTCPSCVLREKGLNEYLSEKTSGQKNV

SEQ ID NO: 35644 - protein, 222 aa, Actinobacillus pleuropneumoniae
  REGION 1..222: note = sp|B0BQ32|QUEC_ACTPJ 7-cyano-7-deazaguanine synthase; OS = Actinobacillus pleuropneumoniae serotype 3 (strain JL03) OX=434271 GN=queC PE=3 SV=1
MNSTPKAVVIFSGGQDSTTCLFQAIQEFGVKNVEVVTFQYGQRHAIELEKAAWIAKDLGVKQTLIDTSVIKAITSNAMMEEREIKQEGNTPNTFVDGRNALFLLYTAIYAKGQGIRTIFTGVCETDFSGYPDCRDVFVKSMNVTLNLAMDYNFNIRTPLMYLTKKQTWALADKLGAFDYIRQHTHTCYLGVEGGCHTCPSCVLREKGLNEYLSEKTSGQKNV

SEQ ID NO: 35645 - protein, 227 aa, Actinobacillus porcinus
  REGION 1..227: note = tr|A0A4V6M354|A0A4V6M354_9PAST 7-cyano-7-deazaguanine synthase OS=Actinobacillus porcinus; OX = 51048 GN=queC PE=3 SV=1
MKILNPNNNRKVVVIHSGGQDSTTCLLLAIQEYGVENVHAMTFQYGQRHHIELEKAKWICQDLGVKHHILDMSAMQVFAPNAMMNETEIKTGDNGVPNTLVDGRNALFLLYAAIYAKSQGMTDIMTGVCETDFSGYPDCRDVFIKSMNVTLNLAMDYNFNIRTPLMYLTKAQTWQLADKLGALDYVREHTHTCYMGVEGGCGECPSCILREKGLAEYLEQKSAVKNV

SEQ ID NO: 35646 - protein, 221 aa, unidentified
  source 1..221: note = Actinobacillus porcitonsillarum
  REGION 1..221: note = tr|A0A2U8FJ52|A0A2U8FJ52_9PAST 7-cyano-7-deazaguanine synthase OS=Actinobacillus porcitonsillarum OX=189834 GN=queC PE=3 SV=1
MQQPQKAIVIFSGGQDSTTCLFQAIAEFGKENVEVITFQYGQRHAIELEKAQWIAQDLGVKQTLVDTSLIKAITSNALMDEQAKIEQQGDKPNTFVDGRNALFLLYAAIYAKGQGIQTIFTGVCETDFSGYPDCRDVFVKSMNVTLNLAMDYNFNIRTPLMYLTKKETWRLADQLGAFDYIREHTHTCYLGVEGGCHTCPSCLLREKGLNEYLAERGEKHV

SEQ ID NO: 35647 - protein, 227 aa, unidentified
  source 1..227: note = [Actinobacillus] rossii
  REGION 1..227: note = tr|A0A380TN55|A0A380TN55_9PAST 7-cyano-7-deazaguanine synthase OS=[Actinobacillus] rossii; OX = 123820 GN=queC PE=3 SV=1
MKILNPNNNRKVVVIHSGGQDSTTCLLLAIKEYGVENVHAMTFKYGQRHSIELEKAKWICQDLGVNHHILDMSAMQVFAPNAMMNETEIKTGENGVPNTLVDGRNALFLLYAAIYAKSQGMTDIMTGVCETDFSGYPDCRDVFIKSMNVTLNLAMDYNFNIRTPLMYLTKAQTWQLADELGRLDYVREHTHTCYMGVEGGCGQCPSCILREKGLEEYLEQKSAVKNV

SEQ ID NO: 35648 - protein, 230 aa, Actinobacillus seminis
  REGION 1..230: note = tr|A0A263HDG1|A0A263HDG1_9PAST 7-cyano-7-deazaguanine synthase OS=Actinobacillus seminis; OX = 722 GN=queC PE=3 SV=1
MQISKILNPNNDRKAVVIFSGGQDSTTCLLLTIEEYGVENVHAMTFQYGQRHHIELQKAQWICQDLGVKQHILDMTAMQVFAPNAMMNETKIVKNEKGVPNTMVDGRNALFLLYAAIYAKSQGMTDIITGVCETDFSSYPDCRDVFIKSMNVTLNLSMDYNFNIRTPLMYLTKAQTWQLADDLGRLDYVREHTHTCYVGVDGGCGECPSCILREKGLAEYLAQKSAVKNV

SEQ ID NO: 35649 - protein, 235 aa, Actinobacillus succinogenes
  REGION 1..235: note = sp|A6VQW6|QUEC_ACTSZ 7-cyano-7-deazaguanine synthase; OS = Actinobacillus succinogenes (strain ATCC 55618 / DSM 22257 / 130Z) OX=339671 GN=queC PE=3 SV=1
MNISNPNGNRKAVVIFSGGQDSTTCLLQAIRDYGPNNVEAVTFQYGQRHAIELQKAQWIAQDLGVKQTLIDTSVIKTITTNAMMSDAQIKQDENGMPNTFVDGRNALFLLYAAIYAKGQGITDIITGVCETDFSGYPDCRNVFIKSMNVTLNLAMDYQFNIRTPLMYLTKAQTWQLADELGALDYVRQYTHTCYLGVEGGCGTCPSCLLREKGLKQYLAQKSAVEKSSVLTAKEA

SEQ ID NO: 35650 - protein, 222 aa, Actinobacillus suis
  REGION 1..222: note = tr|K0G6F6|K0G6F6_ACTSU 7-cyano-7-deazaguanine synthase OS=Actinobacillus suis H91-0380 OX=696748 GN=queC; PE = 3 SV=1
MNSTPKAVVIFSGGQDSTTCLFQAIQEFGVENVEVVTFQYGQRHAIELEKAAWIAKDLGVKQTLIDTSVIKAITSNAMMEEREIKQEGNTPNTFVDGRNALFLLYTAIYAKGQGIQTIFTGVCETDFSGYPDCRDVFVKSMNVTLNLAMDYNFNIRTPLMYLTKKQTWALADKLGAFDYIRQHTHTCYLGVEGGCHTCPSCVLREKGLNEYLSEKTSGQKNV

SEQ ID NO: 35651 - protein, 222 aa, Actinobacillus ureae
  REGION 1..222: note = tr|E8KIR2|E8KIR2_9PAST 7-cyano-7-deazaguanine synthase OS=Actinobacillus ureae ATCC 25976 OX=887324; GN = queC PE=3 SV=1
MNSIPKAVVIFSGGQDSTTCLFQAIQEFGVENVEVVTFQYGQRHAIELEKAAWIAKDLGVKQTLIDTSVIKAITSNAMMEVREIKQEGNTPNTFVDGRNALFLLYTAIYAKGQDIQTIFTGVCETDFSGYPDCRDVFVKSMNVTLNLAMDYNFNIRTPLMYLTKKQTWALADKLGAFDYIRQHTHTCYLGVEGGCHTCPSCILREKGLNEYLSEKTSGQKNV

SEQ ID NO: 35652 - protein, 426 aa, unidentified
  source 1..426: note = Actinobacteria bacterium
  REGION 1..426: note = tr|A0A2N3GS82|A0A2N3GS82_9ACTN 7-cyano-7-deazaguanine synthase OS=Actinobacteria bacterium HGW-Actinobacteria-11 OX=2013646 GN=CVT61_06005; PE = 3 SV=1
MRHFKLLLDTAEASDGEESFYWTRDADSTFLGSLGSSLGSVGAVPSLNIDLVRIAVGVYAADRSVPRKYGGSDWNQREISLTLPLLNVDHWTSRERELASMLDFLSGDSWTLKFVESTPPDEDVALTTVDAARVVLFSGGADSAIGALKSKKELSEKGHHVLVSHYSANHIAPIQKALEAHLAAVSPRRSQSHEVFHLARRAVRLDGSEFESEPSSRSRSFLFLALGLATAAVHGVDLWIPENGFASINPPLGPGRRGSLSTRTTHPAFLKAFNSLLSGSGINSRIRNPFASWTKGEMVAWAIQVLGKERASVYLSTSNSCSSTGQRSFGVPLRVHCGVCFGCVLRRSSFAAADLADKTEYADSRSNAGLANWLERISVVPAVREFVSTGVRPRDLMALSLPHDYKLADALDLTSRGIAELKEYVR

SEQ ID NO: 35653 - protein, 232 aa, unidentified
  source 1..232: note = Actinobacteria bacterium
  REGION 1..232: note = tr|A0A538LRB2|A0A538LRB2_9ACTN 7-cyano-7-deazaguanine synthase OS=Actinobacteria bacterium OX=1883427 GN=queC PE=3 SV=1
MSPSRHVVILSGGLDSTTCMALAARDGGRPPLALCFDYGQSHRIELEHAAKVASHYGAERLVVDIDARAWGGSALTDASVDIPQSTGSPDSGQPDPLDIPVTYVPARNIIFLAVALGVAEARDADAVYLGVNALDYSGYPDCRPAFVDAFRAVAAVGQKRALAGRPVGIRTPLIDLTKPQIVRLALDLGAPVELTWSCYRPGPVPCQACDACQLRARGFADAGVSDPALTTP

SEQ ID NO: 35654 - protein, 202 aa, Actinokineospora auranticolor
  REGION 1..202: note = tr|A0A2S6GJ53|A0A2S6GJ53_9PSEU 7-cyano-7-deazaguanine synthase OS=Actinokineospora auranticolor OX=155976 GN=CLV40_115115 PE=3 SV=1
MKIVAMVSGGTDSVVMAHHLATQGHHLHLLAIDYGQHHRKELIFAAATAHRLDTPYDEIDLRALRALHRGTPHTGHIPNRNAVLLSIAFALATSTTARAVAIGTRAQDPDTTPELLRRFRDMQLTADPEPLDLLTPLIELPKTGVIALGTELGIPWEQTWTCLHGDEVHCGTCAACTERRAAFTTLGLTDPIPYREPLPNHP

SEQ ID NO: 35655 - protein, 230 aa, Actinokineospora cianjurensis
  REGION 1..230: note = tr|A0A421BAJ6|A0A421BAJ6_9PSEU 7-cyano-7-deazaguanine synthase OS=Actinokineospora cianjurensis OX=585224 GN=queC PE=3 SV=1
MTATKPKAVVLLSGGLDSATVLAIAAADGFETYALSFRYGQRHSVELEAAGRVATALGASKHVVADIDLRVFGGSALTDDSIDVPHHDSVDGVTQDIPITYVPARNTIFLSFALAWAETLGSQDIFIGVNALDYSGYPDCRPEYIEAYQAMANLATKAGVEGSQNLTIHMPLVALTKAETIQRGLELGVDYGLTHSCYDPVDGRACGSCDSCLLRDRGFADLGLTDPALA

SEQ ID NO: 35656 - protein, 233 aa, unidentified
  source 1..233: note = Actinokineospora spheciospongiae
  REGION 1..233: note = tr|W7ILF6|W7ILF6_9PSEU 7-cyano-7-deazaguanine synthase OS=Actinokineospora spheciospongiae OX=909613; GN = queC PE=3 SV=1
MERPAIVLLSGGLDSTTVLAIARDQGFTPYALSFRYGQRHSIELQAAERVATTQGAARHVVADIDLRVFGGSALTSDISVPKHDSVEQIEADTIPVTYVPARNTIFLSFALAYAEVVGATDIFTGVTAVDFSGYPDCRPEYMDAFATMANLATKAGVEGKTRLELHSPLIDLSKADIIRKGLSLGVDYSITSSCYDPDAQGRACGHCDTCLLRLKGFAEVGIDDPAPYQNAGA

SEQ ID NO: 35657 - protein, 230 aa, Actinokineospora terrae
  REGION 1..230: note = tr|A0A1H9NYD4|A0A1H9NYD4_9PSEU 7-cyano-7-deazaguanine synthase OS=Actinokineospora terrae; OX = 155974 GN=queC PE=3 SV=1
MTATKPKAVVLLSGGLDSATVLAIAAADGFETYALSFRYGQRHSVELEAAGRVATALGASKHVVADIDLRVFGGSALTDDSIDVPHHDSVAGVTQDIPITYVPARNTIFLSFALAWAETLGSQDIFIGVNALDYSGYPDCRPEYIEAYQAMANLATKAGVEGSQNLTIHMPLVALTKAETIQRGLELGVDYGLTHSCYDPVDGRACGSCDSCLLRDRGFADLGLTDPALA

SEQ ID NO: 35658 - protein, 231 aa, Actinokineospora terrae
  REGION 1..231: note = tr|A0A1H9WRK9|A0A1H9WRK9_9PSEU 7-cyano-7-deazaguanine synthase OS=Actinokineospora terrae; OX = 155974 GN=SAMN04487818_11173 PE=3 SV=1
MMIERPEHRHLEHAVVIASDGLDSTARAYWLAARHSRPTLVLFDYGQRHRVELGHAAEIARLHLSPHRIIDRTSLGALLPGSALTDSPVAVPDGHYTAESIAATVVPNRNAIMLDITVAVAIVVLADAVAFGANAGDHAIYSDCLPEFAERFARSALVANERLLVPGFQVLAPFLPLTKIDIDGVGEALTVPFARTWSCYRGRGAHCGTGTERREAFLDNNIADPAIYRAA

SEQ ID NO: 35659 - protein, 273 aa, Actinomadura echinospora
  REGION 1..273: note = tr|A0A1H6E998|A0A1H6E998_9ACTN 7-cyano-7-deazaguanine synthase OS=Actinomadura echinospora OX=1992 GN=queC PE=3 SV=1
MPYDRISPLRAQGERLGVSDRSRRAPAGGGAVINVESTGIRHAVVIASGGLDSTTLAYWLKAEGTQQLTLLGVDYGQRHRVELSYLKRTAAKLGAWHVQLGVPDLGKLLAGSALTDPQVQVPSGHYTDVSMRATVVPNRNALLLDLAVGLAISAKADAVAFGAHAGDQPIYPDCRPAFVDAYTRMAAVANEGFLTVGFKVVAPFLTWTKADIVRVAAALGVPFGDTWSCYRGDTWHCGRCGTCAERKKAFARAGLVDPTHYQDATGPGHRPVR

SEQ ID NO: 35660 - protein, 226 aa, Actinomadura mexicana
  REGION 1..226: note = tr|A0A238VVX1|A0A238VVX1_9ACTN 7-cyano-7-deazaguanine synthase OS=Actinomadura mexicana; OX = 134959 GN=queC PE=3 SV=1
MLLSGGLDSTTVLAIAREQDYETYALSFRYGQRHTEELDAAKKVAAELGAAQHVIADINLAVFGGSALTDDALAVPHHESVNDVSADEIPITYVPARNTIFLSFALAWAETLGSSDIFIGVNAMDYSGYPDCRPEFIEAYEHMANRATKAGVEGTQRLKIHTPLIELTKAQTIQRGLDLGVDYSWTHSCYDPVDGRACETCDSCLLRGRGFAELGLVDPSFSSANA

SEQ ID NO: 35661 - protein, 248 aa, unidentified
  source 1..248: note = Actinomadura parvosata
  REGION 1..248: note = tr|A0A2P9IXC7|A0A2P9IXC7_9ACTN 7-cyano-7-deazaguanine synthase OS=Actinomadura parvosata subsp. kistnae OX=1955414 GN=KIS93_12115 PE=3 SV=1
MRLPRSAPRPDGTPAPLAVVLFSGGLDSTVLAVHYARTHRLLLLSFDYGQRHRAPELAAGADVAADLEAEHHTVTITGLSPLLTGCSLTDPDEQVPTLVPSDAALRSITIPNRNAFILDMAVAVATARQAEVVALGVHHTREGYPMPDGRPDFFEAYQEMVRLASRGFHTPRIEVPFISMQKEDIVAYGARLGAPMHKSWTCYLDGPVHCGTCIACMTRRSAYARSATPDPTHYDREALDDASDPGPP

SEQ ID NO: 35662 - protein, 249 aa, Actinomadura sp.
  REGION 1..249: note = tr|A0A372GNU3|A0A372GNU3_9ACTN 7-cyano-7-deazaguanine synthase OS=Actinomadura sp. LHW52907 OX=2303421 GN=queC PE=3 SV=1
MRLQFPRSRQDGEQQVRTDKRRAVVLLSGGLDSTTVLAIARDEEYETYALSFRYGQRHTEELDAAQKVARELGATDHVIADINLAVFGGSALTDESLAVPHHANADELGEEIPVTYVPARNTVFLSFALAWAETLGSSDVFIGVNAMDYSGYPDCRPEYIQAYERMANLATKAGVEGTQKLKIHTPLIDLTKAQTIERGLSLGVDYGWTHSCYDPVDGRACETCDSCLLRSRGFAELGLADPSFTSAKA

SEQ ID NO: 35663 - protein, 224 aa, Actinomadura sp.
  REGION 1..224: note = tr|A0A5C4J9E0|A0A5C4J9E0_9ACTN 7-cyano-7-deazaguanine synthase OS=Actinomadura sp. 14C53; OX = 2508997 GN=queC PE=3 SV=1
MSGGLDSTTVLAIARDEGYETHALSFRYGQRHTEELEAAEKVAVELGATQHVIADINLAVFGGSALTDDALDVPHHDSVEAVCVEEIPITYVPARNTVFLSFALAWAETLGSSDVFIGVNAMDYSGYPDCRPEYIEAYERMANLATKAGVEGTQQLKIHTPLIELTKAQTIQRGLELGVDYSWTHSCYDPVGGRACETCDSCLLRSRGFAELGMVDPSFSSANA

SEQ ID NO: 35664 - protein, 554 aa, Actinomyces bowdenii
  REGION 1..554: note = tr|A0A3P1V2Z6|A0A3P1V2Z6_9ACTO Uncharacterized protein OS=Actinomyces bowdenii OX=131109 GN=EII10_08900; PE = 4 SV=1
MNDLEVDLRLISPHWREGGAGAGTGGAAAPGAPGLWVRGDLPCPAPTDPAALRAHPGRLAAVEVGADEVVLAQDRLRSWPLFWSIQPSAPGRPRRLVISDDAAAMRAALEAPALDERACREMVDAGFVSGADTLLRDVFQVEQGSMVRIDLRSGRASTTSHSLGRFDEDGVIEDPQAFSDLLEGALDAVMGRLVDRLGEARIVLPLSGGLDSRLLVAWLALHGLGDRVVSFTYGRPGAREMEVSRAVAQAVGMQWHAVDYEPRALRGAWGTQEAADFLAQSYALSALPHVQDWYALTRLMDRGVVRPGDVVLPGHTLVGNMHDEHLLEAGRVRRSEVARALCWHHQDLQGRQARAWADPYRAAKLKDFLALRPFTGEARDVQSILESYNLRERQTKYINNSVRAYEHLGLDWALPMLDVEFWDAWHRGGVGLTATRDFYGVLIGRLWDRATGSGQGGQEDLPYFAVTRVDEATRSRLKSALAATGLLPLAERSFSTWSTLHDSMAFDALITDTPRPVAAAQLMAGRKLLGFWTSAFLADTWCPASRLFSDLPRI

SEQ ID NO: 35665 - protein, 507 aa, Actinomyces naeslundii
  REGION 1..507: note = tr|J3ABP5|J3ABP5_ACTNH Queuosine biosynthesis protein QueC-like protein OS=Actinomyces naeslundii (strain ATCC 12104 / DSM 43013 / JCM 8349 / NCTC 10301 / Howell 279 ) OX=1115803 GN=HMPREF1129_2128 PE=4 SV=1
MAPKADDVEAVRQQQPERRAGAWTLVEESDGVLRLTTDRTRSHHLVFTRAGGTWVVSDDPQELRRHVPTWVRDEQAAEVFLHAGFTPGARTLAREVYATAPGTVVELRPDGTWSSRPWETYHYDPEPVTSPQEFSDVLRTALDVVVERLLQDTGDRQLLVPLSGGLDSRLLAVWLKRHGARNVVAFTYGVPGSAEVAISRGVAEALKMDWFTVDLDPTEVARTWAGPDGVEFQERTWGLTSLPHVQDWYALLQMRRHALVDTDAVFLPGHTIVGNMHDEHLLESRPSREDVLTAIARHHSLLQGDHKAWRHLPLLRRAVLQGAEELSFPTGQDEMNGSGRAIQELLEWVNLQERQSKYINGSFKAYEAFGYGWALPMLDTEMWGAWLRGSEELTATRDWYAQFTAEAFAEATGTASRLFEAPAERIPAGARRLLMTALTVTGTRTAMSRAVSMRTKLHHPMAFEAFNAPMPRSEQILRMARGATSTGLWAQLFLDGTWGAHPVAPMG

SEQ ID NO: 35666 - protein, 431 aa, Actinomyces naeslundii
  REGION 1..431: note = tr|A0A2Z5QQT1|A0A2Z5QQT1_ACTNA Asparagine synthetase; OS = Actinomyces naeslundii OX=1655 GN=AN27039_1733 PE=4 SV=1
MSAIEVDLRLRSPHWSRVTTSVDTVNDGNGLWVRADHDCSDPTDPEVLVSHPGRLTAIQIDGDEVVLAQDRLRSWPLFWSLEDGMSDAQRLVISDDATLMREAVSAPRLDARARREFLDAGFVTGSDTLLAGIHQTEQGTVVRIDRATGRVRTINHSVAQFSEETDAVVAPEEFSDLLTEALDAVMGRLLVDLDRRPGTPRLVIPLSGGLDSRLLVAWLTLHDALDRAVAFTYGRPGAREVEISRKVAQAVGLEWHAVDYDPAVLREAWQTQEAADFLTDGYALGPCHTSRTGGRCAPSWHAGRCGPVTSCCRGTRSWATCTTSICSTGLPPPAARWPKRSSPTTRGSRVSRTRPGLTPTGPGRSRNSWRCGRSPAAPATYRASWSPTTSASDRPSTSTTRCAPTSTWAWNGPCPCWTRSSGTPGTTAPSS

SEQ ID NO: 35667 - protein, 572 aa, Actinomyces oris
  REGION 1..572: note = tr|A0A120KQB0|A0A120KQB0_9ACTO Uncharacterized protein OS=Actinomyces oris OX=544580 GN=AXE84_07700 PE=4; SV = 1
MSAIEVDLRLRSPHWSRVTTSVDTVNDGNGLWVRADHDCSDPTDPEVLVSHPGRLTAIQIDEDEVVLAQDRLRSWPLFWSLEDGMSDAQRLVISDDATLMREAVSAPRLDARARREFLDAGFVTGSDTLLAGIHQTEQGTVVRIDRATGRVRTINHSVAQFSEETDAVVAPEEFSDLLTEALDAVMGRLLVDLDRRPGTPRLVIPLSGGLDSRLLVAWLTLHDALDRAVAFTYGRPGAREVEISRKVAQAVGLEWHAVDYDPAVLREAWQTQEAADFLTDGYALGALPHVQDWWALRTLLARGTVRPGDILLPGHTIVGNMHDEHLLDGPPATRSQVAKAIITHHQGLQGEQNQAWADPYRTRKVKEFLALRPFTGSPRDVQSILESYNVRERQTKYINNSVRAYEHLGLEWALPMLDVEFWDAWHRGAVELTATRDFYAVFIGRLWAQATARASGQEQTSQADLAYFTPTQVNETTRSRLKAVLSRLHLLHLAERTASSWATLHSPMSFDAFITDTSRPAAAVQLMTGRTLLGFWARAFITDTWCRRCRLFTDLPVADVPPAAADSSGQKA

SEQ ID NO: 35668 - protein, 572 aa, Actinomyces oris
  REGION 1..572: note = tr|A0A1Q8W8L7|A0A1Q8W8L7_9ACTO Uncharacterized protein OS=Actinomyces oris OX=544580 GN=BKH22_11650 PE=4; SV = 1
MSAIEVDLRLRSPHWSRVTTSADTVTDGNGLWVRADYDCSDPTDPEVLASHPGRLAAIRIDGDEVVLAQDRLRSWPLFWSLEDGLSGAQRLVVSDDAALMREAVSAPRLDARARREFLDAGFVTGSDTLLAGIHQTEQGTVVRIDRATGRARTINHSVARFCEGTDTVVDPEDFSGLLCEALDVVLGRVLAEMDRRAGTPRLVVPLSGGLDSRLLVAWLTLHDALDRTVAFTYGRPGAREVEISRKVAQAVGLEWHAVDYDPAALREAWQTQEAADFLKDGYTLGALPHIQDWWALRTLLARGTVRPGDIVLPGHTIVGNMHDEQLLDGPPATRGQVAKAIITHHQELQGEQNQAWADPYRAGKVKNFLALRPFTGSPRDVQSILESYNVRERQTKYINNSVRAYEHLGLEWALPMLDVEFWNAWHRGAVELTATRDFYAVFIGRLWAQATARASGQEQTAQADLAYFTPTKVNETTRSRLKAVLSRLHLLHLAERTASSWATLHSPMSFDAFITDASRPAAAVQLMMGRTLLGFWARAFITDTWCRRCRLFTDLPVVDVPPTVADSSELKA

SEQ ID NO: 35669 - protein, 571 aa, Actinomyces sp.
  REGION 1..571: note = tr|F3P5U1|F3P5U1_9ACTO Conserved domain protein; OS = Actinomyces sp. oral taxon 170 str. F0386 OX=762963; GN = HMPREF9056_00399 PE=4 SV=1
MNVIDVELRLTSPQWQQTGPSDGTAESLWMRCDTSCPDPTDPEVLASHPGRLTAIRVNDDEVILAQDRLRSWPLFWALENGADGRRLIISDDATAMRGALSAPRLDPRARREFLDAGFISGTDTLLAGVHQTEQGAIVHIDRDTGRARTVTHSLARFSEESAMVTDPEEFSGLLLAALDAGMGRVLEDLAARPGSPRLVLPLSGGLDSRLLVAWLTLHGTLDRAVAFTYGRPGTREVEVSRKVAEAVGLEWHAVDYVPAELREAWQTQDAADFLEYGYALGALPHVQDWYALRSLLERGVVRPGDVVLPGHTIVGNMHDEHLLEEPRVTRGRVARAILVHHQELQGDQRRAYADPYRAAKVRDFLALWPFTGSPRDVQSILESYNVRERQTKYINNSMRAYEHLGLEWALPMLDVEFWEAWHRGAVELTATRDFYAVFIGRLWARATALAAGAEADAAGRDAEADLPYFAATEVSEETRSRLKTVLSRLHLLGLAERTFSAWASLHSTMAFEAFITDTPLPVAAAELMGGRKLLGFWTRAFVNDAWCRRCRLFTDLPVASPAELEAAASEE

SEQ ID NO: 35670 - protein, 572 aa, Actinomyces sp.
  REGION 1..572: note = tr|A0A1F1FAC9|A0A1F1FAC9_9ACTO Uncharacterized protein OS=Actinomyces sp. HMSC075C01 OX=1739387; GN = HMPREF2883_07290 PE=4 SV=1
MSAIEVDLRLRSPHWSRVTTSADTVTDGNGLWVRADHDCSDPTDPEVLTSHPGRLAAIRIDGDEVVLAQDRLRSWPLFWSLEDGLSGAQRLVVSDDATLMREAVSAPRLDARARQEFLDAGFVTGSDTLLAGIHQTEQGTVVRIDRATGRARTINHSVARFCEGTDTVVDPEDFSGLLCEALDVVLGRVLAEMDRRAGSPRLVVPLSGGLDSRLLVAWLTLHDALDRTVAFTYGRPGAREVEISRKVAQAVGLEWHAVDYDPAALREAWQTQEAADFLKDGYTLGALPHIQDWWALRTLLARGTVRPGDIVLPGHTIVGNMHDEQLLDGPPATRGQVAKAIITHHQELQGEQNQAWADPYRAGKVKSFLALRPFTGSPRDVQSILESYNVRERQTKYINNSVRAYEHLGLEWALPMLDVEFWNAWHRGAVELTATRDFYAVFIGRLWAQATARASGQEQTAQADLAYFTPTKVNETTRSRLKAVLSRLHLLHLAERTASSWATLHSPMSFDAFITDASRPAAAVQLMMGRTLLGFWARAFITDTWCRRCRLFTDLPVVDVPPTVADSSELKA

SEQ ID NO: 35671 - protein, 451 aa, unidentified
  source 1..451: note = Actinophytocola xanthii
  REGION 1..451: note = tr|A0A1Q8CKZ5|A0A1Q8CKZ5_9PSEU 7-cyano-7-deazaguanine synthase OS=Actinophytocola xanthii; OX = 1912961 GN=BU204_24320 PE=3 SV=1
MKERCYEFTSYGPRHRGADWIAISERDFRERETRVDLLTRLVSTAPLWSSDLLRIARAVFLVDKRFLRSETADRWTRVIRLSVQLNEPETWTPSVLETLNTVLAQLTGDHWSVEVHPGATAQTLLDDEPVGEVALFSGGLDSTAYAAHAVRNATTPLLLISFDDGLQSRQQEIRRYVEQISRRPVTSQQLAQTVQSEPGEDLEPSSRSRGFLYLAAAVCSAASHRLERVSLPENGQLAVNPPLTPGRLGALSTRSAHPNTIALLNQVIRGVGGTVRVTNPLLDRTKGEVCALALESGLTAAALGRTISCGNPRRTKMKADFNCGYCYPCLLRRAGLLQALGEDPTEYQHNVADLPIDDRKARDLTALAQWLNNPFGLRDVVADSPYPDEVPPPAVLPVLLRGRTEFSAMLTRVLPADHPLRTASAGLFEGDGAATQAAASRESVGHHGGVA

SEQ ID NO: 35672 - protein, 434 aa, unidentified
  source 1..434: note = Actinoplanes lutulentus
  REGION 1..434: note = tr|A0A327YXX3|A0A327YXX3_9ACTN 7-cyano-7-deazaguanine synthase in queuosine biosynthesis; OS = Actinoplanes lutulentus OX=1287878 GN=B0I29_129105 PE=4; SV = 1
MPKDYNIVVNDCASPPVLGLTHLRTRATPYGGRNFTSSFQDIIGGLPERLTPIQQDWLHILTSIFAADVASKRGAGDDWSRRIQLWIGVREPDHWKPLKPQIELVFKSLTYDQFAVTFVADPDAPPTPRQDREAFPRADSVALVSGGIDSLTGAARLLDLHRTPLFISHQNSGAVSDALQAVDEGLARIGQHAGRRSFTAQKEGIDGTESSQRSRSLLYMGVACLAAACLDISDVYLNENGIMAINVPLTPARIGSFSTHTCNPTIVYDVAKIAGQALGWTGTIHNIIVTSTKPEVVLEAATLGLRDVLPKTVSCWQIGRTRRHCGYCVPCLIRQISFEHAGLSDTSHEIYPLDTIPNGGIRQQTAIDNVTHLAAHVLALSQSDEFELELDFTEIINCDGQLTRRQSMDMHYRWAEQCLSVLERHPHSAHLLGR

SEQ ID NO: 35673 - protein, 230 aa, Actinoplanes sp.
  REGION 1..230: note = tr|R4LCI3|R4LCI3_9ACTN 7-cyano-7-deazaguanine synthase OS=Actinoplanes sp. N902-109 OX=649831 GN=exsB; PE = 3 SV=1
MPKTIAIVSGGLDSVTMAYHLKDRGHKLHLLSVDYGQRHLVEHEFAAKAARVLGVPHDVADLGAVGKLLGGSSLTDPAVDVPARKSEEMTGGSPNVVPNRNALLLAVAFAVAVAEQAQAVAIGVIDDAQAAPDCTPEFLDFFLTMEKIATRGYAHPDLTLTAPLAKLRKSGVVALGEKLGVPWTDTWTCFRGTTLHCGRCAACWERQEAFLEAGVADPTDYQTSHSKEPA

SEQ ID NO: 35674 - protein, 226 aa, Actinoplanes teichomyceticus
  REGION 1..226: note = tr|A0A561WR03|A0A561WR03_ACTTI 7-cyano-7-deazaguanine synthase OS=Actinoplanes teichomyceticus OX=1867 GN=FHX34_1011274 PE=3 SV=1
MPKIVAIVSGGMDSVTMAHQLKEQGHDLHLLSVDYGQRHRKEHRFAAAAAERLGAVHQVADLSAMGALLRGSSLTDPTVDVPEQTWTGYGESPNIVPNRNALLLSVAFAVAVAEKAQAVAIGIMADDTVSVPDSTPAFLESFIAMERIATAGYAHPDLDLLAPLSGLGKKDVVTLGERLGVPWTETWTCLRGQDDHCARCAACWERQEAFTAAGVQDPTIYQEHQS

SEQ ID NO: 35675 - protein, 233 aa, Actinosynnema pretiosum
  REGION 1..233: note = tr|A0A290Z0Y8|A0A290Z0Y8_9PSEU 7-cyano-7-deazaguanine synthase OS=Actinosynnema pretiosum; OX = 42197 GN=queC PE=3 SV=1
MGRPAIVLLSGGLDSTTVLAIAKDQGFTPYALSFRYGQRHSAELVAAERVAKTLGAARHVVADIDLRVFGGSALTDDISVPKHDSVEEISSDTVPVTYVPARNTIFLSFALAYAEVVGSTDIFTGVTAVDYSGYPDCRPEYMAAYEAMANLATKASMEGGSPLKLHSPLITMSKADIIREGLRLGVDYSMTSSCYDPDAQGRACGHCDTCLLRLKGFTEAGVVDPAPYRPSNA

SEQ ID NO: 35676 - protein, 236 aa, Actinosynnema pretiosum
  REGION 1..236: note = tr|A0A347Q2H2|A0A347Q2H2_9PSEU 7-cyano-7-deazaguanine synthase OS=Actinosynnema pretiosum subsp. pretiosum OX=103721 GN=queC PE=3 SV=1
MTDELDAHRVPAHAVVIASGGLDSTVLAHWLADRGSRVTLLSFDYGQRHRVELEYAAEAAKRLGARHEVVELTSLGRLLSGSALTDPAVDVPDGHYAADSMRSTVVPNRNAVMLDIAVSVAIAVGADAVAFGAHAGDHTVYPDCRPEFVEHFTRSAFTANEGLLPSWFQVLAPFLSLTKAQIVRLGAELGVLFERTWSCYRGEELHCGRCGTCVERKEAFSAHDLVDPVAYQGGRS

SEQ ID NO: 35677 - protein, 234 aa, Actinosynnema sp.
  REGION 1..234: note = tr|A0A1V2P5Q1|A0A1V2P5Q1_9PSEU 7-cyano-7-deazaguanine synthase OS=Actinosynnema sp. ALI-1.44 OX=1933779 GN=queC PE=3 SV=1
MPIGTPAHRHPRHAVVIASGGLDSTVLAYWLAARGAELTLLSFDYGQRHRVELEHAAEIARLLNCPHETVELSMLGRLLVGSALTDTDVPVPDGYYTDESMRATVVPNRNAIMLDIAVSVAVARKADVVAFGAHAGDHAVYPDCRPEFVERFTRSVRTANEGLLVDDFEILAPFLTQSKTDIVRIGAALEVPFERTWSCYRGEATHCGTCGTCTERKEAFQQNGMTDPTSYRCA

SEQ ID NO: 35678 - protein, 236 aa, Actinosynnema sp.
  REGION 1..236: note = tr|A0A1V2QFN3|A0A1V2QFN3_9PSEU 7-cyano-7-deazaguanine synthase OS=Actinosynnema sp. ALI-1.44 OX=1933779 GN=queC PE=3 SV=1
MNGNGDRGDSTLVLLSGGLDSTVLTTELLRTGAVVQAVSVHYGQRHAVELEAAAAVASRLGIPHEIVDLGVLRQHLRSALTGAGDIPHGHYTADTMTATVVPNRNAIMLMVAAGIAAARGLRRVATAVHSGDHPIYPDCRPEFIAAANLAAMLGTETVRVEAPYMRLTKAEIAAKGALHNAPMELSWSCYEGGDFAGRHCGRCGTCVERAEAFHLAGVRDPTDYADTAFWREQVTV

SEQ ID NO: 35679 - protein, 201 aa, Actinotalea fermentans
  REGION 1..201: note = tr|A0A511YXH4|A0A511YXH4_9CELL 7-cyano-7-deazaguanine synthase OS=Actinotalea fermentans; OX = 43671 GN=queC PE=3 SV=1
MSRLLLLSGGLDSTAIAAMTRPDQCLTIDYGQVAAQAEARAAKQVATLLGIHWSMITVPAREVGAGLMTGTATDPQGPPDAAPEWWPFRNQLLITLAAAWGVTRGITVVEVGTVASDGARHLDGTSLFLEAIDHVVASQEGHIRVRAPAAKLGAVELLTTSPVTEDVLAWTHSCHRANLPCGACPGCTKRRETLAAVGLLQ

SEQ ID NO: 35680 - protein, 227 aa, Adhaeribacter aerolatus
  REGION 1..227: note = tr|A0A512B2I2|A0A512B2I2_9BACT 7-cyano-7-deazaguanine synthase OS=Adhaeribacter aerolatus; OX = 670289 GN=queC PE=3 SV=1
MENERRDAAVVLLSGGQDSTTCLFWAKQIFNHVEGLGFDYGQKHNVELEQAGIIAAKAGVEFTIFNIQGTLSGSSLIEYNKDIAEPHERNKNLPSSFVPGRNALFLTIAASYAYNKGITNLVGGMCETDYSGYPDCRRAFLDSLQTSLSLAMDTDVSIHTPLMYLSKAETWKMAKELGVLDIVRFDSHTDYNGNRNVLNEWGYGQLDNPASILRARGFEEAKAKGWI

SEQ ID NO: 35681 - protein, 239 aa, Adlercreutzia equolifaciens
  REGION 1..239: note = tr|A0A3E2EQR8|A0A3E2EQR8_9ACTN ExsB family transcriptional regulator OS=Adlercreutzia equolifaciens; OX = 446660 GN=DX903_03550 PE=4 SV=1
MEVTKVAEIEEKSVETAVDFESVVAEDTEDVGPGQHLFGEPLEMYLLREPKLAVAFSGGCDSALLLAAAKLAGCEVRAYLVKTAFQPDFELDDARAVAAALDVPLTVVEADVLAQEAICANPADRCYRCKRFIFGEVRRAAAADGFTVIVDGTNATDDPERRPGFKALAEAGVVSPLRRAGMTKANVRHVLASLEERFGLPSGALMSAKPSFPCLAVYVPQGESITEASLREAARMRGL

SEQ ID NO: 35682 - protein, 229 aa, Adlercreutzia equolifaciens
  REGION 1..229: note = tr|A0A3E2EFT1|A0A3E2EFT1_9ACTN 7-cyano-7-deazaguanine synthase OS=Adlercreutzia equolifaciens OX=446660 GN=queC PE=3 SV=1
MTNNKALVLCSGGVDSTTLLARAVSKYGAENVYALSISYGQKHVREIEAARAVAAHYGVEQRFLDLGAIFADSDCSLLAHSDAAIPESSYADQQAEGDGGPVSTYVPFRNGLFLSSAASMALSLGCSTVYYGAHHDDWAGNAYPDCSLEFVEAMNRAIVEGTGGELCLEAPFVTWSKADIVREGLALGVPYELTWSCYEGGEAPCGRCATCLDRAAAFAANGVEDPAMR

SEQ ID NO: 35683 - protein, 235 aa, Advenella incenata
  REGION 1..235: note = tr|A0A4Q7VEK1|A0A4Q7VEK1_9BURK 7-cyano-7-deazaguanine synthase OS=Advenella incenata; OX = 267800 GN=queC PE=3 SV=1
MNNKALVLFSGGQDSTTCLAWALDRYQYVETIGFSYGQRHAIELTCRDQVIEQLRVHFPAWSARLGNDHMLDLSVLGQISDTALTQDKAIEFEQSGLPNTFVPGRNLLFFNFAAALAYRRGLEVLVGGMCETDYSGYPDCRDNTLKSLQVSLSLGLDRPMVIETPLMWIDKEKTWHMASTLGGQPLVQLIEEHTHTCYLGDRQHRHPWGYGCNQCPACDLRRKGYELYKSAHENH

SEQ ID NO: 35684 - protein, 235 aa, Advenella kashmirensis
  REGION 1..235: note = tr|I3UGG9|I3UGG9_ADVKW 7-cyano-7-deazaguanine synthase OS=Advenella kashmirensis (strain DSM 17095 / LMG 22695 / WT001) OX=1036672 GN=queC PE=3 SV=1
MNNKALVLFSGGQDSTTCLAWALDRYQYVETIGFSYGQRHAIELTCRDQVIKQLRLHFPDWSARLGNDHMLDLSVLGQISDTALTQDKAIEFEQSGLPNTFVPGRNLLFFNFAAALAYRRGLEVLVGGMCETDYSGYPDCRDNTLKSLQVSLSLGLDRPMVIETPLMWIDKEKTWHMARTLGGQPLVQLIEEHTHTCYLGDREHRHPWGYGCNQCPACDLRRKGYELYKSAHENH

SEQ ID NO: 35685 - protein, 235 aa, Advenella kashmirensis
  REGION 1..235: note = tr|A0A356LCL0|A0A356LCL0_9BURK 7-cyano-7-deazaguanine synthase OS=Advenella kashmirensis; OX = 310575 GN=queC PE=3 SV=1
MNNKALVLFSGGQDSTTCLAWALDRYQYVETIGFSYGQRHAIELTCRDQVIEQLRVHFPAWSAKLGDDHMLDLSVLGQISDTALTQDKAIEFEQSGLPNTFVPGRNLLFFNFAAALAYRRGLEVLVGGMCETDYSGYPDCRDNTLKSLQVSLSLGLDRPMVIETPLMWIDKEKTWDMARTLGGQPLVQLIEEHTHTCYLGDRQHRHPWGYGCNQCPACDLRRKGYELYKSAHENH

SEQ ID NO: 35686 - protein, 235 aa, Advenella mimigardefordensis
  REGION 1..235: note = tr|W0PJH4|W0PJH4_9BURK 7-cyano-7-deazaguanine synthase OS=Advenella mimigardefordensis DPN7 OX=1247726; GN = queC PE=3 SV=1
MNNKALVLFSGGQDSTTCLAWALDRYQYVETIGFSYGQRHAVELTCREQVIEQLRLQFPDWSARLGNDHMLDLSVLGQISDTALTQDKAIEFEQSGLPNTFVPGRNLLFFNFAAALAYRRGLEVLVGGMCETDYSGYPDCRDNTLKSLQVSLSLGLDRPMVIETPLMWIDKEKTWHMASTLGGPALVQLIEEYTHTCYLGDREHRHPWGYGCNQCPACDLRRKGYELYQSAHANH

SEQ ID NO: 35687 - protein, 235 aa, Advenella sp.
  REGION 1..235: note = tr|A0A2M9TJB5|A0A2M9TJB5_9BURK 7-cyano-7-deazaguanine synthase OS=Advenella sp. S44; OX = 1982755 GN=queC PE=3 SV=1
MNHRALVLFSGGQDSTTCLAWALDRYEYVETIGFAYGQRHAVELACREQVIEQIRMQFPVWGAKLGDDHMLDLSVLGQISDTALTQDKAIEFEQSGLPNTFVPGRNLLFFNFAAALAYRRGLQVLVGGMCETDYSGYPDCRDNTLKSLQVSLSLGLDRPMVIETPLMWIDKEATWRMAGLLGGQPLVQLIEEHTHTCYLGDREHRHPWGYGCNRCPACELRRHGYELYQRAHENR

SEQ ID NO: 35688 - protein, 186 aa, Aequorivita antarctica
  REGION 1..186: note = tr|A0A5C6Z030|A0A5C6Z030_9FLAO 7-cyano-7-deazaguanine synthase OS=Aequorivita antarctica; OX = 153266 GN=ESU54_11110 PE=3 SV=1
MDSIALAYWKKPAHSITIDYGQKAANAEIKAAEQISKYLNIKHHIIKVDCSKLGSGDMNGSKSLSISPITEWWPYRNQLLVTLACMKGVSLGIKELIVGSVSTDGAHKDGTRIFYDYLSTLIEYQEGQIKITCPGIEMSTVELIKRAKLPISLLYWAHSCHTANEPCMNCNGCKKYLYTLQMLGLD

SEQ ID NO: 35689 - protein, 219 aa, unidentified
  source 1..219: note = Aeribacillus composti
  REGION 1..219: note = tr|A0A559TXK0|A0A559TXK0_9BACI 7-cyano-7-deazaguanine synthase OS=Aeribacillus composti; OX = 1868734 GN=queC PE=3 SV=1
MDNKKAVVVFSGGQDSTTCLFWAKKQFDEVTAVTFHYNQRHAQEIEAAKNIANEAGIPHYVLDMSLLNQMAPNALTRSNMEIEQKEGELPNTFVPGRNLVFLTFAAILAKQLGAKHIVTGVCETDFSGYPDCRDVFVKSCNVTINLAMEEDFVIHTPLMWINKAETWKFADELGVFDIIREKTLTCYNGIIGDGCGECPACLLRKRGLEQYLAEKGANT

SEQ ID NO: 35690 - protein, 219 aa, Aeribacillus pallidus; identical to SEQ ID NO: 35689
  REGION 1..219: note = tr|A0A165WDA4|A0A165WDA4_9BACI 7-cyano-7-deazaguanine synthase OS=Aeribacillus pallidus; OX = 33936 GN=queC PE=3 SV=1

SEQ ID NO: 35691 - protein, 214 aa, unidentified
  source 1..214: note = Aerococcaceae bacterium
  REGION 1..214: note = tr|A0A3D0CKA2|A0A3D0CKA2_9LACT 7-cyano-7-deazaguanine synthase OS=Aerococcaceae bacterium; OX = 2053495 GN=queC PE=3 SV=1
MKLVLLSGGVDSSTALALAKATDPDILAITFTYNQQHEQMELLAAQKVSEYYQVRHKIMDLSSIFSDSQSALSLNNDIPIAEGAYGESNELNTEVEFRNGVFLAILASLAKQYRADEIYFGAHQDESGTVYPDCSPEFIQTMNQAIQLGTNNSVSIKAPFMTRLKKDIVATGIELEVPYELTYSCYKGTDPACGVCGTCIDRKKAFEANGLEVA

SEQ ID NO: 35692 - protein, 232 aa, Aeromicrobium sp.
  REGION 1..232: note = tr|A0A0S9RDQ7|A0A0S9RDQ7_9ACTN 7-cyano-7-deazaguanine synthase OS=Aeromicrobium sp. Leaf289 OX=1736324 GN=queC PE=3 SV=1
MGRKAVVLLSGGLDSTTVLAVAKDQGFEPYAISFRYGQRHVVELESARRVAAGVGAAGHVVCDIDLRVFGGSALTADVDVPKHGSADELSDSEIPITYVPARNTVFLSFALAYAEVIGSTDIFIGVSALDYSGYPDCRPEYIAAYEQMANLATRAGVEGNEVKIHTPLIDLTKAQTVELGMRLGVDYSLTLSCYDPDVEGRACGHCDSCLLRLRGFADAGLADPVRYQEGTE

SEQ ID NO: 35693 - protein, 227 aa, Aeromicrobium sp.
  REGION 1..227: note = tr|A0A3B7DBB1|A0A3B7DBB1_9ACTN 7-cyano-7-deazaguanine synthase OS=Aeromicrobium sp. A1-2; OX = 2107713 GN=queC PE=3 SV=1
MKPKAIVLLSGGLDSSTVLAHALNEGYDVKALSFRYGQRHAIELKAAERVAKAFEVTEHVVCDIDLGVFGGSALTADIEVPKHESAEELNSDIPVTYVPARNTVFLSFALAFAEVSGANDIFIGVSALDYSGYPDCRPEFIEAFERMANLATKAGVEGSGIRIKTPLINLTKAQTVEMGLRLGVDYSLTSTCYDPAADGTPCGQCDSCHLRIKGFEELGLKAPLVYR

SEQ ID NO: 35694 - protein, 235 aa, Aeromonas allosaccharophila
  REGION 1..235: note = tr|A0A1Q5VW33|A0A1Q5VW33_9GAMM 7-cyano-7-deazaguanine synthase OS=Aeromonas allosaccharophila OX=656 GN=queC PE=3 SV=1
MKKAVVVFSGGQDSTTCLVQALAQYDEVHAITFDYGQRHREEIDTARRLGSALGIAAHKVMDVTLLNELAVSALTRDDIPVSCELQDNGLPNTFVPGRNILFLTLASIYAYQVGAEAVITGVCETDFSGYPDCRDEFVKALNQAVSLGLGRGIRFDTPLMWLDKAETWALADHYGHLDTVRQQTLTCYNGIAGDGCGTCPACELRSRGLNNYLADKAGIMARLYDKTGLGEKSAE

SEQ ID NO: 35695 - protein, 235 aa, Aeromonas allosaccharophila
  REGION 1..235: note = tr|A0A0T6V0P6|A0A0T6V0P6_9GAMM 7-cyano-7-deazaguanine synthase OS=Aeromonas allosaccharophila OX=656 GN=queC PE=3 SV=1
MKKAVVVFSGGQDSTTCLVQALAQYDEVHAITFDYGQRHREEIDTARRLGSALGIAAHKVMDVTLLNELAVSALTRDDIPVSCELQDNGLPNTFVPGRNILFLTLASIYAYQVGAEAVITGVCETDFSGYPDCRDEFVKALNQAVSLGLGRDIRFDTPLMWLDKAETWALADHYGHLDTVRQQTLTCYNGIAGDGCGTCPACELRSRGLNNYLADKAGIMTRLYEKTGLGEKSAE

SEQ ID NO: 35696 - protein, 230 aa, unidentified
  source 1..230: note = Aeromonas cavernicola
  REGION 1..230: note = tr|A0A2H9U3N4|A0A2H9U3N4_9GAMM 7-cyano-7-deazaguanine synthase OS=Aeromonas cavernicola; OX = 1006623 GN=queC PE=3 SV=1
MNKAVVVFSGGQDSTTCLVQALAQYDEVHAITFDYGQRHRQEIDTARDLAKKLGVTAHKVMDANMLGELAVSALTRDDIPVSGELQDNGLPNTFVPGRNILFLTLAAIYAYQVGAQVVITGVCETDFSGYPDCRNEFVKSLNQAVSLGLDRTIRFATPLMWLDKAETWALADHYGHLDTVRQHTLTCYNGIAGDGCGTCPACELRGRGLARYLADKGGVQATLRKKLGLQ

SEQ ID NO: 35697 - protein, 235 aa, Aeromonas caviae
  REGION 1..235: note = tr|A0A3G9I513|A0A3G9I513_AERCA 7-cyano-7-deazaguanine synthase OS=Aeromonas caviae OX=648; GN = queC PE=3 SV=1
MKKAVVVFSGGQDSTTCLVQAQARYDEVHAITFDYGQRHRAEIDTARHLATALGIAAHKVMDVTMFGELAISALTRDDIPVSFELQENGLPNTFVPGRNILFLTLAAIYAYQVGAEAVITGVCETDFSGYPDCRDDFVKALNQAVSLGLDRPIRFETPLMWLDKAETWALADHYGHLDTVRHQTLTCYNGIQGDGCGACPACELRRRGLDHYLADKTGIRARLYEKSGLGEKSGS

SEQ ID NO: 35698 - protein, 235 aa, Aeromonas caviae
  REGION 1..235: note = tr|A0A3S5WT93|A0A3S5WT93_AERCA 7-cyano-7-deazaguanine synthase OS=Aeromonas caviae OX=648; GN = queC PE=3 SV=1
MKKAVVVFSGGQDSTTCLVQAQARYDEVHAITFDYGQRHRAEIDTARHLATALGIAAHKVMDVTMLGELAISALTRDDIPVSFELQENGLPNTFVPGRNILFLTLAAIYAYQVGAEAVITGVCETDFSGYPDCRDDFVKALNQAVSLGLDRPTRFETPLMWLDKAETWALADHYGHLDTVRHQTLTCYNGIQGDGCGACPACELRRRGLDHYLADKSGIRARLYEKSGLGEKSGS

SEQ ID NO: 35699 - protein, 235 aa, unidentified
  source 1..235: note = Aeromonas dhakensis
  REGION 1..235: note = tr|K1JR55|K1JR55_9GAMM 7-cyano-7-deazaguanine synthase OS=Aeromonas dhakensis OX=196024 GN=queC PE=3 SV=1
MKKAVVVFSGGQDSTTCLVQALSRYDEVHAITFDYGQRHSEEIETARRLASRLGIAAHKVMDVTMLGELAISALTRDEIPVSFELQENGLPNTFVPGRNILFLTLAAIYAYQVGAEAVITGVCETDFSGYPDCRDEFVKALNQAVSLGLDRAIRFETPLMWLDKAETWALADHYGHLDTVRQQTLTCYNGIAGEGCGACPACDLRSRGLQQYLADKAGVLARLHQKTGLGEKSGC

SEQ ID NO: 35700 - protein, 235 aa, unidentified
  source 1..235: note = Aeromonas dhakensis
  REGION 1..235: note = tr|A0A433GCG3|A0A433GCG3_9GAMM 7-cyano-7-deazaguanine synthase OS=Aeromonas dhakensis; OX = 196024 GN=queC PE=3 SV=1
MKKAVVVFSGGQDSTTCLVQALSCYDEVHAITFDYGQRHSEEIETARRLASRLGIAAHKVMDVTMLGELAISALTRDEIPVSFELQENGLPNTFVPGRNILFLTLAAIYAYQVGAEAVITGVCETDFSGYPDCRDEFVKALNQAVSLGLDRAIRFETPLMWLDKAETWALADHYGHLDTVRQQTLTCYNGIAGDGCGACPACDLRSRGLQQYLADKAGVLVRLHQKTGLGEKSGC

SEQ ID NO: 35701 - protein, 231 aa, Aeromonas diversa
  REGION 1..231: note = tr|N9VIJ5|N9VIJ5_9GAMM 7-cyano-7-deazaguanine synthase OS=Aeromonas diversa CDC 2478-85 OX=1268237; GN = queC PE=3 SV=1
MSIAVVVFSGGQDSTTCLVQALQTYDEVHAITFDYGQRHVAEIEVAKALTERLGVKAHKVMDVSLLGELALSSLTRDDIPVSRELQDNGLPNTFVPGRNILFLTLAAIYAYQVGAEAVITGVCETDFSGYPDCRDEFVKALNRAVVLGMERPVRFETPLMWLDKAETWALADRCGHLETVRHHTLTCYNGIQGDGCGECPACLLRARGLQEYLEQGEAVRARLAVKLAPAS

SEQ ID NO: 35702 - protein, 235 aa, Aeromonas encheleia
  REGION 1..235: note = tr|A0A448KWS7|A0A448KWS7_9GAMM 7-cyano-7-deazaguanine synthase OS=Aeromonas encheleia; OX = 73010 GN=exsB_1 PE=3 SV=1
MKKAVVVFSGGQDSTTCLVQALARYDEVHAITFDYGQRHREEIDTARRLASEFGIAAHKVMDVTMLGELAVSALTRDEIPVSGELQDNGLPNTFVPGRNILFLTLASIYAYQVGAETVITGVCETDFSGYPDCRDEFVKALNQAVSLGLDRGIRFETPLMWLDKAETWALADHYGQLDRVRQQTLTCYNGILGDGCGSCPACELRSRGLNHYLADRVGVMARLREKTGLGEKSGS

SEQ ID NO: 35703 - protein, 229 aa, Aeromonas enteropelogenes
  REGION 1..229: note = tr|A0A175VL29|A0A175VL29_AEREN 7-cyano-7-deazaguanine synthase OS=Aeromonas enteropelogenes OX=29489 GN=queC PE=3 SV=1
MKKAVVVFSGGQDSTTCLVQALARYDEVHAITFDYGQRHREEIDTARRLASQLGVAAHKVMDVTLLNELAVSALTRDDIPVSGELQDNGLPNTFVPGRNILFLTLASIYAYQVGAEAVITGVCETDFSGYPDCRDEFVKALNQGVSLGLDRGIRFETPLMWLDKAETWALADHYGHLETVRQQTLTCYNGIPGDGCGSCPACELRSRGLNHYLADKAGVTTRLREKTGL

SEQ ID NO: 35704 - protein, 235 aa, Aeromonas hydrophila
  REGION 1..235: note = sp|A0KJA0|QUEC_AERHH 7-cyano-7-deazaguanine synthase; OS = Aeromonas hydrophila subsp. hydrophila (strain ATCC 7966 / DSM 30187 / JCM 1027 / KCTC 2358 / NCIMB 9240) OX= 380703 GN=queC PE=3 SV=1
MKKAVVVFSGGQDSTTCLVQALSRYDEVHAITFDYGQRHREEIETARRLASQLGIAAHKVMDVTMLGELAISALTRDEIPVSFELQDNGLPNTFVPGRNILFLTLAAIYAYQVGAEAVITGVCETDFSGYPDCRDEFVKALNQAVSLGLDRAIRFETPLMWLDKAETWALADHYGHLDTVRQQTLTCYNGIAGDGCGACPACDLRSRGLQQYLADKAGVAARLHQKTGLGEKSGC

SEQ ID NO: 35705 - protein, 235 aa, Aeromonas hydrophila
  REGION 1..235: note = tr|A0A454GF94|A0A454GF94_AERHY 7-cyano-7-deazaguanine synthase OS=Aeromonas hydrophila; OX = 644 GN=queC PE=3 SV=1
MKKAVVVFSGGQDSTTCLVQALSRYDEVHAITFDYGQRHREEIETARRLASGLGIAAHKVMDVTMLGELAISALTRDEIPVSFELQDNGLPNTFVPGRNILFLTLAAIYAYQVGAEAVITGVCETDFSGYPDCRDEFVKALNQAVSLGLDRAIRFETPLMWLDKAETWALADHHGHLDTVRQQTLTCYNGIAGDGCGACPACDLRSRGLQQYLADKAGVTARLHQKTGLGEKSGC

SEQ ID NO: 35706 - protein, 235 aa, Aeromonas jandaei
  REGION 1..235: note = tr|A0A3N6V4H9|A0A3N6V4H9_AERJA 7-cyano-7-deazaguanine synthase OS=Aeromonas jandaei; OX = 650 GN=queC PE=3 SV=1
MKKAVVVFSGGQDSTTCLVQALANYDEVHAITFDYGQRHREEIDTARHLVQLLGVTAHKVMDVTLLNELAISALTRDDIPVSCDLQDNGLPNTFVPGRNILFLTLASIYAYQVGAEAVITGVCETDFSGYPDCRDEFVKALNQAVSLGLDRGIRFETPLMWLDKAETWALADHYGHLETVRQQTLTCYNGIAGDGCGTCPACNLRSRGLHGYLTDKAGIMANMREKIGLGEKSGA

SEQ ID NO: 35707 - protein, 235 aa, Aeromonas jandaei
  REGION 1..235: note = tr|A0A2S5FGD1|A0A2S5FGD1_AERJA 7-cyano-7-deazaguanine synthase OS=Aeromonas jandaei; OX = 650 GN=queC PE=3 SV=1
MKKAVVVFSGGQDSTTCLVQALANYDEVHAITFDYGQRHREEIDTARHLVQLLGVTAHKVMDVTLLNELAISALTRDDIPVSCDLQDNGLPNTFVPGRNILFLTLASIYAYQVGAEAVITGVCETDFSGYPDCRDEFVKALNQAVSLGLDRGIRFETPLMWLDKAETWALADHYGHLDTVRQQTLTCYNGIAGDGCGTCPACNLRSRGLDGYLADKAGIMAKMHVKTGLGEKSGA

SEQ ID NO: 35708 - protein, 229 aa, unidentified
  source 1..229: note = Aeromonas lusitana
  REGION 1..229: note = tr|A0A2M8HCM4|A0A2M8HCM4_9GAMM 7-cyano-7-deazaguanine synthase OS=Aeromonas lusitana; OX = 931529 GN=queC PE=3 SV=1
MKKAVVVFSGGQDSTTCLVQAQAKYGEVHAITFDYGQRHREEIDTARRLAKSFGIKAHKVMDVTMLGELAVSALTRDEIPVSGELQDNGLPNTFVPGRNILFLTLASIYAYQVGADTVITGVCETDFSGYPDCRDEFVKALNQAVSLGLDRGIRFETPLMWLDKAETWALADHYGHLDTVRQQTLTCYNGIQGDGCGTCPACELRSRGLNQYLADRVGVMGRLHTKTGL

SEQ ID NO: 35709 - protein, 229 aa, Aeromonas media
  REGION 1..229: note = tr|A0A023RH45|A0A023RH45_AERME 7-cyano-7-deazaguanine synthase OS=Aeromonas media WS; OX = 1208104 GN=queC PE=3 SV=1
MKKAVVVFSGGQDSTTCLVQALALYDEVHAITFDYGQRHREEIETARRLAGQLGIAAHKVMDVTMLGELAVSALTRDDIPVSGELQDNGLPNTFVPGRNILFLTLAAIYAYQVGADTLITGVCETDFSGYPDCRDDFVKALNQAVSLGLDRAIRFETPLMWLDKAETWALADHYGHLETVRQQTLTCYNGIQGDGCGTCPACELRSRGLNQYLADRVGVMARLHKKTGL

SEQ ID NO: 35710 - protein, 86 aa, Aeromonas molluscorum
  REGION 1..86: note = tr|R1GPR5|R1GPR5_9GAMM 7-cyano-7-deazaguanine synthase (Fragment) OS=Aeromonas molluscorum 848; OX = 1268236 GN=G113_18222 PE=3 SV=1
AVALGLDRGLRFETPLMWLDKAETWALADTFGQLNLVREQTLTCYNGLIGDGCGTCPACILRRRGLDQYLADRVGVNLRLQHKQGR

SEQ ID NO: 35711 - protein, 40 aa, Aeromonas molluscorum
  REGION 1..40: note = tr|R1GPL0|R1GPL0_9GAMM 7-cyano-7-deazaguanine synthase (Fragment) OS=Aeromonas molluscorum 848; OX = 1268236 GN=G113_18454 PE=3 SV=1
MKKAVVVFSGGQDSTTCLVQAKAQYDEVHAITFDYGQRHL

SEQ ID NO: 35712 - protein, 229 aa, unidentified
  source 1..229: note = Aeromonas rivipollensis
  REGION 1..229: note = tr|A0A2P1PL48|A0A2P1PL48_9GAMM 7-cyano-7-deazaguanine synthase OS=Aeromonas rivipollensis; OX = 948519 GN=queC PE=3 SV=1
MKKAVVVFSGGQDSTTCLVQALALYDEVHAITFDYGQRHREEIETARRLAGQLGVAAHKVMDVTMLGELAVSALTRDDIPVSGELQDNGLPNTFVPGRNILFLTLAAIYAYQVGADTLITGVCETDFSGYPDCRDDFVKALNQAVSLGLDRAIRFETPLMWLDKAETWALADHYGHLETVRQQTLTCYNGIQGDGCGTCPACELRSRGLQRYLCDKAGIMASLREKTGL

SEQ ID NO: 35713 - protein, 235 aa, Aeromonas salmonicida
  REGION 1..235: note = tr|A0A290VQG4|A0A290VQG4_AERSA 7-cyano-7-deazaguanine synthase OS=Aeromonas salmonicida subsp. masoucida OX=197700 GN=queC PE=3 SV=1
MKKAVVVFSGGQDSTTCLVQALAHYDEVHAITFDYGQRHREEIETARRLATQFGIAAHKVMDVTLLNELAVSALTRDEIPVSGELQDNGLPNTFVPGRNILFLTLASIYAYQVGAEAVITGVCETDFSGYPDCRDEFVKSLNQAVSLGLDRGIRFETPLMWLDKAETWALADYYGHLETVRQQTLTCYNGIAGDGCGTCPACELRSRGLDLYLADKAGIMARLYEKTGLCEKSVL

SEQ ID NO: 35714 - protein, 237 aa, Aeromonas salmonicida
  REGION 1..237: note = sp|A4SLT2|QUEC_AERS4 7-cyano-7-deazaguanine synthase; OS = Aeromonas salmonicida (strain A449) OX=382245 GN=queC; PE = 3 SV=1
MNVKKAVVVFSGGQDSTTCLVQALAHYDEVHAITFDYGQRHREEIETARRLATQFGIAAHKVMDVTLLNELAVSALTRDEIPVSGELQDNGLPNTFVPGRNILFLTLASIYAYQVGAEAVITGVCETDFSGYPDCRDEFVKSLNQAVSLGLDRCIRFETPLMWLDKAETWALADYYGHLETVRQQTLTCYNGIAGDGCGTCPACELRSRGLDLYLADKAGIMARLYEKTGLCEKSVL

SEQ ID NO: 35715 - protein, 231 aa, Aeromonas schubertii
  REGION 1..231: note = tr|A0A0S2SDX9|A0A0S2SDX9_9GAMM 7-cyano-7-deazaguanine synthase OS=Aeromonas schubertii; OX = 652 GN=queC PE=3 SV=1
MSIAVVVFSGGQDSTTCLVQALQHYDEVHAITFDYGQRHVAEIEVARALAERLGVKAHKVMDVSLLGELALSSLTRDEIPVSRELQENGLPNTFVPGRNILFLTLAAIYAYQVGAEAVITGVCETDFSGYPDCRDEFVQALNRAVVLGMDRPVRFETPLMWLDKAETWALADRCGHLDTVRHHTLTCYNGIQGDGCGECPACLLRARGLQEYLEQGEAVRARLATKLAPAS

SEQ ID NO: 35716 - protein, 230 aa, Aeromonas simiae
  REGION 1..230: note = tr|A0A5J6WWK0|A0A5J6WWK0_9GAMM 7-cyano-7-deazaguanine synthase QueC OS=Aeromonas simiae; OX = 218936 GN=queC PE=4 SV=1
MGIAVVVFSGGQDSTTCLVQALQHYDEVHAITFDYGQRHVAEIEVAKALAVRLGVKAHKVMDVSLLGELALSSLTRDDIPVSRELQDNGLPNTFVPGRNILFLTLAAIYAYQVGAEAVITGVCETDFSGYPDCRDEFVKALNHAVALGMDRPVRFETPLMWLDKAETWALADRYGHLDTVRQHTLTCYNGIQGDGCGECPACLLRARGLNEYLEQGEAVRARLATKLAAA

SEQ ID NO: 35717 - protein, 235 aa, Aeromonas sobria
  REGION 1..235: note = tr|A0A1S2D448|A0A1S2D448_AERSO 7-cyano-7-deazaguanine synthase OS=Aeromonas sobria OX=646; GN = queC PE=3 SV=1
MKKAVVVFSGGQDSTTCLVQALAQYDEVHAITFDYGQRHREEIDTARRLGSALGIAAHKVMDVTLLNELAVSALTRDDIPVSCELQDNGLPNTFVPGRNILFLTLASIYAYQVGAEAVITGVCETDFSGYPDCRDEFVKALNQAVSLGLGRGIRFETPLMWLDKAETWALADHYGHLDTVRQQTLTCYNGIAGDGCGTCPACELRSRGLNNYLADKAGIMTRLFEKTGLGEKSAE

SEQ ID NO: 35718 - protein, 235 aa, Aeromonas sobria
  REGION 1..235: note = tr|A0A2N3IWE9|A0A2N3IWE9_AERSO 7-cyano-7-deazaguanine synthase OS=Aeromonas sobria OX=646; GN = queC PE=3 SV=1
MKKAVVVFSGGQDSTTCLVQALAQYDEVHAITFDYGQRHRQEIDTARDLGSALGIAAHKVMDVTLLNELAVSALTRDDIPVSCELQDNGLPNTFVPGRNILFLTLASIYAYQVGAEAVITGVCETDFSGYPDCRDEFVKALNQAVSLGLDRGIRFETPLMWLDKAETWALADHYGHLETVRQQTLTCYNGIAGDGCGTCPACELRSRGLNNYLADKAGIMAKLFEKTGLGEKSAE

SEQ ID NO: 35719 - protein, 235 aa, Aeromonas sp.; identical to SEQ ID NO: 35695
  REGION 1..235: note = tr|A0A1Q8D6A8|A0A1Q8D6A8_9GAMM 7-cyano-7-deazaguanine synthase OS=Aeromonas sp. YN13HZO-058 OX=1921564 GN=queC PE=3 SV=1

SEQ ID NO: 35720 - protein, 235 aa, Aeromonas sp.
  REGION 1..235: note = tr|A0A2R7MUF8|A0A2R7MUF8_9GAMM 7-cyano-7-deazaguanine synthase OS=Aeromonas sp. HMWF017; OX = 2056853 GN=queC PE=3 SV=1
MKKAVVVFSGGQDSTTCLVQALARYDEVHAITFDYGQRHREEIDTARRLGSALGIAAHKVMDVTLLNELAVSALTRDDIPVSCELQDNGLPNTFVPGRNILFLTLASIYAYQVGAEAVITGVCETDFSGYPDCRDEFVKALNQAVSLGLDRGIRFETPLMWLDKAETWALADHYGHLDTVRQQTLTCYNGIAGDGCGTCPACVLRRRGLNNYLADKAGIMARLFEKTGLGEKSAE

SEQ ID NO: 35721 - protein, 235 aa, Aeromonas taiwanensis
  REGION 1..235: note = tr|A0A5F0KE11|A0A5F0KE11_9GAMM 7-cyano-7-deazaguanine synthase OS=Aeromonas taiwanensis; OX = 633417 GN=queC PE=3 SV=1
MKKAVVVFSGGQDSTTCLVQAQALYDEVHAITFDYGQRHRAEIETARRLAGALGIAAHKVMDVTMLGELAISALTRDDIPVSGELQDNGLPNTFVPGRNILFLTLASIYAYQVGAEAVITGVCETDFSGYPDCRDEFVKALNQAVSLGLDRAIRFETPLMWLDKAETWALADHYGHLDTVRHQTLTCYNGIQGDGCGACPACELRRRGLDLYLADRAAIAARLYKKTRLGEKSGS

SEQ ID NO: 35722 - protein, 235 aa, Aeromonas veronii
  REGION 1..235: note = tr|A0A1Q8F209|A0A1Q8F209_9GAMM 7-cyano-7-deazaguanine synthase OS=Aeromonas veronii; OX = 654 GN=queC PE=3 SV=1
MKKAVVVFSGGQDSTTCLVQALAQYDEVHAITFDYGQRHREEIDIARRLGSALGIAAHKVMDVTLLNELAVSALTRDDIPVSCELQDNGLPNTFVPGRNILFLTLASIYAYQVGAEAVITGVCETDFSGYPDCRDEFVKALNQAVSLGLDRGIRFETPLMWLDKAETWALADHYGHLDTVRQQTLTCYNGIAGDGCGTCPACELRSRGLNNYLADKAGIMARLFEKTGLGEKSAE

SEQ ID NO: 35723 - protein, 235 aa, Aeromonas veronii
  REGION 1..235: note = tr|A0A3A9IWQ2|A0A3A9IWQ2_9GAMM 7-cyano-7-deazaguanine synthase OS=Aeromonas veronii; OX = 654 GN=queC PE=3 SV=1
MKKAVVVFSGGQDSTTCLVQALARYDEVHAITFDYGQRHREEIDIARRLGSALGIAAHKVMDVTLLNELAVSALTRDDIPVSCELQDNGLPNTFVPGRNILFLTLASIYAYQVGAEAVITGVCETDFSGYPDCRDEFVKALNQAVSLGLDRGIRFETPLMWLDKAETWALADHYGHLDTVRQQTLTCYNGIAGDGCGTCPACELRSRGLNNYLADKAGIMARLFEKTGLGEKSAE

SEQ ID NO: 35724 - protein, 219 aa, Aestuariibacter sp.
  REGION 1..219: note = tr|A0A506RV37|A0A506RV37_9ALTE 7-cyano-7-deazaguanine synthase OS=Aestuariibacter sp. GS-14 OX=2590670 GN=queC PE=3 SV=1
MSEKVIVIYSGGMDSFTVLNKAIEEGKTPYALSFDYGQRHKKELDYAANVCKELGISHKIVDISAINSLVGGSALTDDIDVPEGHYAEPSMKQTVVPNRNMILLSLAVGYAVSMDANKVYYGAHTGDHAIYPDCRPEFVEKMNAVCAIANYEAIEIVTPYLKVSKTAILTDGLRMGLDYNKSWTCYNGRELACGKCGACQERLEAFRDNNATDPLQYES

SEQ ID NO: 35725 - protein, 219 aa, Aestuariibacter sp.
  REGION 1..219: note = tr|A0A2D6XYK4|A0A2D6XYK4_9ALTE 7-cyano-7-deazaguanine synthase OS=Aestuariibacter sp.; OX = 1872400 GN=queC PE=3 SV=1
  VARIANT 40..41: note = Xaa can be any naturally occurring amino acid
  VARIANT 51: note = Xaa can be any naturally occurring amino acid
  VARIANT 58: note = Xaa can be any naturally occurring amino acid
  VARIANT 118: note = Xaa can be any naturally occurring amino acid
MSEKVIVIYSGGMDSYTVLNKAIEDGKTPYALSFDYGQRXXKELDYAANVXKELGISXKIVDISAINSLVGGSALTDDIEVPEGHYEEPSMKQTVVPNRNMILLSLAVGYAVSMEANXVYYGAHSGDHAIYPDCRPEFVEKMNDVCAIANYEAIEIVTPYLKVSKTAILTDGLRMGLDYGKSWTCYNGREHACGKCGACQERLEAFRDNNATDPLEYES

SEQ ID NO: 35726 - protein, 236 aa, unidentified
  source 1..236: note = Aestuariispira insulae
  REGION 1..236: note = tr|A0A3D9HH68|A0A3D9HH68_9PROT 7-cyano-7-deazaguanine synthase OS=Aestuariispira insulae; OX = 1461337 GN=queC PE=3 SV=1
MKTIVICSGGLDSVTLAHKVAKEHELLALVTFDYGQRHKKEMDFAKACAERLEVPFIPVDMANIGALLSGSALTDDIDVPDGHYAEETMKITVVPNRNAIMLAIAFGIASARGADAVAAAVHGGDHFIYPDCRPAFVEAFETMQKHALEGMNEIQLYTPFVHVPKSEIAAEGARLGVPFAETWSCYKGGEDQCGRCGTCVERIEAFVEAGVEDPTHYADTEFWREAVAKAHEKAGA

SEQ ID NO: 35727 - protein, 242 aa, Afipia broomeae
  REGION 1..242: note = tr|K8PND6|K8PND6_9BRAD 7-cyano-7-deazaguanine synthase OS=Afipia broomeae ATCC 49717 OX=883078 GN=queC; PE = 3 SV=1
MTELSQNNAALVLFSGGQDSATCLAWALARFERVETIGFSYGQRHAVELESRATLIGGMKALHPEWAARLGESHTLDIPTLGDISETALTRDTAIEMGEGGLPNTFVPGRNLVFLTFAAALAYRRGITHIVGGMCETDFSGYPDCRDDTIKALNIALNLGMARPFELHTPLMWRDKGETWALAEELGGKGLVDLIVEHSHTCYLGERGARHDWGYGCGECPACSLRSKGWAAYSAKAKTEKQ

SEQ ID NO: 35728 - protein, 238 aa, Afipia broomeae
  REGION 1..238: note = tr|A0A2M8ZU52|A0A2M8ZU52_9BRAD 7-cyano-7-deazaguanine synthase OS=Afipia broomeae; OX = 56946 GN=queC PE=3 SV=1
MGASLNASAALVSFSGGQDSTTALAWALSRYDIVETIGFRYGQKHFVEMECRPAVREAIARLNPVWKERLGPDHVIELDLIGQLAKNVISPDGYTPTPGEGIEAGTRYIPGRNLVMLSMCASVAFRRNIGALVCGTSETEYSGYPDCRDASMKAVETAINMSSGKHFKIECPLMWRDKKGVWQLAESLGGADLIKIVREDTHTCYQGSRDNLHDWGYGCGACPACNLRAKGWREFTNH

SEQ ID NO: 35729 - protein, 242 aa, Afipia clevelandensis
  REGION 1..242: note = tr|K8PNL9|K8PNL9_9BRAD 7-cyano-7-deazaguanine synthase OS=Afipia clevelandensis ATCC 49720 OX=883079; GN = queC PE=3 SV=1
MTELGPNNAALVLFSGGQDSATCLAWALSRFERVETIGFSYGQRHAIELDSRGKLIAGMTALRPEWAARLGDSHTLDIPTLGDVSETALTRETAIEMNDDGLPNTFVPGRNLVFLTFAAALAYRRGITHIVGGMCETDFSGYPDCRDDTIKALNVALNLGMARPFELHTPLMWLDKSETWALAETLGGRGLVDLIVEHSHTCYLGERGARHDWGYGCGECPACSLRARGWVAYAAKAKIEAR

SEQ ID NO: 35730 - protein, 240 aa, Afipia felis
  REGION 1..240: note = tr|A0A380W7X8|A0A380W7X8_AFIFE 7-cyano-7-deazaguanine synthase OS=Afipia felis OX=1035; GN = queC PE=3 SV=1
MVDRAMDKTPENAALVLFSGGQDSATCLAWALSRFERVETVGFDYGQRHAIELECRAALIDGFKSIKTEWRARLGEAHTLAIPTLAEISDTALTRDIAIEMKEDGLPNTFVPGRNLLFLTFAAALGYRRGIRHIVGGMCETDYSGYPDCRDETIKSLNAAINQGMGREFELHTPLMWRDKAQTWELADELGGEALVDLIIQHSHTCYLGERGALHDWGYGCGECPACRLRAAGWAKYKAA

SEQ ID NO: 35731 - protein, 76 aa, Afipia felis
  REGION 1..76: note = tr|A0A090MKU4|A0A090MKU4_AFIFE 7-cyano-7-deazaguanine synthase OS=Afipia felis OX=1035; GN = queC PE=3 SV=1
MGRDFELHTPLMWRDKAQTWALAHELGGEALVDLIVQHSHTCYLGERGALHDWGYGCGECPACRLRAAGWEKYKAA

SEQ ID NO: 35732 - protein, 242 aa, Afipia massiliensis
  REGION 1..242: note = tr|A0A4U6BRU8|A0A4U6BRU8_9BRAD 7-cyano-7-deazaguanine synthase OS=Afipia massiliensis; OX = 211460 GN=queC PE=3 SV=1
MTELGQNNAALVLFSGGQDSATCLAWALARFTRVETIGFSYGQRHAVELDSRAKLIDGMMALRPEWASKLGENHTLDVPTLGDISETALTRDTAIEMGEGGLPNTFVPGRNLVFLTFAAALAYRRGVTHIVGGMCETDFSGYPDCRDETIKALNVALNLGMARPFELHTPLMWRDKADTWALAEELGGKGLVDLIVEHSHTCYLGERGARHDWGYGCGECPACSLRAKGWAAYAAHAVPEAR

SEQ ID NO: 35733 - protein, 236 aa, Afipia sp.
  REGION 1..236: note = tr|A0A1H0TCZ4|A0A1H0TCZ4_9BRAD 7-cyano-7-deazaguanine synthase OS=Afipia sp. GAS231; OX = 1882747 GN=queC PE=3 SV=1
MSDQSKSETALVLFSGGQDSTTCLAWALQRFARVEMIGFSYGQRHAIELECRDRLLSGITSLRPEWATRLGENHTLEIPTLAEISDTALTRDVAIEMGADGLPNTFVPGRNLVFLTFAAALAYRRGIRHIIGGMCETDYSGYPDCRDETIKALQSALNLGMAKNFELHTPLMWLDKASTWKLAHELGGAGLVDLIREHSHTCYLGERGAQHDWGYGCGECPACALRAKGWREYAEE

SEQ ID NO: 35734 - protein, 235 aa, Afipia sp.
  REGION 1..235: note = tr|D6V6F5|D6V6F5_9BRAD 7-cyano-7-deazaguanine synthase OS=Afipia sp. 1NLS2 OX=666684 GN=queC PE=3 SV=1
MDKTPENAALVLFSGGQDSATCLAWALSRFARVETLGFDYGQRHAIELECRATLIEGFKRLKPEWKTKLGEAHMLAIPTLAEISDTALTRDIAIEMEEGGLPNTFVPGRNLLFLTFAAALGYRRGIRHIVGGMCETDYSGYPDCRDETIKSLNVALNQGMGRDFELHTPLMWRDKAQTWALAHELGGEALVDLIVQHSHTCYLGERGALHDWGYGCGECPACRLRAAGWEKYKAA

SEQ ID NO: 35735 - protein, 218 aa, Agarivorans albus
  REGION 1..218: note = tr|R9PQQ7|R9PQQ7_AGAAL 7-cyano-7-deazaguanine synthase OS=Agarivorans albus MKT 106 OX=1331007 GN=queC; PE = 3 SV=1
MKEKAVVIYSGGMDSFTVLHKTLQLGLQPYALSFNYGQRHVKELEYAQKVTEELGIEHKIVDITAINQLLAGSSLTSDIDIPEGDYQEESMKSTVVPNRNMILLSLAIGYAVSIGAKKVFYGAHSGDHAIYPDCRPEFVKKMNDVSLIANYEAVEVISPYLEQSKIDILSDGLAMGLDYAKTWTCYNGREQACGKCGACQERLEAFKLNAVTDPLNYE

SEQ ID NO: 35736 - protein, 218 aa, Agarivorans sp.
  REGION 1..218: note = tr|A0A4D4IXY2|A0A4D4IXY2_9ALTE 7-cyano-7-deazaguanine synthase OS=Agarivorans sp. Toyoura001 OX=2283141 GN=queC PE=3 SV=1
MKEKAVVIYSGGMDSYTVLHKTLQLGLQPFALSFNYGQRHIKELEYAKNVCDELSVGHKIVDISSINQLLEGSSLTSDIDIPEGDYQEESMKSTVVPNRNMILLSLAIGYAVSIGAKKVFYGAHSGDHAIYPDCRPEFVRKMNEVSLIANYEAVEVISPYLEQSKIDILSDGLAMNLDYAKTWTCYNGRDLACGKCGACQERLEAFKLNEVNDPLSYE

SEQ ID NO: 35737 - protein, 228 aa, unidentified
  source 1..228: note = Agathobacter ruminis
  REGION 1..228: note = tr|A0A2G3E256|A0A2G3E256_9FIRM 7-cyano-7-deazaguanine synthase OS=Agathobacter ruminis; OX = 1712665 GN=queC PE=3 SV=1
MKALVLISGGIDSTTCLALAVKEYGHENVIGLSIFYGQRHDKEIEAANAVCEYYQVEHITLDLSTMFQFSDCTLLSHSDGEIPEESYAEQLEKTDGKPVSTYVPFRNGLFLSSASAIALSKGCSKIYYGAHADDAAGNAYPDCSEAFNQAMNTAIYEGSGKQLQIEAPFINKNKAGVVALGLSLNVPYHLTWSCYEGHDKACGKCGTCIDRKQAFIENGTTDPIEYES

SEQ ID NO: 35738 - protein, 228 aa, unidentified
  source 1..228: note = Agathobaculum butyriciproducens
  REGION 1..228: note = tr|A0A2U1BEM6|A0A2U1BEM6_9FIRM 7-cyano-7-deazaguanine synthase OS=Agathobaculum butyriciproducens OX=1628085 GN=queC PE=3 SV=1
MSEKAMVLCSGGVDSTTCLALAIEKHGKENVCALSIYYGQKHVKEIQAAKAVLEYYGIEGTSLDLTPVFAYSDCSLLSHSTEDIPEESYAEQLAQRGGKPVTTYVPFRNGLFLSAAASVALSKNCSVIYYGAHHDDAAGNAYPDCSEDFVNAMNHSIVLGSGGDVRIEAPFVRWNKAQIVAEGLRLQVPYQLTWSCYEGGDKPCGKCGTCLDRIRAFEANGVTDPAMR

SEQ ID NO: 35739 - protein, 232 aa, Aggregatibacter actinomycetemcomitans
  REGION 1..232: note = tr|G4A8N9|G4A8N9_AGGAC 7-cyano-7-deazaguanine synthase OS=Aggregatibacter actinomycetemcomitans serotype e str. SC1083 OX=907488 GN=queC PE=3 SV=1
MSNQPNKALVIFSGGQDSTTCLFLAIQEFGAENVEVITFQYGQRHAIELEKARWIAQDLKVKQTVLDTSVIKAITHNALMDPSAQISQNDNELPNTFVDGRNALFLLYAAIYAKSQGICVIYTGVCETDFSGYPDCRDVFIKSMNVTLNLAMDYPFEIRTPLMWLDKKATWALADQLGAFDYIRQHTHTCYNGVEGGCGECPSCVLRERGLKAYLPEREANTPKKKTALLRE

SEQ ID NO: 35740 - protein, 232 aa, Aggregatibacter actinomycetemcomitans
  REGION 1..232: note = tr|H0KFL2|H0KFL2_AGGAC 7-cyano-7-deazaguanine synthase OS=Aggregatibacter actinomycetemcomitans RhAA1; OX = 1089447 GN=queC PE=3 SV=1
MSNQPNKALVIFSGGQDSTTCLFLAIQEFGAENVEVITFQYGQRHAIELEKARWIAQDLKVKQTVLDTSVIKAITYNALMDPSAQISQNDNELPNTFVDGRNALFLLYAAIYAKSQGIRVIYTGVCETDFSGYPDCRDVFIKSMNVTLNLAMDYPFEIRTPLMWLDKKETWALADQLGAFDYIRRHTHTCYNGVEGGCGKCPSCVLRERGLKGYLPEREAKTPKKTAALLRE

SEQ ID NO: 35741 - protein, 223 aa, Aggregatibacter aphrophilus
  REGION 1..223: note = tr|A0A3S4PSE9|A0A3S4PSE9_AGGAP 7-cyano-7-deazaguanine synthase OS=Aggregatibacter aphrophilus ATCC 33389 OX=985008 GN=queC PE=3 SV=1
MSNQPNKALVIFSGGQDSTTCLFLAIKEFGAENVEVITFQYGQRHAIELEKARWIAQDLKVKQTLLDTSVIKAITHNALMDPNAQISQKDDELPNTFVDGRNALFLLYAAIYAKSQGIRVIYTGVCETDFSGYPDCRDVFVKSMNVTLNLAMDYPFDIRTPLMWLDKKDTWALADQLGAFDYIRQHTHTCYNGVEGGCGECPSCILRERGLNAYLQARDTKNV

SEQ ID NO: 35742 - protein, 223 aa, Aggregatibacter aphrophilus; identical to SEQ ID NO: 35741
  REGION 1..223: note = tr|A0A336N9X9|A0A336N9X9_AGGAP 7-cyano-7-deazaguanine synthase OS=Aggregatibacter aphrophilus OX=732 GN=queC PE=3 SV=1

SEQ ID NO: 35743 - protein, 226 aa, Agitococcus lubricus
  REGION 1..226: note = tr|A0A2T5IWI1|A0A2T5IWI1_9LACT 7-cyano-7-deazaguanine synthase OS=Agitococcus lubricus; OX = 1077255 GN=queC PE=3 SV=1
MNLSTKPRAVVLLSGGLDSATCLAIANQHYDCYALSFAYGQRHNSELLAAQRIAQALGVCEHRIISIDLAGIGGSALTDLSIAVPEQASEGIPVTYVPARNTIFLAYALGFAEVIGAQHIVIGVNAVDYSGYPDCRPEYIAAFQHLADLATKSGVEGQSLRIETPLLHLSKADIIQTGIQLGVDYSLTVSCYQADTEGRACGKCDSCRLRKEGFASAQCPDPTHYQ

SEQ ID NO: 35744 - protein, 236 aa, unidentified
  source 1..236: note = Agrobacterium arsenijevicii
  REGION 1..236: note = tr|A0A0D8KT24|A0A0D8KT24_9RHIZ 7-cyano-7-deazaguanine synthase OS=Agrobacterium arsenijevicii OX=1585697 GN=queC PE=3 SV=1
MKTIVICSGGLDSVSLAHKIAAEHELLALVSFDYGQRHKKELDFAADCARRLGVPHHVIDIRTIGAHLTGSALTDDIAVPDGHYAEETMRSTVVPNRNAIMLTIAFGLAAAQQADAVAIAVHGGDHFIYPDCRPGFIDSFNAMQAHALEGYADVKLFAPYVTVSKAAIVTDGVKYGTPFGETWSCYKGGLRHCGRCGTCVERREAFHLAGVTDPTDYEDPDFWVAATHAYAAQEVR

SEQ ID NO: 35745 - protein, 236 aa, unidentified
  source 1..236: note = Agrobacterium bohemicum
  REGION 1..236: note = tr|A0A135P8M7|A0A135P8M7_9RHIZ 7-cyano-7-deazaguanine synthase OS=Agrobacterium bohemicum; OX = 2052828 GN=queC PE=3 SV=1
MKTIVICSGGLDSVSLAHKIAAENELVALVSFDYGQRHKKELDFAALCASRLAVPHHIIDIRTIGAHLTGSALTDDVAVPDGHYAEETMRSTVVPNRNAIMLTIAFGLAAAQQADAVAIAVHGGDHFIYPDCRPGFIDSFNDMQRHALDGYASVKLYAPYVAGSKADIVTDGASHDTPFAETWSCYKGGMRHCGRCGTCVERREAFHLAGVNDPTDYEDPDFWLAATSAYAAQEVN

SEQ ID NO: 35746 - protein, 236 aa, unidentified
  source 1..236: note = Agrobacterium deltaense
  REGION 1..236: note = tr|A0A1S7QZR5|A0A1S7QZR5_9RHIZ 7-cyano-7-deazaguanine synthase OS=Agrobacterium deltaense RV3 OX=1183426 GN=queC PE=3 SV=1
MKTIVICSGGLDSVSLAHKIAAEHELLALVSFDYGQRHRKELEYAADCARRLGVPHHIIDIRTIGAHLTGSALTDDVEVPDGHYAEETMRSTVVPNRNAIMLTIAFGLAAAQQADAVAIAVHGGDHFIYPDCRPGFIDSFNAMQAHALEGYADVKLFAPYVTVSKAAIVTDGAKYGTPFGETWSCYKGGLRHCGRCGTCVERREAFHLAGVTDPTDYEDPDFWVAATHAYAAQEVR

SEQ ID NO: 35747 - protein, 196 aa, unidentified
  source 1..196: note = Agrobacterium deltaense
  REGION 1..196: note = tr|A0A1S7U764|A0A1S7U764_9RHIZ 7-cyano-7-deazaguanine synthase OS=Agrobacterium deltaense NCPPB 1641 OX=1183425 GN=AGR7A_pAt10093 PE=3 SV=1
MSIVTLVSGGLDSTLVAKLAQEEGLSIHPLFIDYGQRSRDRELAACRGIMKRLGLPEPKVADLSGYGALIRSGLTDRSLHIVDDAFTPGRNMLFLLTAAAYAFQRNADAVSIGLLHEETSLFPDQTSAFLRDAEQMIARCLGRSIRVLAPLSQFHKIDVVELARQKGIVGTYSCHEGGDEACGECIACNEFKFERA

SEQ ID NO: 35748 - protein, 236 aa, unidentified
  source 1..236: note = Agrobacterium fabrum
  REGION 1..236: note = sp|Q8UAM7|QUEC_AGRFC 7-cyano-7-deazaguanine synthase; OS = Agrobacterium fabrum (strain C58 / ATCC 33970); OX = 176299 GN=queC PE=3 SV=1
MKTIVICSGGLDSVSLAHKIAAEHELLALVSFDYGQRHKKELDFAADCAKRLGVPHHLIDIGTIGAHLTGSALTDDIDVPDGHYAEETMRSTVVPNRNAIMLTIAFGLAAAQQADAVAIAVHGGDHFIYPDCRPGFIGSFNAMQAHALEGYADVTLFAPYVTVSKAAIVTDAVKYGTPFGETWSCYKGGLRHCGRCGTCVERREAFHLAGVTDPTEYEDPDFWVAATQAYAAQEVH

SEQ ID NO: 35749 - protein, 236 aa, unidentified; identical to SEQ ID NO: 35748
  source 1..236: note = Agrobacterium fabrum
  REGION 1..236: note = tr|A0A3G2CUU9|A0A3G2CUU9_9RHIZ 7-cyano-7-deazaguanine synthase OS=Agrobacterium fabrum; OX = 1176649 GN=exsB PE=3 SV=1

SEQ ID NO: 35750 - protein, 236 aa, unidentified
  source 1..236: note = Agrobacterium genomosp.
  REGION 1..236: note = tr|A0A1S7MZI5|A0A1S7MZI5_9RHIZ 7-cyano-7-deazaguanine synthase OS=Agrobacterium genomosp. 1 str. TT111 OX=1183430 GN=queC PE=3 SV=1
MKTIVICSGGLDSVSLAHKIAAEHELLALVSFDYGQRHKKELDFAADCAKRLGVPHHLIDITTIGAHLTGSALTDDIDVPDGHYAEETMRSTVVPNRNAIMLTIAFGLAAAQQADAVAIAVHGGDHFIYPDCRPGFIDSFNAMQAHALEGYADVTLFAPYVTVSKAAIVTDAVKYGTPFGETWSCYKGGSRHCGRCGTCVERREAFHLAGVTDPTDYEDPDFWVAATHAYAAQEVR

SEQ ID NO: 35751 - protein, 458 aa, unidentified
  source 1..458: note = Agrobacterium genomosp.
  REGION 1..458: note = tr|A0A1S7R0N0|A0A1S7R0N0_9RHIZ Uncharacterized protein OS=Agrobacterium genomosp. 5 str. CFBP 6626; OX = 1183435 GN=AGR5A_Lc10003 PE=4 SV=1
MREAILLKRPTLALDVIASSERRREDVQVCLIGRDISFKTAALESFAFRNWNNIVFDALVVAATIEFCDRALARKAVIWGREFDLRIAVHDAELWSSSKVYEPLIACLELLTGDRWQIDFVSRTVPEESPRQIVMEFPRDAEAVIAYSDGMDSRAVAGLERAKRGDKLVLVRLGGSDTGVTNAERNKRPFTAVPYKVVLGRDNAENSARSRGFKFAMIAAIGSFLVKAPVVIVPESGQGSLGPALLPVGQGYPDYRNHPAFTARMEALCRGLFDHIVRYEFPQIWNTKGETLAAFSKLGSNDADWIGTRSCWQQARHVSVDEHRRQCGICAACILRRLSVHAAGLSEPTSTYVWENLSAPVFEDGANSNFEKITPALRQYAIASVMHFDHMAGLRASPEYKLVQGRFVHGLAQGLREERSVVANKLDQLLARHEKEWSSFIDNIGAQSFLNAWISNRP

SEQ ID NO: 35752 - protein, 236 aa, unidentified
  source 1..236: note = Agrobacterium larrymoorei
  REGION 1..236: note = tr|A0A4Z1Q0Z8|A0A4Z1Q0Z8_9RHIZ 7-cyano-7-deazaguanine synthase OS=Agrobacterium larrymoorei OX=160699 GN=queC PE=3 SV=1
MKTIVICSGGLDSVSLAHRIAAEHELLALLSFDYGQRHKKELDFAAACATRLGVPHHIIDIRTIGAHLTGSALTDDVDVPDGHYAEETMRSTVVPNRNAIMLTIAFGLAAAQQADAVAIAVHGGDHFIYPDCRPGFIDAFNTMQAHALEGYANVKLYAPYVTVTKADIVTDGARHSTPFAETWSCYKGGIRHCGRCGTCVERREAFHLAGINDPTDYEDPDFWVAATSAYAAQEVR

SEQ ID NO: 35753 - protein, 197 aa, unidentified
  source 1..197: note = Agrobacterium larrymoorei
  REGION 1..197: note = tr|A0A4D7E2X0|A0A4D7E2X0_9RHIZ 7-cyano-7-deazaguanine synthase OS=Agrobacterium larrymoorei OX=160699 GN=CFBP5473_21300 PE=3 SV=1
MRLLLFSGGLDSTALAWSQRPDLCLTVDYGQRPAQGEIRAASGLSGLMGLRHEVVTVDLAHLGSGSLAGSETATVGSAPEWWPYRNQMLITLAAMKFVGQGLKEIMFGAVATDVHADGKKPFVDAISSLVSLQEGAVRVTAPAIDSDPVDLIRGSGLPASLLGATFSCHVAEYPCGRCRGCEKHSDTMRELAGAAHP

SEQ ID NO: 35754 - protein, 236 aa, unidentified
  source 1..236: note = Agrobacterium radiobacter
  REGION 1..236: note = sp|B9JLH9|QUEC_AGRRK 7-cyano-7-deazaguanine synthase; OS = Agrobacterium radiobacter (strain K84 / ATCC BAA-868); OX = 311403 GN=queC PE=3 SV=1
MKTIVVCSGGLDSVSLAHKVAAEQQLIGLVSFDYGQRHRKELDFAAACAKRLGVPHEIIDITTIGKHLTGSALTDDVDVPDGHYAEETMKATVVPNRNAIMLAIAFGLAAAQKADAVAVAVHGGDHFIYPDCRPGFIDAFQQMQNQALDGYASVSLYAPFVMTSKADIVTDGARHKTPFAETWSCYKGGERHCGRCGTCVERREAFHLAGVEDPTDYEDPDFWVTATSGFSAQEVK

SEQ ID NO: 35755 - protein, 236 aa, unidentified
  source 1..236: note = Agrobacterium radiobacter
  REGION 1..236: note = tr|W1L2D0|W1L2D0_RHIRD 7-cyano-7-deazaguanine synthase OS=Agrobacterium radiobacter DSM 30147 OX=1336745; GN = queC PE=3 SV=1
MKTIVICSGGLDSVSLAHKIAAEHELLALVSFDYGQRHRKELEYAADCARRLGVPHHVIDIRTIGAHLTGSALTDDVEVPDGHYAEETMRSTVVPNRNAIMLTIAFGLAAAQQADAVAIAVHGGDHFIYPDCRPGFIDSFNAMQAHALEGYANVKLFAPYVTVSKAAIVTDGVKYGTPFGETWSCYKGGLRHCGRCGTCVERREAFHLAGVTDPTDYEDPDFWVAATHAYAAQEVS

SEQ ID NO: 35756 - protein, 236 aa, unidentified
  source 1..236: note = Agrobacterium rhizogenes
  REGION 1..236: note = tr|A0A546XBD2|A0A546XBD2_AGRRH 7-cyano-7-deazaguanine synthase OS=Agrobacterium rhizogenes OX=359 GN=queC PE=3 SV=1
MKTIVICSGGLDSVSLAHKIAAEHELLALVSFDYGQRHRKELDFAADCARRLGVPHHIIDIRTIGAHLTGSALTDDIDVPDGHYAEETMRSTVVPNRNAIMLTIAFGLAAAQQADAVAIAVHGGDHFIYPDCRPGFIGSFNAMQAHALEGYADVTLFAPYVTVSKAAIVTDAVKYGTPFGETWSCYKGGLRHCGRCGTCVERREAFHLAGVTDPTDYEDPDFWVAATHAFAAQEVR

SEQ ID NO: 35757 - protein, 236 aa, unidentified
  source 1..236: note = Agrobacterium rhizogenes
  REGION 1..236: note = tr|A0A178GZI4|A0A178GZI4_AGRRH 7-cyano-7-deazaguanine synthase OS=Agrobacterium rhizogenes OX=359 GN=queC PE=3 SV=1
MKTIVICSGGLDSVSLAHKIAAEHELLALVSFDYGQRHRKELEYAADCARRLGVPHHVIDIRTIGAHLTGSALTDDVEVPDGHYAEETMRSTVVPNRNAIMLTIAFGLAAAQQADAVAIAVHGGDHFIYPDCRPGFIDSFNAMQAHALEGYADVKLFAPYVTVSKAAIVTDGAKYGTPFGETWSCYKGGLRHCGRCGTCVERREAFHLAGVTDPTDYEDPDFWVAATHAFAAQEVR

SEQ ID NO: 35758 - protein, 236 aa, unidentified
  source 1..236: note = Agrobacterium rosae
  REGION 1..236: note = tr|A0A2S4EAJ3|A0A2S4EAJ3_9RHIZ 7-cyano-7-deazaguanine synthase OS=Agrobacterium rosae; OX = 1972867 GN=queC PE=3 SV=1
MKTIVICSGGLDSVSLAHKIAAENELIALVSFDYGQRHKKELDFAALCASRLGVPHHIIDVRTIGAHLTGSALTDDVAVPDGHYAEETMRSTVVPNRNAIMLTIAFGLAAAQQADAVAIAVHGGDHFIYPDCRPGFIDSFNDMQRHALEGYANVKLYAPYVTGSKADIVTDGARHDTPFAETWSCYKGGMRHCGRCGTCVERREAFHLAGVDDPTDYEDPDFWLAATSAYVAQEVN

SEQ ID NO: 35759 - protein, 236 aa, unidentified
  source 1..236: note = Agrobacterium rubi
  REGION 1..236: note = tr|A0A081CSB0|A0A081CSB0_9RHIZ 7-cyano-7-deazaguanine synthase OS=Agrobacterium rubi TR3 = NBRC 13261 OX=1368415 GN=queC PE=3 SV=1
MKTIVICSGGLDSVSLAHKIASEHELLALVSFDYGQRHKKELDFAARCATRLGVPHHIIDIRTIGAHLTGSALTDNVEVPDGHYAEETMRSTVVPNRNAIMLTIAFGLAAAQQADAVAIAVHGGDHFIYPDCRPGFIDSFNDMQRHALEGYASVKLYAPYVTGSKADIVTDGAKHETPFAETWSCYKGGMRHCGRCGTCVERREAFQLAGVDDLTDYEDPDFWIAATSAYAAQAVK

SEQ ID NO: 35760 - protein, 236 aa, unidentified
  source 1..236: note = Agrobacterium rubi
  REGION 1..236: note = tr|A0A1B9TX34|A0A1B9TX34_9RHIZ 7-cyano-7-deazaguanine synthase OS=Agrobacterium rubi; OX = 28099 GN=queC PE=3 SV=1
MKTIVICSGGLDSVSLAHKIASEHELLALVSFDYGQRHKKELDFAARCATRLSVPHHIIDIRTIGAHLTGSALTDDVEVPDGHYAEETMRSTVVPNRNAIMLTIAFGLAAAQQADAVAIAVHGGDHFIYPDCRPGFIDSFNKMQRHALEGYASVKLYAPYVTGSKADIVTDGAKHDTPFAETWSCYKGGMRHCGRCGTCVERREAFQLAKVDDPTDYEDPDFWIAATSAYAAQAVK

SEQ ID NO: 35761 - protein, 236 aa, unidentified
  source 1..236: note = Agrobacterium salinitolerans
  REGION 1..236: note = tr|A0A4Z1R6B8|A0A4Z1R6B8_9RHIZ 7-cyano-7-deazaguanine synthase OS=Agrobacterium salinitolerans OX=1183413 GN=queC PE=3 SV=1
MKTIVICSGGLDSVSLAHKIAAEHELLALVSFDYGQRHRKELDFAADCARRLGVPHHIIDIRTIGAHLTGSALTDDVEVPDGHYAEETMRSTVVPNRNAIMLTIAFGLAAAQQADAVAIAVHGGDHFIYPDCRPGFIDSFNSMQAHALEGYADVKLFAPYVTVSKAAIVTDGAKYGTPFGETWSCYKGGLRHCGRCGTCVERREAFHLAGVTDPTDYEDPDFWVAATHAFAAQEVR

SEQ ID NO: 35762 - protein, 236 aa, unidentified
  source 1..236: note = Agrobacterium salinitolerans
  REGION 1..236: note = tr|A0A1S7UCE8|A0A1S7UCE8_9RHIZ 7-cyano-7-deazaguanine synthase OS=Agrobacterium salinitolerans str. Hayward 0363 OX=1183434 GN=queC PE=3; SV = 1
MKTIVICSGGLDSVSLAHKIAAEHELLALVSFDYGQRHRKELDFAADCARRLGVPHHIIDIRTIGAHLTGSALTDDVEVPDGHYAEETMRSTVVPNRNAIMLTIAFGLAAAQQADAVAIAVHGGDHFIYPDCRPGFIDSFNAMQAHALEGYADVKLFAPYVTVSKAAIVTDGAKYGTPFGETWSCYKGGLRHCGRCGTCVERREAFHLAGVTDPTDYEDPDFWVAATHAYAAQEVR

SEQ ID NO: 35763 - protein, 236 aa, unidentified
  source 1..236: note = Agrobacterium sp.
  REGION 1..236: note = tr|A0A3R9CJP5|A0A3R9CJP5_9RHIZ 7-cyano-7-deazaguanine synthase OS=Agrobacterium sp. FDAARGOS_525 OX=2420311 GN=queC PE=3 SV=1
MKTIVICSGGLDSVSLAHKIAAEHELLALVSFDYGQRHRKELDFAADCARRLGVPHHVIDIRTIGAHLTGSALTDDVEVPDGHYAEETMRSTVVPNRNAIMLTIAFGLAAAQQAEAVAIAVHGGDHFIYPDCRPGFIDSFNAMQAHALEGYADVKLFAPYVTVSKAAIVTDGAKYGTPFGETWSCYKGGLRHCGRCGTCVERREAFHLAGVTDPTDYEDPDFWVAATHAFAAQEVR

SEQ ID NO: 35764 - protein, 236 aa, unidentified
  source 1..236: note = Agrobacterium sp.
  REGION 1..236: note = tr|A0A0X7A016|A0A0X7A016_9RHIZ 7-cyano-7-deazaguanine synthase OS=Agrobacterium sp. D14; OX = 1336743 GN=queC PE=3 SV=1
MKTIVICSGGLDSVSLAHKIAAEHELLALVSFDYGQRHRKELEYAADCARRLGVPHHVIDIRTIGAHLTGSALTDDVEVPDGHYAEETMRSTVVPNRNAIMLTIAFGLAAAQQADAVAIAVHGGDHFIYPDCRPGFIDSFNAMQAHALEGYADVKLFAPYVTVSKAAIVTDGAKYGTPFGETWSCYKGGLRHCGRCGTCVERREAFHLAGVTDPTDYEDPDFWVAATHAYAAQEVS

SEQ ID NO: 35765 - protein, 236 aa, unidentified
  source 1..236: note = Agrobacterium tumefaciens
  REGION 1..236: note = tr|A0A1S7RK87|A0A1S7RK87_RHIRD 7-cyano-7-deazaguanine synthase OS=Agrobacterium tumefaciens str. Kerr 14 OX=1183424 GN=queC PE=3 SV=1
MKTIVICSGGLDSVSLAHKIAAEHELLALVSFDYGQRHKKELDFAADCARRLGVPHHVIDIRAIGAHLTGSALTDDIAVPDGHYAEETMRSTVVPNRNAIMLTIAFGLAAAQQADAVAIAVHGGDHFIYPDCRPGFIDSFNAMQAHALEGYADVKLFAPYVTVSKAAIVTDGVKYGTPFGETWSCYKGGLRHCGRCGTCVERREAFHLAGVTDPTDYEDPDFWVAATHAYAAQEVR

SEQ ID NO: 35766 - protein, 236 aa, unidentified; identical to SEQ ID NO: 35750
  source 1..236: note = Agrobacterium tumefaciens
  REGION 1..236: note = tr|H0H3F0|H0H3F0_RHIRD 7-cyano-7-deazaguanine synthase OS=Agrobacterium tumefaciens 5A OX=1107544; GN = queC PE=3 SV=1

SEQ ID NO: 35767 - protein, 235 aa, unidentified
  source 1..235: note = Agrobacterium vitis
  REGION 1..235: note = sp|B9JS46|QUEC_AGRVS 7-cyano-7-deazaguanine synthase; OS = Agrobacterium vitis (strain S4 / ATCC BAA-846); OX = 311402 GN=queC PE=3 SV=1
MKILVVCSGGLDSVSLADKMAAEHELIGLISFDYGQRHKKELDFAALAAKRLGVPHQIIDMTNIGASLTGSALTDDLDVPDGHYAEETMKITVVPNRNAIMLAIAFGVAAAKKADAVALAVHGGDHFIYPDCRPGFIDAFQIMQAHALEGYADVKLLAPFVTVSKADIVTEGAKYGTPFDQTWSCYKGGARHCGRCGTCVERREAFHLAGVTDPTDYEDPDFWVSATSGFQAREV

SEQ ID NO: 35768 - protein, 235 aa, unidentified
  source 1..235: note = Agrobacterium vitis
  REGION 1..235: note = tr|A0A560YX87|A0A560YX87_AGRVI 7-cyano-7-deazaguanine synthase OS=Agrobacterium vitis; OX = 373 GN=queC PE=3 SV=1
MKTLVVCSGGLDSVSLAYKIASEQQLIGLLSFDYGQRHKKELEFAARAAKALGVPHQIIDISTIGKSLTGSALTDDLDVPDGHYAEDTMKITVVPNRNAIMLAIAFGVAAAKKADAVAVAVHGGDHFIYPDCRPGFIDAFQTMQNHALEGYADLTLLSPFVTVPKSEIVVEGAKYGTPFADTWSCYKGGARHCGRCGTCVERREAFHLAGVVDPTEYEDPDFWRAATSGFKAEGV

SEQ ID NO: 35769 - protein, 425 aa, Agrococcus baldri
  REGION 1..425: note = tr|A0A1I6MKW8|A0A1I6MKW8_9MICO 7-cyano-7-deazaguanine synthase (Queuosine biosynthesis); OS = Agrococcus baldri OX=153730 GN=SAMN04487783_2245 PE=4; SV = 1
MRYLSVPKLDGTDRSGDQTPIVLFGRDGNGDLLTAGWSAAEKVRRQKLMPDAAAWDLLAIALSVVVADGTTLRSSSPDGWTRQIELEIALSDPDRWSPHADAIATALRFLTTDRWTISFRDGGTIPTPPKKPRYPTSDAVALLSGGLDSLIGAIDLTAAGTTLLAVSQTVRGDAAKQDRFAQRIGGGIDHLQLNHNASTPRGQKETSQRSRSLIFLAFAVLAATATRRHAYGQPVPLYVCENGFIAINPPLTTARVGSLSTRTAHPEFLGRMQSIFDAVGLNVQIKNPYAEKTKGEMLRECLDQDLLSTEAPISTSCGRFQRFNYRHCGRCVPCQIRRASFEAWGRPDPTEYVYDNLAIQDEDHAAFDDVRSVAIALLTIEQDGFDRWLGPTLSSPLIHNRLELRDMLQRGFGELRTVHERYGLV

SEQ ID NO: 35770 - protein, 231 aa, Agromyces ramosus
  REGION 1..231: note = tr|A0A4Q7M950|A0A4Q7M950_9MICO 7-cyano-7-deazaguanine synthase OS=Agromyces ramosus; OX = 33879 GN=queC PE=3 SV=1
MSKRKAIVLLSGGLDSTTVLALAKNQGYEPYALSFRYGQRHVVELEAAKRVAKAQGVAQHVVCDIDLRTFGGSALTSETEVPKHENAGDLSAEEIPVTYVPARNTIFLSFALAFAEVVGATDVFIGVNALDYSGYPDCRPEYIEAYETMANLATRAGVEGARLKIHTPLISMTKADIVQTGTELGVDYSLTLSCYDPDDEGRSCGHCDSCLLRIRGFQEAGFADPVSYQAA

SEQ ID NO: 35771 - protein, 224 aa, Agromyces sp.
  REGION 1..224: note = tr|A0A542JR00|A0A542JR00_9PSED 7-cyano-7-deazaguanine synthase OS=Agromyces sp. SLBN-50; OX = 744977 GN=queC PE=3 SV=1
MTDKKAVVLLSGGLDSATILAQANAAGFACYSMSFDYGQRHRAELQAAERVAQQMGVVEHKVIGLNLNGIGGSALTDSSIAVPEAPTEGIPVTYVPARNTVFLSLALGWAEVLGAHDIFIGVNAVDYSGYPDCRPEFIEAFERVANLATREGVEGRGFRIQAPLQNLSKAQIVQIGVQHGVDYGLTVSCYQADDDGRACGKCDSCRLRAAGFAAAGVADPTRYA

SEQ ID NO: 35772 - protein, 221 aa, unidentified
  source 1..221: note = Ahniella affigens
  REGION 1..221: note = tr|A0A2P1PW31|A0A2P1PW31_9GAMM 7-cyano-7-deazaguanine synthase OS=Ahniella affigens; OX = 2021234 GN=queC PE=3 SV=1
MKHAVVLVSGGMDSALTLAIARQMGFVCHALSVDYGQRHHAELDAAKRVAEAMGAVEHHVQMLDLRRFGGSALTADIAVPEAPSQGIPVTYVPARNTIMLSLALAWAETLGSDDIFCGVNAVDYSGYPDCRPAFIEAFEHLARVATKAGVNGELISIHAPLIAMSKADIARKGHELDVDYGITVSCYQADDQGRACGKCDACRLRAQGFHDAGLPDPTRYR

SEQ ID NO: 35773 - protein, 452 aa, unidentified
  source 1..452: note = Ahniella affigens
  REGION 1..452: note = tr|A0A2P1PRE9|A0A2P1PRE9_9GAMM ATPase OS=Ahniella affigens OX=2021234 GN=C7S18_09435 PE=4 SV=1
MKPLASLAVDVLDAGSRPRAGRTPCHIGTNLTFTTELLESYCLREWEPIIYDALIVMGAVEFCDRIFRRPVQHWGREIELRIPVHEPERWNASEVSRALHDALCFVTGDRWSLSFIARRTPFTLPKQVPIPIASDIDAVIPFSDGLDSCAVAGLMHKQMGDRMMRVRLGTKRFCSPESTEKQPFTSIPYKVKRTNSKFVESSARSRGFKFAMVSGLAAYLVQANRIIVPESGQGALGPALVPVGQTYEDYRNHPMFMSRMEKVLFALYGRRICYAFPRIWYTKGETLDSFVKECCDGPAWATTWSCWQPNYQVSVEHKKRQCGVCAACQLRRMSVHAAGLSERPDTYVWENLKASSFNEGAAGGFTHVLKAQYQYAIAGTLHLAELSALQEDQMNNGTIKLAASQLAKALSLTESEAGARLARLLSQHKREWNGFLDALGESSFIVKWTRRS

SEQ ID NO: 35774 - protein, 457 aa, Ahrensia sp.
  REGION 1..457: note = tr|A0A2E2RSC6|A0A2E2RSC6_9RHOB Uncharacterized protein OS=Ahrensia sp. OX=1872419 GN=CL535_16745 PE=4 SV=1
MSSGTAQIRIPERSIEVVENGGATPRGWVPFDLGRDFEFSTEALETYAFASWEPVIYDAMVVAAAIEYGDRILKRPPRGWARRIALRIPVHDPDRWNDSELSAALLDAAGFLTGDYWSVEFVARAKAAPSPHSDYLNLPVPTEAVLAFSDGMDSRAVAGLIGSGLGPKLVRVRVGSNKIGRPDKKNRREPFTMVPYDVPCNMPNREASARSRGFKFALISGIAAYLSGAGEIVIPESGQGAIGPAIAPVVHAYPDYRNHPRFTQRMERLLKALFGKEIRYVFPRLWNTKGETLRSFAALPEGSDWHATRSCWRSNRWSSVNGKRRQCGVCAACMLRRLSVHAAGLTEADDAYVCTDLTAVSLEEAVDPDFTRMTPAYRQYAIAGVLHMDHLADLASKDGLPVVRRHAALLGPALGLGKEQTEESLTRMLSEHAGEWKEFVRSMGSNSFIRQWVRAGL

SEQ ID NO: 35775 - protein, 232 aa, Aidingimonas halophila
  REGION 1..232: note = tr|A0A1H3B974|A0A1H3B974_9GAMM 7-cyano-7-deazaguanine synthase OS=Aidingimonas halophila; OX = 574349 GN=queC PE=3 SV=1
MSTSPSDASQDDDAVVIYSGGMDSFTVLHHAIHLGYRIHALSFHYGQRHARELDVAAQVCRQLKVPHQVVDIRSIHGLIDRSALTDSDRDMPGGEYDHDTMAATVVPNRNMILLSLAIAKAVNIGARRVFYGAHGGDHVLYPDCRPAFVQRMNDVAAIANFDAVDIVAPYLEYDKADILADGLAMGLDYRDTWTCYLGEEKACGDCGSCRERLAAFNANGVVDPLPYRQGGR

SEQ ID NO: 35776 - protein, 223 aa, unidentified
  source 1..223: note = Akkermansia glycaniphila
  REGION 1..223: note = tr|A0A1C7PC70|A0A1C7PC70_9BACT 7-cyano-7-deazaguanine synthase OS=Akkermansia glycaniphila OX=1679444 GN=queC PE=3 SV=1
MTAPQTVAVLLSGGLDSTVALHWAARQGRVACALSFDYASNHAQQELACARWQADSLGIPHRVIDITAISRHLDSALLRGADAVPTENYGTDNMKQTVVPFRNGIFLAIAAGIAESDGCGGIVIAAHSGDHSIYPDCRETFMSAMSSAIREGTYAHLEILRPFIDSTKGEIVRIGQQLGVDFAHTYSCYRGKERHCGICATCRERREAFADAHTDDPTVYEQQ

SEQ ID NO: 35777 - protein, 223 aa, Akkermansia muciniphila
  REGION 1..223: note = tr|A0A2N8IKE5|A0A2N8IKE5_9BACT 7-cyano-7-deazaguanine synthase OS=Akkermansia muciniphila; OX = 239935 GN=queC PE=3 SV=1
MDKMETAVLLSGGLDSSVALHWTHRNHSVRVALSFDYASNHAERELECAAWQAASLGIEHRVIDISSISSHLKSALLSGADDIPDGSYDEELMKQTVVPFRNGIFLSIAAGVAESCGAQQLVIAAHSGDHSIYPDCREEFMAAMTEAIRLGTYAGLGILRPFIHMSKGGIAAMGQDLGVDFSRTYSCYKGGAVHCGVCSTCMERREAFREAGIPDPTAYAPAG

SEQ ID NO: 35778 - protein, 223 aa, Akkermansia muciniphila
  REGION 1..223: note = tr|A0A2N8IH98|A0A2N8IH98_9BACT 7-cyano-7-deazaguanine synthase OS=Akkermansia muciniphila; OX = 239935 GN=queC PE=3 SV=1
MDKMETAVLLSGGLDSSVALHWAHRNHRVRVALSFDYASNHAERELKCAAWQAASLGIEHRVIDISSISSHLKSALISGADDIPDGSYDEELMKQTVVPFRNGIFLSIAAGVAESCGAQQLVIAAHSGDHSIYPDCREEFMAAMTEAIRLGTYAGLGILRPFIHMSKGGIAAMGQDLGVDFSRTYSCYKGGAVHCGVCSTCMERREAFREAGIPDPTAYAPAE

SEQ ID NO: 35779 - protein, 222 aa, Akkermansia sp.
  REGION 1..222: note = tr|A0A5B6A3K7|A0A5B6A3K7_9BACT 7-cyano-7-deazaguanine synthase OS=Akkermansia sp. BIOML-A43 OX=2584599 GN=queC PE=3 SV=1
MERMETAVLLSGGLDSSAALHWAHKNHHVKLALSFDYASNHAARELECAAWQAASLGVEHRIIDITPIAAHLKSALLSGADNIPDGKYDTELMKQTVVPFRNGIFLSMAAGIAESHGAQQLVIAAHSGDHSIYPDCREEFMAAMTDAIRLGTYAGLGILRPFIHTSKGGIVRTGHELGVDFSRTYSCYKGGRIHCGACSTCLERREAFREAGIPDPTVYADQ

SEQ ID NO: 35780 - protein, 222 aa, Akkermansia sp.
  REGION 1..222: note = tr|A0A139TUX4|A0A139TUX4_9BACT 7-cyano-7-deazaguanine synthase OS=Akkermansia sp. KLE1798; OX = 1574265 GN=queC PE=3 SV=1
MERMETAVLLSGGLDSSAALHWAHKNHHVKLALSFDYASNHAARELECAAWQAASLGVEHRIIDITPIAAHLKSALLSGADDIPDGKYDTELMKQTVVPFRNGIFLSMAAGIAESHGAQQLVIAAHSGDHSIYPDCREEFMAAMTDAIRLGTYAGLGILRPFIHTSKGGIVRTGHELGVDFSRTYSCYKGGRIHCGACSTCLERREAFREAGIPDPTVYADQ

SEQ ID NO: 35781 - protein, 232 aa, Albidiferax sp.
  REGION 1..232: note = tr|A0A1H0WB44|A0A1H0WB44_9BURK 7-cyano-7-deazaguanine synthase OS=Albidiferax sp. OV413; OX = 1855285 GN=queC PE=3 SV=1
MHSRALVLFSGGQDSTTCLALALSKYDHVETVAFDYGQRHHVELQARLQVLAHIKAQFPQWAGKMGEDHLLDLSVLGQVSETSLTRDMVFKMEESGLPNTFVPGRNLLFLTLAAALAYRRNLEVIVTGVCETDFSGYPDCRDDTMKAMQLALSLGMDKRYLIETPLMWIDKAQTWQLAHQLGGQALVDLIVEDTHTCYLGDRVHRHAWGYGCGQCPACELRARGFERFIAQT

SEQ ID NO: 35782 - protein, 230 aa, unidentified
  source 1..230: note = Alcaligenaceae bacterium
  REGION 1..230: note = tr|A0A2G4J511|A0A2G4J511_9BURK 7-cyano-7-deazaguanine synthase OS=Alcaligenaceae bacterium OX=2021368 GN=queC PE=3 SV=1
MSKKAVCLLSGGLDSTTVVAMAQHEGYEVYALSFRYGQRHSIELERAAAFAKLRGVARHAILDIDLRSFGGSALTADIDVPKGHSVVDISAGIPITYVPARNTIFLSFALGWAEVLGAQDIFVGVNAMDYSGYPDCRPEFIEAFEHLGNLATKAGVEGAQRLKIRAPLISMSKADIIRKGLELGVDFSETTSCYDPAPTGAPCKQCDSCLLRAKGFAQVGIKDPLDGKFA

SEQ ID NO: 35783 - protein, 247 aa, unidentified
  source 1..247: note = Alcaligenaceae bacterium
  REGION 1..247: note = tr|A0A516WEQ5|A0A516WEQ5_9BURK 7-cyano-7-deazaguanine synthase OS=Alcaligenaceae bacterium SJ-26 OX=2593958 GN=queC PE=3 SV=1
MTSRALVLFSGGQDSTTCLAWALDRYDHVETIGFDYGQRHRVELECRQTVLQALRDDFPQWAGKLGEDHMLDMSVLGHISDTALTQDKAIEFEQGGLPNTFVPGRNLMFFNFAAAVAWRRGLEVLVGGMCETDYSGYPDCRDNTLKALQVALSLGLDARMVIETPLMWLDKRETWQLARTLGGEALVQLVRESTHTCYMGDRSHRHAWGYGCGECPACALRASGHAAFVSSAASDTATPPAAEPSAH

SEQ ID NO: 35784 - protein, 243 aa, Alcaligenes aquatilis
  REGION 1..243: note = tr|A0A3G2HX45|A0A3G2HX45_9BURK 7-cyano-7-deazaguanine synthase OS=Alcaligenes aquatilis; OX = 323284 GN=queC PE=3 SV=1
MKPHTPRRRALVLFSGGQDSATCLAWALDRFAFVETVGFDYGQRNHAELQCRQTLRDKLCQQFPHWAERLGQDHVLDASVLAQIGGSAMTESMTIAMQEDGLPNTFVPGRNLLFFTLAGALAYRRGLDTLVGGMSETDYSGYPDCRDNTLKALQVALSLGIERPLTVETPLMWLDKADTWELAHRLGSDALVQLIREDSHTCYQNNRETLHDWGYGCGRCPACELRAKGYADWRIQDRTARRS

SEQ ID NO: 35785 - protein, 243 aa, Alcaligenes aquatilis
  REGION 1..243: note = tr|A0A3R9AR99|A0A3R9AR99_9BURK 7-cyano-7-deazaguanine synthase OS=Alcaligenes aquatilis; OX = 323284 GN=queC PE=3 SV=1
MKPHTPHRRALVLFSGGQDSATCLAWALDRFAFVETVGFDYGQRNHAELQCRQTLKDKLCQRFPHWAERLGQDHVLDAHVLAQIGGSAMTESMTIAMQEDGLPNTFVPGRNLLFFTLAGALAYRRGLDTLVGGMSETDYSGYPDCRDNTLKALQVALSLGIERPLTVETPLMWLDKADTWELAHQLGSDALVQLIREDSHTCYQNNRETLHDWGYGCGQCPACELRAKGYADWRIQDRTARRS

SEQ ID NO: 35786 - protein, 243 aa, Alcaligenes faecalis
  REGION 1..243: note = tr|A0A2U2BMM9|A0A2U2BMM9_ALCFA 7-cyano-7-deazaguanine synthase OS=Alcaligenes faecalis; OX = 511 GN=queC PE=3 SV=1
MKPHTPRRRALVLFSGGQDSATCLAWALDRFAFVETVGFDYGQRNHAELQCRQTLREKLCQQFPHWAERLGQDHVLDASVLAQIGGSAMTESMTIAMQEDGLPNTFVPGRNLLFFTLAGALAYRRGLDTLVGGMSETDYSGYPDCRDNTLKALQVALSLGIERPLTVETPLMWLDKADTWELAHQLGSDALVKLIQEDSHTCYENERETLHDWGYGCGQCPACELRAKGYTEWQAQAGATRHP

SEQ ID NO: 35787 - protein, 237 aa, Alcaligenes faecalis
  REGION 1..237: note = tr|A0A4P8JM27|A0A4P8JM27_ALCFA 7-cyano-7-deazaguanine synthase OS=Alcaligenes faecalis; OX = 511 GN=queC PE=3 SV=1
MKPHTPRRRALVLFSGGQDSATCLAWALDRFAFVETVGFDYGQRNHAELQCRQTLRDKLYQQFPHWAERLGQDHVLDASVLAQIGGSAMTESMTIAMQEDGLPNTFVPGRNLLFFTLAGALAYRRGLDTLVGGMSETDYSGYPDCRDNTLKALQVALSLGIERPLTVETPLMWLDKADTWELAHQLGSDALVKLIQEDSHTCYQNERETLHDWGYGCGQCPACELRAKGYGDWKLWG

SEQ ID NO: 35788 - protein, 237 aa, Alcaligenes sp.
  REGION 1..237: note = tr|U1YFE0|U1YFE0_9BURK 7-cyano-7-deazaguanine synthase OS=Alcaligenes sp. EGD-AK7 OX=1386079 GN=queC; PE = 3 SV=1
MKPHTPRRRALVLFSGGQDSATCLAWALDRFAFVETVGFDYGQRNHAELQCRQTLRDKLCQQFPHWAERLGQDHVLDASVLAQIGGSAMTESMTIAMQEDGLPNTFVPGRNLLFFTLAGALAYRRGLDTLVGGMSETDYSGYPDCRDNTLKALQVALSLGIERPLTVETPLMWLDKADTWELAHQLGSDALVKLIQEDSHTCYQNERETLHEWGYGCGQCPACELRAKGYGDWKLRG

SEQ ID NO: 35789 - protein, 239 aa, unidentified
  source 1..239: note = Alcaligenes xylosoxydans
  REGION 1..239: note = tr|A0A424WJC6|A0A424WJC6_ALCXX 7-cyano-7-deazaguanine synthase OS=Alcaligenes xylosoxydans xylosoxydans OX=85698 GN=queC PE=3 SV=1
MQNHQRRALVLFSGGQDSTTCLAWALDRYAHVETVAFDYGQRHHIELTARLNVLREIRSNFPDWAPRLGEDHLLDLKVLGQVGDTAMTSDRAIEMQANGLPNTFVPGRNLLFLTLAAALGYRRQLDVLVGGMCETDFSGYPDCRDDTIKAQQVALGLGLGSRITIETPLMWIDKSETWALAHQLGGDALVETIVEESHTCYLGERGARHDWGYGCGECPACKLRKIGWEKWVVASAAEG

SEQ ID NO: 35790 - protein, 237 aa, unidentified
  source 1..237: note = Alcaligenes xylosoxydans
  REGION 1..237: note = tr|A0A179T854|A0A179T854_ALCXX 7-cyano-7-deazaguanine synthase OS=Alcaligenes xylosoxydans xylosoxydans OX=85698 GN=queC PE=3 SV=1
MLNHQRRALVLFSGGQDSTTCLAWALDRYAHVETVAFDYGQRHRIELDARLNVLREIRARFPQWAPRLGEDHLLDLKVLGQVGDTAMTSDRAIEMQENGLPNTFVPGRNLLFLTLAAALGYRRQLDVLVGGMCETDFSGYPDCRDDTIKAQQVALGLGLGSRVTIETPLMWIDKSETWALAKQLGGDALVETIVEESHTCYLGERGARHAWGYGCGECPACKLRRAGWDKWQAQGAV

SEQ ID NO: 35791 - protein, 222 aa, unidentified
  source 1..222: note = Alcanivoracaceae bacterium
  REGION 1..222: note = tr|A0A2E2DH43|A0A2E2DH43_9GAMM 7-cyano-7-deazaguanine synthase OS=Alcanivoracaceae bacterium OX=2024895 GN=queC PE=3 SV=1
MKKAVVLLSGGLDSATCLAMARDQGYQCYTIAFDYGQRTRSELDAAKRVSAALGAVSHRVIELGMGNIGGSALTDHSIEVPEEGGDGIPVTYVPARNTVFLSLALGLAEVVDAEAIYIGVNAVDYSGYPDCRPAFIEAFQAMAGLATKAGVEGRPVTIETPLMHLSKAQIIQAGTALGLDYGLTVSCYQADENGNACGKCDSCRLRKQGFDEALVKDPTNYQ

SEQ ID NO: 35792 - protein, 225 aa, unidentified
  source 1..225: note = Alcanivoracaceae bacterium
  REGION 1..225: note = tr|A0A3L8B091|A0A3L8B091_9GAMM 7-cyano-7-deazaguanine synthase OS=Alcanivoracaceae bacterium GenoA1_TS13_700 OX=2072747 GN=queC PE=3 SV=1
MSDIKKAVVLLSGGLDSATCLAIARHQGYECYAITFDYGQRHESELAAARRVVDALGAMELKTIHINLGDIGGSALTDRSIEVPLGPTEGIPVTYVPARNTIFLSLALGWAEVLDADAIFIGVNAVDYSGYPDCRAEFISAFEGLANLATRRGVEGRPMAIEAPLLHLSKAEIIQKGLQLGLDYGLTVSCYQADSRGRACGQCDSCRLRREGFQQAGVADPTPYR

SEQ ID NO: 35793 - protein, 222 aa, Alcanivorax borkumensis
  REGION 1..222: note = sp|Q0VRI8|QUEC_ALCBS 7-cyano-7-deazaguanine synthase; OS = Alcanivorax borkumensis (strain ATCC 700651 / DSM 11573 / NCIMB 13689 / SK2) OX=393595 GN=queC PE=3 SV=2
MKKAVVLLSGGLDSATCLAIARDQGYACHTIAFDYGQRTRSELDAAERVSGVLGALSHRVIELGMGNIGGSALTDHSIEVPENGGDGIPVTYVPARNTVFLSLALGLAEVIDAQAIFIGVNAVDYSGYPDCRPAFIEAFQSMATLATKAGVEGRPMQIETPLMHLSKAQIIQRGVALGLDYGLTVSCYQADDHGNACGKCDSCRLRSQGFEDALVKDPTNYQ

SEQ ID NO: 35794 - protein, 228 aa, Alcanivorax dieselolei
  REGION 1..228: note = tr|K0CD19|K0CD19_ALCDB 7-cyano-7-deazaguanine synthase OS=Alcanivorax dieselolei (strain DSM 16502 / CGMCC 1.3690 / B-5) OX=930169 GN=exsB PE=3 SV=1
MSTAVVLLSGGLDSATCLAMARAEGHRCHTIAFDYGQRTRSELKAAERVSRALGAESHRVIELGLGNIGGSALTDHDIAVPENVPEEESDGIPVTYVPARNTVFLSLALGLAEVLEADVIYIGVNAVDYSGYPDCRPAFIEAFQNMANLATKAGVEGHPIRIATPLMNLSKADIIREGTRLGLDYGLTVSCYQADEEGQACGRCDSCRLRRQGFEEALVKDPTKYQGA

SEQ ID NO: 35795 - protein, 222 aa, Alcanivorax hongdengensis
  REGION 1..222: note = tr|L0WDX4|L0WDX4_9GAMM 7-cyano-7-deazaguanine synthase OS=Alcanivorax hongdengensis A-11-3 OX=1177179; GN = queC PE=3 SV=1
MKKAVVLLSGGLDSATCLAIARDQGYQCHTIAFDYGQRTRSELDAAARVSEALGAASHRVIELGMGNIGGSALTDHNIEVPEDGGEGIPVTYVPARNTVFLSLALGLAEVTGAEAIYIGVNAVDYSGYPDCRPAFIEAFQTLANLATKAGVEGNTIRIETPLMHLSKAQIIQQGEGLGLDYGLTVSCYQADAEGRACGRCDSCRLRKQGFADALVKDPTNYQ

SEQ ID NO: 35796 - protein, 222 aa, Alcanivorax jadensis
  REGION 1..222: note = tr|A0A095TDG9|A0A095TDG9_9GAMM 7-cyano-7-deazaguanine synthase OS=Alcanivorax jadensis T9; OX = 1177181 GN=queC PE=3 SV=1
MKKAVVLLSGGLDSATCLAIARDQGYECHTIAFDYGQRTRSELDAAERVSAALGALSHRVIELGMGNIGGSALTDHSIDVPEEGGDGIPVTYVPARNTVFLSLALGLAEVVEAEAIYIGVNAVDYSGYPDCRPAFIEAFQAMASLATKAGVEGSPISVETPLMHLSKAQIIQQGTALGLDYGLTVSCYQADENGNACGKCDSCRLRKQGFDEALVKDPTNYQ

SEQ ID NO: 35797 - protein, 222 aa, unidentified
  source 1..222: note = Alcanivorax nanhaiticus
  REGION 1..222: note = tr|A0A095SL17|A0A095SL17_9GAMM 7-cyano-7-deazaguanine synthase OS=Alcanivorax nanhaiticus; OX = 1177154 GN=queC PE=3 SV=1
MNKAVVLLSGGLDSATCLAIARDQGYECHTIAFDYGQRTRAELAAALRVSAALGALSHRVVELGMGNIGGSALTDHSIEVPEDGGDGIPVTYVPARNTVFLSLALGLAEVLDAQAIFIGVNAVDYSGYPDCRPEFIEAFQTMANLATKAGVEGRPIQVETPLMHLSKADIIREGVALGLDYGLTVSCYQADESGNACGKCDSCRLRRLGFEDALVKDPTNYQ

SEQ ID NO: 35798 - protein, 227 aa, Alcanivorax pacificus
  REGION 1..227: note = tr|A0A0B4XMY4|A0A0B4XMY4_9GAMM 7-cyano-7-deazaguanine synthase OS=Alcanivorax pacificus W11-5 OX=391936 GN=queC PE=3 SV=1
MKKAVVLLSGGLDSATCLAMGQEAGYQCHTLAFDYGQRHRAELVAAERVSRYHGAASHRVIRLDLGTIGGSALTDTALAVPEEESEGIPITYVPARNTVFLSLALGLAEVLEADAIYIGVNAVDYSGYPDCRPAFIDAFRALATVATKAGVEGHAPSIQTPLLTLSKGDIIRAGTALGVDYSLTVSCYQADDDGQACGRCDSCRLRRAGFAAAGVVDPTRYAGAMPK

SEQ ID NO: 35799 - protein, 222 aa, unidentified
  source 1..222: note = Alcanivorax profundi
  REGION 1..222: note = tr|A0A418Y1H5|A0A418Y1H5_9GAMM 7-cyano-7-deazaguanine synthase OS=Alcanivorax profundi; OX = 2338368 GN=queC PE=3 SV=1
MKKAVVLLSGGLDSATCLAMARDRGYQCYTIAFDYGQRTRSELDAAKRVSAALGAVSHRVIELGMGNIGGSALTDHSIEVPEEGGDGIPVTYVPARNTVFLSLALGLAEVVDAEAIYIGVNAVDYSGYPDCRPAFIEAFQAMAGLATKAGVEGRPVTIETPLMHLSKAQIIQAGTALGLDYGLTVSCYQADENGNACGKCDSCRLRKQGFDEALVKDPTNYQ

SEQ ID NO: 35800 - protein, 222 aa, Alcanivorax sp.
  REGION 1..222: note = tr|B4WY38|B4WY38_9GAMM 7-cyano-7-deazaguanine synthase OS=Alcanivorax sp. DG881 OX=236097 GN=queC PE=3; SV = 1
MKKAVVLLSGGLDSATCLAIARDQGYECHTIAFDYGQRTRSELDAAVQVSGALGALSHRVIELGMGNIGGSALTDHSIDVPEDGGEGIPVTYVPARNTVFLSLALGLAEVVDAQAIFIGVNAVDYSGYPDCRPAFIEAFQSMANLATKAGVEGRPMQIETPLMHLSKAQIIQQGVALGLDYGLTVSCYQADENGNACGKCDSCRLRSQGFEDALVKDPTNYQ

SEQ ID NO: 35801 - protein, 223 aa, Alcanivorax sp.
  REGION 1..223: note = tr|A0A2D9ULQ9|A0A2D9ULQ9_9GAMM 7-cyano-7-deazaguanine synthase OS=Alcanivorax sp.; OX = 1872427 GN=queC PE=3 SV=1
METAVVLLSGGLDSATCLAMARAEGFRCHTIAFDYGQRTRSELQAAERVSAALGAESHRVIELGMGGIGGSALTDHAIDVPENGGDGIPVTYVPARNTVFLSLALGLAEVVGADAIFIGVNAVDYSGYPDCRPEFIDAFQHLAGLATKAGVEGHPVRISTPLMALSKAEIIRRGTELGLDYSLTVSCYQADAEGRACGRCDSCRLRREGFEQALIKDPTIYQS

SEQ ID NO: 35802 - protein, 239 aa, Alicycliphilus denitrificans
  REGION 1..239: note = tr|A0A3R7FD39|A0A3R7FD39_9BURK 7-cyano-7-deazaguanine synthase OS=Alicycliphilus denitrificans OX=179636 GN=queC PE=3 SV=1
MSAPDRRRALVLLSGGQDSATCLAWALARYAEVETIGFDYGQRHRAELDCRQRLRAGLQAMPWPGRLGPDHLLTVDVLAQLGGSAMTEEVAIAMQQDGLPNTFVPGRNLLFFTLAAALAYRRGLRVLVGGMSETDYSGYPDCRDNTLKALQVALSLGLERPLTLETPLMWIDKAGTWALAHQLGGDALVGLVRRDSHTCYLGQRDRLHDWGYGCGSCPACELRAQGWVQWAERNRPACA

SEQ ID NO: 35803 - protein, 239 aa, Alicycliphilus denitrificans
  REGION 1..239: note = tr|E8TTA4|E8TTA4_ALIDB 7-cyano-7-deazaguanine synthase OS=Alicycliphilus denitrificans (strain DSM 18852 / JCM 14587 / BC) OX=596153 GN=queC PE=3 SV=1
MSAPDRRRALVLLSGGQDSATCLAWALARYAHVETIGFDYGQRHRAELDCRQRLRAGLQAMPWSGRLGPDHLLTVDVLAQLGGSAMTEEVAIAMQQDGLPNTFVPGRNLLFFTLAAALAYRRGLQVLVGGMSETDYSGYPDCRDNTLKALQVALSLGLDRPLTLETPLMWIDKAGTWALAHQLGGDALVELIRRDSHTCYLGQRDRLHDWGYGCGRCPACELRAQGWAQWAEKNRPACE

SEQ ID NO: 35804 - protein, 326 aa, Alicycliphilus sp.
  REGION 1..326: note = tr|A0A0E9LQI8|A0A0E9LQI8_9BURK 7-cyano-7-deazaguanine synthase OS=Alicycliphilus sp. B1; OX = 1603291 GN=ALISP_7211 PE=3 SV=1
MFGQALDTAAFFAIAFWRSSNAFMAAHWVEIAWVDYAIKLGVSLLLFVPAYGVLLGGRRALAATRIPLPLAGRAMSAPDRRRALVLLSGGQDSATCLAWALARYADVETIGFDYGQRHRAELDCPPAAARGPAGHAVVRAGWGLDHLLTVDVLAQLGGSAMTEEVAIAMQQDGLPNTFVPGRNLLFFTLAAALAYRRGLQVLVGGMSETDYSGYPDCRDNTLKALQVALSLGLDRPLTLETPLMWIDKAGTWALAHQLGGDALVELDQARFPHLLPRPARPAARLGLRLRQAARPASCAPRAGRSGQKETALLANRAVIFLIAASA

SEQ ID NO: 35805 - protein, 239 aa, Alicycliphilus sp.
  REGION 1..239: note = tr|A0A0E9LCF2|A0A0E9LCF2_9BURK 7-cyano-7-deazaguanine synthase OS=Alicycliphilus sp. B1; OX = 1603291 GN=queC PE=3 SV=1
MSAPDRRRALVLLSGGQDSATCLAWALARYAEVETIGFDYGQRHRSELDCRQRLRAGLQAMPWPGRLGLDHLLTVDVLAQLGGSAMTEEVAIAMQQDGLPNTFVPGRNLLFFTLAAALAYRRGLQVLVGGMSETDYSGYPDCRDNTLKALQVALSLGLERPLTLETPLMWIDKAGTWALAHQLGGDALVELVRRDSHTCYLGRRDRLHDWGYGCGSCPACELRAQGWAQWAERNRPACA

SEQ ID NO: 35806 - protein, 227 aa, Alicyclobacillus acidocaldarius
  REGION 1..227: note = tr|C8WRW8|C8WRW8_ALIAD 7-cyano-7-deazaguanine synthase OS=Alicyclobacillus acidocaldarius subsp. acidocaldarius (strain ATCC 27009 / DSM 446 / JCM 5260 / NBRC 15652/ NCIMB 11725 / NRRL B-14509 / 104-1A) OX=521098
MAKAVVILSGGLDSATCMGIAHAAGYELCPITFDYGQRHRIELESAKKVAAFYGVKDHRIVSIDFLRQIGGSALTDESIDVPTEGVSREIPVTYVPGRNLLFLAIAASYAEVIGAEAIYIGVNALDYSGYPDCRPEFIEGVEHVLRIGTKAGVEGRPIRIETPLLHWTKGEIVRKGLELGVPYELTTSCYQGGEVACGECDSCRLRLKGFAEAGAKDPIPYRPGFND

SEQ ID NO: 35807 - protein, 179 aa, Alicyclobacillus acidocaldarius
  REGION 1..179: note = tr|F8II74|F8II74_ALIAT 7-cyano-7-deazaguanine synthase OS=Alicyclobacillus acidocaldarius (strain Tc-4-1) OX=1048834 GN=queC PE=3 SV=1
MAAFYGVKDHRIVSIDFLRQIGGSALTDESIDVPTEGVSREIPVTYVPGRNLLFLAIAASYAEVIGAEAIYIGVNALDYSGYPDCRPEFIEGVEHVLRIGTKAGVEGRPIRIETPLLHWTKGEIVRKGLELGVPYELTTSCYQGGEVACGECDSCRLRLKGFAEAGAKDPIPYRPGFND

SEQ ID NO: 35808 - protein, 229 aa, Alicyclobacillus acidoterrestris
  REGION 1..229: note = tr|T0BTT5|T0BTT5_ALIAG 7-cyano-7-deazaguanine synthase OS=Alicyclobacillus acidoterrestris (strain ATCC 49025 / DSM 3922 / CIP 106132 / NCIMB 13137 / GD3B); OX = 135685 4 GN=queC PE=3 SV=1
MMAKAVVILSGGLDSTTCMGLAKAAGYDLYPLTFDYGQRHNRELVCAVEVAKHYQAYDHRIVKLDFLRQIGGSALTDDNIEVPQDGVSEDIPVTYVPGRNLLFLSMAASYAEVIGAEAIYIGVNALDYSGYPDCRPEFIEAVQTTIARGTKAGVEGRPIRIETPLLNWTKAEIIRRGMELHVPYQLTTSCYVGEEVACGECDSCRLRLKGFAEAGYQDPVAYRNDVNLR

SEQ ID NO: 35809 - protein, 229 aa, Alicyclobacillus acidoterrestris
  REGION 1..229: note = tr|A0A512CT97|A0A512CT97_9BACL 7-cyano-7-deazaguanine synthase OS=Alicyclobacillus acidoterrestris OX=1450 GN=queC PE=3 SV=1
MMAKAVVILSGGLDSTTCMGLAKAAGYDLYPLTFDYGQRHNRELVCAVEVAKHYQASDHRIVKLDFLRQIGGSALTDDEIEVPQDGVSEDIPVTYVPGRNLLFLSMAASYAEVIGAEAIYIGVNALDYSGYPDCRPAFIEAVQTTIARGTKAGVEGRPIRIETPLLHWTKAEIIRRGMELNVPYQLTTSCYVGEEVACGECDSCRLRLKGFAEAGYQDPVAYRNDVNRR

SEQ ID NO: 35810 - protein, 220 aa, Alicyclobacillus ferrooxydans
  REGION 1..220: note = tr|A0A0P9GTN6|A0A0P9GTN6_9BACL 7-cyano-7-deazaguanine synthase OS=Alicyclobacillus ferrooxydans OX=471514 GN=queC PE=3 SV=1
MMEQNAVVVFSGGQDSTTCLVWALQNFKHVEAITFQYGQRHELEIECAREIASKLSVPHHVLNLDLLNQLAPSALTRSDIAVQAGTDGALPSTFVDGRNHIFLSFAAIFAKQIGASHIVTGVCQTDFSGYPDCRDVFVKSLNVTLNLAMDYEFVIDTPLMWLDKKMTWALADELGCFELVRNETLTCYNGVMGDGCGECPACELRNRGLQAYLAEIGTSA

SEQ ID NO: 35811 - protein, 209 aa, Alicyclobacillus hesperidum
  REGION 1..209: note = tr|J9E3I1|J9E3I1_9BACL 7-cyano-7-deazaguanine synthase OS=Alicyclobacillus hesperidum URH17-3-68; OX = 1200346 GN=queC PE=3 SV=1
MGIAQHAGYELFPITFDYGQRHRIELECAKKVAAHYGVRDHRIVSLDFLRQIGGSALTDDAIDVPTSGVSRDIPVTYVPGRNLLFLSIAASYAEVIEATAIYIGVNALDYSGYPDCRPEFIEGVQHVLRIGTKAGVEGRSMQIETPLLHWSKAEIIRNGLALNVPYELTTSCYQGGEEACGECDSCRLRLKGFAEAGARDPIPYRVSVG

SEQ ID NO: 35812 - protein, 231 aa, Alicyclobacillus hesperidum
  REGION 1..231: note = tr|A0A1H2QX96|A0A1H2QX96_9BACL 7-cyano-7-deazaguanine synthase OS=Alicyclobacillus hesperidum OX=89784 GN=queC PE=3 SV=1
MGRIGVAKAVVILSGGLDSTTCMGIAQHAGYELFPITFDYGQRHRIELECAKKVAAHYGVRDHRIVSLDFLRQIGGSALTDDAIDVPTSGVSRDIPVTYVPGRNLLFLSIAASYAEVIEATAIYIGVNALDYSGYPDCRPEFIEGVQHVLRIGTKAGVEGRSMQIETPLLHWSKAEIIRNGLALNVPYELTTSCYQGGEEACGECDSCRLRLKGFAEAGARDPIPYRVSVG

SEQ ID NO: 35813 - protein, 222 aa, Alicyclobacillus macrosporangiidus
  REGION 1..222: note = tr|A0A1I7IG46|A0A1I7IG46_9BACL 7-cyano-7-deazaguanine synthase OS=Alicyclobacillus macrosporangiidus OX=392015 GN=queC PE=3 SV=1
MHQDQRAVVVFSGGQDSTTCLVWAMRRFGHVEAVTFHYNQRHELEIECAKHIASELGVPHHILDLGLLSQLAPNALTRRDIEIEHKEGELPSTFVDGRNLLFLSFAAILAKQRGARHLVTGVCQTDFSGYPDCRDVFIKSLNVTLNLAMDYEFVIHTPLMWLTKRDTWALADELGCFDLVRDKTLTCYNGVIGAGCGTCPACILRNRGLEAYLQEREQRGHA

SEQ ID NO: 35814 - protein, 227 aa, unidentified
  source 1..227: note = Alicyclobacillus montanus
  REGION 1..227: note = tr|A0A1M6U4B7|A0A1M6U4B7_9BACL 7-cyano-7-deazaguanine synthase OS=Alicyclobacillus montanus OX=1830138 GN=queC PE=3 SV=1
MLNRKAVVVLSGGLDSTTCLGIAADEGYSLYTLTFDYGQRHARELRAAEQVADYYQVADRRIVKLDFLRKIGKSALTDFHLSVPKNVHDGEDIPITYVPGRNLLFLSLAASFAEAIEAQAIYIGVNALDYSGYPDCRPQFIQAVQKVLDVGTKTAVEGAPISLQTPLLHLTKAEIIRWGHRLGVPYQLTTSCYEGAEEACGECDSCRLRLRGFKEAGLVDPIPYRSL

SEQ ID NO: 35815 - protein, 226 aa, Alicyclobacillus sacchari
  REGION 1..226: note = tr|A0A4R8LWY0|A0A4R8LWY0_9BACL 7-cyano-7-deazaguanine synthase OS=Alicyclobacillus sacchari OX=392010 GN=queC PE=3 SV=1
MAKAVVILSGGLDSTTCMGIAQHAGYELFPITFDYGQRHRIELECAKKVAAHYGVRDHRIVSLDFLRQIGGSALTDDAIEVPVSGLSRDIPVTYVPGRNLLFLSIAASYAEVIEATAIYIGVNALDYSGYPDCRPEFIEGVQHVLRIGTKAGVEGRSMQIETPLLHWSKAEIIRNGLDLNVPYELTTSCYQGGEEACGECDSCRLRLKGFAEAGARDPIPYRVSAS

SEQ ID NO: 35816 - protein, 226 aa, Alicyclobacillus sp.
  REGION 1..226: note = tr|A0A1F2Y1Y9|A0A1F2Y1Y9_9BACL 7-cyano-7-deazaguanine synthase OS=Alicyclobacillus sp. RIFOXYA1_FULL_53_8 OX=1797236 GN=queC PE=3 SV=1
MKKAVVILSGGLDSTTCMGIARAEGYELLALTFDYGQRHKIELESARKVAEHYGVKDHRVVKLDFLRDIGGSALTSDELSVPTEGLTDEIPITYVPGRNLLFLSIASSYAEVVDADAIFMGVNALDYSGYPDCRPEFIESVQTAIERGTKKGVEGHQTVIEIPLVHWTKAEIIRRGMELEVPYELTTSCYQGAAEACGTCDSCRLRLKGFAEAGYTDPIPYKSEEQ

SEQ ID NO: 35817 - protein, 231 aa, unidentified
  source 1..231: note = Alicyclobacillus tengchongensis
  REGION 1..231: note = tr|A0A0V0PT98|A0A0V0PT98_9BACL 7-cyano-7-deazaguanine synthase OS=Alicyclobacillus tengchongensis OX=368812 GN=queC PE=3 SV=1
MGRIGVAKAVVILSGGLDSTTCMGIAQHAGYELFPITFDYGQRHRIELECAKKVAAHYGVRDHRIVSLDFLRQIGGSALTDDAIEVPTSGVSRDIPVTYVPGRNLLFLSIAASYAEVIEATAIYIGVNALDYSGYPDCRPEFIEGVQHVLRIGTKAGVEGRSMQIETPLLHWSKAEIIRNGLALRVPYELTTSCYQGGEEACGECDSCRLRLKGFAEAGARDPIPYRVSVG

SEQ ID NO: 35818 - protein, 229 aa, Alicyclobacillus vulcanalis
  REGION 1..229: note = tr|A0A1N7K225|A0A1N7K225_9BACL 7-cyano-7-deazaguanine synthase OS=Alicyclobacillus vulcanalis OX=252246 GN=queC PE=3 SV=1
MAKAVVILSGGLDSATCMGIARAAGYELCPITFDYGQRHRIELESAKKVAAFYGVKDHRIVSIDFLREIGGSALTDTSIDVPTEGVSRDIPVTYVPGRNLLFLAIAASYAEVIGAEAIYIGVNALDYSGYPDCRPEFIEGVEHVLRIGTKAGVEGRPIRIETPLLHWTKGEIVRKGLELGVPYELTTSCYQGGDVACGECDSCRLRLKGFAEAGARDPIPYRPGVNDAP

SEQ ID NO: 35819 - protein, 221 aa, unidentified
  source 1..221: note = Aliidiomarina haloalkalitolerans
  REGION 1..221: note = tr|A0A432VZM8|A0A432VZM8_9GAMM 7-cyano-7-deazaguanine synthase OS=Aliidiomarina haloalkalitolerans OX=859059 GN=queC PE=3 SV=1
MKKAVVIYSGGMDSFTVLHRAIADGFEVYPLSFHYGQRHSKELDCAAAVCEQLGLAHKLVDIRSINTLLAGSALTDDIEVPAADYAEGNMKATVVPNRNMILLSLAIGYAVSIDADEVYYGAHSGDHDIYPDCRPEFVEAMNQVSQLANYKAIPVRSPYLYNSKAEILADGLSMGLDYSQTWTCYNGREFACGNCSACRERLGAFAAHQLTDPLRYEEQAN

SEQ ID NO: 35820 - protein, 232 aa, unidentified
  source 1..232: note = Aliidiomarina iranensis
  REGION 1..232: note = tr|A0A432VXC6|A0A432VXC6_9GAMM 7-cyano-7-deazaguanine synthase OS=Aliidiomarina iranensis; OX = 1434071 GN=queC PE=3 SV=1
MQPTPASSNQPAAKCKRAVVIYSGGMDSFTVLNRAIADGCQVAALSFNYGQRHSKELDYAAKVCEKLKIEHKIVDIRAINSLLAGSSLTSDIAVPNADYAESNMQSTVVPNRNMILLSLAIGYAVSIDADEVYYGAHAGDHDIYPDCRPEFVEAMNTVSQLANYKAIPVHSPYLHNTKGDILADGIRMNLDYADTWTCYNGREHACGKCSACRERLAAFAAHGITDPLTYEE

SEQ ID NO: 35821 - protein, 227 aa, unidentified
  source 1..227: note = Aliidiomarina maris
  REGION 1..227: note = tr|A0A327WPM4|A0A327WPM4_9GAMM 7-cyano-7-deazaguanine synthase OS=Aliidiomarina maris; OX = 531312 GN=queC PE=3 SV=1
MAQNSTENNKVVVIYSGGMDSFTVLHRALEDGYDVHAVSFHYGQRHHRELESARQVCEQLGIAHKIVDIRAINTLLAGSSLTDDIEVPEGDYANTNMTSTVVPNRNMILLSLAIGYAVSIKASKVYYGAHSGDHDIYPDCRPEFVDAMNAVSQIANYEPIEVHSPYLQQSKADILGDGLRMGLDYSQTWTCYNGRDKACGRCSACRERLAAFASHAVSDPLAYESAQ

SEQ ID NO: 35822 - protein, 226 aa, unidentified
  source 1..226: note = Aliidiomarina minuta
  REGION 1..226: note = tr|A0A432WA78|A0A432WA78_9GAMM 7-cyano-7-deazaguanine synthase OS=Aliidiomarina minuta; OX = 880057 GN=queC PE=3 SV=1
MVQKTKQEKVVVIYSGGMDSFTVLNRALADGYQVFAVSFHYGQRHHRELEVASEACKKLGVEHKVVDIRNINQLLAGSSLTDDIDIPDAEYATSNMTSTVVPNRNMILLSLAIGYAVSIKANKVYYGAHSGDHDIYPDCRPEFVEAMNHVSQIANYDAVSIHSPYLQQSKADILADGIKMGLDYSQTWTCYNGRDKACGRCSACRERLAAFASHGLSDPLEYEAAE

SEQ ID NO: 35823 - protein, 220 aa, unidentified
  source 1..220: note = Aliidiomarina sanyensis
  REGION 1..220: note = tr|A0A432WEM9|A0A432WEM9_9GAMM 7-cyano-7-deazaguanine synthase OS=Aliidiomarina sanyensis; OX = 1249555 GN=queC PE=3 SV=1
MEQKTAVVIYSGGMDSFTVLNRAIADGYRVFALSFHYGQRHSKELEYAANVCENLGINHKVVDIRAINSLLAGSSLTDDIDVPNAAYATENMTSTVVPNRNMILLSLAIGYAVSIDADEVLYGAHSGDHDIYPDCRPEFVEAMNQVSLIANYKPIPVRSPYLYQSKNDILADGLSLGLDYSQTWTCYNGRERACGTCSACRERLQAFASLGTHDPLPYEN

SEQ ID NO: 35824 - protein, 231 aa, unidentified
  source 1..231: note = Aliidiomarina shirensis
  REGION 1..231: note = tr|A0A432WY85|A0A432WY85_9GAMM 7-cyano-7-deazaguanine synthase OS=Aliidiomarina shirensis; OX = 1048642 GN=queC PE=3 SV=1
MKQPAANNEQPTASNIAVVIYSGGMDSFTVLNRAIVDGFNVHALSFNYGQRHSKELDYAANVCEKLGIPHKIVDIRAINSLLAGSSLTSDIDVPDAEYAEANMQSTVVPNRNMILLSLAIGYAVSINADEVYYGAHAGDHDIYPDCRPEFVEAMNTVSQLANYKAIPVRSPYLHSSKGDILADGMRMNLDYANTWTCYNGRERACGKCSACRERLAAFAAHGLTDPINYEV

SEQ ID NO: 35825 - protein, 230 aa, unidentified
  source 1..230: note = Aliidiomarina soli
  REGION 1..230: note = tr|A0A432WL98|A0A432WL98_9GAMM 7-cyano-7-deazaguanine synthase OS=Aliidiomarina soli; OX = 1928574 GN=queC PE=3 SV=1
MMAQNSNPATKPQQQTVVVIYSGGMDSFTVLNRAIADGHQVHAVSFHYGQRHHRELESAKTVCAQLGVPHKVVDIRSINTLLAGSSLTDDIDIPEGDYATSNMTSTVVPNRNMILLSLAIGYAVSIKAGKVYYGAHSGDHDIYPDCRPEFVEAMNAVSQLANYEPVEIHSPYLVQSKADILADGLRMGLDYSQTWTCYNGRDKACGKCSACRERLAAFAAHGITDPLEYE

SEQ ID NO: 35826 - protein, 221 aa, Aliidiomarina sp.
  REGION 1..221: note = tr|A0A552X362|A0A552X362_9GAMM 7-cyano-7-deazaguanine synthase OS=Aliidiomarina sp. IM1326 OX=2593535 GN=queC PE=3 SV=1
MGQKSAVVIYSGGMDSFTVLNRAIADGLTVHALSFHYGQRHSKELDYAANVCEKLGISHKVVDIRAINTLLAGSALTSDIDVPDAEYAEGNMKATVVPNRNMILLSLAIGYAVSIDADEVYYGAHSGDHDIYPDCRPVFVEAMNQVSQLANYKPIPVVSPYLYQSKIDILRDGLSLGLDYSQTWTCYNGREKACGKCSACRERLQAFAALGLTDPLPYENA

SEQ ID NO: 35827 - protein, 218 aa, unidentified
  source 1..218: note = Aliiglaciecola lipolytica
  REGION 1..218: note = tr|K6YRK0|K6YRK0_9ALTE 7-cyano-7-deazaguanine synthase OS=Aliiglaciecola lipolytica E3 OX=1127673; GN = queC1 PE=3 SV=1
MSQKVVVIFSGGMDSYTVLNKALREGYEVYALSFDYGQRHNKELTYAANACKELNVAHKIVDISAINELIGGSSLTSDIDVPEGHYEQDSMKQTVVPNRNMILLSMAVGYAVSLEAKKVFYGAHSGDHAIYPDCRPEFVHKMNDVCAIANYEAVEIACPYLDVSKIDILTDGLKMGLDYGKTWTCYNGREKACGKCGACQERLEAFAKNQATDPLAYE

SEQ ID NO: 35828 - protein, 219 aa, unidentified
  source 1..219: note = Aliiglaciecola sp.
  REGION 1..219: note = tr|A0A553L1G6|A0A553L1G6_9ALTE 7-cyano-7-deazaguanine synthase OS=Aliiglaciecola sp. M165; OX = 2593649 GN=queC PE=3 SV=1
MSQKVVVIFSGGMDSFTVLNKVVREHNDVYALSFNYGQRHSKELDYAAKVCNELGVHHKIIDISAINELIGGSSLTADIDVPEGHYEQESMKQTVVPNRNMILLSMAVGYAVSLQANKVYYGAHSGDHAIYPDCRPEFVHRMNDVCAIANYEAVEIACPYLNVSKIDILTDGLIMGLDYGKTWTCYNGREKACGKCGACQERLEAFEHNGVTDPLSYEE

SEQ ID NO: 35829 - protein, 231 aa, unidentified
  source 1..231: note = Aliikangiella marina
  REGION 1..231: note = tr|A0A545TD19|A0A545TD19_9GAMM 7-cyano-7-deazaguanine synthase OS=Aliikangiella marina; OX = 1712262 GN=queC PE=3 SV=1
MSDKNTPKAIVLLSGGLDSSTCLAIAQSKGFDVYALSFSYGQKHSSELEAAKRVANLSQVSEHRIINLDLGGFGGSALTDEGIEVPTENDPDNSDEIPATYVPARNTVFLSIALAWAEVLEAEKIFAGVNAVDYSGYPDCRPEYIEAFQKMADLATKAGIEGTGVKIETPLINLTKPKIIQLGLSLAVDYSQTVSCYQADEHGLACGQCDSCLIRKAAFESAGIADPTRYR

SEQ ID NO: 35830 - protein, 225 aa, unidentified
  source 1..225: note = Aliikangiella sp.
  REGION 1..225: note = tr|A0A545UBW1|A0A545UBW1_9GAMM 7-cyano-7-deazaguanine synthase OS=Aliikangiella sp. M105; OX = 2592383 GN=queC PE=3 SV=1
MSKKKAIILLSGGLDSTTCLAIAQSENYDCYALSFRYGQKHSSELEAAQRIAKNAKVKLHKIIDLNLGSFGGSALTDDSIEVPKGGTEGIPVTYVPARNTVFLSIALAWAEVLEADFIFAGVNAVDYSGYPDCRPEYIDAFQKMADLATKAGIEGRGVKLITPLIDLTKVEIIQRGHSLGVDYSQTVSCYDADVDGKACGECDSCLIRKNAFESAQVSDPTIYHS

SEQ ID NO: 35831 - protein, 227 aa, Aliivibrio finisterrensis
  REGION 1..227: note = tr|A0A4V1Z924|A0A4V1Z924_9GAMM 7-cyano-7-deazaguanine synthase OS=Aliivibrio finisterrensis OX=511998 GN=queC PE=3 SV=1
MSTAIVVFSGGQDSTTCLIQALTQYDNVHCITFDYGQRHNQEIEVAKKVALELGAASHKVMDVGLLNELAVSSLTRDNIPVSHELQENGLPNSFVPGRNILFLTLAGIYAYQLGAESVITGVCETDFSGYPDCRDEFVKSINQSLVLGMDRKLRIDTPLMWLNKAETWALADKYGKLDYVRSQTLTCYNGVIGDGCGDCPSCDLRKNGLDEYLENKDAVMADLNAKL

SEQ ID NO: 35832 - protein, 227 aa, Aliivibrio finisterrensis
  REGION 1..227: note = tr|A0A4Q5KI08|A0A4Q5KI08_9GAMM 7-cyano-7-deazaguanine synthase OS=Aliivibrio finisterrensis OX=511998 GN=queC PE=3 SV=1
MSTAIIVFSGGQDSTTCLIQALTQYDNVHCITFDYGQRHNQEIEVAKKVALELGAASHKVMDVGLLNELAVSSLTRDNIPVSHELQENGLPNSFVPGRNILFLTLAGIYAYQLGAESVITGVCETDFSGYPDCRDEFVKSINQSLVLGMDRKLRIDTPLMWLNKAETWALADKYGKLDYVRSQTLTCYNGVIGDGCGDCPSCDLRKNGLDEYLENKDAVMADLNAKL

SEQ ID NO: 35833 - protein, 227 aa, Aliivibrio fischeri
  REGION 1..227: note = sp|Q5E4H1|QUEC_ALIF1 7-cyano-7-deazaguanine synthase; OS = Aliivibrio fischeri (strain ATCC 700601 / ES114); OX = 312309 GN=queC PE=3 SV=1
MSTAIVVFSGGQDSTTCLIQALTQYDHVHCITFDYGQRHNQEIEVAKKVSIELGAASHKVMDVGLLNELAVSSLTRDNIPVSHELQENGLPNSFVPGRNILFLTLAGIYAYQLGAEAVITGVCETDFSGYPDCRDEFVKSINQSLVLGMDRQLEIKTPLMWLNKAETWALADKYGKLDYVRNHTLTCYNGVIGDGCGDCPSCDLRKNGLDAYLENKEPVMADLESKL

SEQ ID NO: 35834 - protein, 227 aa, Aliivibrio fischeri
  REGION 1..227: note = sp|B5FF08|QUEC_ALIFM 7-cyano-7-deazaguanine synthase; OS = Aliivibrio fischeri (strain MJ11) OX=388396 GN=queC; PE = 3 SV=1
MSTAIVVFSGGQDSTTCLIQALTQYDHVHCITFDYGQRHNQEIEVAKKVAIELGAASHKVMDVGLLNELAVSSLTRDNIPVSHELQENGLPNSFVPGRNILFLTLAGIYAYQLGAEAVLTGVCETDFSGYPDCRDEFVKSINQSLVLGMDRQLEIKTPLMWLNKAETWALADKYGKLDYVRNHTLTCYNGVIGDGCGDCPSCDLRKNGLDAYLENKESVMADLESKL

SEQ ID NO: 35835 - protein, 227 aa, Aliivibrio logei
  REGION 1..227: note = tr|A0A1B9NUH1|A0A1B9NUH1_ALILO 7-cyano-7-deazaguanine synthase OS=Aliivibrio logei OX=688; GN = queC PE=3 SV=1
MSTAIVVFSGGQDSTTCLIQALTHYDHVHCITFDYGQRHNQEIEVAKSVALDLGATSHKVMDVGLLNELAVSSLTRDNIPVSHELQENGLPNSFVPGRNILFLTLAGIYAYQLGAESVITGVCETDFSGYPDCRDEFVKSINQSLVLGMDRKLKIDTPLMWLNKAETWALADKYGKLDYVRNQTLTCYNGVIGDGCGDCPSCDLRKNGLDDYLANKESVMADLESKI

SEQ ID NO: 35836 - protein, 227 aa, Aliivibrio salmonicida; identical to SEQ ID NO: 35835
  REGION 1..227: note = sp|B6EH68|QUEC_ALISL 7-cyano-7-deazaguanine synthase; OS = Aliivibrio salmonicida (strain LFI1238) OX=316275; GN = queC PE=3 SV=1

SEQ ID NO: 35837 - protein, 227 aa, Aliivibrio sifiae
  REGION 1..227: note = tr|A0A2S7XHI1|A0A2S7XHI1_9GAMM 7-cyano-7-deazaguanine synthase OS=Aliivibrio sifiae; OX = 566293 GN=queC PE=3 SV=1
MSTAIVVFSGGQDSTTCLIQALTQYDHVHCITFDYGQRHNQEIEVAKKVALELGAASHKVMDVGLLNELAVSSLTRDNIPVSHELQENGLPNSFVPGRNILFLTLAGIYAYQLGAESVITGVCETDFSGYPDCRDEFVKSINQSLVLGMDRKLRIDTPLMWLNKAETWALADKYGKLDYVRNQTLTCYNGVIGDGCGDCPSCDLRKNGLDDYLDNKDAVMVDLISKI

SEQ ID NO: 35838 - protein, 227 aa, Aliivibrio sifiae
  REGION 1..227: note = tr|A0A2S7XDN3|A0A2S7XDN3_9GAMM 7-cyano-7-deazaguanine synthase OS=Aliivibrio sifiae; OX = 566293 GN=queC PE=3 SV=1
MSTAIVVFSGGQDSTTCLIQALTQYDHVHCITFDYDQRHNQEIEVAKKVALELGAASHKIMDVGLLNELAVSSLTRDNIPVSHELQANGLPNSFVPGRNILFLTLAGIYAYQLGAESVITGVCETDFSGYPDCRDEFVKSINQSLVLGMDRKLKIDTPLMWLNKAETWALADKYGKLNYVRNQTLTCYNGVIGDGCGDCPSCDLRKNGLDEYLENKDAVMADLISKI

SEQ ID NO: 35839 - protein, 227 aa, Aliivibrio sp.
  REGION 1..227: note = tr|A0A1B9PKF7|A0A1B9PKF7_9GAMM 7-cyano-7-deazaguanine synthase OS=Aliivibrio sp. 1S175; OX = 1840087 GN=queC PE=3 SV=1
MSTAIVVFSGGQDSTTCLIQALTQYEHVHCITFDYGQRHNQEIEVAKKVALELGAASHKVMDVGLLNELAASSLTRDNIPVSHELQENGLPNSFVPGRNILFLTLAGIYAYQLGAESVITGVCETDFSGYPDCRDEFVKSINQSLVLGMDRKLRIDTPLMWLNKAETWALADKYGKLDYVRNQTLTCYNGVIGDGCGDCPSCDLRKNGLDDYLENKDAVMADLNSKI

SEQ ID NO: 35840 - protein, 227 aa, Aliivibrio wodanis
  REGION 1..227: note = tr|A0A090KJN0|A0A090KJN0_9GAMM 7-cyano-7-deazaguanine synthase OS=Aliivibrio wodanis; OX = 80852 GN=queC PE=3 SV=1
MSTAIVVFSGGQDSTTCLIQALTQYDHVHCITFDYGQRHNQEIEVAKKVALELGAASHKVMDVGLLNELAASSLTRDNIPVSHELQENGLPNSFVPGRNILFLTLAGIYAYQLGAESVITGVCETDFSGYPDCRDEFVKSINQSLVLGMDRKLRIDTPLMWLNKAETWALADKYGKLDYVRNHTLTCYNGVIGDGCGDCPSCELRQNGLDTYINNKLDTMNELHKKN

SEQ ID NO: 35841 - protein, 218 aa, Alishewanella aestuarii
  REGION 1..218: note = tr|J1PYK9|J1PYK9_9ALTE 7-cyano-7-deazaguanine synthase OS=Alishewanella aestuarii B11 OX=1197174 GN=queC; PE = 3 SV=1
MTQKVVVIYSGGMDSYTVLHRALRDGHDVYALSFNYGQRHVKELKCAEQVCRELGVKHKIVDISAINQLLSGSSLTSDIEVPEGHYAADNMKSTVVPNRNMILLSLAVGYADSIGARAVYYGAHSGDHFIYPDCRPEFVQKMNDVCQIANYQPVDIVSPYLHQTKIEILKDGLAMGLDYSKTWTCYNGREKACGKCGSCQERLEAFALNQATDPLQYE

SEQ ID NO: 35842 - protein, 218 aa, Alishewanella agri
  REGION 1..218: note = tr|I8UDR3|I8UDR3_9ALTE 7-cyano-7-deazaguanine synthase OS=Alishewanella agri BL06 OX=1195246 GN=queC; PE = 3 SV=1
MTQKVVVIYSGGMDSYTVLHKALRDGHDVYALSFNYGQRHVKELKCAEQVCAELGVKHKIVDISAINQLLSGSSLTSDIEVPEGHYAADNMKSTVVPNRNMILLALAVGYADSIGARAVYYGAHSGDHFIYPDCRPEFVQKMNDVCQIANYEPVDIVSPYLAQTKIEILRDGLAMGLDYSKTWTCYNGREKACGKCGSCQERLEAFALNQAVDPLSYE

SEQ ID NO: 35843 - protein, 218 aa, Alishewanella jeotgali; identical to SEQ ID NO: 35841
  REGION 1..218: note = tr|H3ZJE5|H3ZJE5_9ALTE 7-cyano-7-deazaguanine synthase OS=Alishewanella jeotgali KCTC 22429 OX=1129374; GN = queC PE=3 SV=1

SEQ ID NO: 35844 - protein, 218 aa, Alishewanella sp.; identical to SEQ ID NO: 35841
  REGION 1..218: note = tr|A0A1C2C2P6|A0A1C2C2P6_9ALTE 7-cyano-7-deazaguanine synthase OS=Alishewanella sp. HH-ZS; OX = 1856684 GN=queC PE=3 SV=1

SEQ ID NO: 35845 - protein, 218 aa, Alishewanella sp.
  REGION 1..218: note = tr|A0A259P1V4|A0A259P1V4_9ALTE 7-cyano-7-deazaguanine synthase OS=Alishewanella sp. 34-51-39 OX=1970316 GN=queC PE=3 SV=1
MTQKVVVIYSGGMDSYTVLHKALRDGHDVYALSFNYGQRHVKELKCAEQVCAELGVKHKIVDISAINQLLSGSSLTSDIEVPEGHYAADNMKSTVVPNRNMILLALAVGYADSIGARAVYYGAHSGDHFIYPDCRPEFVQKMNDVCQIANYEPVDIVSPYLAQTKIEILKDGLAMGLDYSKTWTCYNGREKACGKCGSCQERLEAFALNQAVDPLSYE

SEQ ID NO: 35846 - protein, 218 aa, Alistipes onderdonkii
  REGION 1..218: note = tr|A0A4Q5INP5|A0A4Q5INP5_9BACT 7-cyano-7-deazaguanine synthase OS=Alistipes onderdonkii; OX = 328813 GN=queC PE=3 SV=1
MKDSVIIVSGGMDSITLLHEKVEEIALAVTFDYGSNHNKREAECAARHCQQLGIEHIIIPLAFIGQYFKSSLLEGADAVPEGHYEAENMKSTVVPFRNGIMLSVACGLAESRKLSKVLIANHGGDHAIYPDCRAGFVHSMSEAMRHGTYIGVQIDAPYTGIRKSDIARIGKRLGLDYSTTYSCYKGGEKHCGKCGTCVERKEALRDAEIEDTTEYETE

SEQ ID NO: 35847 - protein, 218 aa, Alistipes putredinis; identical to SEQ ID NO: 35846
  REGION 1..218: note = tr|B0MZU1|B0MZU1_9BACT 7-cyano-7-deazaguanine synthase OS=Alistipes putredinis DSM 17216 OX=445970; GN = queC PE=3 SV=1

SEQ ID NO: 35848 - protein, 218 aa, Alistipes sp.
  REGION 1..218: note = tr|A0A374AIC0|A0A374AIC0_9BACT 7-cyano-7-deazaguanine synthase OS=Alistipes sp. AF14-19; OX = 2292910 GN=queC PE=3 SV=1
MKDSVIIVSGGMDSITLLHEKVEEIALAVTFDYGSNHNKREAECAARHCQQLGIEHIIIPLAFIGQYFKSSLLEGADAVPEGHYEAENMKSTVVPFRNGIMLSVACGLAESRKLSKVLIANHGGDHAIYPDCRSEFIRTMAAAMRFGTYEHVGISAPYTGISKSDIARIGKRLGLDYSTTYSCYKGGEKHCGKCGTCVERKEALRDAGIEDTTEYETE

SEQ ID NO: 35849 - protein, 225 aa, unidentified
  source 1..225: note = Aliterella atlantica
  REGION 1..225: note = tr|A0A0D8ZRR3|A0A0D8ZRR3_9CYAN 7-cyano-7-deazaguanine synthase OS=Aliterella atlantica CENA595 OX=1618023 GN=queC PE=3 SV=1
MKAVVLLSGGLDSATVLYSAIASGDECYALSFDYQQRHQKELESAIAIAQSAGVIDRKIVSFDLRSWGGSALTDDKIDLPQERSLAQMSADIPVTYVPARNTIFLSFALAYAETIDAGRVYIGVNALDYSGYPDCRLDYIQAMQEVFRLGTKQGREGEAIKIVTPLIDLKKTEIIQLGNKLGVPWEKTWSCYAGGDKACGVCDSCQLRLAAFKELGLQDPVAYIC

SEQ ID NO: 35850 - protein, 218 aa, Alkalibacillus haloalkaliphilus
  REGION 1..218: note = tr|A0A511W325|A0A511W325_9BACI 7-cyano-7-deazaguanine synthase OS=Alkalibacillus haloalkaliphilus OX=94136 GN=queC PE=3 SV=1
MKNEKALVVFSGGQDSTTCLFWALENFKEVETVTFDYNQRHDLEIEVAQEIAKELGVNNRVLDMSLISQLSANALTRDDIEIEEKDGELPSTFVEGRNHLFLSFAAVLGKQIGAKHIITGVSETDFSGYPDCRDGFIKSLNVTLNLSMDDQFVIHTPLMWRDKKEVWQLSDELGALDFVQNRTLTCYNGVMAEGCGECPACQLRREGLDAYLTEKGVS

SEQ ID NO: 35851 - protein, 218 aa, unidentified
  source 1..218: note = Alkalicoccus halolimnae
  REGION 1..218: note = tr|A0A5C7F065|A0A5C7F065_9BACI 7-cyano-7-deazaguanine synthase OS=Alkalicoccus halolimnae; OX = 1667239 GN=queC PE=3 SV=1
MLKEEKAVVVFSGGQDSTTCLLWALDRFAEVETVTFNYNQRHSREIDVAEKIAADFGVKHTVLDMSLLNQLAPNALTRSDIEIEQKEGEPPSTFVEGRNLLFLSFAAIQGKQHGARHIITGVCETDFSGYPDCRDAFVKSLNVTLNLAMDYEFVLHTPLMWLDKAETWKLADELHGLDYVRNNTLTCYNGILADGCGECPACILRHNGLQTYLQRKET

SEQ ID NO: 35852 - protein, 218 aa, unidentified
  source 1..218: note = Alkalicoccus saliphilus
  REGION 1..218: note = tr|A0A2T4UA07|A0A2T4UA07_9BACI 7-cyano-7-deazaguanine synthase OS=Alkalicoccus saliphilus; OX = 200989 GN=queC PE=3 SV=1
MREKEKAVVVFSGGQDSTTCLLWALKQFDEVETVTFNYNQRHHKEIEVAQSVAEKLGVKNTVLDMSLLNQLAPNALTRDDINIEQKEGELPTTFVDGRNHLFFSFAAIYGKQISARHIITGVCETDFSGYPDCRDVFVKSLNVTLNLSMDYNFVFHTPLMWLDKAETWELADKLDGLEFVRRETLTCYNGIIADGCGECPACELRRNGLENYKARKEG

SEQ ID NO: 35853 - protein, 238 aa, Alkalilimnicola ehrlichii
  REGION 1..238: note = sp|Q0A550|QUEC_ALKEH 7-cyano-7-deazaguanine synthase; OS = Alkalilimnicola ehrlichii (strain ATCC BAA-1101 / DSM 17681 / MLHE-1) OX=187272 GN=queC PE=3 SV=1
MSETADTNQTAVVLFSGGQDSTTCLAWALARYHRVHTVAFDYGQRHRVELACRQRVREAIGQHFAGWGARLGEDHLLDLTSLGEISDTSLTRERAIEIRDSGLPDTFVPGRNLLFLTYAAALAWRLQARHLITGVCETDYSGYPDCRDDTIKALQVALNLGMDSHFVLHTPLMWRDKAQTWALAETLGGADLVELIAEHTHTCYLGDRTQRHDWGYGCGECPACRLRAQGWRRHRGLC

SEQ ID NO: 35854 - protein, 231 aa, Alkalilimnicola ehrlichii
  REGION 1..231: note = tr|A0A3E0X3V3|A0A3E0X3V3_9GAMM 7-cyano-7-deazaguanine synthase OS=Alkalilimnicola ehrlichii OX=351052 GN=queC PE=3 SV=1
MSKPRAVILLSGGLDSATVLAIARSQGFDCYALSFDYGQRHKAELDACRRIASDLGAVEHRVLSIGLGEFGGSALTDLDLAVPDKQEPGIPITYVPARNTVFLSLALGYAEVIGAWDIFIGVNAVDYSGYPDCRPAFIKAFEQMANVATKAAVEGEEQLHVRAPLMDLSKADIIRMGARLGVDYGLTVSCYQADEAGRACGICDSCRLRAEGFRAARIADPTPYQKKNTKS

SEQ ID NO: 35855 - protein, 219 aa, Alkalimonas amylolytica
  REGION 1..219: note = tr|A0A1H4B692|A0A1H4B692_ALKAM 7-cyano-7-deazaguanine synthase OS=Alkalimonas amylolytica; OX = 152573 GN=queC PE=3 SV=1
MMPQKVVVIYSGGMDSYTVLHKAIADGHDVYALSFNYGQRHVKELECAAQVCRELGINHKVVDISAINQLLAGSSLTDNIEVPEGHYEAENMKSTIVPNRNMILISLAVGYADSIKAKAVYYGAHSGDHFIYPDCRPEFVEKMNAVCQIANYDPIDIVSPYLHESKIEILRDGLAMGLDYSKTWTCYNGRELACGKCGACQERLEAFALNKAKDPLPYE

SEQ ID NO: 35856 - protein, 476 aa, unidentified
  source 1..476: note = Alkalinema sp.
  REGION 1..476: note = tr|A0A251W9S9|A0A251W9S9_9CYAN Uncharacterized protein OS=Alkalinema sp. CACIAM 70d OX=1934309; GN = B0A82_23080 PE=4 SV=1
MERQSKQTSDFTLLFESVMSSGGNICLYDHSRNKESNVRIAVDDSAFSCRIQKEFPSIIADLIDLAVAIHAADRLTFQSLRQQQTQIHVVLPIRHPEILNQSSFQDKLSSLLGWATGSRWIFEFSQRVDLGRVVEQQPLLTSSDPYINEVVLWSGGLDALAGLYTRLKENHQISFMLFGTGSNDNSYARQGQIFQALLPSFPNRLNLCRVPIRFSESNLHIKNKISRARGIVFTLLGSACAYLMGQQVLHLYENGIGAVNLPYRKSAVGLDHSRSVHPLTLLRVSDLVSELVGEGFRVQNPFLFWTKAEMCQQLAKDMKYDLPALTISCDSPHRKQPIQCGYCSSCILRKQALAASRVEDQTYYIVPHNDRPVSDIRLYLQNMLTQVSTLKGLLNCSENAISQWESLTRRFPSLDDIVDRTHGIEGLTPPEMRKNLIRLYQTYVLEWDAVEPQILGDFLSQVIDQPIIQDFQMAIQ

SEQ ID NO: 35857 - protein, 232 aa, unidentified
  source 1..232: note = Alkalinema sp.
  REGION 1..232: note = tr|A0A251WA49|A0A251WA49_9CYAN 7-cyano-7-deazaguanine synthase OS=Alkalinema sp. CACIAM 70d OX=1934309 GN=queC PE=3 SV=1
MKKAVVLLSGGLDSATSAAQAIADGYEVIALSLYYGQRHDRELQAARDIVAALKLSEHFILDVNLSQWGGSALTDRQIEIPTEGVQSDVIPSTYVPGRNTVFIAIALSLAEAKQAEAIYLGINAVDYSGYPDCRPDYLAAFEQLAQLSSKAGLEGHAPRLVAPLVLDSKVDIVHRAVKLGVPIAQTWSCYQGGSEPCGLCDSCRIRDKALIDAGYPDLATGLGRQLNHQEAR

SEQ ID NO: 35858 - protein, 230 aa, Alkaliphilus peptidifermentans
  REGION 1..230: note = tr|A0A1G5KKJ5|A0A1G5KKJ5_9CLOT 7-cyano-7-deazaguanine synthase OS=Alkaliphilus peptidifermentans DSM 18978 OX=1120976 GN=queC PE=3 SV=1
MREAKGMIKNMKKAVILLSGGLDSTTCMAIAQQEGYQLYPISFDYKQRHNRELALAKEIATYFQSSDHKIIAIENVGGSALTDESIDLPTYQETNDIPITYVPARNIIFLSYALGYAEVIGAEAIFIGVSSIDYSGYPDCRPEFIKAFQKVVDVGTAAGVKGNSIEIKTPLINLSKKETIQLGYKYGAPYHLTTSCYNGKEKACGVCDSCVLRLKGFNEAGIIDPILYEE

SEQ ID NO: 35859 - protein, 238 aa, Alkalispirillum mobile
  REGION 1..238: note = tr|A0A498BSY9|A0A498BSY9_9GAMM 7-cyano-7-deazaguanine synthase OS=Alkalispirillum mobile; OX = 85925 GN=queC PE=3 SV=1
MVTETDKASSAVVLFSGGQDSTTCLAWALARYPRVHTVGFDYGQRHHVELDCRQRVREAVAERFPDWGERLGEDHLLDLTSLGRISDTSLTRERAIHMQQNGLPDTFVPGRNLLFLTYAAALAWRLQARYLVTGVCETDFSGYPDCRDDTIKALQVALNLGMDSRFVLHTPLMWRDKAQTWALAEALGGDPLVELIVSHTHTCYLGDRAHYHDWGYGCGTCPACELRAEGWARYLIGS

SEQ ID NO: 35860 - protein, 228 aa, unidentified
  source 1..228: note = Alkalitalea saponilacus
  REGION 1..228: note = tr|A0A1T5H8Y7|A0A1T5H8Y7_9BACT 7-cyano-7-deazaguanine synthase OS=Alkalitalea saponilacus; OX = 889453 GN=queC PE=3 SV=1
MKRAVILLSGGLDSAVTLWLAKSEGYELFTLSFDYGQRHKKELEAAAEITKVAGVKEHRLVTINMDQWGGSSLTDKNMEVEDGDVNRTDIPVTYVPARNMVFLSIAASYAEAIDAQNIFIGVSQVDYSGYVDCRESFIKAMENAINQGTVMAAEKNRPITIHAPFIYKTKTEEIKTGAKLGVPFGLTWSCYRGGEKPCGTCDSCLLRAKAFQEAGVVDEGITETGERK

SEQ ID NO: 35861 - protein, 256 aa, Alkanindiges illinoisensis
  REGION 1..256: note = tr|A0A4Y7XHL8|A0A4Y7XHL8_9GAMM 7-cyano-7-deazaguanine synthase OS=Alkanindiges illinoisensis OX=197183 GN=queC PE=3 SV=1
MTQSSSDNSNPHISQLAAQKPRAIVLLSGGLDSTTCLAWAQARYECFALSFSYGQRHSSELDAARALAQRAGVEHRIIDIDLRQLGGSALTDDSIAVPQDCEIESQSENYRQNQPGAIPVTYVPARNTIFLSYALAAAEVKNASAIVIGVNAVDYSGYPDCRPEYIDAFAKMAALATKAGVEGNPITIETPLLHLTKAAIIQLGLEHGVDYAQTISCYQADDNGYACGRCDSCRLRRQGFIDAGVEDPTLYQAVIN

SEQ ID NO: 35862 - protein, 242 aa, Alkanindiges sp.
  REGION 1..242: note = tr|A0A1S8CZ25|A0A1S8CZ25_9GAMM 7-cyano-7-deazaguanine synthase OS=Alkanindiges sp. H1; OX = 1907941 GN=queC PE=3 SV=1
MSNDNVSPASSQKPRAIVLLSGGLDSTTCLAWAQARYECFALSFSYGQRHSSELDAARALAKRAGVEHRIIDIDLRQLGGSALTDDSIDVPEDQSDELPGSIPVTYVPARNTIFLSYALAAAEVINASAIVIGINAVDYSGYPDCRPDYIDAFAKMAALATRAGVEGNPITIETPLLQLTKAAIIQLGLEHGVDYSQTISCYQADVNGYACGRCDSCRLRRQGFLDAGVKDPTLYQAATNQD

SEQ ID NO: 35863 - protein, 230 aa, Allisonella histaminiformans
  REGION 1..230: note = tr|A0A1G5WD81|A0A1G5WD81_9FIRM 7-cyano-7-deazaguanine synthase OS=Allisonella histaminiformans OX=209880 GN=queC PE=3 SV=1
MKKAIVLSSGGVDSTTCISVAVKELGADNVCTASIFYGQKHVKELEAARKVAEWFHVKHYEFDLSSILQYSNCALLAGSSEEIKHESYEDQVKESETGRVSTYVPFRNGLMLSVAASLAASLYEDEEVDIYIGAHADDAAGNAYADCSEPFLKAMEDAISIGTYGKVHLVFPFADKNKAGVVKTGLALGTPYELTWSCYEGGEKPCGTCGTCRDRAAAFEANGVKDPALD

SEQ ID NO: 35864 - protein, 282 aa, Alloactinosynnema album
  REGION 1..282: note = tr|A0A1H0LAB0|A0A1H0LAB0_9PSEU 7-cyano-7-deazaguanine synthase OS=Alloactinosynnema album; OX = 504798 GN=queC PE=3 SV=1
MRIDRPEHRHPDHTVVIASGGLDSTVLAYWLAARQSRLTLVSFDYGQRNRVELDHAAEIARLLDSPHRTIDLTNLGAMLTGSALTDASVAVPDGHYTVESMAAAVVPNHNAIMLYIAVEVAIAVGADAVAFGARAGNYAIYPDCRPEFGQRFARSVQTANEGLLVPGFQVLAPFLTLTKTDIVRVGEALAVPFARTWSCHLGHELHCGTCEWCTERQEAFRDNGLTDPTLYRGRVEGELTVMDKKPAVSGPERGGLSSGHSSRVSSGERGVGTSVLSGWVWL

SEQ ID NO: 35865 - protein, 234 aa, Alloactinosynnema sp.
  REGION 1..234: note = tr|A0A0H5CC57|A0A0H5CC57_9PSEU 7-cyano-7-deazaguanine synthase OS=Alloactinosynnema sp. L-07 OX=1653480 GN=queC PE=3 SV=1
MTIDHPEHRHPEHAVVIASGGLDSTVLAYWLAARHSRLTLVSFDYGQRHRVELDHAAEIARLLLSPHRIIDLTSLGALLTGSALTDTSVAVPDGHYTDESMAATVVPNRNAIMLDIAVAVAIAVRADAVVFGAHAGDHTIYPDCRPEFVERFARSVQAANEGLLVPGFQVLAPFLTLTKTDIVRVGEALAVPFARTWSCYRGREVHCGTCGTCTERQEAFRDNGIVDPTVYRAA

SEQ ID NO: 35866 - protein, 237 aa, Alloactinosynnema sp.
  REGION 1..237: note = tr|A0A0H5CC68|A0A0H5CC68_9PSEU Uncharacterized protein OS=Alloactinosynnema sp. L-07 OX=1653480 PE=4 SV=1
MTDTRVPEVLLFSAGLDSYPAWHYLGRPPGLYFDLDHRYARQERAAIAALADAAGIEVEISDELRLGAWEAEDAIIPLRNVHLAMLAANRAEVVWCIGVKGDHTLDKSREAFADMGRFIARFSEQPTRVDSPFWDMTKTEIIAWYLAQGLPLDHLLLTFSCSRTDGSTVHCGRCPSCLRRWTSLVNNGVEAEFEQQPWTWDRVREFYIPAMRDGRYPDHRAHEFFAALATVGAAMAS

SEQ ID NO: 35867 - protein, 232 aa, Allochromatium vinosum
  REGION 1..232: note = tr|D3RQ61|D3RQ61_ALLVD 7-cyano-7-deazaguanine synthase OS=Allochromatium vinosum (strain ATCC 17899 / DSM 180 / NBRC 103801 / NCIMB 10441 / D) OX=572477 GN=queC; PE = 3SV=1
MKPAVVLLSGGLDSTTALAIARAEGFVPHALSFRYGQRHAVELEAAARVAESMGVTEHVIAEIDLRRFGGSALTADLAVPKGRDPREMESDIPVTYVPARNTVFLSFALAWAEVLEASDIFIGVNALDYSGYPDCRPEYIAAFEQLANLATAAGVEGRQRYRIHAPLIEMSKAEIIRTGLALGVDYGLTSSCYDPGSGGRPCGACDSCQLRAKGFAEAGVADPLLSGFEVSA

SEQ ID NO: 35868 - protein, 235 aa, Allochromatium warmingii
  REGION 1..235: note = tr|A0A1H3DAX0|A0A1H3DAX0_ALLWA 7-cyano-7-deazaguanine synthase OS=Allochromatium warmingii OX=61595 GN=queC PE=3 SV=1
MKPAVVLLSGGLDSTTVLALARAQGFTPYALSFRYGQRHAVELEAAARVAAALGVAEHVIAEIDLRRFGGSALTAELAVPKGRELSELSTASAAIPITYVPARNTVFLSFALAWAEVLDAADLFIGVNALDYSGYPDCRPDYIAAFETLANLATAAGVEGRQRYRIHAPLIEMSKAEIIRNGLALGVDYALTSSCYDPGPIGQPCGACDSCQLRAKGFAEAGVVDPLLARYETDL

SEQ ID NO: 35869 - protein, 238 aa, unidentified
  source 1..238: note = Allonocardiopsis opalescens
  REGION 1..238: note = tr|A0A2T0Q2J6|A0A2T0Q2J6_9ACTN 7-cyano-7-deazaguanine synthase OS=Allonocardiopsis opalescens OX=1144618 GN=queC PE=3 SV=1
MNGDKRKAVVLLSGGLDSTTVLAIARHEGYETHALSFRYGQRHTEELVAAEKVAAALGAARHVVVDINLAVFGGSALTDDTLAVPHHDSADQISTDEIPITYVPARNTVFLSFALAWAETLGSSDVFIGVNALDYSGYPDCRPEYIEAYERMANLATKAGVEGKQRLKIHTPLIELTKAQTIQRGLELGVDYSWTHSCYDPVDGRACQTCDSCLLRSRGFAELGLVDPSFSSTSSANI

SEQ ID NO: 35870 - protein, 231 aa, unidentified
  source 1..231: note = Alloprevotella rava
  REGION 1..231: note = tr|G5GA87|G5GA87_9BACT 7-cyano-7-deazaguanine synthase OS=Alloprevotella rava F0323 OX=679199 GN=queC; PE = 3 SV=1
MNNDKVLVVFSGGQDSTTCLYWAKAHFKEVYALAFIYGQKHVLEVELAEKIAKEAGVHFDKMDVSFIGSLGKNSLTDTSLEMDQEKPADSFPNTFVPGRNMFFLSIAAVYARERGIFHLVTGVSQTDFSGYPDCRDSFIKSLNVTLNLAMDEQFVLHTPLMWLDKCQTWALSDELGVLDLVRHETLTCYNGIAGDGCGHCPSCKLRKHGLDSYLELKAAGKTPFDVMHPQE

SEQ ID NO: 35871 - protein, 218 aa, unidentified
  source 1..218: note = Alloprevotella sp.
  REGION 1..218: note = tr|A0A328PWA3|A0A328PWA3_9BACT 7-cyano-7-deazaguanine synthase OS=Alloprevotella sp. E39; OX = 2133944 GN=queC PE=3 SV=1
MKRNKALVVFSGGQDSTTCLYWAKAHFDEVWALSLRYGQKHATEVEVAEKIAQKAGVHFEAKDAPLIGSLGANSLTNSDIVMDETQPEESFPNTFVPGRNMFFLAIAAVYAREHGIFDLVTGVSQTDFSGYPDCRDAFIRSLNVTINLAMDEQFVIHTPLMWLDKSETWALADSFGVLDLVRNETLTCYNGIPGDGCGHCPACKLRREGLEKYLKSKK

SEQ ID NO: 35872 - protein, 221 aa, unidentified
  source 1..221: note = Alloprevotella sp.
  REGION 1..221: note = tr|A0A496KMB3|A0A496KMB3_9BACT 7-cyano-7-deazaguanine synthase OS=Alloprevotella sp.; OX = 1872471 GN=queC PE=3 SV=1
MNNKALVVLSGGQDSTTCLFWALREFDEVFALGFTYGQKHAAEVELARTICAEQNVPFEVMDVPLLGQLGRNSLTDTSLTMDEHKPADAPPNTFVPGRNLFFLSIAAVYARERGIFHLVTGVGQTDFSGYPDCRDNFIKSLNVTLNLAMDEQFCIHTPLMWRDKAETWALADELGVLDLIRQRTLTCYNGVVGDGCGHCPACQLRHDGLQQYLLTKETNHK

SEQ ID NO: 35873 - protein, 226 aa, unidentified
  source 1..226: note = Alloprevotella tannerae
  REGION 1..226: note = tr|C9LKA9|C9LKA9_9BACT 7-cyano-7-deazaguanine synthase OS=Alloprevotella tannerae ATCC 51259 OX=626522; GN = queC PE=3 SV=1
MKLLNNERALVVFSGGQDSTTCLFWAKRQFKEVFALSFRYGQKHANEVELAECIAREAGVHFQSLEAPLIGQLGRNSLTDASLEMDAEQPEGSFPNTFVPGRNLFFLSIAAVYAREHDIRHLVTGVSQTDFSGYPDCRDSFMKSLNVTLNLAMDEQFVIHTPLMWRDKAATWALADELGVLDLVRNETLTCYNGVKGDGCGHCPACTLRRRGLEEYLALKDAAQKS

SEQ ID NO: 35874 - protein, 232 aa, unidentified
  source 1..232: note = Unknown
  REGION 1..232: note = tr|A0A1V1PMY1|A0A1V1PMY1_9PROT 7-cyano-7-deazaguanine synthase OS=alpha proteobacterium U9-1i OX=1605283 GN=queC PE=3 SV=1
MSDTALVLFSAGQDSATCLAWALERYHRVETIGFFYGQRHAVELAQRPLIRAAMSDLSLRWRDRLGDDVVVDLAGYGALAESALTTQRAIEMAESGLPTTFVPGRNLVFLAVAAAHAYRRGADVLVGGMCETDYSGYPDCRRATLDAMQQALSLGLDRPTIVETPLMHRTKAQTWALAHALGGDAFVDLIVEQTHTCYEGDRSRRHAWGYGCETCPACDLRAKGWAEWKASA

SEQ ID NO: 35875 - protein, 239 aa, unidentified
  source 1..239: note = Unknown
  REGION 1..239: note = tr|A0A2A5XS23|A0A2A5XS23_9PROT 7-cyano-7-deazaguanine synthase OS=alpha proteobacterium MED-G09 OX=2007301 GN=queC PE=3 SV=1
MLDKNKSIVLFSGGQDSSACLLWALSKFEEVQTIGFDYGQRHNIELECRINLLKRIQLHSSNFLGKLSNDIVINLEEIKNISESSLLNSENIGMLENGLPNTFVPGRNLIFLNYASIIAYKNKTKNIVGGMCETDFSGYPDCRNETINSMEKSLNLGMDVEFKIQTPLMFKSKAEIWELIYKKGNKELIDIIIEESHTCYKGDRSKRYDWGYGCNSCPACELRSKGWNEFIINYPELKN

SEQ ID NO: 35876 - protein, 312 aa, unidentified
  source 1..312: note = Alphaproteobacteria bacterium
  REGION 1..312: note = tr|A0A257HPT1|A0A257HPT1_9PROT 7-cyano-7-deazaguanine synthase OS=Alphaproteobacteria bacterium PA1 OX=2015569 GN=queC PE=3 SV=1
MPECFKHSKRIHPFVRARLIPANGKALHRACDFDGRNLLRSSSFGFAENRLWNAPIPPFCFRESLLVIEPKHALVLFSGGQDSTACLAWALSRYDRVETIGFDYGQRHRVELDQRLVILEAIRATMPDWGQKLGDDHLLDLGLLGQISDTALTRDTAIAMADSGLPTTFVPGRNLVFLTFAGALAYRRGLGVLVGGMCETDYSGYPDCRRATLDAMEQSLSLGMDVSFKLATPLMYLTKAQTWDLAFALGGNALIELTVEHSHTCYTGDRSLRHDWGYGCGTCPACELRAAGWQQWQAQHQGQAVQGARVAP

SEQ ID NO: 35877 - protein, 235 aa, unidentified
  source 1..235: note = Alphaproteobacteria bacterium
  REGION 1..235: note = tr|A0A2S6RFC6|A0A2S6RFC6_9PROT 7-cyano-7-deazaguanine synthase OS=Alphaproteobacteria bacterium MarineAlpha9_Bin4 OX=2013099 GN=queC PE=3 SV=1
MKKRAILLFSGGQDSTTALGWCLKNFNTVDLLSFDYGQRHSVELKSAKNIIREIEKDFSHHKNKIRNSLIFKIKNLSNITKSSLTSNIKIDTSAKIPNTFVPGRNLLFYNLAATYAYTKDIDNIVSGVCQTDYSGYPDCRDATIKMLNKAINLGMEKKFTFHTPLMFLTKAETWKLSYSIGGNKFVNIIKKLTHTCYKGERRKLFSWGYGCNRCPACLIRKKGWEEYNLEKKNDL

SEQ ID NO: 35878 - protein, 232 aa, unidentified
  source 1..232: note = Altererythrobacter aquimixticola
  REGION 1..232: note = tr|A0A4T3EXX7|A0A4T3EXX7_9SPHN 7-cyano-7-deazaguanine synthase OS=Altererythrobacter aquimixticola OX=2489173 GN=queC PE=3 SV=1
MVETTPKAVILLSGGLDSMVAGGIAREQGYAIYALTIDYNQRHRREIGSARKIAEALGAERHVVLPLDLSQFGGSALTDDIEVPKTGVGEGIPVTYVPARNLVFLSLTLAWAEAIGAHDIFIGVNALDYSGYPDCRPDFIASFQETARLATRDGVEGKPFTIHAPLQHWGKARIAQEAERLGLDPVMSWSCYDPTPEGMACGLCDSCRLRQKGFAEAGLEDPTPYAARPGPG

SEQ ID NO: 35879 - protein, 236 aa, unidentified
  source 1..236: note = Altererythrobacter atlanticus
  REGION 1..236: note = tr|A0A0F7KWA1|A0A0F7KWA1_9SPHN 7-cyano-7-deazaguanine synthase OS=Altererythrobacter atlanticus OX=1267766 GN=queC PE=3 SV=1
MSDHTKTETRRNAVVLLSGGLDSMVAGGIAREQGFAINALTIDYNQRHRCEIEAAKTIAKELGAVRHVILPLDLRQFGGSALTDDIAVPKTGLTDDIPVTYVPARNLIFLSLTLGWAEPIGAHDIFIGVNALDYSGYPDCRPEFIASFTDTATLATKEGAQGHSFTIQTPLQFWGKARIAQECQRLGLDPAMSWSCYDPTPEGMACGLCDSCRLRRKGMEEAGVVDRTEYAATPAD

SEQ ID NO: 35880 - protein, 228 aa, Altererythrobacter dongtanensis
  REGION 1..228: note = tr|A0A1B2A9T3|A0A1B2A9T3_9SPHN 7-cyano-7-deazaguanine synthase OS=Altererythrobacter dongtanensis OX=692370 GN=queC PE=3 SV=1
MADNSRIAVILLSGGLDSMVSAGIARERGFTLHALSIDYGQRHVRELDCARDIARRLGAERHVVLPLDLRAFGGSALTADIAVPKDGVTDDIPITYVPARNLVFLALTTAFAECSGARDIFIGVNALDYSGYPDCRPEFIASFAETARLGTKAGVEGEPFAIHAPLQHMTKADIAREAARLGLDPGWSWSCYDPADDGRACGLCDSCRLRQKGFAEAGLPDRVAYTDA

SEQ ID NO: 35881 - protein, 229 aa, Altererythrobacter epoxidivorans
  REGION 1..229: note = tr|A0A0M3TB04|A0A0M3TB04_9SPHN 7-cyano-7-deazaguanine synthase OS=Altererythrobacter epoxidivorans OX=361183 GN=queC PE=3 SV=1
MTQGKSENMQAVVLLSGGLDSMVSAAIAKERGYTVHALTVDYGQRHRRELDAAREIANRLELASHREIKLDLSAFGGSALTADIPVPKGGVGEDIPVTYVPARNLVFLSLTVACAEASDAANIFIGVNALDYSGYPDCRPEFIESFAETARLGTKAGVEGRPFQIHAPLQYMSKADIARECDRLGLEPAWSWSCYDPEPDGRACGKCDSCRLRQKGFEEAGITDNTSYA

SEQ ID NO: 35882 - protein, 231 aa, Altererythrobacter ishigakiensis
  REGION 1..231: note = tr|A0A562US68|A0A562US68_9SPHN 7-cyano-7-deazaguanine synthase OS=Altererythrobacter ishigakiensis OX=476157 GN=queC PE=3 SV=1
MSDNSPKAEKSAVVLLSGGLDSMVTAALALEQGFAIHALTIDYDQRHRRELEAARRIAKQLNVARHIELQMNMRAIGGSALTDLMDVPKDGVGDSIPVTYVPARNLIFLSVCVAAAEAAGASDVFIGVNALDYSGYPDCRPEFIASFAETARLGTKSGVEGEAFVIHAPLQEMTKADIARECVRLGLEPSNSWSCYDPTEDGLACGLCDSCRLRKKGFAEAGLTDSTAYAD

SEQ ID NO: 35883 - protein, 234 aa, Altererythrobacter marensis
  REGION 1..234: note = tr|A0A2W4YPJ6|A0A2W4YPJ6_9SPHN 7-cyano-7-deazaguanine synthase OS=Altererythrobacter marensis OX=543877 GN=queC PE=3 SV=1
MDNHDKPGAAVVLLSGGLDSMVVGALARERGLRLHALTVDYGQRHRRELDAARAIGARLEAERHVFLSLDLRHFGGSALTDDIAVPKGGVDRAIPVTYVPARNLIFLSLTTGFAEASGARDIFIGVNALDYSGYPDCRPEFIASFAETARLATRIGAEGDPVTIHAPLQHMTKADIAREAYRLGLDPAWSWSCYDPTAEGLACGLCDSCRLRRKGFAEAALVDTTRYAADAPGD

SEQ ID NO: 35884 - protein, 234 aa, Altererythrobacter marensis
  REGION 1..234: note = tr|A0A0G3XCP3|A0A0G3XCP3_9SPHN 7-cyano-7-deazaguanine synthase OS=Altererythrobacter marensis OX=543877 GN=queC PE=3 SV=1
MGSESGKTNNPAVVLLSGGLDSMVAAAIAREQGFRLNALTIDYGQRHRVELDAARRIATALDCERHVVLPLDLTIFGGSALTDDIAVPTDGVGEDIPVTYVPARNIVFLSLTLAWAETVGADDIFIGVNALDYSGYPDCRPEFIAAFEQMARIGTKAGAEGSALSIRAPLQFMSKAQIAAEAARLSLDTGMSWSCYAPTEAGLACGLCDSCRLRQKGFAEAGIEDGITYERTTG

SEQ ID NO: 35885 - protein, 232 aa, Altererythrobacter namhicola
  REGION 1..232: note = tr|A0A1C7D556|A0A1C7D556_9SPHN 7-cyano-7-deazaguanine synthase OS=Altererythrobacter namhicola OX=645517 GN=queC PE=3 SV=1
MSDNAKRHAVILLSGGMDSMVAAGLARESGFRISALTIDYNQRHRVELQAARAIADHVGVERHVVMPLDLRQFGGSALTDDIDVPKEGVGSAIPVTYVPARNLVFLSLTLAWAEAIGAHDIFIGVNALDYSGYPDCRPDFIASFAETARLATRDGVGGDGFTIHTPLMDMTKADIAREADRLGLPAGLSWSCYDPTPENLACGRCDACRLRAKGFSEAGLPDPTPYAEAPPA

SEQ ID NO: 35886 - protein, 238 aa, Altererythrobacter sp.
  REGION 1..238: note = tr|A0A1Q3MD17|A0A1Q3MD17_9SPHN 7-cyano-7-deazaguanine synthase OS=Altererythrobacter sp. 66-12 OX=1895714 GN=queC PE=3 SV=1
MTGNPEQTTRQSARQAVVLLSGGLDSMVAAALAREQGFAINALTIDYNQRHRCEIDAAAAIARHLGAIRHVVLPLDLRRFGGSALTDDIAVPKDGVGPEIPITYVPARNLVFLSLTLAWAEPLGAHDIFIGVNALDYSGYPDCRPEFIASFAETARLATKEGMEGSAFTFHAPLQHWGKARIAEEAVRLGLDPAMSWSCYDPTPGGLACGLCDSCRLRRAGFADAGLIDPTRYAATGT

SEQ ID NO: 35887 - protein, 241 aa, Altererythrobacter sp.
  REGION 1..241: note = tr|A0A369QDM2|A0A369QDM2_9SPHN 7-cyano-7-deazaguanine synthase OS=Altererythrobacter sp. HME9302 OX=2161824 GN=queC PE=3 SV=1
MTNLQSNGQPKAVVLLSGGLDSMVTAGIARERGFALYALSIDYGQRHRRELLAASKIAELLGADRHVVLPLDLRAFGGSALTDDIAVPKGGVGNDIPVTYVPARNLIFLALTTAFAESCDARDIFIGVNALDYSGYPDCRPEFIDSFAETARLGTKAGIEGAPFVIHAPLQMLGKAEIAQEADRMGLDSGLSWSCYDPRPDGLACGGCDSCRLRRQGFADAGLVDGAAYPVNSPPIRGETA

SEQ ID NO: 35888 - protein, 227 aa, unidentified
  source 1..227: note = Altererythrobacter xiamenensis
  REGION 1..227: note = tr|A0A1Y6F7D0|A0A1Y6F7D0_9SPHN 7-cyano-7-deazaguanine synthase OS=Altererythrobacter xiamenensis OX=1316679 GN=queC PE=3 SV=1
MHSSKKAVVLLSGGLDSMVVAALAKEAGFAIQALTINYGQRHLRELRSARDIAERLGVERHVELPLDLRTFGGSALTDDIAVPKSGVSEDIPVTYVPARNLVFLALTTAFAEASGAQDIFIGVNALDYSGYPDCRPEFIASFAETARLGTKSGAGGDAFTIHAPLQHLTKSDIAKECYRLDLDPSWSWSCYDPDEHGVACGLCDSCRLRRKGFAEAGLEDSTAYAAE

SEQ ID NO: 35889 - protein, 222 aa, unidentified
  source 1..222: note = Alteribacillus bidgolensis
  REGION 1..222: note = tr|A0A1G8MK56|A0A1G8MK56_9BACI 7-cyano-7-deazaguanine synthase OS=Alteribacillus bidgolensis OX=930129 GN=queC PE=3 SV=1
MSFANEKAVVVFSGGQDSTTCLFWALERFEEVSAVTFDYGQRHREELKVAKSITEEHGIEHKVMDMSLLNQLAPNALTRDDIKVQDGQDGELPNTFVEGRNLLFFSFATIYASQKGAKHIVTGVCETDYSGYPDCRDVFVKSLNVSLNLALDKDFVLHTPLMWLDKKETWELADKLGRLSYVKEKTLTCYNGVPGDGCGECPACRLRQAGYEQYIKEKEREE

SEQ ID NO: 35890 - protein, 220 aa, unidentified
  source 1..220: note = Alteribacillus iranensis
  REGION 1..220: note = tr|A0A1I2CUH9|A0A1I2CUH9_9BACI 7-cyano-7-deazaguanine synthase OS=Alteribacillus iranensis OX=930128 GN=queC PE=3 SV=1
MSFADEKAVVVFSGGQDSTTCLFWALERFQEVSAITFDYGQRHRKELEVAAEIAEELGVDHHVLDMTLLNQLAPNALTREEIEVSEGEEGELPNTFVEGRNLLFFSFAAIAASQKGAKHVVTGVSQTDYSGYPDCRDSFVKSLNVTLNLATDKEFVLHTPLMWLDKKETWELADRLGRLSYVKEKTLTCYNGIRGEGCGECPACHLRHAGYKEYMKEKER

SEQ ID NO: 35891 - protein, 222 aa, unidentified
  source 1..222: note = Alteribacillus persepolensis
  REGION 1..222: note = tr|A0A1G8GJ91|A0A1G8GJ91_9BACI 7-cyano-7-deazaguanine synthase OS=Alteribacillus persepolensis OX=568899 GN=queC PE=3 SV=1
MRFHNEKAVVVFSGGQDSTTCLFWALERFEEVHAVTFDYGQRHNKELDVARAIAEELGVVHKVMNMDLLNQLAPNALTRDDIDVEEGKDGEPPNTFVEGRNLLFFSFATIYASQIGAKHVVTGVCETDYSGYPDCRDMFVKSLNVSLNLAIDKEFVLHTPLMWLDKKETWELADKLGKLSYIKNHTLTCYNGIVGDGCGECPACKLRQAGYEQYLNEKEREE

SEQ ID NO: 35892 - protein, 224 aa, unidentified
  source 1..224: note = Alteromonadaceae bacterium
  REGION 1..224: note = tr|A0A495DC15|A0A495DC15_9ALTE 7-cyano-7-deazaguanine synthase OS=Alteromonadaceae bacterium 2052S.S.stab0a.01 OX=1304900 GN=queC PE=3 SV=1
MSKKAVVLSSGGLDSTTVLAIAQQQGYDCYTLSFDYGQRHRAELEAADRVSAAMGATEHKVVSLDLRTIGGSALTDTSISVPETETSGIPVTYVPARNTVFLSIALGWAEVLGAEAIFIGVNAVDYSGYPDCRPAYIQAYQAMASLATRAGVEGQPLKIETPLIDLSKADIIRLGSTLGVDYSLTVSCYQADEQGRACGKCDSCRLRRRGFEDAGVDDPTPYRD

SEQ ID NO: 35893 - protein, 218 aa, unidentified
  source 1..218: note = Alteromonadaceae bacterium
  REGION 1..218: note = tr|A0A2E9KAS5|A0A2E9KAS5_9ALTE 7-cyano-7-deazaguanine synthase OS=Alteromonadaceae bacterium OX=1916082 GN=queC PE=3 SV=1
MSEKVIVIYSGGMDSFTVLHKAIADGKKPYALSFNYGQRHKKELDYATAVCTELNVPHKVVDISAINSLVGGSALTDDIEVPEGHYEEPSMKTTVVPNRNMILLSLAVGYAVSENATKVYYGAHSGDHAIYPDCRPEFVEKMNDVCAIANYEAVEIVTPYLKVSKTAILTDGLKMGLDYGKTWTCYNGREHACGGCGACQERLEAFRDNGAVDPLTYE

SEQ ID NO: 35894 - protein, 218 aa, unidentified
  source 1..218: note = Alteromonadales bacterium
  REGION 1..218: note = tr|A0Y003|A0Y003_9GAMM 7-cyano-7-deazaguanine synthase OS=Alteromonadales bacterium TW-7 OX=156578; GN = queC PE=3 SV=1
MTQKVVVIYSGGMDSFTVLNKALQQGHDVYALSFDYGQRHVKELKVAAQVCEKLNVPHKIVDISAINQLIGGSSLTDNIDVPEGHYEEESMKSTIVPNRNMILLSLAVGYAVSLKASQVYYGAHSGDHAIYPDCRPEFVQKMDDVCRIANYDAVEIFSPYLNNTKIDILTDGIKMGLDYSQTWTCYNGREKACGKCGACQERLEAFALNNITDPLEYE

SEQ ID NO: 35895 - protein, 220 aa, unidentified
  source 1..220: note = Alteromonadales bacterium
  REGION 1..220: note = tr|A0A2N0WLH9|A0A2N0WLH9_9GAMM 7-cyano-7-deazaguanine synthase OS=Alteromonadales bacterium alter-6D02 OX=2058087 GN=queC PE=3 SV=1
MKEKVVVIYSGGMDSFTVLHKAIEEGKAVYPLTFNYGQRHSKEVDVAAQVCKTLNVPHKVVDISAINQLMAGSSLTSDIDIPEGHYEEDSMKSTVVPNRNMVLLSMAIAYAVSIEANAVYYGAHSGDHAIYPDCRPEFVHKMNEVSQIANYEPVDIVSPYIKNNKIEILADGLRMGLDYGQTWTCYNGREQSCGVCGSCQERLEAFAKNGLTDPLAYETS

SEQ ID NO: 35896 - protein, 218 aa, unidentified
  source 1..218: note = Alteromonas aestuariivivens
  REGION 1..218: note = tr|A0A3D8M698|A0A3D8M698_9ALTE 7-cyano-7-deazaguanine synthase OS=Alteromonas aestuariivivens OX=1938339 GN=queC PE=3 SV=1
MSEKVVVIYSGGMDSFTVLNKAIREGKSPLALSFDYGQRHKKELVYAAAVCDELGVPHKVVDISAINSLVGGSALTDDIDVPEGHYEEPSMQQTVVPNRNMILLSLAVGYAVSQGANKVFYGAHSGDHAIYPDCRPEFVERMNQVCAIANYEAVEIVTPYLQDSKTAILTDGLKMGLDYGKTWTCYNGREKACGKCGACQERLEAFRDNQATDPLEYE

SEQ ID NO: 35897 - protein, 220 aa, unidentified
  source 1..220: note = Alteromonas australica
  REGION 1..220: note = tr|A0A075P4V6|A0A075P4V6_9ALTE 7-cyano-7-deazaguanine synthase OS=Alteromonas australica; OX = 589873 GN=queC PE=3 SV=1
MSENVVVIYSGGMDSFTVLHKAIRDGKKVNALSFDYGQRHKKELDYAANVCRSLNIPHKVVDISAINTLIGGSSLTSDIEVPEGHYEEPSMKQTVVPNRNMILLSLAVGYAVSLEANEVYYGAHSGDHAIYPDCRPEFVEKMNDVCHIANYTPVDIVSPYLKVSKTDILTDGLKMGLDYGLTWTCYNGREKACGKCGACEERLEAFRDNNATDPLEYEAH

SEQ ID NO: 35898 - protein, 219 aa, unidentified
  source 1..219: note = Alteromonas confluentis
  REGION 1..219: note = tr|A0A1E7ZFM1|A0A1E7ZFM1_9ALTE 7-cyano-7-deazaguanine synthase OS=Alteromonas confluentis; OX = 1656094 GN=queC PE=3 SV=1
MSEKVIVIYSGGMDSFTVLHKALADGKKPYALSFNYGQRHKKELDYAARVCDELNVPHKIVDISAINALVGGSALTDDIDVPEGHYEEPSMKTTVVPNRNMILLSLAVGYAVSEEATKVYYGAHSGDHAIYPDCRPEFVEKMNDVCAIANYEAVEIVTPYLKVSKTAILTAGLQMGLNYGKTWTCYNGREKACGKCGACQERLEAFRDNQATDPLAYEA

SEQ ID NO: 35899 - protein, 218 aa, unidentified
  source 1..218: note = Alteromonas lipolytica
  REGION 1..218: note = tr|A0A1E8FJ63|A0A1E8FJ63_9ALTE 7-cyano-7-deazaguanine synthase OS=Alteromonas lipolytica; OX = 1856405 GN=queC PE=3 SV=1
MSEKVIVIYSGGMDSFTVLNKALEDGKTPLALSFDYGQRHKKELDYAARVCAELNIPHKIVDISAINSLVGGSALTDDIDVPEGHYEEPSMKTTVVPNRNMILLSMAVGYAVSENATKVYYGAHSGDHAIYPDCRPEFVRKMNDVCAIANYEAVEIVTPYLEVSKTAILTDGLRMGLDYGKTWTCYNGREKACGQCGACQERLEAFRDNHQTDPLDYE

SEQ ID NO: 35900 - protein, 218 aa, Alteromonas macleodii
  REGION 1..218: note = tr|K0E8E6|K0E8E6_ALTMB 7-cyano-7-deazaguanine synthase OS=Alteromonas macleodii (strain Balearic Sea AD45) OX=1004787 GN=queC PE=3 SV=1
MSENVVVIYSGGMDSFTVLHKALKAGKKVHALSFNYGQRHKKELDYAANVCNSLNVPHKIVDISAINTLIGGSALTSDIEVPEGHYEEPSMKQTVVPNRNMILLSLAVGYAVSLDANEVYYGAHSGDHAIYPDCRPEFVHKMNDVCGIANYTPVTIMTPYIDDSKTAILTDGLSMGLDYGQTWTCYNGREKACGKCGACEERLEAFKENNAVDPLEYE

SEQ ID NO: 35901 - protein, 218 aa, Alteromonas macleodii; identical to SEQ ID NO: 35900
  REGION 1..218: note = tr|A0A126PXT1|A0A126PXT1_ALTMA 7-cyano-7-deazaguanine synthase OS=Alteromonas macleodii; OX = 28108 GN=queC PE=3 SV=1

SEQ ID NO: 35902 - protein, 218 aa, Alteromonas marina
  REGION 1..218: note = tr|A0A0B3YHB5|A0A0B3YHB5_9ALTE 7-cyano-7-deazaguanine synthase OS=Alteromonas marina; OX = 203795 GN=queC PE=3 SV=1
MSENVVVIYSGGMDSFTVLHKALKAGKKVHALSFNYGQRHKKELDYAANVCKSLNVPHKIVDISAINTLIGGSALTSDIDVPEGHYEEPSMKQTVVPNRNMILLSLAVGYAVSLEANEVYYGAHSGDHAIYPDCRPEFVHKMNDVCGIANYTPVTIMTPYIDDSKTAILTDGLSMGLDYGQTWTCYNGREKACGKCGACEERLEAFKENDAIDPLEYE

SEQ ID NO: 35903 - protein, 218 aa, unidentified
  source 1..218: note = Alteromonas mediterranea
  REGION 1..218: note = tr|S5BWL3|S5BWL3_9ALTE 7-cyano-7-deazaguanine synthase OS=Alteromonas mediterranea UM7 OX=1300258; GN = queC PE=3 SV=1
MSENVVVIYSGGMDSFTVLHKALRAGKKVHALSFDYGQRHKKELDYAAAVCTSLGVPHKIVDISAINTLIGGSALTSDIDVPEGHYEEPSMKQTVVPNRNMILLSLAVGYAVSLDANEVYYGAHSGDHAIYPDCRPEFVHKMNDVCGIANYTPVTIMTPYIKDSKTAILTDGLSMGLDYGQTWTCYNGREKACGKCGACEERLEAFKDNGATDPLEYE

SEQ ID NO: 35904 - protein, 218 aa, unidentified; identical to SEQ ID NO: 35903
  source 1..218: note = Alteromonas mediterranea
  REGION 1..218: note = sp|B4RTX3|QUEC_ALTMD 7-cyano-7-deazaguanine synthase; OS = Alteromonas mediterranea (strain DSM 17117 / CIP 110805 / LMG 28347 / Deep ecotype) OX=1774373 GN=queC PE=3 S V=1

SEQ ID NO: 35905 - protein, 218 aa, unidentified
  source 1..218: note = Alteromonas naphthalenivorans
  REGION 1..218: note = tr|F5ZDQ4|F5ZDQ4_ALTNA 7-cyano-7-deazaguanine synthase OS=Alteromonas naphthalenivorans OX=715451; GN = queC PE=3 SV=1
MSENVVVIYSGGMDSFTVLHKALRDGKTVHALSFDYGQRHKKELDYAAAVCKSLNVPHKIVDISAINSLIGGSSLTSDIDVPEGHYEEPSMKQTVVPNRNMILLSLAVGYAVSLEANEVYYGAHSGDHAIYPDCRPEFVEKMSDVCRIANYTPVEIVTPYIKDSKTAILTDGLKMGLDYGETWTCYNGREKACGKCGACEERLEAFRENHCTDPLSYE

SEQ ID NO: 35906 - protein, 218 aa, unidentified
  source 1..218: note = Alteromonas pelagimontana
  REGION 1..218: note = tr|A0A2A6AXE3|A0A2A6AXE3_9ALTE 7-cyano-7-deazaguanine synthase OS=Alteromonas pelagimontana OX=1858656 GN=queC PE=3 SV=1
MSEKVIVIYSGGMDSFTVLNKALAEGKAPLALSFNYGQRHKKELDYAATACKQLNVPHKIVDISAINSLVGGSALTDDIDVPEGHYEEPSMQQTVVPNRNMILLSLAVGYAVSQNATKVYYGAHSGDHAIYPDCRPEFVEKMNDVCAIANYSAIEIVTPYLEVSKAAILTDGLSMNLDYSLTWTCYNGREKACGKCGACQERLEAFRDNQASDPLPYE

SEQ ID NO: 35907 - protein, 218 aa, Alteromonas sp.; identical to SEQ ID NO: 35900
  REGION 1..218: note = tr|A0A2V3V9F9|A0A2V3V9F9_9ALTE 7-cyano-7-deazaguanine synthase OS=Alteromonas sp. I10; OX = 1938740 GN=queC PE=3 SV=1

SEQ ID NO: 35908 - protein, 218 aa, Alteromonas sp.
  REGION 1..218: note = tr|A0A3N5Y5A6|A0A3N5Y5A6_9ALTE 7-cyano-7-deazaguanine synthase OS=Alteromonas sp. U0105; OX = 2259342 GN=queC PE=3 SV=1
MSEKAVIIYSGGMDSYTVLHKALQRGIHATALSFNYGQRHKKELDYAANVCRTLSIPHTVVDISAINQLLAGSSLTDNIDVPEGHYEEPSMKQTVVPNRNMILLSLAIGHAVSIEANAVYYGAHSGDHAIYPDCRPEFVERMNAVSQIANYEPVQIVSPYLNNTKGEILADGLAMGLDYGNTWTCYNGREKACGKCGACQERLEAFALNGATDPLEYE

SEQ ID NO: 35909 - protein, 218 aa, Alteromonas stellipolaris; identical to SEQ ID NO: 35905
  REGION 1..218: note = tr|A0A0S1YLK4|A0A0S1YLK4_9ALTE 7-cyano-7-deazaguanine synthase OS=Alteromonas stellipolaris LMG 21856 OX=1160720 GN=queC PE=3 SV=1

SEQ ID NO: 35910 - protein, 214 aa, Alysiella crassa
  REGION 1..214: note = tr|A0A376BMU2|A0A376BMU2_9NEIS 7-cyano-7-deazaguanine synthase OS=Alysiella crassa; OX = 153491 GN=queC PE=3 SV=1
MTATLVIFSGGQDSTTCLFQAIAEYGVANVQTITFAYGQRHSIELERAAWIARDLGVKQTVLDLSLISGITNNALMDNTAEIDTSGSLPNTFVDGRNALFLLYAAIYAKSQNIKEIFVGVCETDFSGYPDCRDVFVKSMNVSLNLAMAYDFNIRTPLMYLTKKETWALADKLGVFDYIRQHTHTCYLGVDGGCHECPSCLLREKGLSEYLAERT

SEQ ID NO: 35911 - protein, 221 aa, Alysiella filiformis
  REGION 1..221: note = tr|A0A286E6Q4|A0A286E6Q4_9NEIS 7-cyano-7-deazaguanine synthase OS=Alysiella filiformis DSM 16848 OX=1120981 GN=queC PE=3 SV=1
MNNPHTTPAALVIFSGGQDSTTCLFQAIAEFGAANVQAITFHYGQRHAIELERAAWMAQDLGIKQTVLDLSLISSITNNALMDSNAQIDVSGSLPNTFVDGRNALFLLYAAIYAKSQNIKTIFVGVCETDFSGYPDCRDVFVKSMNVSLNLAMAYDFNIRTPLMYLTKKETWALADQLGAFDYVRQHTHTCYLGVQGGCHECPSCQLREKGLREYLAERES

SEQ ID NO: 35912 - protein, 233 aa, unidentified
  source 1..233: note = Amantichitinum ursilacus
  REGION 1..233: note = tr|A0A0N0XJW7|A0A0N0XJW7_9NEIS 7-cyano-7-deazaguanine synthase OS=Amantichitinum ursilacus OX=857265 GN=queC PE=3 SV=1
MTQTTEAARPAVILLSGGLDSATCLAIAKSQGFAPYCLSFDYGQRHNAELKAAARVAKALGAVEHRVVRIDLATFGGSALTDASIEVPTDGATDGGIPVTYVPARNTILLSYALAWAEVLKGDDIFIGVNAVDYSGYPDCRPDYIAAYQAMARLATRTGVEGSPLTIHTPLISLSKADIIKTGLALGVDYSLTVTCYKADDEGRACGVCDACRLRAAGFADAGVPDPTRYQPA

SEQ ID NO: 35913 - protein, 249 aa, unidentified
  source 1..249: note = Aminicella lysinilytica
  REGION 1..249: note = tr|A0A4R6Q6A5|A0A4R6Q6A5_9FIRM Uncharacterized protein OS=Aminicella lysinilytica OX=433323; GN = EV211_11330 PE=4 SV=1
MNIQEFFETNNKVALGFSGGVDSSYLLYAAKEAGADIGAYYVKSQFQPQFELDDALKLAEHVGAELKVLECDVLSEPKVASNPSDRCYYCKRHIFGAVADRAAKDGYGVLIDGTNASDDAGDRPGTKALGELKVLSPLRDCGLTKDDIRALSKEAGLFTWNKPSYACLATRIPEGEEITDKTLRRIEGAEDVLRMMGFSDFRVRKRGDIGLLQIPECQMVSAVKLNEEIVLGLKPYFKDVVLDLVGRRR

SEQ ID NO: 35914 - protein, 620 aa, Aminobacter aminovorans
  REGION 1..620: note = tr|A0A142M800|A0A142M800_AMIAI Uncharacterized protein OS=Aminobacter aminovorans OX=83263 GN=AA2016_3548; PE = 4 SV=1
MKQFEFACGGASFTCAYADVQRLTLDVQGANRNVNLRISDISRSMLGNVPDLLLDLLEIAAYIYCADQRASRGSEKLTLAGSSWRRSMHFTIPVRYPEIWSGAELNSALHETLSFLSDDSYHFSFVAAADPFVEKMAYFDGLLDGVVEADEIALFSGGIDSFAGAVETIVDHGRKVVLVGHHSAPKVFSIQKELIAKLGEAGHANSLFYVSVNITNTGVEAIESTQRSRSFLYASLAFVVARMFGKNAITFFENGIVSFNLPIARDVLGSRATRTTHPKVIRGFERIFSLLAGERIDVRTPYIWLTKKEVVERILDNSFGHLLPRTVSCAHPRSWTTSVRHCGACSQCIDRRFAVLAADAGDLEPATDYAIDLLTGDRSLDEKIRMPVAYVKFCQTILDSGKTQFMVNNPQVASALNYFPDLSCDLALDQIWDMHHRHAAGILSVLEGGLRQYSSALARNTLPPGSLLSLCFSRTHIEAPPLEDYDRQLGEFMDRLAQPVCEFAVDLDAKRIWFRGDYYLDGANFRLVAALIENHRSAKARLVEVPFTRTVKLAEKLEIDEDSLRQQVNRLRNEVANRLAVDQGIVFQINDFIENRQREGYRLAPALREVTRADLSRADH

SEQ ID NO: 35915 - protein, 200 aa, Aminobacter sp.
  REGION 1..200: note = tr|A0A0Q6MF63|A0A0Q6MF63_9RHIZ 7-cyano-7-deazaguanine synthase OS=Aminobacter sp. Root100; OX = 1736420 GN=ASC75_19180 PE=3 SV=1
MRALLFSGGLDSSALAWWLRPEICVTIDYGQRAARGEIAASSALCSQIGLEHRTIHANLSSLGSGSMAAKVAAEGASAEEFWPYRNQMLVTLAAMKLMPMGVREIILGSVSTDQHADGKAPFLKSLDRTLSLQEGHVRVTAPARRMSTRTLLRTSGFPYGLIGLTFSCHVHEYACGQCNGCLKHRECVEMTYPRPKRGAA

SEQ ID NO: 35916 - protein, 219 aa, Ammonifex degensii
  REGION 1..219: note = tr|C9RBW2|C9RBW2_AMMDK 7-cyano-7-deazaguanine synthase OS=Ammonifex degensii (strain DSM 10501 / KC4); OX = 429009 GN=queC PE=3 SV=1
MKSVVLLSGGLDSAVCLACAVEDGEVVLSLTFDYGQAAAKKEIEAASKLSRHYGVPHQVLHLPFLRELLPPAMASGEGMPEPETRELDDKVSADKLARSVWVPNRNALFLSIGAAFAESLGAEAVVAGFNAEEAQSFPDNSPPFVDAMNEVLRYSTRGKVRVISYTQRLDKKAIVRLGKRLGLPFPFIWSCYRAGEEMCGRCPSCLRYFRALREAEEEW

SEQ ID NO: 35917 - protein, 218 aa, Ammonifex sp.
  REGION 1..218: note = tr|A0A3A6MQG2|A0A3A6MQG2_9THEO 7-cyano-7-deazaguanine synthase OS=Ammonifex sp.; OX = 1872493 GN=queC PE=3 SV=1
MKCVVLLSGGLDSAVSLACARRDGAVLLCLTFDYGQQAVKPEIQAAAAFCEYYKVPHRVIDLPFLREITTTALVTGEDLPEPEVAYLDEFSRALEDAARVWVPNRNGIFLNIAAAYAEHLGAPAVVAGFNREEAAAFPDNSAAFVNAATAALYFATQNHVRVISYTQNLDKTGIAALGRRLGVPLELVWSCYRGGSEPCWRCESCLRYSRALAAAKEE

SEQ ID NO: 35918 - protein, 218 aa, Ammonifex thiophilus
  REGION 1..218: note = tr|A0A3D8P2C8|A0A3D8P2C8_9THEO 7-cyano-7-deazaguanine synthase OS=Ammonifex thiophilus; OX = 444093 GN=queC PE=3 SV=1
MRSVVLLSGGLDSAVCLACAVEDGEVVLSLTFDYGQAAARREIEAASKLARHYGVPHRVLPLSFLQELLPPAMASGEGMPEPETRELDDEVLADQLARSVWVPNRNALFLSVGAAFAESLGAEAVVAGFNAEEAQSFPDNSPPFVNAVNEVLRYSTRGKVRVISYTQRLDKRAIVRLGKRLGLPFSFIWSCYRAGEEMCGRCPSCLRYFRALREVEGE

SEQ ID NO: 35919 - protein, 223 aa, Ammoniphilus oxalaticus
  REGION 1..223: note = tr|A0A419SM78|A0A419SM78_9BACL 7-cyano-7-deazaguanine synthase OS=Ammoniphilus oxalaticus; OX = 66863 GN=queC PE=3 SV=1
MKKKAVIILSGGLDSATCMGVAQQVGYELYPLTFDYGQKHQHEIVHAKRIAQHYQVAEHRVVKLDFLNQLGGSALTDPSIEVPDYAGDDEVPVTYVPARNLIFLSLATAYAETVGAEKIFIGVSSVDYSGYPDCRPEFIASMSETIRLATKLGAEQGMLQIEAPLSHLSKEDTIRLGMELAVPYELTTSCYRGGDKACGTCDSCELRLKGFAEAGLVDPIPYV

SEQ ID NO: 35920 - protein, 223 aa, Ammoniphilus sp.
  REGION 1..223: note = tr|A0A4Q1SRH8|A0A4Q1SRH8_9BACL 7-cyano-7-deazaguanine synthase OS=Ammoniphilus sp. CFH 90114 OX=2493665 GN=queC PE=3 SV=1
MTKKAVIILSGGLDSTTCMGIAEREGYTCYPLTFDYGQRHKHEVEQAKKVAAHYEVPQHKIVDIAFLGQIGGSALTDSSIEVPDYTGSKEVPVTYVPARNMIFLSLAAAYAEVVGAEAIYIGVSSVDYSGYPDCRPEFIRSMTETINLATQAGIKEGNLKILAPLSHLSKAQTIQLGIDLNVPYHLTTSCYRGGESACGTCDSCKLRLQGFEQAGAKDPIPYM

SEQ ID NO: 35921 - protein, 215 aa, unidentified
  source 1..215: note = Amphibacillus marinus
  REGION 1..215: note = tr|A0A1H8K3Q5|A0A1H8K3Q5_9BACI 7-cyano-7-deazaguanine synthase OS=Amphibacillus marinus; OX = 872970 GN=queC PE=3 SV=1
MNNNKAIVVFSGGQDSTTCLFWALKQFNEVEVVTFDYNQRHQEEIKVAQEIADELGVKQTIMDMSLLNQLAPNALTRNDIAVTEGEDGELPSTFVPGRNLLFLSFATIYASQVGAKHIVTGVCETDFSGYPDCRDVFIKSLNVTLNLSMDTQFVIHTPLMWLDKAETWALADQLNAFEFVRDKTLTCYEGIRGSGCGECPACKLRQNGLDRFLEK

SEQ ID NO: 35922 - protein, 246 aa, unidentified
  source 1..246: note = Amphiplicatus metriothermophilus
  REGION 1..246: note = tr|A0A239PP86|A0A239PP86_9PROT 7-cyano-7-deazaguanine synthase OS=Amphiplicatus metriothermophilus OX=1519374 GN=queC PE=3 SV=1
MYALDSDKAVVLFSGGQDSAIALAWALQRFDWVETIGFDYGQRHAVELGARTALRRELTRDFSAFAARLGPDTLVDLGGLGRLSETALTRDAEIAVAENGLPTTFVPGRNLAFLVFAAALAYRRGAGALVAGMCQVDYSGYPDCREEALRAQIEAIRLGMDAAFRLETPVMHLSKAESWRLAEKIGGRRLVDLINEHSHSCYRGVRATRHEWGYGCGDCPACDLRAKGWAAYVADEGGETATGKAK

SEQ ID NO: 35923 - protein, 228 aa, Amphritea atlantica
  REGION 1..228: note = tr|A0A1H9FR16|A0A1H9FR16_9GAMM 7-cyano-7-deazaguanine synthase OS=Amphritea atlantica; OX = 355243 GN=queC PE=3 SV=1
MSTPSNNAVVLLSGGLDSATALAMAVERGFNCYVLSFDYGQRSQTELLAAKKITRDLDVKEHRVVRLHLEDFGGSALTDNSIDVPDHEEEGIPVTYVPARNTVFMSLALAWAEVLHAQHIFIGVNAVDYSGYPDCRPEYIAAFEQMANLATKTGVEGERLTIETPLIDLTKAEIIREGTRLGVNYGLTVSCYQADDDGRACGVCDSCRLRAKGFEDAGVADPTRYITA

SEQ ID NO: 35924 - protein, 227 aa, Amphritea balenae
  REGION 1..227: note = tr|A0A3P1SIK5|A0A3P1SIK5_9GAMM 7-cyano-7-deazaguanine synthase OS=Amphritea balenae; OX = 452629 GN=queC PE=3 SV=1
MSTPSNNAVVLLSGGLDSATALAMAVERGFNCYVLSFDYGQLSQTELNAARKIAAQLDVKEHKVVRLNLEDFGGSALTDDSIEMPETEEEGIPVTYVPARNTVFMSLALAWAEVLHAQHVFIGVNAVDYSGYPDCRPEYIAAFETMANLATKTGVEGERLTIETPLIDLTKAEIIQAGTQLGVDYGLTVSCYQADDEGRACRVCDSCRLRAKGFADAGVADPTLYRD

SEQ ID NO: 35925 - protein, 231 aa, Amphritea sp.
  REGION 1..231: note = tr|A0A430KQ68|A0A430KQ68_9GAMM 7-cyano-7-deazaguanine synthase OS=Amphritea sp. MCCC 1K03512 OX=2490544 GN=queC PE=3 SV=1
MTMSTSSNNAVVLLSGGLDSATALAMAVEHGYNCYVLSFDYGQRSQTELTAAKQIAANLDVKEHRVVRLNLEDFGGSALTDNDIDVPDHEEEGIPVTYVPARNTVFMSLALAWAEVLHAQHIFIGVNAVDYSGYPDCRPEYIAAFEHMANLATKTGVEGERLTIETPLIDLTKAQIIQEGTRLGVDYGLTVSCYQADDDGRACGVCDSCRLRAKGFEDAGVVDPTRYVQGA

SEQ ID NO: 35926 - protein, 235 aa, Amycolatopsis alba
  REGION 1..235: note = tr|A0A229RCF1|A0A229RCF1_9PSEU 7-cyano-7-deazaguanine synthase OS=Amycolatopsis alba DSM 44262 OX=1125972 GN=queC PE=3 SV=1
MVPIGSPAHRHPRHAIVIASGGLDSTVLAYWLAQRGAELTLLSFDYGQRHRVELEHAAEIARLLDCPHEIVDLAMLGRLLAGSALTDADVQVPDGHYTDESMRATIVPNRNAIMLDIAVSLAVVRNADVVAFGAHAGDHTVYPDCRPEFVKRYAWSARVANDGLLDDDFEILAPFITQSKTDIVRIGAAFRVPFEKTWSCYRGGTTHCGTCGTCTERKEAFQQNGIPDPTTYGSA

SEQ ID NO: 35927 - protein, 757 aa, unidentified
  source 1..757: note = Amycolatopsis albispora
  REGION 1..757: note = tr|A0A344LH82|A0A344LH82_9PSEU Condensation domain-containing protein OS=Amycolatopsis albispora; OX = 1804986 GN=A4R43_37235 PE=4 SV=1
MTEPKLLSTEPAQAEVIEQEVEAALRRHGGVADCAVVFAGAGESARRNCVRCGITGKYPGLTFDDAGVCSLCVLYEENREQIDAYWGDLSELAPKLRAKAEAAGSEYDCLLLFSGGKDSTYVLYRLVDLGLRVMTFTFDNGFISTTALRNVEEVTGELGIEHVTKTRADQNKIFLLSLQEHKSVCNGCFRSLLDLSTELAHHRGIPSIVTGLSRGQIMDERLSWFHQQGIFDRDEIEEKLALGRRVYHQAGGDGAEAAAVDAVEVVDFYRYSEVTKDEIRALLKSRSKIWAHPDDTGFCSSNCLINDVGVYVHNAERGFHNYEAPTRWEVRLGHLAVAEADEELQGPVNSTRVKRMLAKIGYPDPAEHPHLGARMTAYYVQGSSTEEAVRAAVASVLPEGLVPERWVAVSEIPRKAGVVDRSALKAPVATRFGRGNEDSSHPLTPSQLRVTERTPLAEQARALLVTLPGAVDTAKVKKIVLQLLMQHDTMRMKFTKDEHGWRQQPIGAGGSLPVVRLDLSAVSPEQEPALLKRAVAKLRARLDPAEGRVLQVTALERGSRPAGLLLVLHELAADTASWRLILEDVVTACRQLGAGEPVELARSEAFPGTTPIEPPPAATDPGPAGAALGVLADVLPAWLGQDSVVVEVADHTAPHHRAGRVVGRVSDVDFWRIRPDRIEPADGPADIRYDHFGDVTTLLPPGSPVRVSDLPEVDFTELPGEGPHRISITGAVRGGKLRLSWRGAPEEVVQRATDRLA

SEQ ID NO: 35928 - protein, 237 aa, unidentified
  source 1..237: note = Amycolatopsis albispora
  REGION 1..237: note = tr|A0A344LDJ4|A0A344LDJ4_9PSEU 7-cyano-7-deazaguanine synthase OS=Amycolatopsis albispora; OX = 1804986 GN=queC PE=3 SV=1
MVSMSTTQAEHRHPEHVVVIASGGLDSTVLAYWLAARHSRLTLLSFDYGQRHRIELDHAAEIARLLDSPHRIIDLTSLGTLLTGCALTDTSVAVPDGHYTDESMAATVVPNRNAIMLDIAVSVATSVRADAVAFGAHAGDHAIYPDCRPEFVERFARSVQAANEGLLVPDFQVLAPFLTLSKTDVVRVGEALEVPFARTWSCYRGQDVHCGTCGTCTERREAFRGNDIIDPTVYRAA

SEQ ID NO: 35929 - protein, 233 aa, unidentified
  source 1..233: note = Amycolatopsis cihanbeyliensis
  REGION 1..233: note = tr|A0A542DPQ7|A0A542DPQ7_9PSEU 7-cyano-7-deazaguanine synthase OS=Amycolatopsis cihanbeyliensis OX=1128664 GN=FB471_4913 PE=3 SV=1
MSAKEILLYSAGLDSFPAWHYLGKPEALFFDIGQRYCSQEYRAIETLRRRWDITLTTSRELNLTAWERPDGIIPLRNLYFAMLASHRADVIWCIGVKGDHTADKNPEAFAQMSTFLSTYAGREIRIDSPFWDMTKTEIVRWYLDQGLPVEDLLNTFSCLNPGTSPFHCGRCSACLRRWISLVNNGITDAKFQTNPWEWDEVQSYYLTAMHDGTYPDHRAEEFFTALSTVGVDA

SEQ ID NO: 35930 - protein, 220 aa, Amycolatopsis coloradensis
  REGION 1..220: note = tr|A0A1R0L1E8|A0A1R0L1E8_9PSEU 7-cyano-7-deazaguanine synthase OS=Amycolatopsis coloradensis OX=76021 GN=queC PE=3 SV=1
MVIASGGLDSTVLAYWLAQRGAELTLLSFDYGQRHRVELEHAAEIARLLDCPHEIVDLAMLGRLLAGSALTDADVPVPDGHYSDESMRATIVPNRNAIMLDIAVSLAVVRKADVVAFGAHAGDHAVYPDCRPEFVKRYAWSARVANDGLLDDDFEILAPFITQSKTDIVRLGAAFRVPFEKTWSCYRGGTTHCGTCGTCIERKEAFQQNGIPDPTSYGSA

SEQ ID NO: 35931 - protein, 235 aa, Amycolatopsis decaplanina
  REGION 1..235: note = tr|M2YJW3|M2YJW3_9PSEU 7-cyano-7-deazaguanine synthase OS=Amycolatopsis decaplanina DSM 44594 OX=1284240; GN = queC PE=3 SV=1
MSARELVAVVLSGGMDSTTVAAHYHHDGHPLLMITVDYGQRHRKEIDSAAAVARHYSAEHVVVDLRSVGSALTGSALTDDTVAVPDGHYAEATMKATIVPNRNAILANVAVGIALSHRAAVLALGTHAGDHFIYPDCRPAFIDALSTLVEVANEGMNPPRVEAPFLRWSKSDIARHGTMLGAPMELTWSCYKGGDRHCGVCGTCYERREAFRDADVPDPTAYLDNTTEFPAPAAL

SEQ ID NO: 35932 - protein, 240 aa, Amycolatopsis japonica
  REGION 1..240: note = tr|A0A075UT05|A0A075UT05_9PSEU 7-cyano-7-deazaguanine synthase OS=Amycolatopsis japonica; OX = 208439 GN=queC PE=3 SV=1
MRDVVIVPIGSPAHRHPRHAIVIASGGLDSTVLAYWLAQRGAELTLLSFDYGQRHRVELEYAAEIARLLDCPHEIVDLAMLGRLLNGSALTDADVPVPDGHYTDESMRATIVPNRNAIMLDIAVSLAVVRNADVVAFGAHAGDHAVYPDCRPEFVKRYAWSARVANDGLLNDDFEILAPFITQSKTDIVRIGAAFRVPFEKTWSCYRGGTTHCGMCGTCTERKEAFQQNGIPDPTNYGSA

SEQ ID NO: 35933 - protein, 219 aa, Amycolatopsis keratiniphila
  REGION 1..219: note = tr|A0A1H2JBU8|A0A1H2JBU8_9PSEU 7-cyano-7-deazaguanine synthase OS=Amycolatopsis keratiniphila OX=129921 GN=queC PE=3 SV=1
MIASGGLDSTVLAYWLAQRGAELTLLSFDYGQRHRIELEYAAEIARLLDCPHEIVDLAMLGRLLAGSALTDADVPVPDGHYTDESMRTTIVPNRNAIMLDIAVSLAVVRNADVVAFGAHAGDHAVYPDCRPEFVKRYAWSARVANDGLLDDDFEILAPFITQSKTDIVRIGAAFRVPFEKTWSCYRGGTTHCGMCGTCTERKEAFQQNGIPDPTNYGSA

SEQ ID NO: 35934 - protein, 237 aa, Amycolatopsis marina
  REGION 1..237: note = tr|A0A1I1BR88|A0A1I1BR88_9PSEU 7-cyano-7-deazaguanine synthase OS=Amycolatopsis marina; OX = 490629 GN=queC PE=3 SV=1
MNTKRKAVVLLSGGLDSATVLAIARAEGYECYALSFRYGQRHEVELAAAGRVAEAGGAAAHVVADIDLRLFGGSALTADIAVPHHDRVEDLDISEIPVTYVPARNTIFLSFALAWAETLEASDVFIGVNALDYSGYPDCRAEYISAYETMANLATKAGVEGRQQLRIHTPLIELTKGQTIERGLALGVDYALTHSCYDPTEDGRACGSCDSCLLRSRGFAEVGLTDPALATSAGAAR

SEQ ID NO: 35935 - protein, 234 aa, Amycolatopsis niigatensis
  REGION 1..234: note = tr|A0A2N3X169|A0A2N3X169_9PSEU 7-cyano-7-deazaguanine synthase OS=Amycolatopsis niigatensis OX=369932 GN=queC PE=3 SV=1
MPIGTPAHRHPRHAIVIASGGLDSTVLAYWLAARGAELTLLSFDYGQRHRVELEYAAEIARLLNCPHETVELSMLGRLLVGSALTDTDVAVPDGYYTDESMRATVVPNRNAIMLDIAVSVAVARKADVVAFGAHAGDHAVYPDCRPEFVERFTRSVRTANEGLLVDDFEILAPFLTQSKTDIVRIGTALDVPFERTWSCYRGEATHCGTCGTCTERKEAFQQNGITDPTSYRCA

SEQ ID NO: 35936 - protein, 234 aa, Amycolatopsis orientalis
  REGION 1..234: note = tr|A0A193CD21|A0A193CD21_AMYOR 7-cyano-7-deazaguanine synthase OS=Amycolatopsis orientalis OX=31958 GN=queC PE=3 SV=1
MPIGSSTHRHPRHAIVIASGGLDSTVLAYWLAARGARLTLLSFDYGQRHRVELEYAAQIARLLDCPHEVVDLAMLGRLLAGSALTDADVPVPDGHYTDESMRATIVPNRNAIMLDIAVSLALVRNSDAVAFGAHAGDHAVYPDCRPEFVERFTRSTRIANEGLLNDDFEILAPFITQRKADIVRIGTAFSVPFEKTWSCYRGRTTHCGTCGTCTERKEAFQQNDIPDPTKYGSV

SEQ ID NO: 35937 - protein, 269 aa, Amycolatopsis rifamycinica
  REGION 1..269: note = tr|A0A066UE10|A0A066UE10_9PSEU ExsB family transcriptional regulator OS=Amycolatopsis rifamycinica; OX = 287986 GN=DV20_09420 PE=4 SV=1
MNGTRLVAHLAGIGRLAVAFSGGADSALVLAAAVRALGPADVLAVTANSASLAAVELAAAREIAADLGVRHLTPPTGELAEPGYTANGRQRCYFCKTTVLTAIAEVAVDHGFPALATGTNADDAVDPFRPGIRAGDELGVHTPLRTLRLSKEDVRAIARHWGLDWADKPAAPCLASRVRYGVPITTATLARVEQAESAVRAYLDDRSLPSRDVRVRDLGGTARIELDAAVAAEVRDDPRLVDAVRARGFAEAAVAPFRSGGLNHESTAG

SEQ ID NO: 35938 - protein, 237 aa, Amycolatopsis rubida
  REGION 1..237: note = tr|A0A1I5WK75|A0A1I5WK75_9PSEU 7-cyano-7-deazaguanine synthase (Queuosine biosynthesis); OS = Amycolatopsis rubida OX=112413 GN=SAMN05421854_109277; PE = 4 SV=1
MTEPRIPEVLLFSAGLDSYPAWHYLGRPPGLYFDLGHRYASQERAAVAALSDAAGIEIEISDELRLGAWEAEDAIIPLRNVHLAMLASNRAEMVWCIGVKGDHTLDKSRDAFADMGRFIARFSEKPTRVDSPFWDMTKTDIIAWYLAQGLPVEHLLLTFSCSRTDGSTVHCGRCSSCLRRWTSLVNNGVEAEFEHQPWTWDRVREFYIPAMRGGRYPDHRAHEFFAALATVGAAVAS

SEQ ID NO: 35939 - protein, 448 aa, Amycolatopsis rubida
  REGION 1..448: note = tr|A0A1I5ZB37|A0A1I5ZB37_9PSEU 7-cyano-7-deazaguanine synthase (Queuosine biosynthesis); OS = Amycolatopsis rubida OX=112413 GN=SAMN05421854_114169; PE = 4 SV=1
MSAVSRSVIAFRSSSDRAARRIEFGVDARLDGQGVPDVLSRQLDPLAADLLEVAAAVYAVDRSVVRPRYAGFERGENWARQIDLTIPVRCRERWESVRTDLAELLAWLTDDEWSVSFSESDRDRLTGGQGYLVSTLPDDIEPVLFSGGLDSSAGLALRLGGPPLLPVSVRTNNDMAGVQERVLSRLRGVSREVLPAASFRVNLTQSRTRAPGAKQENSQRSRGLLFLAAGIAVAITLGKGRLWFLENGIGAINLPYLRSQVGSQATRSAHPRTVQAMARLAGTLTGQDFAVETPLLGLTKAEAVSAVPPEYEHAIACSVSCDTGFASRISGHPPCGTCTSCLLRRQAVTASRYPKLDEGKRFRRIPDRTTPELAAMLWQASRIESRLAEQDPWSGFVEEFPEIAGAAEFVPRDRLLRLFGAYVREWPKVLAPMDVPVGDWFSGQELAS

SEQ ID NO: 35940 - protein, 476 aa, Amycolatopsis saalfeldensis
  REGION 1..476: note = tr|A0A1H8Y8F8|A0A1H8Y8F8_9PSEU 7-cyano-7-deazaguanine synthase OS=Amycolatopsis saalfeldensis OX=394193 GN=SAMN04489732_11214 PE=3 SV=1
MCFIGGGIVSGQVSDSADSELVLRRLMQLGASRGSDGAGVAMLGLHGSSFARDLAGPLAVAERIQVRSGQTVVLMNSRLEPTSEHVPDITAEQLQPYQYGGTTIVHNGIVANDHELRARYGIEQSNLATRIDSGIIPNLLVRGGSSPREQLVNFADEVVGSYALAVHNVAQPEMLTLACSFKPLWMAFSYGLGSMFFASESGQLRAALAGIDDTAEVTRLEPYSGAVVDATRVLDSFSLDRRRSGGPALCVCSGGMDSTTAAALVAEAGQKLVFCNFQYGCRAEVRERRAVEEIAEFYGAEAIFPDLRWLGELGGSTLTSEIDHIADGDEGVETAHEWVPARNLVLIAHAVALCERYGFGSIVLGTNEQEGSVFPDNELEFIETLSRAVNIGSVDRITIASPVGRMSKRDIVRTALQLNVPLHLTWSCYRSGELPCGSCGSCLQRRIAFHQLGLDDPRAYATPVPASILARSGRPA

SEQ ID NO: 35941 - protein, 430 aa, Amycolatopsis sp.
  REGION 1..430: note = tr|A0A5C4LYF3|A0A5C4LYF3_9PSEU Uncharacterized protein OS=Amycolatopsis sp. SYSUP0005 OX=2547244; GN = FG385_20430 PE=4 SV=1
MTRLLLATNSETAQDGSGYDEVFLWNDSSRSSFTGSLEPSLSALGPIGEVNSDFVRVALGVFAADRSVRRKGRGADWNARDLHLTVQIADPGRWQTKSQELTELISFLTGDRWSLDFVAAPASIVTPLPVDDASFVQTVLLSGGADSAAGALYSALQLQPGETQALVSHFSSTAISPFQKSLADSIAQLAPRQTSIHFQVNLNRGSKRLDRTNFRNEPSSRSRSLLFLALGLAVASRTSSPLLIPENGFASLNPPLGPERRGALSTRTTHPRFLHDLEKLLAALGAHSRIENPFQNLTKGQMFALIADQTNADTASRYLSATNSCSHTDAHYEGAPPGSSCGVCFGCIVRRAAFKAAGLKDRTTYLSEDPDGSYKDFVQKKSIEAAVADFCQDEVKPRTVMAMSLSANYRASDALDLCRRGAAELREYIQ

SEQ ID NO: 35942 - protein, 448 aa, Amycolatopsis sp.
  REGION 1..448: note = tr|A0A178X6F9|A0A178X6F9_9PSEU 7-cyano-7-deazaguanine synthase OS=Amycolatopsis sp. M39; OX = 1825094 GN=queC PE=4 SV=1
MSAVSRSVIAFRSSSDRAARRIEFGVDARLDGQGVPDVLSRQLDPLAADLLEVAAAVYAVDRSVVRPRYAGFERGENWARQIDLTIPVRCRERWESVRTDLAELLAWLTDDEWSVSFSESDRDRLTGGQGYLVSTLPDDIEPVLFSGGLDSSAGLALRLGGPPLLPVSVRTNNDMAGVQERVLSRLRGVSREVLPAASFRVNLTQSRTRAPGAKQENSQRSRGLLFLAAGIAVAITLGKGRLWFLENGIGAINLPYLRSQVGSQATRSAHPRTVQAMARLAGTLTGQDFAVETPLLGLTKAEAVSAVPPEYEHAIACSVSCDTGFASRISGHPPCGTCTSCLLRRQAVTASRYPKLDEGKRFRRIPDRTTPELAAMLWQASRIESRLAEQDPWSGFVEEFPEIAGAAEFVPRDRLLRLFGAYVREWPKVLASMDVPVGDWFSGQELAS

SEQ ID NO: 35943 - protein, 236 aa, Amycolatopsis sulphurea
  REGION 1..236: note = tr|A0A2A9FIC3|A0A2A9FIC3_9PSEU 7-cyano-7-deazaguanine synthase OS=Amycolatopsis sulphurea; OX = 76022 GN=queC PE=3 SV=1
MPIGTPAHRHPRHAIVIASGGLDSTVLAYWLAARGAKLTLLSFDYGQRHRVELEHAADIASLLGCPQKTIELATLGRLLAGSALTDTVVPVPDGHYTDESMRATIVPNRNAIILDIAVAVAIVSKADVVAFGAHAGDHAIYPDCRPEFVERFTRTVRAANEGLLASDFEVLAPFLAHSKTDIVRIGAALGVPFERTWSCYRGQAMHCGTCGTCIERKEAFESNGLPDPTTYRNACA

SEQ ID NO: 35944 - protein, 232 aa, Amycolatopsis xylanica
  REGION 1..232: note = tr|A0A1H3PBZ2|A0A1H3PBZ2_9PSEU 7-cyano-7-deazaguanine synthase OS=Amycolatopsis xylanica; OX = 589385 GN=queC PE=3 SV=1
MSKPAIVLLSGGLDSTTTLAIAKDQGFAPYVLSFRYGQRHSVELTAAQRVAEHQGVERHIIADIDLRVFGGSALTDDIEVLKGRTEAEMNEGIPSSYVPARNTIFLSFALAYAEVTGARDIFTGVTAVDYSGYPDCRPEYLAAYETMANLATKSAVEGESPIKVHAPLLRLSKADIIRTGTRLGVDYSLTSSCYDPDDEGRACGQCDTCVLRLKGFTEAGVPDPVRYQGVSA

SEQ ID NO: 35945 - protein, 235 aa, Anabaena cylindrica
  REGION 1..235: note = tr|K9ZLI9|K9ZLI9_ANACC 7-cyano-7-deazaguanine synthase OS=Anabaena cylindrica (strain ATCC 27899 / PCC 7122) OX=272123 GN=queC PE=3 SV=1
MGKPKLSSEMKAVILLSGGLDSSTVLYQARADGCECYVISFDYQQRHQRELKSALLIAQAVGVVKHQVVNFDLRQWGGSALTDHAIALPQERSLDEMSQNIPVTYVPARNTIFLSFALAYAEAIAAQRVYIGVNALDYSGYPDCRPDYIQAMQEVFRLGTKQGLEGQPINIVAPLINLKKTEIIQLGNQLGVPWELTWSCYAGGEVACGVCDSCRLRLAAFAELGLKDLVPYAKY

SEQ ID NO: 35946 - protein, 224 aa, Anabaena sp.
  REGION 1..224: note = tr|A0A1B7VMZ7|A0A1B7VMZ7_9NOST 7-cyano-7-deazaguanine synthase OS=Anabaena sp. WA113; OX = 1710889 GN=queC PE=3 SV=1
MKAVILLSGGLDSSTVLYQAKADGCECYTISCDYQQRHRKELDAALKVGKEAGTIQHQVVSFDLRQWGGSALTDDKISLPEQRSLDEMAENIPVTYVPARNTIFLSFALSYAEAIAAERVYIGVNALDYSGYPDCRPDYIQAMQEVFRLGTKQGREGQAIQVITPLINLKKTEIIQLGNQLGVPWHLTWSCYAGSDLACGVCDSCRLRLAAFAELGLTDPIDYV

SEQ ID NO: 35947 - protein, 227 aa, Anabaena sp.
  REGION 1..227: note = tr|A0A1B7VA51|A0A1B7VA51_9NOST 7-cyano-7-deazaguanine synthase OS=Anabaena sp. AL09; OX = 1710891 GN=queC PE=3 SV=1
MKAVILLSGGLDSSTVLYKAKADGCECYAISFDYQQRHRKELNSALMIAKAAGVIQHQVVNFDLGQWGGSALTDHKIDVPKGRSLAEMADNIPVTYVPARNTIFLSFALSYAEAIAAERVYIGVNILDYSGYPDCRPDYIEAMQEVFRLGTKQGREGEAMKIIAPLIDLKKTEIIQLGNQLGVPWDLTWSCYAGGESACGVCDSCQLRLAAFAELGLKDPVDYSEVG

SEQ ID NO: 35948 - protein, 224 aa, Anabaenopsis circularis
  REGION 1..224: note = tr|A0A1Z4GMS7|A0A1Z4GMS7_9CYAN 7-cyano-7-deazaguanine synthase OS=Anabaenopsis circularis NIES-21 OX=1085406 GN=queC PE=3 SV=1
MKAVILLSGGLDSSTVLYQAKADGCDCYAISFDYQQRHRRELNSARHVAQTAQVVEHQVVNFDLRQWGGSALTDDKIDLPEARSLAEMSQNIPVTYVPARNTIFLSFALGYAEAIAAERVYIGVNALDYSGYPDCRPDYIQAMQEVFRLGTKQGREGNPTAIVAPLVNLKKTEIIQLGNTLGVPWDLTWSCYSGGDVACGVCDSCRLRLAAFDELGLTDPVPYA

SEQ ID NO: 35949 - protein, 221 aa, Anaerobacillus alkalidiazotrophicus
  REGION 1..221: note = tr|A0A1S2MBU3|A0A1S2MBU3_9BACI 7-cyano-7-deazaguanine synthase OS=Anaerobacillus alkalidiazotrophicus OX=472963 GN=queC PE=3 SV=1
MKKALVVFSGGQDSTTCLFWALKNFDVVETVTFDYNQRHNKEIDVAKAIASDLGVENTVIDMSLLNQLTSNALTRSDIEIKEGGEGELPSTFVDGRNHLFLSFAAIMAKAKGIKNIITGVCETDFSGYPDCRDVFIKSLNVTLNLSMDYQFVIHTPLMWIDKKETWALADKLGAFEYVREKTLTCYNGIIGDGCGECPACKLRKEGLRKHLEEQKGGAANV

SEQ ID NO: 35950 - protein, 221 aa, Anaerobacillus alkalilacustris
  REGION 1..221: note = tr|A0A1S2LWU9|A0A1S2LWU9_9BACI 7-cyano-7-deazaguanine synthase OS=Anaerobacillus alkalilacustris OX=393763 GN=queC PE=3 SV=1
MKKALVVFSGGQDSTTCLFWALKNFDVVETVTFDYNQRHNKEIDVAKAIASDLGVENTVIDMSLLNQLTSNALTRSDIEIKEGGEGELPSTFVDGRNHLFLSFAAIMAKAKGIKNIITGVCETDFSGYPDCRDVFVKSLNVTLNLSMDYQFVIHTPLMWIDKKETWALADELGAFEYVREKTLTCYNGIIGDGCGECPACKLRKEGLRMYLEEQKGGAADV

SEQ ID NO: 35951 - protein, 222 aa, unidentified
  source 1..222: note = Anaerobacillus isosaccharinicus
  REGION 1..222: note = tr|A0A1S2MFV7|A0A1S2MFV7_9BACI 7-cyano-7-deazaguanine synthase OS=Anaerobacillus isosaccharinicus OX=1532552 GN=queC PE=3 SV=1
MKKALVVFSGGQDSTTCLFWALKHFDQVETVTFDYNQRHKEEIEVAKKIAHEMSVENTVIDMSLLNQLTSNALTRSDIEIKEGEDGELPTTFVDGRNHLFLSFAAIMAKAKGINHIITGVCETDFSGYPDCRDMFVKSLNVTLNLAMDYNFVIHTPLMWIDKKETWALAAELGAFDYIREKTLTCYNGIVGDGCGECPACKLRSEGLRKFLEEQGTGVSTHV

SEQ ID NO: 35952 - protein, 206 aa, unidentified
  source 1..206: note = Anaerobacillus macyae
  REGION 1..206: note = tr|A0A0J6FZA5|A0A0J6FZA5_9BACI 7-cyano-7-deazaguanine synthase OS=Anaerobacillus macyae; OX = 157733 GN=queC PE=3 SV=1
MGMAKEKGYELYPITFHYGQKHNREVEQAKKVAEYYDAPDHRIVNISFLNQIGGSALTDDSIDVPSDMDEDEIPVTYVPARNMIFLSLASAYAEVIGAEAIYIGVSAVDYSGYPDCRPEFIQSMNETVNLATKAGATGSEMKIETPLIDMTKADTVKEGLRLNVPYELTTSCYNGEEEACGECDSCRLRLKGFEEARAVDPIPYKA

SEQ ID NO: 35953 - protein, 224 aa, unidentified
  source 1..224: note = Anaerobacterium chartisolvens
  REGION 1..224: note = tr|A0A369BBC8|A0A369BBC8_9FIRM 7-cyano-7-deazaguanine synthase OS=Anaerobacterium chartisolvens OX=1297424 GN=queC PE=3 SV=1
MKKAIVLLSGGMDSTTVLYIAKAEGYEVYALSFNYGQRHKKELDCARRIADRAGVQEHIIVKTNMNAWGGSALTDDKIDVPDRDESSLDIPITYVPARNMIFLSYAASYAEAVGAQDIFIGVSEVDYSGYVDCRQEFIDAMENAINMGTVCAVEKGKRIKIQAPLVHMKKADEIKLGVSLGVDYGLTWTCYRGEEEACGTCDSCVLRLKAFEEARLRDEVRYKA

SEQ ID NO: 35954 - protein, 230 aa, unidentified
  source 1..230: note = Anaerobium acetethylicum
  REGION 1..230: note = tr|A0A1D3TN68|A0A1D3TN68_9FIRM 7-cyano-7-deazaguanine synthase OS=Anaerobium acetethylicum OX=1619234 GN=queC PE=3 SV=1
MTEKALVLFSGGVDSTTCLGMAVEKYGRENVTALSISYGQKHTKEIEASQKIADYYKVEHLYLDLAKIFEYSNCSLLNHSQKEIPKDAYAKQLEKTDGKPVSTYVPFRNGLFLSSAASIALSKGCSVIYYGAHSDDSAGNAYPDCSSVFNNAMNEAIYEGSGRQLRIEAPFVSWSKADVVRKGLDINVPYELTWSCYEGGDVPCGNCGTCIDRSLAFEKNGVADPALCGR

SEQ ID NO: 35955 - protein, 221 aa, unidentified
  source 1..221: note = Anaerobutyricum hallii
  REGION 1..221: note = tr|C0ERV2|C0ERV2_9FIRM 7-cyano-7-deazaguanine synthase OS=Anaerobutyricum hallii DSM 3353 OX=411469; GN = queC PE=3 SV=1
MQELKNKDAAVVVFSGGQDSTTCLFWALKRYKKVIALSFDYHQKHVKELECAKKICRDHEVEHHIMDMSLLNQLAPNSLTRVDIKVDESAPEEGTPNSFVDGRNLLFLSYAAVFAKQRGITDIITGVSQSDFSGYPDCRDMFIKSLNTTLCLAMDYQFDIITPLMWLDKKETWALADELGAFDIIRNETLTCYNGIIGDGCGHCPSCKLRKKGLDAYLASK

SEQ ID NO: 35956 - protein, 221 aa, unidentified; identical to SEQ ID NO: 35955
  source 1..221: note = Anaerobutyricum hallii
  REGION 1..221: note = tr|A0A173SDK3|A0A173SDK3_9FIRM 7-cyano-7-deazaguanine synthase OS=Anaerobutyricum hallii; OX = 39488 GN=queC PE=3 SV=1

SEQ ID NO: 35957 - protein, 218 aa, unidentified
  source 1..218: note = Anaerococcus nagyae
  REGION 1..218: note = tr|A0A3E2THL9|A0A3E2THL9_9FIRM 7-cyano-7-deazaguanine synthase OS=Anaerococcus nagyae; OX = 1755241 GN=queC PE=3 SV=1
MKSLVLLSGGVDSSTCLAMALDNKEEVIAISIEYGQSHGKRELQAAKDIANYYKVDHRIIDLSNIFNASKSSLNKNNNLEVSKGDYADQENINTEVEFRNGVFLTVMASLALQFDANKIYYGAHLDDSGAIYADTSEEFIDSITRTIDIGTRSKVEVVTPFRNKRKEDIVRTGLKLNLPYELTYSCYVGGDEPCGECGTCIDRKKAFLANGITDEKYF

SEQ ID NO: 35958 - protein, 231 aa, Anaeroglobus geminatus
  REGION 1..231: note = tr|G9YHD2|G9YHD2_9FIRM 7-cyano-7-deazaguanine synthase OS=Anaeroglobus geminatus F0357 OX=861450 GN=queC; PE = 3 SV=1
MRSDTVKAAVLASGGVDSTTALAQAVERYGAAKVTAVSVLYGQKHIKELEAAEKIASYYGVEHISVDAAPLFQYSRASLLQGSPEPVPKECYADQLKKTQGKAPFSTCVPFRNGIFLAAAAGIALSLGSEAVIYGAHADDAAGAAYPDCSPAFFEAMAAAVWEGSGRQIRLEAPFLAMNKAAVVEIGLRLRVPYELTWSCYEGGAEPCGQCGTCRDRAAAFAANRVSDPAR

SEQ ID NO: 35959 - protein, 250 aa, unidentified
  source 1..250: note = Anaerolineaceae bacterium
  REGION 1..250: note = tr|A0A3B9PYS9|A0A3B9PYS9_9CHLR Uncharacterized protein OS=Anaerolineaceae bacterium OX=2024896; GN = DCK95_00335 PE=4 SV=1
METNHKASKINLFWTGGWDSTYRLLEILIKEKKIVQTYYIIDPNRPSHALEMKRMDEIRKLIYKKYPSTRDQFLPTIRIELSDIQEDADIEKAFKEANEKQHLGNQYDWLARFCKQFDIDNMELCVQKLGNPALPCRFSPFFENDQKNGELVYKKSLLNEPEYVLFRRFKFPILHLTKQDMLNAARQNGWLGIMKKTWFCHQPIFGKFPCGQCDPCQQTMNERGMQNRIPLLVRLMRRRPLSKILTKFYR

SEQ ID NO: 35960 - protein, 443 aa, unidentified
  source 1..443: note = Anaerolineaceae bacterium
  REGION 1..443: note = tr|A0A2E0UU84|A0A2E0UU84_9CHLR Uncharacterized protein OS=Anaerolineaceae bacterium OX=2024896; GN = CL609_10590 PE=4 SV=1
MIWHIIAREKSDDSFTIENSQKGIPIYIDLSGVDKTIGIKSNLSSLFDSYGSFPTEVASDLLKLAMTVYSADKSAIRNQAFNKWSRYFHIYQPVSNIDLWNGIKEKLEQSLDFLTGDHWEIHFRISTEKLFGGMKEIQERIPSFSHSPSAFALMSGGLDSFAGAIDLLENTLGEVIFISHYSRGGATKTVQDRVYSLLRQKYPDRFCSLQFFVQPSEGIIEDVEPSQRSRSFLFLSIGAAVSSASHTNLPLNIFENGLLSLNVPLAANRGGGLSTRTTHPHFLSMFQEILESLGITMSIATPFRFLTKGEMLTGTKNPGVLQEGVKLTHSCSHGTYVRFKGGAFDDHCGYCLPCIIRRAATTAAGIEDVNYVVDVISNNLPANRVEGKDLYAMKIALKRLDNMTSSLYSHVRTAGPLQGTPEEISQYVDVYKRGMAEVQMLLG

SEQ ID NO: 35961 - protein, 186 aa, unidentified
  source 1..186: note = Anaerolineales bacterium
  REGION 1..186: note = tr|A0A523ZYB6|A0A523ZYB6_9CHLR Uncharacterized protein (Fragment) OS=Anaerolineales bacterium OX=2073117; GN = E3J25_11545 PE=4 SV=1
MKRCTRCILPETFPGVKFDEAGVCNYCLAFTDALQKQERLKQRLRQKFHHILEQVRGQNSHDCLMSWSGGKDSTYTLMLLKQEYDLNILAFTFDMGFTSPTAFSNMRRIAENLGVDHIIVKPRFDLLRQVFVASTARDMYPAKALDRASNICTSCMGMAKGIALRMAIEKRIPIIAYGWSPGQAPL

SEQ ID NO: 35962 - protein, 251 aa, unidentified
  source 1..251: note = Anaeromassilibacillus sp.
  REGION 1..251: note = tr|A0A1Y4EPG1|A0A1Y4EPG1_9FIRM TIGR00268 family protein OS=Anaeromassilibacillus sp. An250 OX=1965604; GN = B5F54_11915 PE=4 SV=1
MTLEQFFHAHPRAAVAFSGGTDSALLLWAAKTYGCDVHAYYMKTAFQPAFELADARRLAGELDIPMTVIETDILAVPGAAANGPDRCYHCKRQLFSALWQRARRDGHTLLLDGTNASDDEGDRPGMQALRELEVRSPLRECGLTKDEVRRLSREAGLFTWEKPAYACLATRIPTGTRITAGDLARVERAEDALSRLGFADFRVRLREDGARIQVTEAQMALARAKWEEILEQLKPDFTDVLLDQTPRQASR

SEQ ID NO: 35963 - protein, 217 aa, unidentified
  source 1..217: note = Anaeromicrobium sediminis
  REGION 1..217: note = tr|A0A267MDA7|A0A267MDA7_9CLOT 7-cyano-7-deazaguanine synthase OS=Anaeromicrobium sediminis OX=1478221 GN=queC PE=3 SV=1
MNNEKAVVVFSGGQDSTTCLFWAKEKFGDVIAISFDYNQKHKFELECAKDICKKHGIEHHILDLGLLNQLAPNSLTRVDIEVDKTAPKEGLPNSFVDGRNLLFFTFAAVFAKQRGINHIVTGVSQSDYSGYPDCRDVFIKSLNVTLNLSMDYEFEIHTPLMWIDKAATWKMADDLGVLHIVKNETLTCYNGIVGNGCGDCPACDLRKKGYLKFKEMK

SEQ ID NO: 35964 - protein, 447 aa, Anaeromyxobacter dehalogenans
  REGION 1..447: note = tr|B8JF98|B8JF98_ANAD2 PP-loop superfamily ATPase-like protein OS=Anaeromyxobacter dehalogenans (strain 2CP-1 / ATCC BAA-258) OX=455488 GN=A2cp1_1108 PE=4; SV = 1
MKSPAYRYEVDGGGRIVVSHGGGTHILTPKLTADTVERSWLAPFARPERDLIRVAAAIHSVDRLSRRIPQGTKGLERELHWQRRLHVKLAVEDPDRWAAARERVARLLAFMTDDEWNLTFASCSDHLRPQPLFTENCENAEVGLFSGGLDSIVGTYLRSRTAKKLIVVSVHGIQVRASAQQRAITMLQRASFFSVPLHWVSFDHQLRHAHPPEKSQRCRGFLFLSIGAAVARTVGASTLHTYENGIGALNPPMNLAQVGAQNTRAMHPGTLASLEGILEVVQDDPVRLEAPFLFSTKGEMCRDAREHLIPLAQASNSCDEGEHGKPDPAEHCGLCTSCLLRRSALFAALGDKDPTPYRNRTSSHDDYDVLAFEQQARRFGGMQDWSTLLRSDPSLALIASYSKRRGTAPAVVADRIRDLFGRHRAELDSFYAARRPRPKIASSEERV

SEQ ID NO: 35965 - protein, 234 aa, Anaeromyxobacter dehalogenans
  REGION 1..234: note = sp|Q2IG55|QUEC_ANADE 7-cyano-7-deazaguanine synthase; OS = Anaeromyxobacter dehalogenans (strain 2CP-C) OX=290397; GN = queC PE=3 SV=1
MAKATSEARRAVVLLSGGLDSSTCLAVARAEGLEAHCLSVDYGQRHKGELARARRIARALGAAGHRVVKVDLSAFGGSALTDAAIAVPKGRSEARMARDIPVTYVPARNTVMLSLALAHAEVIGAEQIFVGVNAIDYSGYPDCRPAFLHAFERLAKVATRAGVEGHPLRIRAPLLRLSKAGIVRLGTKLGVPYRMTLSCYDPIRGRACGRCDACSLRRKGFAEAGVQDPTQYAK

SEQ ID NO: 35966 - protein, 249 aa, Anaeromyxobacter sp.
  REGION 1..249: note = tr|A0A1F3C662|A0A1F3C662_9DELT 7-cyano-7-deazaguanine synthase OS=Anaeromyxobacter sp. RBG_16_69_14 OX=1797238 GN=queC PE=3 SV=1
MAKRVARPRAVVLLSGGLDSSTCLAVAMSELFEAHALTVNYGQRHRGEIDRARRVARALGAADHRVVRVDLFSFGGSALTDRAIAVPKGRSARAMASGIPITYVPARNTVLLALALAHAETIGAADVYVGVNAIDYSGYPDCRPAFIRAFERLARVATKAGVEGRRLRIRAPLLRLSKAGIIQLGTRLGVPYRVTLSCYDPVRGRACGRCDACELRRKGFAEAGVSDPTAYADVPSEARPASRSRELGR

SEQ ID NO: 35967 - protein, 233 aa, Anaeromyxobacter sp.
  REGION 1..233: note = sp|A7HHA2|QUEC_ANADF 7-cyano-7-deazaguanine synthase; OS = Anaeromyxobacter sp. (strain Fw109-5) OX=404589 GN=queC; PE = 3 SV=1
MAKRPTKRAVVLLSGGLDSTTCLAVARRDGFEAHCLSVDYGQRHKGELARARRLSRALGAADHRVVKVDLSAFGGSALTDRAIAVPKGRSGRRRAAEIPVTYVPARNTVLLALALAHAETLGAEDVYVGVNAIDYSGYPDCRPAFLRAFERLATVATKAGVEGRPLRIHAPLLRLTKAGIVRLGTSLGVPYRVTLSCYDPVRGRACGACDACVLRRKGFAEAGIPDPTLYVQK

SEQ ID NO: 35968 - protein, 219 aa, unidentified
  source 1..219: note = Anaerospora hongkongensis
  REGION 1..219: note = tr|A0A4R1Q1I3|A0A4R1Q1I3_9FIRM 7-cyano-7-deazaguanine synthase OS=Anaerospora hongkongensis OX=244830 GN=queC PE=3 SV=1
MAVSDGGAMVVFSGGQDSTTCLFWALERFKHVEAVTFNYNQRHSLEIDCARTIASDLNIAHTILDMSLLNQLTANALTRPAMAITPGEQGNLPSTFVDGRNLLFMSFAAILAKQKGLHHIVTGVCETDFSGYPDCRDVFIKSLNVTIDLAMEYPFVIHTPLMWLNKAQTWELADQMGRLDYIRTKTLTCYDGVMGEGCGQCPACKLRNNGLAQYQQEKQ

SEQ ID NO: 35969 - protein, 218 aa, unidentified
  source 1..218: note = Anaerosporomusa subterranea
  REGION 1..218: note = tr|A0A154BM59|A0A154BM59_ANASB 7-cyano-7-deazaguanine synthase OS=Anaerosporomusa subterranea OX=1794912 GN=queC PE=3 SV=1
MNENGAMVVFSGGQDSTTCLFWALERFKNVEAVTFDYNQRHKLEIECAKNIAKEFGVQHTILDMSLLSQLTANALTREDIAIAKGSDGELPTTFVDGRNMLFLTFAAVLAKQKNLRHIVTGVCETDFSGYPDCRDIFVKSLNVTLNLAMDYQFVVHTPLMWINKAQTWEMADVMGKLDFIREKTLTCYYGILGSGCGQCPACVLRNNGLQEYLISRGR

SEQ ID NO: 35970 - protein, 219 aa, Anaerostipes caccae
  REGION 1..219: note = tr|B0ME50|B0ME50_ANACD 7-cyano-7-deazaguanine synthase OS=Anaerostipes caccae (strain DSM 14662 / NCIMB 13811 / L1-92) OX=411490 GN=queC PE=3 SV=1
MSKPTKAVVVFSGGQDSTTCLFWAKKKYEEVIALSFDYGQKHSDELICAKEICKKYGVEHHILDMALLNQLAPNSLTRADIEVDKEAPETGTPNSFVDGRNMLFLTFAAVFAKQRDIHVLVTGVSQSDFSGYPDCRHVFITSLETTLTLAMDYEFEVITPLMWIDKKETWKMADDLGVFDVIRQETLTCYNGVRGDGCGDCPACRLRRRGMEAYLSERK

SEQ ID NO: 35971 - protein, 221 aa, unidentified
  source 1..221: note = Anaerostipes hadrus
  REGION 1..221: note = tr|A0A1Q2C421|A0A1Q2C421_ANAHA 7-cyano-7-deazaguanine synthase OS=Anaerostipes hadrus; OX = 649756 GN=queC PE=3 SV=1
MAKPNKAVVVFSGGQDSTTCLFWAKKKYDEVIALSFNYGQRHSKELECAKKICKEHGVEHHILDMGLLNQLAPNSLTRVDMEVDHEAPEEGTPNSFVDGRNMLFLTFAAVFAKQRDIHVLVTGVSQSDFSGYPDCRHVFISSLETTLTLAMDYEFEVITPLMWIDKKQTWEMADKLGVFDIVKNETLTCYNGVMGDGCGECPACKLRRHGLEEYLKVRDHK

SEQ ID NO: 35972 - protein, 221 aa, unidentified
  source 1..221: note = Anaerostipes hadrus
  REGION 1..221: note = tr|L1PSZ7|L1PSZ7_ANAHA 7-cyano-7-deazaguanine synthase OS=Anaerostipes hadrus DSM 3319 OX=649757 GN=queC; PE = 3 SV=1
MAKPNKAVVVFSGGQDSTTCLFWAKKKYDEVIALSFNYGQRHSKELECAKKICKEHGVEHHILDMGLLNQLAPNSLTRVDMEVDHEAPEEGTPNSFVDGRNMLFLTFAAVFAKQRDIHVLVTGVSQSDFSGYPDCRHVFISSLETTLTLAMDYEFEVITPLMWIDKKQTWEMADKLGVFDIVRNETLTCYNGVMGDGCGECPACKLRRHGLEEYLKVRGHK

SEQ ID NO: 35973 - protein, 220 aa, unidentified
  source 1..220: note = Anaerostipes rhamnosivorans
  REGION 1..220: note = tr|A0A4P8IE08|A0A4P8IE08_9FIRM 7-cyano-7-deazaguanine synthase OS=Anaerostipes rhamnosivorans OX=1229621 GN=queC PE=3 SV=1
MSKPTKAVVVFSGGQDSTTCLFWAKKKYEEVIALSFNYGQKHSDELVCAKEICKKHGVEHHILDMGLLNQLAPNSLTRADIEVDKEAPETGTPNSFVDGRNMLFLTFAAVFAKQRGIHVLVTGVSQSDFSGYPDCRHVFITSLETTLTLAMDYEFEVITPLMWIDKKETWKMADDLGVFDIIRQETLTCYNGVKGDGCGDCPACKLRRKGMEAYLTERRN

SEQ ID NO: 35974 - protein, 219 aa, Anaerostipes sp.
  REGION 1..219: note = tr|R6QUY9|R6QUY9_9FIRM 7-cyano-7-deazaguanine synthase OS=Anaerostipes sp. CAG:276 OX=1262699 GN=queC; PE = 3 SV=1
MSKPTKAVVVFSGGQDSTTCLFWAKKKYEEVIALSFDYGQKHSDELICAKEICKKYGVEHYILDMALLNQLAPNSLTRADIEVDKEAPETGTPNSFVDGRNMLFLTFAAVFAKQRDIHVLVTGVSQSDFSGYPDCRHVFITSLETTLTLAMDYEFEVITPLMWIDKKETWKMADDLGVFDVIRQETLTCYNGVRGDGCGDCPACRLRRRGMEAYLSERK

SEQ ID NO: 35975 - protein, 222 aa, Anaerostipes sp.
  REGION 1..222: note = tr|A0A1Q9JQ00|A0A1Q9JQ00_9FIRM 7-cyano-7-deazaguanine synthase OS=Anaerostipes sp. 494a; OX = 1261636 GN=queC PE=3 SV=1
MSKPTKAVVVFSGGQDSTTCLFWAKKKYDEVIALSFDYGQRHSLELECAKDICNKYEIEHHILNMELLNQLAPNSLTRMDMEVDHDAPEKGTPNTFVDGRNMLFLTFAAVFAKQRDIHVLVTGVSQSDFSGYPDCRHVFISSLETTLTLAMDYEFEIITPMMWIDKKETWEMADKLGVFDIIRNETLTCYNGVMGDGCGECPSCKLRKKGLDEYLKIRTKND

SEQ ID NO: 35976 - protein, 228 aa, Anaerotruncus sp.
  REGION 1..228: note = tr|A0A3A9HLR7|A0A3A9HLR7_9FIRM 7-cyano-7-deazaguanine synthase OS=Anaerotruncus sp. 1XD22-93 OX=2320082 GN=queC PE=3 SV=1
MKVLVLSSGGIDSTVCLALAVEKYGYENVLSLSVSYGQKHSNELKAARRIAQHYHVRHKELDMGMIFAGSDCTLLEGRGEIPKGTYASQLQESTGKPVSTYVPFRNGLFLAAAASVALADGCEKIYYGAHADDSAGNAYPDTSEAFHEAISRAVYEGSGKQLEIEAPFLYSHKADVVRAGMELQVPFAFTWSCYEGGEKACGKCATCMDRMNAFALNGIQDPIEYESS

SEQ ID NO: 35977 - protein, 227 aa, Anaerovibrio lipolyticus
  REGION 1..227: note = tr|A0A1M6DI35|A0A1M6DI35_9FIRM 7-cyano-7-deazaguanine synthase OS=Anaerovibrio lipolyticus DSM 3074 OX=1120997 GN=queC PE=3 SV=1
MEKAVVLLSGGLDSTVCMAVAKSKGMEVYPISFNYHQRHNIELEGAKKVAKFYGVKKHLIIETNMEEIGGSALTDSQIEVPDGDFQHGAEDIPVTYVPARNMIFLSYAMAYAEVIGADHVYIGVNAVDYSGYPDCRPEFIGSFQKTANLATKAGTADGRNIKIETPLQDLSKKEIVQLGSKLGAPLQFTHSCYKGGEKACGVCDSCKLRLRGFAEAGVVDPVEYENM

SEQ ID NO: 35978 - protein, 227 aa, Anaerovibrio lipolyticus; identical to SEQ ID NO: 35977
  REGION 1..227: note = tr|A0A0B2JP02|A0A0B2JP02_9FIRM 7-cyano-7-deazaguanine synthase OS=Anaerovibrio lipolyticus OX=82374 GN=queC PE=3 SV=1

SEQ ID NO: 35979 - protein, 227 aa, Anaerovibrio sp.
  REGION 1..227: note = tr|A0A3D4ANJ7|A0A3D4ANJ7_9FIRM 7-cyano-7-deazaguanine synthase OS=Anaerovibrio sp.; OX = 1872532 GN=queC PE=3 SV=1
MEKAVVLLSGGLDSTVCMAVAKSKGMEVYPISFNYHQRHNIELEGAKKVAKFYGVKKHLIIETNMEEIGGSALTDSKIEVPDGDFQHGADDIPVTYVPARNMIFLSYAMAYAEVIGADHVYIGVNAVDYSGYPDCRPEFIGSFQKTANLATKAGTADGRNIKIETPLQDLSKKEIVQLGSKLGAPLQFTHSCYKGGEKACGVCDSCKLRLRGFAEAGVVDPVEYENM

SEQ ID NO: 35980 - protein, 227 aa, Anaerovibrio sp.
  REGION 1..227: note = tr|A0A1X1Q4J1|A0A1X1Q4J1_9FIRM 7-cyano-7-deazaguanine synthase OS=Anaerovibrio sp. JC8; OX = 1240085 GN=queC PE=3 SV=1
MEKAVVLLSGGLDSTVCMAVAKSKGMEVYPISFNYHQRHNIELEGAKKVAEFYGVKTHLIIETNMEGIGGSALTDDNIEVPDGDFEHGAEDIPITYVPARNMIFLSYAMAYAEVIGADHVFIGVNAVDYSGYPDCRPEFIGSFQKTANLATKAGTADGRNIKIETPLQDLSKKDIVQLGSKLGAPLQFTHSCYKGGEKACGVCDSCKLRLRGFEEAGVVDPVEYENM

SEQ ID NO: 35981 - protein, 196 aa, unidentified
  source 1..196: note = Ancylomarina sp.
  REGION 1..196: note = tr|A0A4Q1JJF4|A0A4Q1JJF4_9BACT 7-cyano-7-deazaguanine synthase OS=Ancylomarina sp. SHSM-M15 OX=2501299 GN=EO244_12765 PE=3 SV=1
MKKAILLSGGMDSICLAYFLKPDIAYTIDYGQVCSDREILISQKICRILEIEHKIIRVDCNSLGSGILANRKSIDNSPSDEWWPYRNQLLVTLSLMRAIKDDIKEIHLASVKSDKFHKDGTDKFYKIINELSSYQEGNIAVKCETLEYYTHELVEKYKVPIDLLLMAHSCHISNIACGFCPGCLKQLKVKQELNIS

SEQ ID NO: 35982 - protein, 209 aa, unidentified
  source 1..209: note = Ancylomarina sp.
  REGION 1..209: note = tr|A0A425Y038|A0A425Y038_9BACT 7-cyano-7-deazaguanine synthase OS=Ancylomarina sp. A4; OX = 2283628 GN=DWB62_20110 PE=3 SV=1
MNDFKKGIILVSGGLDSTTLCYLFIKKNIEFIPLIINYGQHCFDTELKRLKSVLPNDYVERVEIIDVSQIYKYSNSKFINAGNLWEEKISADDLYIPYRNVLILTIAASFARTLDLNNVYSAFINSNHAKEIDCSNDFFNNLENLMSEYGSVKIEMPFRNFTKFEVAKLGVELGVPIGKTFSCQASPSIPCGACPNCVDRLDALKKLSE

SEQ ID NO: 35983 - protein, 222 aa, unidentified
  source 1..222: note = Andreesenia angusta
  REGION 1..222: note = tr|A0A1S1V6S0|A0A1S1V6S0_9FIRM 7-cyano-7-deazaguanine synthase OS=Andreesenia angusta; OX = 39480 GN=queC PE=3 SV=1
MKKAVILLSGGLDSTTCMAVAKAEGYELYPISFDYGQKHDRELALASKIAEHYSAAEHRVIKMQNIGGSALTDSDIEVPEYSEDGGVPVTYVPARNLLFLSYALGYAEVVGADAIFIGVSSVDYSGYPDCRPEFIDAFRKMVEVGTVAGLEGNPIEIVTPLIDLSKAETVKLGVKLGAPYEYTTSCYNGEEEACGVCDSCVLRLRGFQEAGIEDPIAYKKLT

SEQ ID NO: 35984 - protein, 234 aa, Andreprevotia lacus
  REGION 1..234: note = tr|A0A1W1XAM6|A0A1W1XAM6_9NEIS 7-cyano-7-deazaguanine synthase OS=Andreprevotia lacus DSM 23236 OX=1121001 GN=queC PE=3 SV=1
MTDLNHANGKPAVILLSGGLDSATCLAIAKNKGFTPYCLSFDYGQRHNAELKAAARVAAALGAAEHRIARIDLAAFGGSALTDASIAVPEDGVHEDEIPVTYVPARNTIMLSFALAWAEVLKADDIYIGVNAVDYSGYPDCRPEYISAFQAMGRLATKVGVEGASLTIHTPLIRLTKAEIIETGTALGVDYSLTTTCYQADDEGRACGVCDACRLRRAGFDDAGIKDPTRYRAV

SEQ ID NO: 35985 - protein, 229 aa, Aneurinibacillus aneurinilyticus
  REGION 1..229: note = tr|U1YBR0|U1YBR0_ANEAE 7-cyano-7-deazaguanine synthase OS=Aneurinibacillus aneurinilyticus ATCC 12856; OX = 649747 GN=queC PE=3 SV=1
MEKKAVVVLSGGLDSTTCMGIAKDAGYELYPLTFYYGQRHNREVEQAKKIADFYGVPAHRLVNLDFLGQIGGSALTDTNIEVPVVQANAADEEEIPATYVPARNMIFLSLAVAYAEVVGAEVIYIGVSAVDYSGYPDCRPEFIRSMNETVHLATKAGAKGTGIRIEAPLAHLSKKETIEWGLALGVPYELSTSCYQGGAEACGECDSCRLRLKGFAEAGVKDPISYQKG

SEQ ID NO: 35986 - protein, 229 aa, Aneurinibacillus danicus
  REGION 1..229: note = tr|A0A511V806|A0A511V806_9BACL 7-cyano-7-deazaguanine synthase OS=Aneurinibacillus danicus OX=267746 GN=queC PE=3 SV=1
MPKKAVVVLSGGLDSTTCMGIAQAAGFETYPLTFHYGQRHSREVEQAKKIAAFYNVPNHRIVDLDFLKQIGGSALTDERIDVPVGKKNGEESEDIPPTYVPARNLIFLSLAAAYAETIGAEVIYIGVSAVDYSGYPDCRPEFIRSMNETVGLATKAGVTGAGIRIEAPLAHLSKKETIEWGLKLGVPYELSTSCYQGGSEACGECDSCRLRLKGFEEAGAKDPIFYKKG

SEQ ID NO: 35987 - protein, 215 aa, Aneurinibacillus danicus
  REGION 1..215: note = tr|A0A511VBZ4|A0A511VBZ4_9BACL 7-cyano-7-deazaguanine synthase OS=Aneurinibacillus danicus OX=267746 GN=ADA01nite_25330 PE=3 SV=1
MEVKSMVLLFSGGVDSTTLLALCQKNQYDVFPLYINYGQRAHRLEEEAVQKLGQHYDVPVKRAVVPIPAFLNGSQMMNKEEKLPVIKDEGQAFAEEFIPHRNLFLLTLAAMYAHSLGISTIGLGIYSGSRLRYSDCTLEFLQKAQEMITISSGNSAIRIYAPFIHMDKGQITKIAADLDVPVHATVSCNMGIYRSCGVCASCIERQRVLNNVFKG

SEQ ID NO: 35988 - protein, 229 aa, Aneurinibacillus migulanus
  REGION 1..229: note = tr|A0A0K2WLT6|A0A0K2WLT6_ANEMI 7-cyano-7-deazaguanine synthase OS=Aneurinibacillus migulanus OX=47500 GN=queC PE=3 SV=1
MEKKAVVVLSGGLDSTTCMGIAKDTGYELYPLTFHYGQRHNREVEQAKKVADFYSVPAHRLVNLDFLGQIGGSALTDTNIEVPVVQANEEDEEDIPATYVPARNMIFLSLAAAYAEVVGAEAIYIGVSAVDYSGYPDCRPEFIRSMNETVQLATKAGVKGTGIRIEAPLAHLSKKETIEWGLTLGVPYELSTSCYQGGAKACGECDSCRLRLKGFAEAGAKDPISYQKG

SEQ ID NO: 35989 - protein, 229 aa, Aneurinibacillus migulanus
  REGION 1..229: note = tr|A0A0D1VI42|A0A0D1VI42_ANEMI 7-cyano-7-deazaguanine synthase OS=Aneurinibacillus migulanus OX=47500 GN=queC PE=3 SV=1
MEKKAVVVLSGGLDSTTCMGIAKDAGYELYPLTFHYGQRHNREVEQAKKVADFYSVPAHRLVNLDFLGQIGGSALTDTNIEVPVVQANAEDEEDIPATYVPARNMIFLSLAAAYAEVVGAEAIYIGVSTVDYSGYPDCRPEFIRSMNETVQLATKAGVKGTGIRIEAPLAHLSKKETIEWGLTLGVPYELSTSCYQGGAKACGECDSCRLRLKGFAEAGAKDPISYQKG

SEQ ID NO: 35990 - protein, 232 aa, unidentified
  source 1..232: note = Aneurinibacillus soli
  REGION 1..232: note = tr|A0A0U4NL61|A0A0U4NL61_9BACL 7-cyano-7-deazaguanine synthase OS=Aneurinibacillus soli; OX = 1500254 GN=queC PE=3 SV=1
MDTAKKAVVVLSGGLDSTTCMGIARDAGYVLHALTFDYGQRHSREIEQAKRIAHHFEVADHRIVKMDFLSQIGGSALTDRSIAVPTEAGTHEESGEIPATYVPARNLIFLSLAAAYAEVVGAEVIYIGVSAVDYSGYPDCRPEFIASMSETIRLATKAGATGTNLRIEAPLSHLSKKETVELGLRLGVPYELSTSCYQGEEVACGVCDSCRLRLQGFREAGAVDPIAYHNRG

SEQ ID NO: 35991 - protein, 228 aa, Aneurinibacillus sp.
  REGION 1..228: note = tr|A0A109QH58|A0A109QH58_9BACL 7-cyano-7-deazaguanine synthase OS=Aneurinibacillus sp. XH2 OX=1450761 GN=queC PE=3 SV=1
MKKAVVILSGGLDSATCMGIAKDEGYELYPITFHYGQRHSREVESAIKMSEYYDTRSHKVINLDWLRQIGGSSLTDISLDVPTSGLTDEIPNTYVPARNLIFIALATAYAEVISASALFLGVNSLDYSGYPDCRPEFIQSMSKTINLATKNGVTGMNIKIETPLINMTKAEIIKKGLELGVPYHLTTSCYQGKELACARCDSCRLRIKGFQENKIIDPIDYEKSIVWN

SEQ ID NO: 35992 - protein, 228 aa, Aneurinibacillus sp.
  REGION 1..228: note = tr|A0A0X8DA88|A0A0X8DA88_9BACL 7-cyano-7-deazaguanine synthase OS=Aneurinibacillus sp. XH2 OX=1450761 GN=queC PE=3 SV=1
MKKAVVVLSGGLDSTTCMGIARDAGYELYPLTFHYGQRHDREVEQAKKIAAFYRVPHHRIVTLDFLKQIGGSALTDETIAVPVGGVNEAGENDIPSTYVPARNLIFLSLATAYAEVVGAEVVYIGVSAVDYSGYPDCRPEFIRAMNETIGLATKAGIAGAGIRIEAPLVHLSKKETIEWGLRLGVPYELSTSCYQGGEEACGECDSCRLRLKGFADAGAKDPIPYKKR

SEQ ID NO: 35993 - protein, 228 aa, Aneurinibacillus thermoaerophilus
  REGION 1..228: note = tr|A0A1G8BL20|A0A1G8BL20_ANETH 7-cyano-7-deazaguanine synthase OS=Aneurinibacillus thermoaerophilus OX=143495 GN=queC PE=3 SV=1
MKKAVVILSGGLDSATCMGIAKDEGYELYPITFHYGQRHSREVESAIKMSEYYDKRSHKVINLDWLRQIGGSSLTDISLDVPTSGLTDEIPNTYVPARNLIFIALATAYAEVISASALFLGVNSLDYSGYPDCRPEFIQSMSKTINLATKNGVTGMNIKIETPLINMTKAEIIKKGLELGVPYHLTTSCYQGKELACARCDSCRLRIKGFQENKIIDPIDYEKSIVWN

SEQ ID NO: 35994 - protein, 228 aa, Aneurinibacillus thermoaerophilus; identical to SEQ ID NO: 35992
  REGION 1..228: note = tr|A0A1G7WYF0|A0A1G7WYF0_ANETH 7-cyano-7-deazaguanine synthase OS=Aneurinibacillus thermoaerophilus OX=143495 GN=queC PE=3 SV=1

SEQ ID NO: 35995 - protein, 220 aa, Anoxybacillus amylolyticus
  REGION 1..220: note = tr|A0A160F227|A0A160F227_9BACI 7-cyano-7-deazaguanine synthase OS=Anoxybacillus amylolyticus OX=294699 GN=queC PE=3 SV=1
MKKEKAVVVFSGGQDSTTCLFWALKQFQEVEAVTFDYNQRHRLEIEVAASIANELGVPHTVLDMSLLNQLAPNALTRSDIAIEQKEGELPSTFVDGRNLLFLSFAAVLAKQKGARHLVTGVCETDFSGYPDCRDIFIKSLNVTLNLAMDYQFVIHTPLMWLNKAETWKLADELGALDFVRTRTLTCYNGMIADGCGECPACQLRQRGLQQYMAEKGAMNE

SEQ ID NO: 35996 - protein, 223 aa, Anoxybacillus amylolyticus
  REGION 1..223: note = tr|A0A4R1G2X2|A0A4R1G2X2_9BACI 7-cyano-7-deazaguanine synthase OS=Anoxybacillus amylolyticus OX=294699 GN=queC PE=3 SV=1
MKMNEEKAVVVFSGGQDSTTCLFWAKKQFGEVEAVTFDYGQRHRREIDVAQAIADELGVRHTVLDLSLLGQLAPNALTRRDIAIEQKEGELPTTFVDGRNLLFLSFAAVFAKQRGARHIVTGVCETDFSGYPDCRDVFIKSLNVTLNLAMDYEFVIHTPLMWLTKAETWKLADELGALEFIRTKTLTCYNGIIADGCGECPACALRKRGLDEYLREKAEVESR

SEQ ID NO: 35997 - protein, 221 aa, Anoxybacillus ayderensis
  REGION 1..221: note = tr|A0A0D0HQY0|A0A0D0HQY0_9BACI 7-cyano-7-deazaguanine synthase OS=Anoxybacillus ayderensis OX=265546 GN=queC PE=3 SV=1
MKKEKAVVVFSGGQDSTTCLFWAKKHFAEVEAVTFDYNQRHRLEIDVAASIAKELDVPHTVLDMSLLNQLAPNALTRSDIAIEQKEGQLPSTFVDGRNLLFLSFAAVLAKQKGARHLVTGVCETDFSGYPDCRDVFIKSLNVTLNLAMDYDFVIHTPLMWLNKAETWKLADELHALEFVRTKTLTCYNGIIADGCGECPACVLRKRGLDQYMSEKKGAHVQ

SEQ ID NO: 35998 - protein, 221 aa, Anoxybacillus flavithermus
  REGION 1..221: note = sp|B7GLA4|QUEC_ANOFW 7-cyano-7-deazaguanine synthase; OS = Anoxybacillus flavithermus (strain DSM 21510 / WK1); OX = 491915 GN=queC PE=3 SV=1
MKKEKAVVVFSGGQDSTTCLFWAKKHFAEVEAVTFDYNQRHRLEIDVAASIAKELNVSHTVLDMSLLHQLAPNALTRSDIAIEQKEGQLPSTFVDGRNLLFLSFAAVLAKQKGARHLVTGVCETDFSGYPDCRDVFIKSLNVTLNLAMDYQFVIHTPLMWLNKAETWKLADELGALEFVRNKTLTCYNGIIADGCGECPACVLRKRGLDQYMNEKKGANVR

SEQ ID NO: 35999 - protein, 221 aa, Anoxybacillus flavithermus
  REGION 1..221: note = tr|R4FD35|R4FD35_9BACI 7-cyano-7-deazaguanine synthase OS=Anoxybacillus flavithermus NBRC 109594; OX = 1315967 GN=queC PE=3 SV=1
MKKEKAVVVFSGGQDSTTCLFWAKKHFAEVEAVTFDYNQRHRLEIDVAASIAKELNVPHTVLDMSLLNQLAPNALTRSDIAIEQKEGQLPSTFVDGRNLLFLSFAAVLAKQKGARHLVTGVCETDFSGYPDCRDVFIKSLNVTLNLAMDYEFVIHTPLMWLNKAETWKLADELGALEFVRNKTLTCYNGIIADGCGECPACVLRKRGLDQYMNEKKGANVR

SEQ ID NO: 36000 - protein, 221 aa, Anoxybacillus gonensis
  REGION 1..221: note = tr|M5QR65|M5QR65_9BACI 7-cyano-7-deazaguanine synthase OS=Anoxybacillus gonensis OX=198467 GN=queC PE=3; SV = 1
MKREKAVVVFSGGQDSTTCLFWAKKHFAEVEAVTFDYNQRHRLEIDVAASIAKELDVPHTVLDMSLLNQLAPNALTRSDIAIEQKEGQLPSTFVDGRNLLFLSFAAVLAKQKGARHLVTGVCETDFSGYPDCRDVFIKSLNVTLNLAMDYDFVIHTPLMWLNKAETWKLADELDALEFVRTKTLTCYNGIIADGCGECPACVLRKRGLDQYMSEKKGAHVQ

SEQ ID NO: 36001 - protein, 221 aa, Anoxybacillus gonensis
  REGION 1..221: note = tr|B0FSM1|B0FSM1_9BACI 7-cyano-7-deazaguanine synthase OS=Anoxybacillus gonensis OX=198467 GN=queC PE=3; SV = 1
MKKEKAVVVFSGGQDSTTCLFWAKKHFAEVEAVTFDYNQRHRLEIDVAASIAKELNVPHTVLDMSLLNQLAPNALTRSDIAIEQKEGQLPSTFVDGRNLLFLSFAAVLAKQKGARHLVTGVCETDFSGYPDCRDVFIKSLNVTLNLAMDYQFVIHTPLMWLNKAETWKLADELGALEFVRNKTLTCYNGIIADGCGECPACVLRKRGLDQYMNEKKGANVR

SEQ ID NO: 36002 - protein, 221 aa, Anoxybacillus kamchatkensis
  REGION 1..221: note = tr|A0A4S3L1M2|A0A4S3L1M2_9BACI 7-cyano-7-deazaguanine synthase OS=Anoxybacillus kamchatkensis OX=196180 GN=queC PE=3 SV=1
MKREKAVVVFSGGQDSTTCLFWAKKHFAEVEAVTFDYNQRHRLEIDVAASIAKELDVPHTVLDMSLLHQLAPNALTRSDIAIEQKEGQLPSTFVDGRNLLFLSFAAVLAKQKGARHLVTGVCETDFSGYPDCRDVFIKSLNVTLNLAMDYDFVIHTPLMWLNKAETWKLADELDALEFVRTKTLTCYNGIIADGCGECPACVLRKRGLDQYMSEKKGAHVQ

SEQ ID NO: 36003 - protein, 221 aa, Anoxybacillus kamchatkensis; identical to SEQ ID NO: 36002
  REGION 1..221: note = tr|A0A346DDC7|A0A346DDC7_9BACI 7-cyano-7-deazaguanine synthase OS=Anoxybacillus kamchatkensis G10 OX=1212546 GN=queC PE=3 SV=1

SEQ ID NO: 36004 - protein, 218 aa, Anoxybacillus pushchinoensis
  REGION 1..218: note = tr|A0A1I0U4E8|A0A1I0U4E8_9BACI 7-cyano-7-deazaguanine synthase OS=Anoxybacillus pushchinoensis OX=150248 GN=queC PE=3 SV=1
MKKEKAVVVFSGGQDSTTCLFWAKKHFAEVEAVTFDYNQRHRLEIDVAASIAKELNVPHTVLDMSLLNQLAPNALTRSDIAIEQKEGQLPSTFVDGRNLLFLSFAAVLAKQKGARHLVTGVCETDFSGYPDCRDVFIKSLNVTLNLAMDYEFVIHTPLMWLNKAETWKLADELGALEFVRDKTLTCYNGIIADGCGECPACVLRKRGFEQYMSQLPTT

SEQ ID NO: 36005 - protein, 221 aa, Anoxybacillus sp.
  REGION 1..221: note = tr|A0A167ULZ0|A0A167ULZ0_9BACI 7-cyano-7-deazaguanine synthase OS=Anoxybacillus sp. B7M1; OX = 1490057 GN=queC PE=3 SV=1
MKKEKAVVVFSGGQDSTTCLFWALRQFAEVEAVTFDYHQRHRLEIEVASDIARELGIQHTVLNMSLLNQLAPNALTRSDMAIEHQEGELPSTFVDGRNLLFLSFAAVLAKQKGARHLVTGVCETDFSGYPDCRDVFIKSLNVTLNLAMDYQFVIHTPLMWLNKAETWQLADELGALEFVQTKTLTCYNGIMADGCGECPACVLRKRGLEQYLQAKAGVEQR

SEQ ID NO: 36006 - protein, 221 aa, Anoxybacillus sp.
  REGION 1..221: note = tr|A0A094JSP0|A0A094JSP0_9BACI 7-cyano-7-deazaguanine synthase OS=Anoxybacillus sp. KU2-6(11) OX=1535751 GN=queC PE=3 SV=1
MKREKAVVVFSGGQDSTTCLFWAKKHFAEVEAVTFDYNQRHRLEIDVAASIAKELNVPHTVLDMSLLNQLAPNALTRSDIAIEQKEGQLPSTFVDGRNLLFLSFAAVLAKQKGARHLVTGVCETDFSGYPDCRDVFIKSLNVTLNLAMDYEFVIHTPLMWLNKAETWKLADELGALEFVRTKTLTCYNGIIADGCGECPACVLRKRGLDQYMNEKKGANVR

SEQ ID NO: 36007 - protein, 219 aa, unidentified
  source 1..219: note = Anoxybacillus suryakundensis
  REGION 1..219: note = tr|A0A0K6GK54|A0A0K6GK54_9BACI 7-cyano-7-deazaguanine synthase OS=Anoxybacillus suryakundensis OX=1325335 GN=queC PE=3 SV=1
MKKAVVVFSGGQDSTTCLFWAKKHFDEVEAVTFDYNQRHRLEIDVAASIAKELDVPHTVLDMSLLNQLAPNALTRSDIAIEQKEGQLPSTFVDGRNLLFLSFAAVLAKQKGARHLVTGVCETDFSGYPDCRDVFIKSLNVTLNLAMDYEFIIHTPLMWLNKAETWKLADELGALEFVRHKTLTCYNGIIADGCGECPACVLRKRGLDQYMSEKKGADVQ

SEQ ID NO: 36008 - protein, 221 aa, Anoxybacillus thermarum; identical to SEQ ID NO: 35997
  REGION 1..221: note = tr|A0A0D0QAF5|A0A0D0QAF5_9BACI 7-cyano-7-deazaguanine synthase OS=Anoxybacillus thermarum; OX = 404937 GN=queC PE=3 SV=1

SEQ ID NO: 36009 - protein, 220 aa, unidentified
  source 1..220: note = Anoxybacillus vitaminiphilus
  REGION 1..220: note = tr|A0A327YTQ8|A0A327YTQ8_9BACI 7-cyano-7-deazaguanine synthase OS=Anoxybacillus vitaminiphilus OX=581036 GN=queC PE=3 SV=1
MKNEKAVVVFSGGQDSTTCLFWALKTFKEVEAVTFNYNQRHKLEIEVAASIAKDLGIKHTVLDMSLLNQLAPNALTRSDIQIKHKEGELPSTFVDGRNLLFLSFAAVLAKQSGARHLVTGVCETDFSGYPDCRDVFIKSLNVTLNLAMDYQFVIHTPLMWLNKAETWKLADELGAFEFVRNRTLTCYNGIIADGCGECPACILRKRGLEQYLAEKERGNA

SEQ ID NO: 36010 - protein, 600 aa, Antarctobacter heliothermus
  REGION 1..600: note = tr|A0A239KWH9|A0A239KWH9_9RHOB Queuosine biosynthesis protein QueC OS=Antarctobacter heliothermus; OX = 74033 GN=SAMN04488078_107211 PE=4 SV=1
MNVHGPAKNVNLRIDYISRTMLSNLPDLLIDLLEVAAYVYCADQRLVRGSDQLSKFGESWRRSLKFSIPVRELDVWRDPEIRDALIDTLGFLSDDSYSFDFRQAETPVQPKELYFHDLIDPADEHDDVALFSGGVDSFAGAVTDLVSNGRSLTLVGHYSSTKVRSVQEGLIAELKRKGYDRCLSYIPVWVSNEGVRAREFTQRTRSFLFACLGLVVARMSGKDGFSFYENGVVSINLPLAGDVVGGRATRTTHPKVLRGIEHLFSMLLDCEIRIRTPLQWLTKKEVTEKIAAAGMADLLSQTVSCTRPRKWTEIQRHCGVCSQCIDRRFGILAAGLGQHEPSDRYMQDLLLDDRSSGDDLRMALAYVSLFKKISVTPKERFLVDFPEVVSAVGHFPGVPTSEAGDRVFELFQRHAKSVEEVISSAVREYGAALYRNELPAASLLAACYNRGHVEVAPPSNYDADTKAFMDRLSAPTLEFAFDDDHERVHFRGELVLEGANFKLVAALIEAFRSAKKGQAEVPYLLAPDLAQRLDISDQSMRQQLRRLREAIEPLNVSMGIPMDQDTFIQTKERAGYRINPQCRESSVADILVSVSSASTG

SEQ ID NO: 36011 - protein, 224 aa, Aphanizomenon flosaquae
  REGION 1..224: note = tr|A0A1B7W0R5|A0A1B7W0R5_APHFL 7-cyano-7-deazaguanine synthase OS=Aphanizomenon flos-aquae LD13 OX=1710894 GN=queC PE=3 SV=1
MKAVILLSGGLDSSTVLYQAKADGCECYTISCDYQQRHRKELDAALKVGEAAGTIQHQVVSFDLRQWGASALTDDKISLPEQRSLDEMAENIPVTYVPARNTIFLSFALSYAEAIAAERVYIGVNALDYSGYPDCRPDYIQAMQEVFRLGTKQGREGQAIQVITPLINLKKTEIIQLGNQLGVPWHLTWSCYAGSDLACGACDSCRLRLAAFAELGLTDPIDYV

SEQ ID NO: 36012 - protein, 224 aa, Aphanizomenon flosaquae
  REGION 1..224: note = tr|A0A1B7X364|A0A1B7X364_APHFL 7-cyano-7-deazaguanine synthase OS=Aphanizomenon flos-aquae WA102 OX=1710896 GN=queC PE=3 SV=1
MKAVILLSGGLDSSTVLYQAKADGCECYTISCDYQQRHRKELDAALKVGKAAGTIQHQVVSFDLRQWGGSALTDDKISLPEQRSLDEMAENIPVTYVPARNTIFLSFALSYAEAIAAERVYIGVNALDYSGYPDCRPDYIQAMQEVFRLGTKQGREGQAIQVITPLINLKKTEIIQLGNQLGVPWHLTWSCYAGSDLACGVCDSCRLRLAAFAELGLTDPIDYV

SEQ ID NO: 36013 - protein, 230 aa, unidentified
  source 1..230: note = Aphanocapsa feldmannii
  REGION 1..230: note = tr|A0A524RLW6|A0A524RLW6_9CYAN 7-cyano-7-deazaguanine synthase OS=Aphanocapsa feldmannii 277cV OX=2507553 GN=queC PE=3 SV=1
MDQPLSIALLSGGLDSATATALALERGDRVIGLSFDYGQRHRRELACAAMLKEALGLEDQLQVRVNLADWGGSALTDPSIALPSGGVVEGVIPPTYVPGRNTVFISLALSLAEARGAGTIVLGVNAVDYSGYPDCRPDYLEAFQRLADLASKAGREGRGARLWAPLLTMDKRGIVAEALRLGVPIASTWSCYSGAAEACGRCDSCRIRDRALIDGGRPDLASPWARQQLR

SEQ ID NO: 36014 - protein, 230 aa, unidentified; identical to SEQ ID NO: 36013
  source 1..230: note = Aphanocapsa feldmannii
  REGION 1..230: note = tr|A0A524RVI4|A0A524RVI4_9CYAN 7-cyano-7-deazaguanine synthase OS=Aphanocapsa feldmannii 277cI OX=2507554 GN=queC PE=3 SV=1

SEQ ID NO: 36015 - protein, 246 aa, unidentified
  source 1..246: note = Aphanothece cf.
  REGION 1..246: note = tr|A0A2T1F339|A0A2T1F339_9CHRO 7-cyano-7-deazaguanine synthase OS=Aphanothece cf. minutissima CCALA 015 OX=2107695 GN=queC PE=3 SV=1
MTRSPATPSPPPPLAIALLSGGLDSATAAALAIEAGHRVIGLSFDYGQRHRRELDAAAAVAGALALEEHHVIAVNLAAWGGSALTDPAIPVPDGGVVAGVIPSTYVPGRNTVFIALGLSLAEARGATSLVLGVNAVDYSGYPDCRPDYLAAFQTLADLATKAGREGQGARLWAPLVAWDKATIVREALRLGVPIAATWSCYSGEHLPCGRCDSCRIRDAALVAAGRADLTSAAVRAGAASRAGADR

SEQ ID NO: 36016 - protein, 737 aa, unidentified
  source 1..737: note = Aphanothece hegewaldii
  REGION 1..737: note = tr|A0A2T1M2H6|A0A2T1M2H6_9CHRO 7-cyano-7-deazaguanine synthase OS=Aphanothece hegewaldii CCALA 016 OX=2107694 GN=queC PE=3 SV=1
MSKKAVVLLSGGLDSATTAAIALKDGYDVMALSFNYGQRHNKELQASVKIAQALGIKEHYTIDVNLSGWGGSALTDSAIAIPEDGVKSDIIPITYVPGRNTVFIALALSLAEAKGCNAIFLGINAVDYSGYPDCRPDYLAAYQNLANLSSKVGVEGKAPQLIAPLIHDTKVDIVHRAIELGITITDTWSCYLGEDDPCGLCDSCRIRDKALIEAGYPEYATSVGKELYLTQNTSAKAIPTMSTLTSAKFPVLEDTRAGLPNICGFEAQISEIVKQGDPVFLHSTNLRLEDINAGFACALHMHQPTLPAGFEGALISNLQYMFEHPAQGDNHNAGVFAWCYGRMGDFIPDLINYGCNPRIMLDYSGNLLWGLRQMGRDDIINNLKRITCDPQYQPYVEWLGTMWSHAVIPSTPIPDIKLHIQAWQHYFASIFGYDALKRVKGFSPPEMHLPNHPDTLYEYIKALKECGYRWLMVQEHSIETLDGSGIPQDQKYIPNRLVAKNSHGETISITALIKTQGSDTKLVAQMQPYFEAKGRGKQTIGSKSIPSLVTQIADGENGGVMMNEFPRDFFRIYHEIRDQNGNHQGTVAVNGTEYLELIEAAGVNPEDYPTCQAVHQHKIWQRVNLDAVTPEAVENTIAELKSTDHSFNMDGASWTNDLSWVKGYENVLGPMNQFSALFHQKFDPMVAKDPTVTKHPDYHQALLHNLLLQTSCFRYWGQGIWTDYARRIYDRGAVLLR

SEQ ID NO: 36017 - protein, 232 aa, unidentified
  source 1..232: note = Aphanothece sacrum
  REGION 1..232: note = tr|A0A401IIT0|A0A401IIT0_APHSA 7-cyano-7-deazaguanine synthase OS=Aphanothece sacrum FPU1; OX = 1920663 GN=queC PE=3 SV=1
MTHQSKAVVLLSGGLDSATSAAIAAKDGYHVIALSFRYGQRHQRELDSALKIAQALDIQEHYIIDVNLAQWGGSSLTDTFIELPQTGVNAHIIPSTYVPGRNTVFIAIALSLAEAKEAQAIYLGINAVDYSGYPDCRSDYLQAYQMLANLSSKASLDGKAPQLIAPLIKDSKVDIIHRAISLKVPISDTWSCYQGDSEPCGLCDSCRIRDRALIDAGYPELATVKGQELYNL

SEQ ID NO: 36018 - protein, 240 aa, Aquabacter spiritensis
  REGION 1..240: note = tr|A0A4R3M8P7|A0A4R3M8P7_9RHIZ 7-cyano-7-deazaguanine synthase OS=Aquabacter spiritensis; OX = 933073 GN=queC PE=3 SV=1
MSEPGDDGALVLFSGGQDSTTCLAWALERFARVETVGFDYGQRHRVELERRGVLRQALTRLKGRWARQLGEDHTLSLTALSKVSDTALTRNVEIEMAEGGLPNTFVPGRNIIFLTFAAALAYRRGLRHIVGGMCETDYSGYPDCRDDTIKALQVALNLGMEKRFVLHTPLMWIDKAQTWALAETLGGAPLVEIVIEDTHTCYLGERGARHDWGYGCGTCPACRLRADGFARFHAAKGDAA

SEQ ID NO: 36019 - protein, 252 aa, Aquabacterium commune
  REGION 1..252: note = tr|A0A4R6RPE1|A0A4R6RPE1_9BURK 7-cyano-7-deazaguanine synthase OS=Aquabacterium commune; OX = 70586 GN=queC PE=3 SV=1
MLPPVAAPSLSHLDPRTALVVFSGGQDSTVCLAWALSRYARVETIGFDYGQRHQVELDCRPTVRAALSAQFPHWAARLGDDHLLDLRLLGQISDTALTEARAIEMQANGLPNTFVPGRNLLFLTFAAAVAYRRGASVLVGGMCETDFSGYPDCRDNTLKALQVAVSLGLDSPMTVETPLMWLTKAQTWALSAQLGGEALNALIAEHTHTCYLGDRSQRHAWGYGCGSCPACVLRRDGFAAFSQTVTETAAKL

SEQ ID NO: 36020 - protein, 448 aa, unidentified
  source 1..448: note = Aquabacterium olei
  REGION 1..448: note = tr|A0A2U8FWJ6|A0A2U8FWJ6_9BURK Uncharacterized protein OS=Aquabacterium olei OX=1296669 GN=DEH84_08735; PE = 4 SV=1
MTVDVFEEDSACKRGAVPCRIGRDIRFKTEALESFSTHRWDPVIYDAFLVAAAVEFCDRTLVRSSMNWGRKFILHVPVHDVHKWTDKAAHGALTEALNLLTGDDWQIVFRTRKVPVPPPAQETMKFPMNAEAVMAYSDGMDSQAVAALEGKKLNGRVVRVRIGTSERDISRQERKEMPFHAVPYKVKIAKKDGESSARSRGFKFSLISAMAGYLIDVPVAIIPESGQGALAPVLLPVGHGYEDYRNHPAFTARMERFVYALLGYRFKYKFPRLWMTKGETLREFVENCEGGSKWNKTRSCWQTSRQIGFNGTRRQCGICAACILRRLSVHAAGLKEATDVYVWESLSTKTWEAGASKDFDLFTNALRQYSVAGVLHFEHLAGLQSRSDYQLTRRLSNFELAESLGESPVSVSQKLDRLLRQHAKEWSAFTKDLGPRSFVRQWIRSSAS

SEQ ID NO: 36021 - protein, 245 aa, unidentified
  source 1..245: note = Aquabacterium olei
  REGION 1..245: note = tr|A0A2U8FVI0|A0A2U8FVI0_9BURK 7-cyano-7-deazaguanine synthase OS=Aquabacterium olei; OX = 1296669 GN=queC PE=3 SV=1
MSPLNPSDLDPRTALVVFSGGQDSTVCLAWALSRYRHVETIGFDYGQRHRVELYCRNRVRSELTTHFPGWASRLGMDHLLDLRLLGQLSDTALTETRAIEMQANGLPNTFVPGRNLLFLNFAAALAYRRGASVLVGGMCETDFSGYPDCRDNTLKAMQVAISLGLDTPMVIETPLMWLTKAQTWALADQLGGEALNALIAEHTHTCYLGERQQRHPWGYGCGRCPACELRAQGHTEWLNRATPAD

SEQ ID NO: 36022 - protein, 241 aa, Aquabacterium sp.
  REGION 1..241: note = tr|A0A480B0Z8|A0A480B0Z8_9BURK 7-cyano-7-deazaguanine synthase OS=Aquabacterium sp. W35; OX = 2315236 GN=queC PE=3 SV=1
MPAAAPDPRHALVLFSGGQDSTACLAWALDRYERVETVGFDYGQRHRIELDCRTVVRDALAAQFPHWAARLGDDHLLDLRLLGQLSDTALTSERAIAIAANGLPNTFVPGRNLLFFNFAAALAWRRGASVLVGGMCETDYSGYPDCRDNTLKALQVALSLGLDAPMVVETPLMWLSKAQTWALTDRLGGAALNALIIEHTHTCYLGERGTLHAWGHGCGQCPACALRRNGFEAWQPAGATP

SEQ ID NO: 36023 - protein, 235 aa, Aquabacterium sp.
  REGION 1..235: note = tr|A0A0A0DUH5|A0A0A0DUH5_9BURK 7-cyano-7-deazaguanine synthase OS=Aquabacterium sp. NJ1; OX = 1538295 GN=queC PE=3 SV=1
MPSDPRTALVVFSGGQDSTACLAWALSRYARVETVGFDYGQRHRVELDCRLTVRTELARTFPQWGARLGEDHLLDLALLGQISDTALTESRAIEMQANGLPNTFVPGRNLLFLNFAAALAYRRGASVLIGGMCETDYSGYPDCRDNTLKALQVAISLGLDSPMTIETPLMWLTKAQTWQLSHDLGGEALNELIIEHTHTCYLGDRQHRHAWGYGCGTCPACRLRQEGFDAFRQQG

SEQ ID NO: 36024 - protein, 620 aa, Aquamicrobium defluvii
  REGION 1..620: note = tr|A0A4V3DJW8|A0A4V3DJW8_9RHIZ 7-cyano-7-deazaguanine synthase OS=Aquamicrobium defluvii; OX = 69279 GN=DES43_13147 PE=3 SV=1
MKRFFVECGVSQPSGSDAIAMDVHGDAKNVNLRIDYISRTMLGNVPDLLIDLLELAAYIYCADQRLGRGSDKLTNFGENWRRSLHFSVPVRQLEIWQNPEVHEVLAGTLGFLSDDSYEFDFRRAETPVQPKELYFPHLIDASAEHDEVALFSGGIDSFAGVVNDVVTLGKSITLVGHYSSSKVRNVQESLIEGLSQKGFDRRISYIPVWVSNQGVSAREFTQRTRSFLFACLGLVVARMSGKDRFSFYENGVISINPPLAGDVIGGRATRTTHPKVLRGLEALFSILLDHQIEIQTPLHWLTKKEVTQKIKEADMSDMLGQTVSCTRPRIWTERQKHCGVCSQCIDRRFAVLAAGMEDHEPSSNYMRDLLLGDRSADDDLRMALSYVSFFQKVAATPKERFLVDFPEVVSALDQFPGLSPDDAGERIYNLFQRHAKAVEDVITAAISEHGARLYRNELPSGSLLATCFSRGHVEAAPAPDYDAQAKAFIDRLSSPILDFAFDEAAKRVLFHGGHHLDGANFRVVAALIENFREAKRQRADVPFFPATELADRLGVSDQSMRQQLGRLRKTLEPLTVTLGIPLDQDSFVQTKERAGYRLNPEWREVSVGDIRVKGEVTSQA

SEQ ID NO: 36025 - protein, 232 aa, Aquamicrobium sp.
  REGION 1..232: note = tr|A0A4U6BZC0|A0A4U6BZC0_9RHIZ 7-cyano-7-deazaguanine synthase OS=Aquamicrobium sp. LC103; OX = 1120658 GN=queC PE=3 SV=1
MKCLVICSGGLDSVSLAYKVAAEHELAGLVSFDYGQRHGKELQFAAACAERLNVPHETVDIRNVGRSLSGSALTDDVDVPDGHYAEASMKITVVPNRNAIMLAIAFGIAAAQKADAVATAVHGGDHFIYPDCRPGFIDAFQTMQNHALDGYADIRLYAPYVRVSKAEIVRDGARHGTPFALTWSCYKGGELHCGRCGTCVERREAFHLAGHDDPTEYQDPDYWRDAVAKGAG

SEQ ID NO: 36026 - protein, 233 aa, Aquaspirillum sp.
  REGION 1..233: note = tr|A0A1U9JRF2|A0A1U9JRF2_9NEIS 7-cyano-7-deazaguanine synthase OS=Aquaspirillum sp. LM1; OX = 1938604 GN=queC PE=3 SV=1
MSGGRALVVLSGGQDSTTCLHWALRQFDHVEAVTFDYGQRHRVELSAARHIASQAGVRHHLLPINTFAALGGNALTDASITPEAGMRTEGDSQLPNTFVPGRNLIFLTFAAALAWQQRLDHLVVGVAQTDYSGYPDCRDNTLQALERALCLGMDRPIQLHTPLMHLSKADTVRLAMQLGALPALAHSHTCYHGSVPPCGECAACQLRAKGFAEAGVADPLVLRHAGKAEPCLA

SEQ ID NO: 36027 - protein, 226 aa, Aquicella lusitana
  REGION 1..226: note = tr|A0A370G5D2|A0A370G5D2_9COXI 7-cyano-7-deazaguanine synthase OS=Aquicella lusitana; OX = 254246 GN=queC PE=3 SV=1
MQKKAIILFSGGLDSTTCLAIAQSQGYACYALSFAYGQKHHVEIERAKQIAHSFGVVTHQVFVLPLEQIRGSSLTDGDMVVPDYQDGSAIPNTYVPARNTIFLSFALAWGEVLGAHDIFMGANYLDYSGYPDCRPDYLHAFETMANLATKASVEGQQFKIHAPLLKMHKAEIIREGLRLGIDYSHTVSCYRADRMGRACGKCDSCTYRKKGFEEAKVPDPTIYYGV

SEQ ID NO: 36028 - protein, 225 aa, Aquicella siphonis
  REGION 1..225: note = tr|A0A5E4PIS6|A0A5E4PIS6_9COXI 7-cyano-7-deazaguanine synthase OS=Aquicella siphonis; OX = 254247 GN=queC PE=3 SV=1
MNKKAIVLFSGGLDSTTCLVYALEQGFSCYALSFVYGQKHHVEVEQAGKIAGQYGVKEHKILSLPLDEIRGSSLTDKNLAVRDYQASDKIPDTYVPARNTIFLSFALGWGEVLGAYDIFLGANHLDYSGYPDCRPEYLHAFEKLATLATKTGVEQDQRFKIHTPLLSLSKAEIIRKGLHLGIDYSQTISCYRADINGRACGSCDSCVYRKKGFTEAGVTDPTIYA

SEQ ID NO: 36029 - protein, 456 aa, unidentified
  source 1..456: note = Aquicoccus sp.
  REGION 1..456: note = tr|A0A4V6ENG5|A0A4V6ENG5_9RHOB Uncharacterized protein OS=Aquicoccus sp. SCR17 OX=2541728 GN=E0K89_05310; PE = 4 SV=1
MIINAPHPAISRKLSVEIVESDPKRASADHTLVLGRDIRFSTRDLESYANANWEPVVFDAMVVAAAVEYCDRSLRRSVREWARDFRLRLPVHEPDRWNTPEVLDALHDALGFLTGDRWHFTFVPRVHSEPSPRQQSLDLPPDAKATLAFSDGMDSRAVAGLVGADARQALVRVRLGTKRCDRPRRGQPFTGIPYKLGKSVPNPEPSARNRGFRFALVSGLASYICRAEQIIIPESGQGALGPVLVPVAHAYPDYRNHPAFLRRMERFLGALLGHSVEYTFPRIWHTKGQTLAAYLGLGIDHGEWKRTRSCWKGPQWSSVDGQYRQCGACAACMLRRLSVHAAGQTEAADTYIAADLSAPELEASVPATFRKANRSFREYAIAGALHLDHLADLAGEDGHPVLRRQALVLADALGMSAVQTEQNLKAMIAEHAGEWRAFVASLGDGSFLHNWVRGSR

SEQ ID NO: 36030 - protein, 218 aa, unidentified
  source 1..218: note = Aquifex aeolicus
  REGION 1..218: note = sp|O67003|QUEC_AQUAE 7-cyano-7-deazaguanine synthase; OS = Aquifex aeolicus (strain VF5) OX=224324 GN=queC PE=3; SV = 1
MKKHDGIIVLLSGGMDSATLLWLAKREFKKVYAISFDYGQRHKVELKYAKELAKLAEVEDHFIVQVPFYTSLKGSALIDESVEVPKGEYPENEPPVTTVPMRNLIFLSIASAFADNLEVNYIGIGVHALDTPYPDCRPEFITAAEAAINAGSTFVAKKKERMHVYAPFLGMSKRDIALLGKELGVPFEKTYSCYMGTEPPCGECPTCIQREEALRGIL

SEQ ID NO: 36031 - protein, 110 aa, unidentified
  source 1..110: note = Aquifex aeolicus
  REGION 1..110: note = tr|O67015|O67015_AQUAE 7-cyano-7-deazaguanine synthase OS=Aquifex aeolicus (strain VF5) OX=224324; GN = aq_848 PE=3 SV=1
MRNFILCTAGALYGVPKGINTCAIGSLGMYPFEDNKKEFFEKLSETISMSLGKEFYIETPFMGMHKHEVIKRYGKFIPLELSLTCINPVNGEPCGKCIKCKEREEALSLL

SEQ ID NO: 36032 - protein, 158 aa, Aquifex sp.
  REGION 1..158: note = tr|A0A432Q183|A0A432Q183_9AQUI 7-cyano-7-deazaguanine synthase (Fragment) OS=Aquifex sp.; OX = 313370 GN=DSY42_02460 PE=3 SV=1
HFIVQVPFYKSLKGSALIDENVEVPKEDYPENEPPITTVPMRNLTFLSIASAFADNLELNYIGIGVHALDTPYPDCRPEFIASAEAAINAGSTFVAKTKKRIHIYAPFLGMTKRDIALLGKELGVPFEKTYSCYMGTEPPCGECPTCRQREEALKGIL

SEQ ID NO: 36033 - protein, 201 aa, Aquifex sp.
  REGION 1..201: note = tr|A0A432PVE3|A0A432PVE3_9AQUI 7-cyano-7-deazaguanine synthase OS=Aquifex sp. OX=313370; GN = DSY42_08020 PE=3 SV=1
MKKEKIVVLFSGGVESTALLIHYASKNNILYPLYVRFGYSWEDEELKRAKNVLFYLKKSVKNLRNLATVKVKSLSKRLKGFPSTEKELEIPMRNLLLCSQAAIYGYRKGIFRCAIGSLGMYPFPDNKREYFDKLEELISQGLNKTFTIETPFFGMKKEEIIRLYGNLMPLHLTFSCIKPIKGKPCGKCIKCREREEALRLL

SEQ ID NO: 36034 - protein, 202 aa, unidentified
  source 1..202: note = Aquificaceae bacterium
  REGION 1..202: note = tr|A0A3D3RPY1|A0A3D3RPY1_9AQUI 7-cyano-7-deazaguanine synthase OS=Aquificaceae bacterium; OX = 2053503 GN=DIT36_03860 PE=3 SV=1
MYRENAHKIVVLFSGGVESTCLLYLYLKKGWLVYPVYMRAGYPWEPVELENAKRLWQYAKRTYKNLMPIRILFYTNPEKVKSRSHSKDLLIPLRNLNLITPASNYALLKGIKSIAIGSLGIYPFYDNNLDYMRSLQRLTGIEILTPFMGMEKHQVIAKFSKDVPLERTLSCINPKRSKGKISPCGRCEKCKEREEAFKALSL

SEQ ID NO: 36035 - protein, 216 aa, unidentified
  source 1..216: note = Aquificaceae bacterium
  REGION 1..216: note = tr|A0A350D0W9|A0A350D0W9_9AQUI 7-cyano-7-deazaguanine synthase OS=Aquificaceae bacterium; OX = 2053503 GN=queC PE=3 SV=1
MKRVIVLLSGGMDSATLLWLCKREFEEVYALSFDYGQRHKVELKYAKELARLAGVKEHIIVEVPHYRLIKGSALLEGGPQVPEGPYGEEVPPTNVPMRNLVFLAIAGSFADSYEINHIAIGVHALDTPYPDCRVEFITAMESAINSASAYVARTKRRISLYAPFLGMSKTDIARLGKELGVPFEKTYSCYMGTEPPCGVCATCLQRQEALRSIGLM

SEQ ID NO: 36036 - protein, 101 aa, unidentified
  source 1..101: note = Aquificae bacterium
  REGION 1..101: note = tr|A0A3M2ARH5|A0A3M2ARH5_9BACT 7-cyano-7-deazaguanine synthase (Fragment) OS=Aquificae bacterium OX=2202151 GN=D6699_05565 PE=3 SV=1
PYPDCRPEFISAMESAITAGSSYTAETKKRMFIYAPFLGMTKSQIAKLGIELGVPFEKTYSCYRGTEPPCGECATCLQRKQALESALKEVGGAPPPSLQGP

SEQ ID NO: 36037 - protein, 197 aa, unidentified
  source 1..197: note = Aquificae bacterium
  REGION 1..197: note = tr|A0A3M1BJU6|A0A3M1BJU6_9BACT 7-cyano-7-deazaguanine synthase OS=Aquificae bacterium; OX = 2202151 GN=D6804_07355 PE=3 SV=1
MNVHRIVVLFSGGVESTCLLYMYLREGWLVYPVYVKAGYPWEALELENGRNLWLYTMKVHRNLMPLRVVSMINPEKVNRREHNRNLFIPLRNMSLVSMAGNYALLKGIRHVAIGSLGIYPFPDNNADYMKKLQSLMNIELLTPFMGMEKHEVLKRFSEGVPLERTLSCIRPKKLMGKIVSCGKCEKCRERQEAFTYL

SEQ ID NO: 36038 - protein, 224 aa, Aquimonas voraii
  REGION 1..224: note = tr|A0A1G6ZAL7|A0A1G6ZAL7_9GAMM 7-cyano-7-deazaguanine synthase OS=Aquimonas voraii; OX = 265719 GN=queC PE=3 SV=1
MNPARAVVLLSGGMDSATVLAIARAQGYEAYALSVAYGQRHTSELAAAARLAEALGAAAHKVVNIDLRSIGGSALTDDIEVPEHGGEGIPVTYVPARNTIMLSVALGWAEVLGAQDIFCGVNAVDYSGYPDCRPEFIEAFERLGNLATKAGVEGRRLRVHAPLIDLSKADIVRRGIELGVDFSETVSCYRADAKGRACGHCDACRLRAAGFEAAGVADPTRYLG

SEQ ID NO: 36039 - protein, 203 aa, Aquisalimonas asiatica
  REGION 1..203: note = tr|A0A1H8U5D7|A0A1H8U5D7_9GAMM Queuosine biosynthesis protein QueC OS=Aquisalimonas asiatica; OX = 406100 GN=SAMN04488052_105172 PE=4 SV=1
MRRIRDAVNADESRFPGRIAELEVHDMGAMRNNPEIHDALADIRRRRHSGWQYYPLSSYIQQQGLDGIELTAQKYDSLSVILDGMLEPFETPFGASYRISGKHQGTPEHTVFSRFTFPIIDVSKREMHTQAAEHGFLPLMEETWFCHSPLKDGSQCGTCTPCIVSIRGGMGYRVPLKTRLRYRTRTPRRLFWAIRKKLRRTFG

SEQ ID NO: 36040 - protein, 229 aa, Aquisalimonas asiatica
  REGION 1..229: note = tr|A0A1H8U028|A0A1H8U028_9GAMM 7-cyano-7-deazaguanine synthase OS=Aquisalimonas asiatica; OX = 406100 GN=queC PE=3 SV=1
MSGTQRPAIILLSGGLDSATVLAMARDLGYRCHAISFDYGQRHRSELAACDAIAAQGAHEHRRVTLDLGAIGGSALTDTAIDVPETPADGIPVTYVPARNTVFLSLALGYAEVVGAFDLFIGVNAVDYSGYPDCRPDFIRAFEATANLATRAGTEGEQRFRVHAPLSDMSKADIIRHGLALGVDYSRTVSCYQADDQGRACGVCDSCRLRAAGFSEAGVTDPTRYRPGV

SEQ ID NO: 36041 - protein, 234 aa, Aquisphaera giovannonii
  REGION 1..234: note = tr|A0A5B9VY96|A0A5B9VY96_9BACT 7-cyano-7-deazaguanine synthase OS=Aquisphaera giovannonii; OX = 406548 GN=queC_1 PE=3 SV=1
MRADGARGTSAAVLLSGGLDSAVLLSEMRRGHDRIHPLYIRGGLRWEEAELAAARAFVAAIGGPGLEPLTVLEEPVRDVYGDHWSTGSGGVPGAETPDEAVYLPGRNVLLTAKAAVWCRLRGVSELALGSLGSNPFPDSTPGFYRDLESVLGRAMGGSPRLTRPFDRLSKAEVVWAGRDLPLHLTFSCLMPVAGLHCGSCNKCAERREGFRQSGVADRTPYATSNASPRVGHAG

SEQ ID NO: 36042 - protein, 236 aa, Aquisphaera giovannonii
  REGION 1..236: note = tr|A0A5B9WAB3|A0A5B9WAB3_9BACT 7-cyano-7-deazaguanine synthase OS=Aquisphaera giovannonii; OX = 406548 GN=queC_2 PE=3 SV=1
MEPERKAIVLLSGGLDSATALAEAKAAGFTPHALTISYGQRHAVEIRAARAVARSMAVARHVELEIDLRAFGGSALTSELEVPKDRPPGEMTAGIPITYVPARNTVFLSLALAWAESLGAFDIFVGVNCVDYSGYPDCRPEFLGAFEELARLATRAGVEGHDRFRVHAPLITLEKHDIIRRGIALGVDYGLTHSCYDPSPEGLACGRCDSCQIRLAAFRRLGLVDPARYVDGPVGA

SEQ ID NO: 36043 - protein, 234 aa, Aquitalea magnusonii
  REGION 1..234: note = tr|A0A0F3K8U6|A0A0F3K8U6_9NEIS 7-cyano-7-deazaguanine synthase OS=Aquitalea magnusonii; OX = 332411 GN=queC PE=3 SV=1
MTPNTTKTAEKALVVLSGGQDSTTCLYWALQKFGAANVEAVTFDYGQRHRVELDCARKIAAMAGVRQTVLPIDTFAAIGGNALTDDSITPEEGSRDDDALPNTFVPGRNLIFLTFAAAFGYTRGARHIVTGVAQTDYSGYPDCRENTLQALQLAVRLGMDSRVELHTPLMYLSKAETVTLAQQVGAMEALAWSHTCYNGAVPPCGHCASCELRAKGFAEAGVADPLVERCSKEA

SEQ ID NO: 36044 - protein, 234 aa, Aquitalea magnusonii
  REGION 1..234: note = tr|A0A3G9GFG0|A0A3G9GFG0_9NEIS 7-cyano-7-deazaguanine synthase OS=Aquitalea magnusonii; OX = 332411 GN=queC PE=3 SV=1
MTPNTTKTAEKALVVLSGGQDSTTCLYWALQKFGAANVEAVTFDYGQRHRVELDCARKIAAMAGVRQTVLPIDTFAAIGGNALTDDSITPEEGSRDDDALPNTFVPGRNLIFLTFAAAFGYTRGARHIVTGVAQTDYSGYPDCRENTLQALQLAVRLGMDSRVELHTPLMYLSKAETVTLAQQVGAMEALAWSHTCYNGAVPPCGHCASCALRAKGFAEAGVADPLIERCSKEA

SEQ ID NO: 36045 - protein, 234 aa, Aquitalea sp.
  REGION 1..234: note = tr|A0A454JM89|A0A454JM89_9NEIS 7-cyano-7-deazaguanine synthase OS=Aquitalea sp. MWU14-2217 OX=2480983 GN=queC PE=3 SV=1
MNPNSTPTAEKALVVLSGGQDSTTCLYWALQKFGAGNVEAVTFDYGQRHRVELDCARKIAAMAGVRQTVLPIDTFAAIGGNALTDDSIQPEAGSRDDDALPNTFVPGRNLIFLTFAAAFGYTRGARHIVTGVAQTDYSGYPDCRENTLQALQLAVRLGMDSRVELHTPLMYLSKAETVTLAQQVGAMEALAWSHTCYNGAVPPCGHCASCELRAKGFAEAGVADPLVERCAREA

SEQ ID NO: 36046 - protein, 234 aa, Aquitalea sp.
  REGION 1..234: note = tr|A0A3N7EGM2|A0A3N7EGM2_9NEIS 7-cyano-7-deazaguanine synthase OS=Aquitalea sp. FJL05; OX = 2153366 GN=queC PE=3 SV=1
MNPHSTPTAEKALVVLSGGQDSTTCLYWALQKFGAGNVEAVTFDYGQRHRVELDCARKIAAMAGVRQTVLPIDTFAAIGGNALTDDSIQPEEGSRDDDALPNTFVPGRNLIFLTFAAAFGYTRGARHIVTGVAQTDYSGYPDCRENTLQALQLAVRLGMDSRVELHTPLMYLSKAETVTLAQQVGAMEALAWSHTCYNGAVPPCGHCASCELRAKGFAEAGVADPLVERCAKEA

SEQ ID NO: 36047 - protein, 239 aa, unidentified
  source 1..239: note = Arboricoccus pini
  REGION 1..239: note = tr|A0A212RNJ1|A0A212RNJ1_9PROT 7-cyano-7-deazaguanine synthase OS=Arboricoccus pini; OX = 1963835 GN=queC PE=3 SV=1
MSQPSDEGALVLFSGGQDSTTCLAWALERFARVETVGFNYGQRHRIELDQRQHLRRGLQALNPLWAERLGDDHTIALDGLGQISETALTRDEAIRIEASGLPNTFVPGRNIIFLTFAAALAYRRGLRRIVGGMCETDYSGYPDCRDDAIKALQVALNIGMEKRFVLETPLMWIDKAQTWALAERLGGQALVDLIVEESHTCYLGERGASHAWGHGCGTCPACQLRAEGHGRFVAGRRQG

SEQ ID NO: 36048 - protein, 232 aa, Archangium gephyra
  REGION 1..232: note = tr|A0A2W5U4N9|A0A2W5U4N9_9DELT 7-cyano-7-deazaguanine synthase OS=Archangium gephyra; OX = 48 GN=queC PE=3 SV=1
MEQKKKAVVLLSGGLDSATCLGFARRDGFEPVCLSIDYGQRHIVELERAKAVAKANGVTDHRVVKLDLRSIGGSALTADVDVPKHDDVSDLGTGIPVTYVPARNTVFLGLALGLAEVVGSTDLYIGVNAVDYSGYPDCRPEFIRAFEQLAKIATAAGVAGANFTVHAPLSGLTKADIIRQGVAAGVDYSLTHSCYDPSPEGLACGHCDSCLLRRKGFVEAGVPDPTRYVKTP

SEQ ID NO: 36049 - protein, 234 aa, Archangium gephyra
  REGION 1..234: note = tr|A0A0G3A8J7|A0A0G3A8J7_9DELT 7-cyano-7-deazaguanine synthase OS=Archangium gephyra; OX = 48 GN=queC PE=3 SV=1
MAGNNKKKAVVLLSGGLDSTTVLAMAKADGFEPVCLAVSYGQRHSVELDRARRVTQAMGVKDFRVVTVDLRQVGGSALTADIDVPKDRPEDELSHGIPITYVPARNALFLSLALGLAEVVEASVIYIGVNAVDYSGYPDCRPEFIRAFEQMATLATKAGVEGTRFEVRAPLSGMTKADIIRAGVKLGVDYSMTHSCYDPDGEGRACGRCDSCVLRRRGFEQAGVADPTSYVKGA

SEQ ID NO: 36050 - protein, 234 aa, Archangium sp.
  REGION 1..234: note = tr|A0A1Q3HW48|A0A1Q3HW48_9DELT 7-cyano-7-deazaguanine synthase OS=Archangium sp. Cb G35; OX = 1920190 GN=queC PE=3 SV=1
MAGNSKKKAVVLLSGGLDSTTVLAMAKADGFEPVCLAVSYGQRHVVELDRARRVTQAMGVKDFRVVTVDLRQVGGSALTADIDVPKDRPESELSHGIPITYVPARNALFLSLALGLAEVVEASVIYIGVNAVDYSGYPDCRPEFIRAFEQMATLATKAGVEGTRFEVRAPLSGMTKADIIQAGVKLGVDYSMTHSCYDPDGEGRACGRCDSCVLRRRGFEQAGVADPTPYVKGA

SEQ ID NO: 36051 - protein, 198 aa, unidentified
  source 1..198: note = Archangium violaceum
  REGION 1..198: note = tr|A0A084SK21|A0A084SK21_9DELT 7-cyano-7-deazaguanine synthase OS=Archangium violaceum Cb vi76 OX=1406225 GN=Q664_38490 PE=3 SV=1
MKTALLLSGGMDSIAIAWWRRPELAITVDYGQRPALAELRAAASAAEAMGIEHLTVKADLSALGSGDMAGAEPLSLAPVTEWWPFRNQMLVTLAAMKAVAHGVQRLLIGTLKTDGLHADGRPDFVTTLDALLRLQEGGLRLEAPAISLTSAELIRTSSIPMEVLAWAHSCHVGIHACGQCRGCQKHYQTLAELGVDPY

SEQ ID NO: 36052 - protein, 234 aa, unidentified
  source 1..234: note = Archangium violaceum
  REGION 1..234: note = tr|A0A084SKM5|A0A084SKM5_9DELT 7-cyano-7-deazaguanine synthase OS=Archangium violaceum Cb vi76 OX=1406225 GN=queC PE=3 SV=1
MAGNSKKKAVVLLSGGLDSTTVLAMAKADGFEPVCLAVSYGQRHAVELERARRVTQAMGVKDFRVVTVDLRQVGGSALTADIDVPKDRPESELSHGIPITYVPARNALFLSLALGLAEVVEASVIYIGVNAVDYSGYPDCRPEFIRAFEQMATLATKAGVEGTRFEVRAPLSGMTKADIIRAGVELGVDYSMTHSCYDPDEEGRACGRCDSCVLRRRGFEQAGVVDPTLYVKGA

SEQ ID NO: 36053 - protein, 223 aa, unidentified
  source 1..223: note = Arcobacter anaerophilus
  REGION 1..223: note = tr|A0A4Q0XW65|A0A4Q0XW65_9PROT 7-cyano-7-deazaguanine synthase OS=Arcobacter anaerophilus; OX = 877500 GN=queC PE=3 SV=1
MSKKAVCILSGGMDSTLAAYIAKDEGYDIIAVHFNYGQRTQNKELESFRNICKDLEIEQKYEIDIPFFTQIGASALTDKSIDVPTQGVKPGVPITYVPFRNGIFLSIATAIAEKEEAQALFIGVVEEDSSGYPDCTDSFIKKMTSAINEGTKESTKLEIKTPLVKLMKSDIVKKALELNVPLEHTWSCYKEEEEACGVCDSCRLRLNGFKEANAVDPIPYKAN

SEQ ID NO: 36054 - protein, 223 aa, unidentified
  source 1..223: note = Arcobacter aquimarinus
  REGION 1..223: note = tr|A0A4V1LCJ9|A0A4V1LCJ9_9PROT 7-cyano-7-deazaguanine synthase OS=Arcobacter aquimarinus; OX = 1315211 GN=queC PE=3 SV=1
MNKKAICILSGGMDSTLASYMAKKDGYEIIAVHFNYGQRTENRELKAFRDICDDLKILEKYEIDIPFFTQIGASALTDKNIDIPTNGIEAGVPITYVPFRNGIFLSITAAIAEKEGATAMYIGVVQEDSSGYPDCTDDFINKMKKAINQGTKEDTHIDIVTPLVHLSKAQIVEEAIRLNVPLEHTWSCYKEEEFACGVCDSCRLRLNGFKVANQIDPIPYKGL

SEQ ID NO: 36055 - protein, 225 aa, unidentified
  source 1..225: note = Arcobacter bivalviorum
  REGION 1..225: note = tr|A0A345J046|A0A345J046_9PROT 7-cyano-7-deazaguanine synthase OS=Arcobacter bivalviorum; OX = 663364 GN=queC PE=3 SV=1
MNKTIKKAVCILSGGMDSTLASYMAKNEGYEIIAVHFNYGQRTEKRELQAFRDICADLQIKEKYEIDIPFFTQIGASALTDSSIDVPTNGVEEGVPVTYVPFRNGIFLSIASAIAEKEEANALFIGVVEEDSSGYPDCTDEFISKMTNAINQGTKESTKIEIKTPLVHLMKNEIVEKSLELNVPLEHTWSCYKEESEACGVCDSCRLRLNGFKKANATDPIKYKE

SEQ ID NO: 36056 - protein, 228 aa, Arcobacter butzleri
  REGION 1..228: note = sp|A8EWF5|QUEC_ARCB4 7-cyano-7-deazaguanine synthase; OS = Arcobacter butzleri (strain RM4018) OX=367737 GN=queC; PE = 3 SV=1
MNKISTKKAICILSGGMDSTLSSYIAKKDGFEIIAVHFNYGQRTQNRELKAFRDICNELDIKSKYEIDIPFFTQIGANALTDMSIDVPTGGLEAGVPITYVPFRNGIFLAITAAIAEKEGATAMYIGVVQEDSSGYPDCTEEFIQDMKKAINQGTKEDTKIEIITPLVHLSKAQIVQEAIKLNVPLELTWSCYKEEEEACGVCDSCRLRLNGFEQAGKKDPIKYKEFQ

SEQ ID NO: 36057 - protein, 228 aa, Arcobacter butzleri
  REGION 1..228: note = tr|A0A0G9KWV7|A0A0G9KWV7_9PROT 7-cyano-7-deazaguanine synthase OS=Arcobacter butzleri L355 OX=1447263 GN=queC PE=3 SV=1
MNKVSTKKAICILSGGMDSTLSSYIAKKDGFEIIAVHFNYGQRTQNRELKAFRDICNELDIKSKYEIDIPFFTQIGANALTDMTIDVPTGGLEAGVPITYVPFRNGIFLAITAAIAEKEGATAMYIGVVQEDSSGYPDCTEEFIQDMKKAINQGTKEDTKIEIITPLVHLSKAQIVQEAIKLNVPLELTWSCYKEEEEACGVCDSCRLRLNGFEQAGKKDPIKYKEFQ

SEQ ID NO: 36058 - protein, 223 aa, unidentified
  source 1..223: note = Arcobacter canalis
  REGION 1..223: note = tr|A0A2G1CX82|A0A2G1CX82_9PROT 7-cyano-7-deazaguanine synthase OS=Arcobacter canalis; OX = 1912871 GN=queC PE=3 SV=1
MKKRAVCILSGGMDSTLASYIAKNEGYEIIAVHFNYGQRTQDRELKAFRDICNDLKIEEKYEIDIPFFTQIGASALTDKNIDVPIGGVEAGVPITYVPFRNGIFLSIATAIAEKENASALYIGVVEEDSSGYPDCTDDFIKSITNTINTGTKEDTKLEIKTPLVHLMKNEIVLKALELNVPLNLTWSCYKEEEEACGVCDSCRLRLNGFEKANSEDKIPYKVK

SEQ ID NO: 36059 - protein, 229 aa, Arcobacter cibarius
  REGION 1..229: note = tr|A0A5J6RF62|A0A5J6RF62_9PROT 7-cyano-7-deazaguanine synthase OS=Arcobacter cibarius; OX = 255507 GN=queC PE=4 SV=1
MINNFNKKAVVILSGGMDSTLSSYIAKNSGYELIAVHFNYGQRTQERELKAFRDICEKLNVLNKYEIDIPFFTQIGASALTDKTIDVPTSGIEKGIVPITYVPFRNGIFLSIASAIAEKEEASAIYIGVVEEDSSGYPDCSDNFIQDMNKAINKGTKEDTKIRIITPLVHLSKTQIVEESIKLNVPLNLTWSCYKEEIEACGVCDSCRLRLNGFKNANAIDPIKYKEIN

SEQ ID NO: 36060 - protein, 223 aa, unidentified
  source 1..223: note = Arcobacter cloacae
  REGION 1..223: note = tr|A0A4Q0V9Q8|A0A4Q0V9Q8_9PROT 7-cyano-7-deazaguanine synthase OS=Arcobacter cloacae; OX = 1054034 GN=queC PE=3 SV=1
MNKKAICILSGGMDSTLASYIAKNDGYEIIAVHFNYGQRTQNRELKAFRDICDDLKILEKYEIDIPFFTQIGASALTDKNIDVPTNGIETGVPITYVPFRNGIFLSITAAIAEKEGATAMYIGVVQEDSSGYPDCTDDFIEKMKKAINQGTKEDTHIDIVTPLVHLSKAQIVEEAIRLNVPLEHTWSCYKEEEFACGVCDSCRLRLNGFKVANQVDPIPYKGL

SEQ ID NO: 36061 - protein, 223 aa, unidentified
  source 1..223: note = Arcobacter cloacae
  REGION 1..223: note = tr|A0A4Q0ZHM2|A0A4Q0ZHM2_9PROT 7-cyano-7-deazaguanine synthase OS=Arcobacter cloacae; OX = 1054034 GN=queC PE=3 SV=1
MNKKAICILSGGMDSTLASYIAKNDGYEIIAVHFNYGQRTENRELKAFRDICDDLKILEKYEIDIPFFTQIGASALTDKNIDVPTNGIETGVPITYVPFRNGIFLSITAAIAEKEGATAMYIGVVQEDSSGYPDCTDDFIEKMKKAINQGTKEDTHIDIVTPLVHLSKAQIVEEAIRLNVPLEHTWSCYKEEEFACGVCDSCRLRLNGFKVANQVDPIPYKGL

SEQ ID NO: 36062 - protein, 228 aa, Arcobacter cryaerophilus
  REGION 1..228: note = tr|A0A494TA33|A0A494TA33_9PROT 7-cyano-7-deazaguanine synthase OS=Arcobacter cryaerophilus D2610 OX=1032071 GN=queC PE=3 SV=1
MNQNFNKKAVVILSGGMDSTLSSYIAKNSGYELIAIHFNYGQRTQDRELKAFRDICKELNVLNKYEIDIPFFSQIGASALTDKNIDVPIDGIEKGVVPITYVPFRNGIFLSIASAIAEKENASAIYIGVVEEDSSGYPDCSDNFIQKMQNAINEGTKEDTKIEIITPLVHLSKAQIVEEAIKLNAPLELTWSCYKEEEKACGVCDSCRLRLNGFKEANQKDLIPYKES

SEQ ID NO: 36063 - protein, 443 aa, Arcobacter cryaerophilus
  REGION 1..443: note = tr|A0A5B7XE53|A0A5B7XE53_9PROT Uncharacterized protein OS=Arcobacter cryaerophilus ATCC 43158 OX=1032070; GN = AN286_10515 PE=4 SV=1
MFKVTIEELDRKDCLLTLRLNINNEYESGLIINPYDCFTSIISNPTNSSLDVLYFTSIIYAIDKVIQRVDTFDNWSRDIEVEIPVSNVSVWNSAKDILKEAIDFLTSDNWIFNFRELEDISYFERKETLSLNINVEKICLFSGGLDSLAGAINLVDETDNILLISHVDGHGAPSTLHSELLSEIRNEYSTKNIRQASFHVYTEDEIKHEGTTRGRSILFHGIALFHAINLNINEIVTPENGVISINLPLTPSRTCSNSTKTMHPYFIKKFEEALSLLGHNIQINNPYLFKTKGEMLVENRNTDLISKLATKTLSCSHGGGHTATWYNRNSLNCGYCIPCTIRRASIHKFNNTLDRCNDYGHRLKNEDIKISSHEKRLDLLALAYFLNKNLTRAEVKREIKLMAKIDDIEEVTDMLLRGYAEIKQYINDKADDEIKGLFSCQLA

SEQ ID NO: 36064 - protein, 228 aa, Arcobacter defluvii
  REGION 1..228: note = tr|A0A4Q0UN67|A0A4Q0UN67_9PROT 7-cyano-7-deazaguanine synthase OS=Arcobacter defluvii; OX = 873191 GN=queC PE=3 SV=1
MNNKTTKKAICILSGGMDSTLASYIAKKDGYEIIAVHFNYGQRTQNRELKAFRDICDDLGILEKYEIDIPFFTQIGASALTDKSIDVPTNGLEAGVPITYVPFRNGIFLSITAAIAEKEKATAMYIGVVQEDSSGYPDCTEEFINDISKAINQGTREETSIEIKTPLVHLSKAQIVEEALKLNVPLIHTWSCYKEEDEACGVCDSCRLRLNGFNLANQIDPITYKVNL

SEQ ID NO: 36065 - protein, 224 aa, unidentified
  source 1..224: note = Arcobacter ebronensis
  REGION 1..224: note = tr|A0A4Q0YF91|A0A4Q0YF91_9PROT 7-cyano-7-deazaguanine synthase OS=Arcobacter ebronensis; OX = 1462615 GN=queC PE=3 SV=1
MSRKKAVCILSGGMDSSLSSYIAKKEDGYDIIAVHFNYGQRTEKRELEAFRNICEDLDIKEKYEIDIPFFTQIGASALTDKTIEVPTQGVKPGVPITYVPFRNGIFLSIATAIAEKEEAEAIFIGVVEEDSSGYPDCTDSFIEKMTSAINQGTKESTKIKIKTPLVKLMKRDIVKRALELKVPLEHTWSCYKEEEEACGVCDSCRLRLNGFKEANAIDPIPYKD

SEQ ID NO: 36066 - protein, 224 aa, unidentified
  source 1..224: note = Arcobacter ebronensis
  REGION 1..224: note = tr|A0A4Q1AM02|A0A4Q1AM02_9PROT 7-cyano-7-deazaguanine synthase OS=Arcobacter ebronensis; OX = 1462615 GN=queC PE=3 SV=1
MSRKKAVCILSGGMDSSLSSYIAKKEDGYDIIAVHFNYGQRTEKRELKAFRNICEDLDIKEKYEIDIPFFTQIGASALTDKTIEVPTQGVKPGVPITYVPFRNGIFLSIATAIAEKEEAEAIFIGVVEEDSSGYPDCTDSFIEKMTSAINQGTKESTKIKIETPLVKLMKRDIVKRALELNVPLEHTWSCYKEEEEACGVCDSCRLRLNGFKEANAIDPIPYKD

SEQ ID NO: 36067 - protein, 226 aa, Arcobacter ellisii
  REGION 1..226: note = tr|A0A347UBB0|A0A347UBB0_9PROT 7-cyano-7-deazaguanine synthase OS=Arcobacter ellisii; OX = 913109 GN=queC PE=3 SV=1
MNNSTKKAICILSGGMDSTLASYIAKNDGYEIIAVHFNYGQRTQDRELKAFRDICEDLKILEKYEIDIPFFTQIGASALTDKTIDVPTGGIEAGVPITYVPFRNGIFLSITAAIAEKEGASAMYIGVVQEDSSGYPDCTDEFIDKMKKAINQGTKEDTHIDIITPLVHLTKAQIVQEAIKLNVPLEHTWSCYKEENEACGVCDSCRLRLNGFKIAGLKDPISYKAS

SEQ ID NO: 36068 - protein, 223 aa, Arcobacter halophilus
  REGION 1..223: note = tr|A0A2N1J3W8|A0A2N1J3W8_9PROT 7-cyano-7-deazaguanine synthase OS=Arcobacter halophilus; OX = 197482 GN=queC PE=3 SV=1
MKKRAVCILSGGMDSTLASYMAKDEGYDIIAVHFNYGQRTEKRELKAFRDICEDLQIKEKYEIDIPFFTQIGASALTDKSIDVPVDGLESGVPITYVPFRNGIFLSIATAIAEKESANALFIGVVEEDSSGYPDCTDDFIKSITNTINVGTKESTVLEIKTPLVHLMKDEIVLKALELNVPLNLTWSCYKEEEEACGVCDSCRLRLNGFKKANSEDKIPYKVK

SEQ ID NO: 36069 - protein, 223 aa, Arcobacter marinus
  REGION 1..223: note = tr|A0A347THS6|A0A347THS6_9PROT 7-cyano-7-deazaguanine synthase OS=Arcobacter marinus; OX = 505249 GN=queC PE=3 SV=1
MKKRAVCILSGGMDSTLASYIAKNEGYEIIAVHFNYGQRTQDRELKAFRDICNDLKIEEKYEIDIPFFTQIGASALTDKNIDVPVGGVEAGVPITYVPFRNGIFLSIATAIAEKENASALYIGVVEEDSSGYPDCTDDFIKSITNTINTGTKEDTKLEIKTPLVHLMKNEIVLKALELNVPLNLTWSCYKEEEEACGVCDSCRLRLNGFKKANSEDKIPYKVK

SEQ ID NO: 36070 - protein, 196 aa, Arcobacter marinus
  REGION 1..196: note = tr|A0A1T5BRV9|A0A1T5BRV9_9PROT 7-cyano-7-deazaguanine synthase OS=Arcobacter marinus; OX = 505249 GN=SAMN06295997_11548 PE=3 SV=1
MEREKIAILFSGGLESTALIKYYKNKKKDITLIYLFFGYVWEDAEFFHAKKIASKYKLTIATFDLSKVINTIQLGNVKNLKENIIPLRNLSLLTFASLFIYNKNIYKLAIGIQGNLEYPDTSKSYIKDIEKLISIGLLKNDFQIEVPFYGKKKEEIIKEYSLPLELIFSCTNPIKYKRCHNCYKCKKLDFLIKKYS

SEQ ID NO: 36071 - protein, 222 aa, Arcobacter molluscorum
  REGION 1..222: note = tr|A0A2G1DKF0|A0A2G1DKF0_9PROT 7-cyano-7-deazaguanine synthase OS=Arcobacter molluscorum LMG 25693 OX=870501 GN=queC PE=3 SV=1
MKKAVCILSGGMDSTLASYIAKNEGYEIIAVHFNYGQRTEKRELKAFRDICKDLNIKEKYEIDIPFFVQIGASALTDKNIDVPVDGIETGVPITYVPFRNGIFLSIATAIAEKENANALYIGVVEEDSSGYPDCTDEFIKSINYTINTGTKNTTNIEIKTPLVHLLKSEIVLKAMQLNVPLELTWSCYKEEEEACGVCDSCRLRLNGFEKANSKDKIPYKVK

SEQ ID NO: 36072 - protein, 222 aa, Arcobacter mytili
  REGION 1..222: note = tr|A0A345J2E2|A0A345J2E2_9PROT 7-cyano-7-deazaguanine synthase OS=Arcobacter mytili LMG 24559 OX=1032238 GN=queC PE=3 SV=1
MKKAVCILSGGMDSTLSSYIAKNEGYEIIAVHFNYGQRTETRELKAFRDICEDLQIKEKYEIDIPFFTQIGASALTDKSIEVPIGGIEAGVPVTYVPFRNGIFLSIAAAIAEKENTEAIYIGVVEEDSSGYPDCTEEFISSITNSINTGTKETTKIQIKTPLVHLMKNEIVLKAIELNVPLHLTWSCYKEEEEACGVCDSCRLRLNGFKKANCEDKIPYKVL

SEQ ID NO: 36073 - protein, 223 aa, Arcobacter nitrofigilis
  REGION 1..223: note = tr|D5UZC8|D5UZC8_ARCNC 7-cyano-7-deazaguanine synthase OS=Arcobacter nitrofigilis (strain ATCC 33309 / DSM 7299 / LMG 7604 / NCTC 12251 / CI) OX=572480 GN=queC; PE = 3SV=1
MSKKAICILSGGMDSTLSSYIAKNEGYEIIAIHFNYGQRTEKRELKAFRDVCENLNVKNKYEIDIPFFTQIGASALTDANIDVPIDGVKPGVPVTYVPFRNGIFLSIAAAVAEKENAEAMFIGVVEEDSSGYPDCTDAFINQIKNAINEGTKEATHISIKTPLVKLHKSEIVKKALELNVPLELTWSCYKEEKEACGVCDSCRLRLNGFAQANSKDPIPYKGS

SEQ ID NO: 36074 - protein, 226 aa, unidentified
  source 1..226: note = Arcobacter pacificus
  REGION 1..226: note = tr|A0A5C2H7M9|A0A5C2H7M9_9PROT 7-cyano-7-deazaguanine synthase OS=Arcobacter pacificus; OX = 1080223 GN=queC PE=3 SV=1
MSSTAKKAICILSGGMDSTLASYIAKNDGYEIIAVHFNYGQRTEQRELKAFRDICNDLGILEKYEIDIPFFTQIGASALTDSSIDVPTEGVKPGVPITYVPFRNGIFLSITAAIAEKEEATAMYIGVVQEDSSGYPDCTDEFIQDMTKAINQGTKEETKIEIKTPLVHLSKAQIVQEALKLDVPLEHTWSCYKEQNEACGVCDSCRLRLNGFKEAGSSDPIPYKAI

SEQ ID NO: 36075 - protein, 228 aa, Arcobacter skirrowii
  REGION 1..228: note = tr|A0A2U2C2Y1|A0A2U2C2Y1_9PROT 7-cyano-7-deazaguanine synthase OS=Arcobacter skirrowii; OX = 28200 GN=queC PE=3 SV=1
MNNNLKKKAVVILSGGMDSTLSSYIAKNSNYDLIAVHFNYGQRTETKELKAFRDICKELNVLNKYEIDIPFFTQIGASALTDKTIDVPVNGVEKGIIPITYVPFRNGIFLSIASAIAEKEEASAMYIGVVQEDSSGYPDCSDSFIQKMQNAINEGTKDDTKIEIITPLVHLSKAQIVEEAIKLNVPLELTWSCYKEEDKACGVCDSCRLRLNGFKEANQKDLIPYKES

SEQ ID NO: 36076 - protein, 228 aa, Arcobacter skirrowii
  REGION 1..228: note = tr|A0A4Q0UFJ1|A0A4Q0UFJ1_9PROT 7-cyano-7-deazaguanine synthase OS=Arcobacter skirrowii CCUG 10374 OX=1032239 GN=queC PE=3 SV=1
MNNNLKKKAVVILSGGMDSTLSSYIAKNSNYDLIAVHFNYGQRTQDRELKAFRDICKELNVLNKYEIDIPFFSQIGASALTDKTIDVPVDGIEKGVVPITYVPFRNGIFLSIASAIAEKEEASAMYIGVVQEDSSGYPDCSDSFIQKMQNAINEGTKEDTKIEIITPLVHLSKAQIVEEAIKLNVPLELTWSCYKEEDKACGVCDSCRLRLNGFKEANQKDLIPYKES

SEQ ID NO: 36077 - protein, 227 aa, Arcobacter sp.
  REGION 1..227: note = tr|A0A366MRJ9|A0A366MRJ9_9PROT 7-cyano-7-deazaguanine synthase OS=Arcobacter sp. CECT 9230 OX=2044510 GN=queC PE=3 SV=1
MNNNLNKKAIVILSGGMDSTLSSYIAKTDGYELIAVHFNYGQRTQNKELKAFRDICKELNVVNKYEIDIPFFTQIGANALTDLNIDVPTNGLEDGVPITYVPFRNGIFLSIATAVAEKEGATAMYIGVVQEDSSGYPDCTDSFIGSISKAINEGTKEDTKIEIITPLVHLSKSQIVQKAIELSVPLELTWSCYKEEHEACGVCDSCRLRLNGFTQANSIDPIKYKEF

SEQ ID NO: 36078 - protein, 223 aa, Arcobacter sp.
  REGION 1..223: note = tr|A0A1Y5E0P3|A0A1Y5E0P3_9PROT 7-cyano-7-deazaguanine synthase OS=Arcobacter sp. 31_11_sub10_T18 OX=1856277 GN=queC PE=3 SV=1
MTKKRAICILSGGMDSTLSTYIAKNENYDIIPVHFNYGQRTEKRELKAFRDICNELKLENIYEIDIPFFTQIGASALTDDTIDIPVDGIEPGVPITYVPFRNGIFLSIATAIAEKEKASALFMGVVEEDSSGYPDCTDDFISKMSKSINAGTKEETKLEIITPLVKLSKSQIVTKATTLNVKLELTWSCYKESDIACGVCDSCRLRLNGFEKAGIKDNIPYKV

SEQ ID NO: 36079 - protein, 227 aa, unidentified
  source 1..227: note = Arcobacter suis
  REGION 1..227: note = tr|A0A443TJU5|A0A443TJU5_9PROT 7-cyano-7-deazaguanine synthase OS=Arcobacter suis; OX = 1278212 GN=queC PE=3 SV=1
MSKISTKKAICILSGGMDSTLASYIAKNEGYEIIAVHFNYGQRTQDRELKAFRDICDDLKILEKYEIDIPFFTQIGASALTDKTIDVPTGGIEAGVPITYVPFRNGIFLSITAAIAEKEEATAMYIGVVQEDSSGYPDCTDSFIFDMKKAINEGTKKDTHIDIKTPLVHLSKAQIVQEAIKLNVPLEHTWSCYKEEKEACGVCDSCRLRLNGFRIAGVKDPIPYKAS

SEQ ID NO: 36080 - protein, 228 aa, Arcobacter trophiarum
  REGION 1..228: note = tr|A0A4Q1A4Z4|A0A4Q1A4Z4_9PROT 7-cyano-7-deazaguanine synthase OS=Arcobacter trophiarum LMG 25534 OX=1032241 GN=queC PE=3 SV=1
MINNSNNKAVVILSGGMDSTLSSYIAKNSGYELIAVHFNYGQRTENRELIAFRDICKKLNVLNKYEIDIPFFAQIGASALTDKSIDVPVDGLEKGIIPVTYVPFRNGIFLSIASAIAEKENANAIYIGVVQEDSSGYPDCTNSFISSIQNAINEGTKDNTNIKIITPLVNLSKAQIVQEAIKLNVPLELTWSCYKEEESACGVCDSCRLRLNGFKEANQKDPIPYKES

SEQ ID NO: 36081 - protein, 226 aa, unidentified
  source 1..226: note = Arcobacter venerupis
  REGION 1..226: note = tr|A0A443TSP9|A0A443TSP9_9PROT 7-cyano-7-deazaguanine synthase OS=Arcobacter venerupis; OX = 1054033 GN=queC PE=3 SV=1
MNNKTKKAICILSGGMDSTLASYIAKNDGYEIIAVHFNYGQRTQDRELKAFRDICEDLKILEKYEIDIPFFTQIGASALTDKNIDVPTGGVETGVPITYVPFRNGIFLSITAAIAEKEGATAMYIGVVQEDSSGYPDCTDLFISDMKRAINQGTKEDTHIDIKTPLVHLSKAQIVLEAKKLNVPLEHTWSCYKEEEEACGVCDSCRLRLNGFKIANQIDPIAYKAL

SEQ ID NO: 36082 - protein, 1383 aa, Arenibacter sp.
  REGION 1..1383: note = tr|A0A372GRL7|A0A372GRL7_9FLAO Amino acid adenylation domain-containing protein OS=Arenibacter sp. P308M17 OX=2303391 GN=D0S24_18200 PE=4 SV=1
MHNKYLYSQPLTQSQELIWMGQKINPNVPLYNVPYAFEINGNISEEVFELALQALIDRTEILRTIFYEENGTVTQKVLAEFSFQLKKLDFSRNTNGLSVKEWLEKRSEINFDFSQPLFDTAILKVAEENYIWYLNLHHLITDATTAVLIFNLMADLYKGVQDKNVATIPFPPAYSNFITFEAEKRKGPDHNKYNNYWKEKVKSIATVPQLYGSRQKAKTTRAKRVHIALGKRRTQQLKELTRNPKVGSLSTDMGLFTLFSSLIHIFLYRISGQSKILIGSPIHNRLSRDFKFTPGLFVELFPISLELSDDDTFATVIEKMKLETNDFLRNAQVSSSSAEVGRSFSAVINYINTSFSSFNGFPTNVEWIHPKHCDPLHQLRCHIIDFNAKGELEILFDLNQDIFDEGLAELVPHHFLNLMDGLLTDLDQPIGAPPLITKYEIEELLGDMKTSGTSHFKGTFLEHFEKTVHNNPKKIALENGEDLISYLDLNNRANQLAHFLIKNGIKENEKVALHLYRSPDYIISALALMKIGATFIPIPADQPAGRIEFVISNSDCVLVITEKALRKNIAGNTKTMDLREISEKISSEPSTSTGHNLKRSCIAYYLYTSGSTGMPKGVMVSHKALNNYLQWASSFYNIGTNSVFPLFTSIGFDLTISSTFLPLINGGKVVVYREGMLGPDISLIQVLDENKVNSIKVTPAHITLMQVRNLVGSRIKTMIVGGEDLKVGIAKNIYDHLGEDVTIFNEYGPTEATVGCIVSKFNPEHHRDISVPIGKVIANMNAYILDNNKNLVPKGVVGELFLSGDSLAEGYANLKELTKQKFINDPFRPGSIMYRTGDLVRMNNQDEMEFLGRNDEQVKLNGFRIELADIEANLLEHSSIDNASVVLIDAQERVAENEVLNCTECGLPSNYPKTDFDEKGVCHLCNAFKGYKEKTDKYFKTEEELHQLLLSRKASNSTYDCLSLLSGGKDSTYVLARLINMGLKVLAFTLDNGYISEQAKTNIDQIVQKLGVDHVYGSTEHMNKIFVDSLDRHQNVCNGCFKTIYTLSTKVALDKKIPFVVTGLSRGQFFETRLTEELFWDDDIDTSTIDQTILEARKLYHQESDAVNQLLDVSMFKDEKTFEKVQFVDFYRYNDVRLEEMLAYLKEKVGWVRPTDTGRSTNCLINQLGIYVHKKQKGYSNYSFPYSWDVRLGHKTRTETLEEINEYIDENEVKHIMKEIGYVESNYNDKMRPQLVGYYTAKTKISHQELTQHLSKRLPHYMLPGTFKYLETLPLTSNGKVDKKALRGLNIVQLQMETPFVEPKNEIEILLEKIWREVLLLDKIGIHDNFIALGGHSLAAIRVTARVNEEVEMTFPLNKIFELPTISEYAKYIEETLLTLMEE

SEQ ID NO: 36083 - protein, 221 aa, Arenicella xantha
  REGION 1..221: note = tr|A0A395JTG5|A0A395JTG5_9GAMM 7-cyano-7-deazaguanine synthase OS=Arenicella xantha; OX = 644221 GN=DFR28_101252 PE=3 SV=1
MDNSAVTDVAVLVSGGLDSSVLAVHLSDSNYHVYPIYIQHGLYWEATERDHLTRFLCAVARPNIAELKILELPVTDMYESHWSVSGNNVPDENTQDDAVFLPGRNLLLLAKASVWCSLTGIRTIALAPLSGNPFADNSNAFYRAIEQSIQISSGQNMDIIRPFSNMSKDQVLQLGGKLPLHLTFSCIRPHKGLHCGRCNKCAERKLAYHRLGIEDATPYAT

SEQ ID NO: 36084 - protein, 213 aa, Arenicella xantha
  REGION 1..213: note = tr|A0A395JQM9|A0A395JQM9_9GAMM 7-cyano-7-deazaguanine synthase in queuosine biosynthesis; OS = Arenicella xantha OX=644221 GN=DFR28_101249 PE=4 SV=1
MSKPSILCMFSGGIDSTGVLHTLITDEDFHDRALIVHHIILQNRENRAQAEMESVRKIIDFYQAEHPHRGFTYTESVFNTTGFAPLKASRFPFDMDVCAFTAGNISVARKDVRQVAMGRTKTDVESGGDNFQKRMERAQTIYRAVYSLEPETIPEYIFPVINMTKEEIWDSLPEPVQSATWYCRHPQYRPGGHAEPCKKCPTCKEVSEFIAHG

SEQ ID NO: 36085 - protein, 227 aa, unidentified
  source 1..227: note = Arenimonas caeni
  REGION 1..227: note = tr|A0A2P6MBV7|A0A2P6MBV7_9GAMM 7-cyano-7-deazaguanine synthase OS=Arenimonas caeni; OX = 2058085 GN=queC PE=3 SV=1
MNPQAKRAVVLVSGGMDSAVVLAIAREQGFACHALSVSYGQRHTSELAAAAELAASVGAEHKLVTVDLRSIGGSALTDDIDVPEAGGAGIPVTYVPARNTIMLSIALGWAEVLGADDLFCGVNAVDYSGYPDCRPEFIEAFQRLANVATKAGVEGHALKVHAPLLRMSKADIAREGARLGVDFSRTVSCYQADEQGRACGRCDACRLRAEGFVAAGLADPTRYAPRV

SEQ ID NO: 36086 - protein, 237 aa, Arenimonas composti
  REGION 1..237: note = tr|A0A091BEU5|A0A091BEU5_9GAMM 7-cyano-7-deazaguanine synthase OS=Arenimonas composti TR7-09 = DSM 18010 OX=1121013 GN=queC PE=3 SV=1
MKKAVVLVSGGMDSAVVLALAREAGFACHALSVSYGQRHTSELQAAARVAAAMGAVEHKVVTVDLRAIGGSALTADIAVPEHDAGERLDEGIPVTYVPARNTIMLSIALGWAEVLGADDLFCGVNAVDYSGYPDCRPEFIAAFERLANLATKTGVTRAAAGEPGLQVHAPLMRMSKADIAREGTRLGVDFAQTVSCYQADGDGRACGRCDACRLRAAGFADAGLPDPTRYAPGAESR

SEQ ID NO: 36087 - protein, 227 aa, Arenimonas donghaensis
  REGION 1..227: note = tr|A0A087MG37|A0A087MG37_9GAMM 7-cyano-7-deazaguanine synthase OS=Arenimonas donghaensis DSM 18148 = HO3-R19 OX=1121014 GN=queC PE=3 SV=1
MNQNQKHAVVLVSGGMDSAVVLAMAREQGFVCHALSVSYGQRHTSELAAAAELAASVGAQHKVVTVDLRSIGGSALTADIDVPEQGGQGIPVTYVPARNTIMLSIALGWAEVLGADDLFCGVNAVDYSGYPDCRPAFIEAFQALANLATKAGVEGHALRVHAPLMRMSKADIAREGARLGVDFSRTVSCYQADDQGRACGRCDACRLRAEGFAAAGLADPTRYAPRA

SEQ ID NO: 36088 - protein, 213 aa, Arenimonas malthae
  REGION 1..213: note = tr|A0A091B7N5|A0A091B7N5_9GAMM 7-cyano-7-deazaguanine synthase OS=Arenimonas malthae CC-JY-1 OX=1384054 GN=queC PE=3 SV=1
MDSAVVLALAREQGFACHALSVSYGQRHTSELAAAAELARVQGAVEHKVVTVDLRSIGGSALTADIDVPETAGQGIPVTYVPARNTIMLSIALGWAEVLGADDLFCGVNAVDYSGYPDCRPEFIAAFERLANLATKAGVEGHSLRVHAPLMRLGKADIAREGARLGVDFSRTVSCYQADAEGRACGRCDACRLRAEGFAAAGLADPTRYAPRG

SEQ ID NO: 36089 - protein, 227 aa, unidentified
  source 1..227: note = Arenimonas metalli
  REGION 1..227: note = tr|A0A091BSB8|A0A091BSB8_9GAMM 7-cyano-7-deazaguanine synthase OS=Arenimonas metalli CF5-1 OX=1384056 GN=queC PE=3 SV=1
MTTQQRKAVVLVSGGMDSAVVLAMAREQGFLCHALSVSYGQRHTSELAAAAALAALHGAEHKVVTVDLRSIGGSALTADIAVPEAAAAGIPVTYVPARNTIMLSIALGWAEVLGADDLFCGVNAVDYSGYPDCRPEFIAAFECLANLATKAGVEGHALRLHAPLMRMSKADIAREGARLGVDFSATVSCYQADADGRACGRCDACRLRAEGFAAAGLPDPTRYASRE

SEQ ID NO: 36090 - protein, 213 aa, Arenimonas oryziterrae
  REGION 1..213: note = tr|A0A091BFD2|A0A091BFD2_9GAMM 7-cyano-7-deazaguanine synthase OS=Arenimonas oryziterrae DSM 21050 = YC6267 OX=1121015 GN=queC PE=3 SV=1
MDSAVTLAIARELGFTCHALSVSYGQRHSAELDAANELARTQGAAEHKTVGVDLRSIGGSALTSDIAVPETPADGIPVTYVPARNTIMLSIALGWAEVLGADDIFCGVNAVDYSGYPDCRPEFIAAFEKLAGLATQAGVEGRGMRIHAPLIAMSKADIVREGQRLGVDFSRTVSCYQADAQGNACGLCDACRLRSEGFAAAGVPDPTRYRQKA

SEQ ID NO: 36091 - protein, 223 aa, Arenimonas sp.
  REGION 1..223: note = tr|A0A1D2RT38|A0A1D2RT38_9GAMM 7-cyano-7-deazaguanine synthase OS=Arenimonas sp. SCN 70-307 OX=1660089 GN=queC PE=3 SV=1
MKKAVVLVSGGMDSAVVLAIAREQGFDCHALSVAYGQRHTSELAAAAELAQSVGAVHKVVNVDLRSIGGSALTADIDVPEAGGEGIPVTYVPARNTIMLSIALGWAEVLGADDLFCGVNAVDYSGYPDCRPEFIEAFERLANVATKAGVEGHGLKVHAPLLRMSKADIAREGARLGVDFARTVSCYQADGQGRACGRCDACRLRAEGFAAAGLPDPTRYAPRG

SEQ ID NO: 36092 - protein, 224 aa, Arenimonas sp.
  REGION 1..224: note = tr|A0A5B2ZCI2|A0A5B2ZCI2_9GAMM 7-cyano-7-deazaguanine synthase OS=Arenimonas sp. 3729k; OX = 2608255 GN=queC PE=3 SV=1
MKKAVVLVSGGMDSAVVLAMAREQGFACHALSVAYGQRHTSELDAAARVAADLAAVEHKVVQVDLRSIGGSALTDDIAVPESPGQGIPVTYVPARNTIMLSIALGWAEVLGARDLFCGVNAVDYSGYPDCRPAFIAAFERLANLATRAGVEGAGLRVHAPLMEMGKADIVRAGHRLGVDFGSTVSCYQADAEGRACGRCDACRLRAQGFAEAGLADPTRYVTAS

SEQ ID NO: 36093 - protein, 455 aa, unidentified
  source 1..455: note = Armatimonadetes bacterium
  REGION 1..455: note = tr|A0A3D4ZYV9|A0A3D4ZYV9_9BACT Uncharacterized protein OS=Armatimonadetes bacterium OX=2033014; GN = DGT21_15725 PE=4 SV=1
MARVVVRTGMPPDMLERAGPSADWCLQWLGDGCNVMADLEQLQAAICTQPSELTRDILDIALALYTADIVVPRGRNEAWTRELSLLVPVRQPDFWEQNLSALLSILHGLTRDNFHLEFCARLEDCPELLRPVGAGGPADIRSRDVDCVCALSGGIDSLAGGTMLLRADRRPLFVSHRSGNPYVRQLQTAAEKTLDSIRPDTAVFANLVVQPRHGSGAEFRFPVPGDRESSRRLRTFLFMAMLTAAAGGVDVEEAYLCENGILTIALPMSPGRVGSLSTRSTHPSILAGFNALARAAGMKTTILNPFIYRTKAEIITDILRPVLTPNQIQATTSCWMSGRRNRPCGGCIPCLLRRISMLAAGLPDEAYEIDLLADPEVYRGTEAYDNLIDLLTQAVRVSSGTDEQLLVQWPQLLDLASAGVSVEDALAMYRRYAEEVWRVTREHFPAVALLMKRIG

SEQ ID NO: 36094 - protein, 222 aa, unidentified
  source 1..222: note = Armatimonadetes bacterium
  REGION 1..222: note = tr|A0A1Y0H4M7|A0A1Y0H4M7_9BACT 7-cyano-7-deazaguanine synthase OS=Armatimonadetes bacterium Uphvl-Ar1 OX=2004467 GN=queC PE=3 SV=1
MNPRAVILLSGGLDSVTCLAIAQSQGFDPYCLTIQYGQRHYIELDAARSIAEKFQVTEHKILPVDLTLFGGSALTDNIEVPKDSPTTDIPVTYVPARNTVMLSLALAYAETRQANDIFVGVNAVDYSGYPDCRPEFIAAFQNLAQVATKAGVEGNSLTIHAPLIQMTKPEIIQTGLKLGVDYGMTHSCYDPVNGRPCEHCDSCLIRIKAFAELGMTDPALLK

SEQ ID NO: 36095 - protein, 226 aa, unidentified
  source 1..226: note = Aromatoleum aromaticum
  REGION 1..226: note = sp|Q5P4Z2|QUEC_AROAE 7-cyano-7-deazaguanine synthase; OS = Aromatoleum aromaticum (strain EbN1) OX=76114 GN=queC; PE = 3 SV=1
MTEPKRAIVLLSGGLDSATCLAIARNAGFDCYALSIAYGQRHTAELAAARRVAQSLDAREHRLAHVSLGEFGGSALTDSSIPVPIEGAVGGIPVTYVPARNTVMLSIALAWAEVLGAHDIYVGVNAVDYSGYPDCRPEFIAAFEAMANLATKAGIEGARITIHAPLIRLSKAGIIQRGTALGVDYAQTVSCYQADEAGRACGVCDACRLRKAGFEAAGIPDPTPYR

SEQ ID NO: 36096 - protein, 457 aa, unidentified
  source 1..457: note = Aromatoleum aromaticum
  REGION 1..457: note = tr|Q5P5F5|Q5P5F5_AROAE Uncharacterized protein; OS = Aromatoleum aromaticum (strain EbN1) OX=76114; GN = ebA2390 PE=4 SV=1
MTTLLPLKELAVDVVEAGARRRKSMVPCILGQNIDFDLEALESFSSIKWQTTVYDALVVAAVVEFCDRSLARSAMNWGRKFSVHIPVHDPDKWSDKTVIRALVEALNLLTGDDWHFEFRARKVPAEPPQQDRLRFPSDAEAIIAYSDGMDSRAVAGLESSRLGRRLVRMRVGSKQHDVSKKERLRIPFTALPYSVKLENGRNAENSARSRGFKFSVVSTMAAYLIDAPSVIVPESGQGALAPVLLPVGQGYEDYRNHPVFTALMARFFNALLGYKIQYRFPRLWMTKGETLREFVDVCGSEARWATTRSCWQQSRQVAVSGERRQCGVCAACILRRLSVHAAGLNELPKTYVWESLKAATWETGAAKDFASFTPALREYSIAGVLHFEHLASLRGAVQYELIKRRTTNELARALSEPPAVVAQNLDRLLQQHTNEWSAFTNDLGSGSFVRQWIDDAS

SEQ ID NO: 36097 - protein, 216 aa, unidentified
  source 1..216: note = Arsenicibacter rosenii
  REGION 1..216: note = tr|A0A1S2VRU4|A0A1S2VRU4_9BACT Uncharacterized protein OS=Arsenicibacter rosenii OX=1750698; GN = BLX24_03880 PE=4 SV=1
MDDKSVAMLFSGGRDSSLATCILANENSKIHLLSMFNGAVVKGDISQYRYNEIKEKFPNNIISFNILSSFSLFRRIALLDIEKDFERFKYNLIPVGDALATHTIAVIYCIQNKINNLASGYVKYEMDFPEQLPDVVARTSEFVKKYGINYLTPVYEYDSLDKVKYRLFDFGISTKSLEGTSLFADTYSVPPPNVVLDYLDLKLPICDEYIKFMLNL

SEQ ID NO: 36098 - protein, 626 aa, unidentified
  source 1..626: note = Arsenicitalea aurantiaca
  REGION 1..626: note = tr|A0A433XE93|A0A433XE93_9RHIZ Uncharacterized protein OS=Arsenicitalea aurantiaca OX=1783274; GN = EMQ25_04515 PE=4 SV=1
MSEALVQVDGRDRPLAIRINGRHPTFRLATDALETKVIRELDPVILDLMEIASTVFAADGAVPRGGPTRPNLGQDWYRQFDFEIPVRHPELWQRDDVVAALRDAVETLTEDSVSFRFIQAAPDVMRQQYLDYDPTGVAFEADEVILFSGGLDSFAGALELLATTSSRVVLVTHRSAQKAIPRQIELGQYLVDQFPHRVLHVHVLARRVDQEARDSTQRSRTLLFSALGQAVACAFGAERVSFFENGIVSHNLPLSPQIVGTMATRTTHPLALTNINRLMQLALPAAVPISNRFQWLTKTEVVSKIDENGGASQIARSVSCTSIREQNTLHTHCGACTQCFDRRFAILKANLADYDPEETYATDVLFGERGNDRSMTMAVEWTRHTLGLGDLEEQGFMERFGHEVSRILRGHPDLPPRAALDLSLRLHQRQGKVVRDVLETVLRERSAELVAQRLPATCLVRLHLGSGEELVGRVPRYAPDEERRASSTGMEAVEEVDEEVDADAPLRLQFFMQGQRHVVEVAGLTTVMGAPARVPHALRSVYDEDKRNGVRPEDHRYSIGTTLPHLADMDKSTIRKLVARCRKQLAEGYTELHGVPPPAHLLIQTRPSSGYRLDPTIVVVEPNRPV

SEQ ID NO: 36099 - protein, 178 aa, unidentified
  source 1..178: note = Arsenophonus endosymbiont
  REGION 1..178: note = tr|A0A3B0J5S5|A0A3B0J5S5_9GAMM 7-cyano-7-deazaguanine synthase OS=Arsenophonus endosymbiont of Aleurodicus floccissimus OX=2152761; GN = queC PE=3 SV=1
MLNVIVLKLLLLKRYASILTSQHIKYWMSGLLNELATSSLTRDNIPIPSYEKSIESELPNTFVPERNILFLTLAAIYAYQVQAEVVITCVCETDFSGYPNCRDEFVKALNQAICLGIAKPIRFETPLMWLNKAETWALADYYHSLKLVQNKTLTCYNGIIGNGCQHCAACPAICVQKD

SEQ ID NO: 36100 - protein, 233 aa, unidentified
  source 1..233: note = Arsenophonus endosymbiont
  REGION 1..233: note = tr|A0A3B0M1H9|A0A3B0M1H9_9GAMM 7-cyano-7-deazaguanine synthase OS=Arsenophonus endosymbiont of Trialeurodes vaporariorum OX=235567; GN = queC PE=3 SV=1
MTKRAVTVFSGGQDSTTCLIQAIKQYNEVHCITFNYAQRHSAEIVAAQKICQHFNIAAHKILDVGLLNELAISSLTRDNIPIPSYEKSIESELPNTFVPGRNILFLTLAAIYAYQVQAEVVITGVCETDFSSYPDCRDEFVKALNQAICLGIAKTIRFENPLMWLNKAETWALADYYHSLKLVQNKTLTCYNGIIGNGCQQCAACHLRAEGLKYYLNHRQAIMSSLKQKMHLK

SEQ ID NO: 36101 - protein, 233 aa, Arsenophonus nasoniae
  REGION 1..233: note = tr|A0A4P7L796|A0A4P7L796_9GAMM 7-cyano-7-deazaguanine synthase OS=Arsenophonus nasoniae; OX = 638 GN=queC PE=3 SV=1
MLKRAVIVFSGGQDSTTCLIQAIKQYDEVHCITFNYAQRHSTEIVVAQKICQHFNIKAHKILDVGLLNELAISSLTRDNIPIPSYEKSSESELPNTFVPGRNILFLTLAAIYAYQVQAEVVITGVCETDFSGYPDCRDEFVKALNQAICLGIAKAIRFETPLMWLNKAETWALADYYHSFEFIQNKTLTCYNGIIGDGCQKCAACHLRAEGLKYYLNHRQAIMSSLKQKMHLK

SEQ ID NO: 36102 - protein, 239 aa, Arsenophonus nasoniae
  REGION 1..239: note = tr|D2TWD2|D2TWD2_9GAMM 7-cyano-7-deazaguanine synthase OS=Arsenophonus nasoniae OX=638 GN=queC PE=3 SV=1
MMDSIGMLKRAVIVFSGGQDSTTCLIQAIKQYDEVHCITFNYAQRHSTEIVVAQKICQHFNIKAHKILDVGLLNELAISSLTRDNIPIPSYEKSSESELPNTFVPGRNILFLTLAAIYAYQVQAEVVITGVCETDFSGYPDCRDEFVKALNQAICLGIAKAIRFETPLMWLNKAETWALADYYHSFEFIQNKTLTCYNGIIGDGCQKCAACHLRAEGLKYYLNHRQAIMSSLKQKMHLK

SEQ ID NO: 36103 - protein, 233 aa, Arsenophonus sp.
  REGION 1..233: note = tr|A0A2A2H435|A0A2A2H435_9GAMM 7-cyano-7-deazaguanine synthase OS=Arsenophonus sp. ENCA; OX = 1987579 GN=queC PE=3 SV=1
MTKRAVIVFSGGQDSTTCLIQAIKQYNEVHCITFNYAQRHSAEIVAAQKICQHFNIAAHKILDVGLLNELAISSLTRDNIPIPSYEKSIESELPNTFVPGRNILFLTLAAIYAYQVQAEVVITGVCETDFSGYPDCRDEFVKALNQAICLGIAKPIRFETPLMWLNKAETWALADYYHSLKLVQNKTLTCYNGIIGNGCQQCAACHLRAEGLKYYLNHRQAIMSSLKLKMHLK

SEQ ID NO: 36104 - protein, 218 aa, unidentified
  source 1..218: note = Arsukibacterium ikkense
  REGION 1..218: note = tr|A0A0M2V688|A0A0M2V688_9GAMM 7-cyano-7-deazaguanine synthase OS=Arsukibacterium ikkense; OX = 336831 GN=queC PE=3 SV=1
MSQKVVVIYSGGMDSFTVLHKAVAAGHDVYALSFNYGQRHVKELICAANVCKELNIKHKIVDISAINQLISGSSLTSDIDVPEGHYAADNMKSTIVPNRNMILLSLAVGYADSIGARAVYYGAHSGDHFIYPDCRPEFVQKMNDVCQIANYQPVDIVSPYLYQTKIEILADGLAMGLDYSKTWTCYNGRDKACGKCGSCQERLEAFNLNNTADPLPYE

SEQ ID NO: 36105 - protein, 218 aa, unidentified
  source 1..218: note = Arsukibacterium sp.
  REGION 1..218: note = tr|A0A0M2VLG1|A0A0M2VLG1_9GAMM 7-cyano-7-deazaguanine synthase OS=Arsukibacterium sp. MJ3; OX = 1632859 GN=queC PE=3 SV=1
MSQKVVVIYSGGMDSFTVLHKAVAAGHDVYALSFNYGQRHVKELICAANVCKDMNIKHKIVDISAINQLIAGSSLTSDIDVPEGHYAADNMKSTIVPNRNMILLSLAVGYADSIGARAVFYGAHSGDHFIYPDCRPEFVQKMNDVCQIANYQPVDIVSPYLYQTKIEILADGLAMGLDYSKTWTCYNGRDKACGKCGSCQERLEAFNLNNATDPLPYE

SEQ ID NO: 36106 - protein, 188 aa, Arthrobacter sp.
  REGION 1..188: note = tr|A0A2V5D4Q8|A0A2V5D4Q8_9MICC 7-cyano-7-deazaguanine synthase OS=Arthrobacter sp. RC1.1 241 OX=2183924 GN=queC PE=3 SV=1
MELAAAKRVAEAQGVGDHVVCDIDLRVFGGSALTSDVEVPKHSSVDQVEENIPVTYVPARNTVFLSFALAYAEVVGATDIFIGVNALDYSGYPDCRPEYIRAFEAMANLATRAGVEGGAITIHTPLMDKTKGEIVQMGLALGVDYSLTSSCYDPDDAGRSCGHCDSCLLRLKGFAEAGSHDPIAYQGV

SEQ ID NO: 36107 - protein, 229 aa, Arthrobacter sp.
  REGION 1..229: note = tr|A0A4P8GSB6|A0A4P8GSB6_9MICC 7-cyano-7-deazaguanine synthase OS=Arthrobacter sp. 24S4-2; OX = 2575374 GN=queC PE=3 SV=1
MTRKAIVLLSGGLDSTTVLAHAKSEGFEPYALSFRYGQRHVVELQAAQRVAEAQGVKNHVVCDIDLRVFGGSALTADVDVPKHESVDQVEENIPVTYVPARNTVFLSFALAYAEVLGSTDIFIGVNALDYSGYPDCRPEYIQAFEAMANLATRAGVEGGVIKIHTPLMDKTKGEIVQMGLALGVDYGLTSSCYDPDDAGHACGHCDSCLLRLKGFADAGSHDPVTYQGV

SEQ ID NO: 36108 - protein, 187 aa, Arthrobacter viscosus
  REGION 1..187: note = tr|O52119|O52119_ARTVI 7-cyano-7-deazaguanine synthase (Fragment) OS=Arthrobacter viscosus OX=1673; GN = ALU1 PE=3 SV=1
MLRVRGSSYPLKKTKEKQYSILRVVFSGGQDSTTCLFWAMERFEEVEAVTFDYNQRHSLEIECAQKIAKELGITHHILDMSLLNQLAPNALTRSDIAVEDGEDGELPSTFVPGRNLLFLSFAGVLASQIGAKHIVTGVCETDFSGYPDCRDVFIKSLNVTLNLSMDQSFVIDTPLMWLNKEETWELA

SEQ ID NO: 36109 - protein, 226 aa, unidentified
  source 1..226: note = Arthrospira maxima
  REGION 1..226: note = tr|B5W8T4|B5W8T4_LIMMA 7-cyano-7-deazaguanine synthase OS=Arthrospira maxima CS-328 OX=513049 GN=queC; PE = 3 SV=1
MKAVILLSGGLDSSTVLYQAKADGCECYALSFNYQQRHLRELEAAAKIAEAAGVAAHQVVEFDLKRWGGSALTDHNIDLPCDRTLAEMSATIPITYVPARNTIFLSLALAYGETIGADRIYIGVNALDYSGYPDCRPDYIAAMQSVFRLGTKQGREGNAITINTPLIDLKKTDIIQLGNSLGVPWEYTWSCYGGEAQACGVCDACRLRLAAFEALGLTDPISYAKR

SEQ ID NO: 36110 - protein, 226 aa, unidentified; identical to SEQ ID NO: 36109
  source 1..226: note = Arthrospira platensis
  REGION 1..226: note = tr|K1VY67|K1VY67_ARTPT 7-cyano-7-deazaguanine synthase OS=Arthrospira platensis C1 OX=459495 GN=queC; PE = 3 SV=1

SEQ ID NO: 36111 - protein, 226 aa, unidentified
  source 1..226: note = Arthrospira platensis
  REGION 1..226: note = tr|D4ZX25|D4ZX25_ARTPN 7-cyano-7-deazaguanine synthase OS=Arthrospira platensis (strain NIES-39 / IAM M-135) OX=696747 GN=queC PE=3 SV=1
MKAVILLSGGLDSSTVLYQAKADGYECYALSFNYQQRHLRELEAAAKIAQAAGVAAHQTVEFDLKRWGGSALTDDNIDLPCDRTLAEMSATIPITYVPARNTIFLSFALAYGEAIGADRIYIGVNALDYSGYPDCRPDYIVAMQSVFRLGTKQGREGNPITINTPLIDLKKTDIIQLGNSLGVPWEHTWSCYGGEAEACGVCDACRLRLAAFQALGLTDPISYAKR

SEQ ID NO: 36112 - protein, 226 aa, Arthrospira sp.; identical to SEQ ID NO: 36109
  REGION 1..226: note = tr|A0A328V7V3|A0A328V7V3_9CYAN 7-cyano-7-deazaguanine synthase OS=Arthrospira sp. O9.13F; OX = 1982223 GN=queC PE=3 SV=1

SEQ ID NO: 36113 - protein, 196 aa, Asaccharobacter celatus
  REGION 1..196: note = tr|A0A369NVR5|A0A369NVR5_9ACTN ExsB family transcriptional regulator OS=Asaccharobacter celatus; OX = 394340 GN=C1850_10000 PE=4 SV=1
MYLLREPKLAVAFSGGCDSALLLAAAKLAGCEVHAYLVKTAFQPDFELDDARTVAAALEVPLTVVEADVLAQADICANPADRCYLCKRFIFDEVRRAAAADGFTVIVDGTNATDDPERRPGFKALAEAGVVSPLRRAGMTKANVRHVLASLEERFGLPSGALMSAKPSFPCLAVYVPQGESITEASLREAARSRGL

SEQ ID NO: 36114 - protein, 229 aa, Asaccharobacter celatus
  REGION 1..229: note = tr|A0A369NZA6|A0A369NZA6_9ACTN 7-cyano-7-deazaguanine synthase OS=Asaccharobacter celatus; OX = 394340 GN=queC PE=3 SV=1
MTKTKALVLCSGGVDSTTLLARAVSKYGAENVYALSISYGQKHVREIEAARTVAAYYGVQQRFLDLGAIFADSDCSLLDHSDAAVPQSSYAEQQAAGDGGPVSTYVPFRNGLFLSSAASMALSLGCSVVYYGAHHDDWAGNAYPDCSLEFVEAMNRAIVEGTGGELRLEAPFVTWSKADIVREGLALGVPYELTWSCYEGGEAPCGRCATCLDRAAAFAANGVEDPALG

SEQ ID NO: 36115 - protein, 219 aa, unidentified
  source 1..219: note = Asaccharospora irregularis
  REGION 1..219: note = tr|A0A1M5QLJ0|A0A1M5QLJ0_9FIRM 7-cyano-7-deazaguanine synthase OS=Asaccharospora irregularis DSM 2635 OX=1121321 GN=queC PE=3 SV=1
MKEKQKAVVVFSGGQDSTTCLFWALKKFDEVLAVTFDYGQRHKLEIECASSIAKELGVEHHILDMALLNQLAPNALTRDEIEVSEGEEGTLPSTFVEGRNMLFLTFAGVFAKVKGAKHIVTGVCETDFSGYPDCRDIFIKSLNVTMNLAMDYPFVLHTPLMWIDKAQTWEMADKLGKLEYIREKTLTCYNGIKGDGCGECPACHLRKRGLDNYLKSKGE

SEQ ID NO: 36116 - protein, 233 aa, Asaia bogorensis
  REGION 1..233: note = tr|A0A0P0YEZ6|A0A0P0YEZ6_9PROT 7-cyano-7-deazaguanine synthase OS=Asaia bogorensis NBRC 16594 OX=1231624 GN=queC PE=3 SV=1
MLSDDTAIVLFSGGQDSATCLAWALDRFAHVETLGFAYGQRHAIELECRDTLRDAMMRQNPQWRERLGPDHTLDLSVLGRISETALTREAAIEMNENGLPSTFVPGRNLLFLSFAATLGVRRNARHIVTGVCETDYSGYPDCRDDTIKALQVALNLGMETRFVLHTPLMWLDKAETWRLAERIGGDGLVALINRESHSCYMGDRAHLHDWGYGCGTCPACELRAKGWASYVSA

SEQ ID NO: 36117 - protein, 233 aa, Asaia platycodi
  REGION 1..233: note = tr|A0A060QDM5|A0A060QDM5_9PROT 7-cyano-7-deazaguanine synthase OS=Asaia platycodi SF2.1; OX = 1382230 GN=queC PE=3 SV=1
MLSDDTAIVLFSGGQDSATCLAWALDRFEHVETLGFAYGQRHAIELECRDTLRDAMTRQNPQWRERLGPDHTLDLSVLGQISETALTREAAIEMNENGLPSTFVPGRNLLFLSFAATLGVRRNARHIVTGVCETDYSGYPDCRDDTIKALQVALNLGMETRFVLHTPLMWLDKAETWRLAERIGGDGLVALINRESHSCYMGNRAHLHDWGYGCGTCPACELRAKGWASYVSA

SEQ ID NO: 36118 - protein, 56 aa, Asaia sp.
  REGION 1..56: note = tr|A0A433WRY4|A0A433WRY4_9PROT 7-cyano-7-deazaguanine synthase (Fragment) OS=Asaia sp. W19 OX=2067395 GN=C0V97_15850 PE=3 SV=1
MPSDDTAIVLFSGGQDSATCLAWALNRYAHVETLGFAYGQRHAIELECRETLRRAM

SEQ ID NO: 36119 - protein, 233 aa, Asaia sp.
  REGION 1..233: note = tr|A0A433WSJ2|A0A433WSJ2_9PROT 7-cyano-7-deazaguanine synthase OS=Asaia sp. W19; OX = 2067395 GN=queC PE=3 SV=1
MPSDDTAIVLFSGGQDSATCLAWALNRYAHVETLGFAYGQRHAIELECRETLRRAMISARPDWQDRLGEDHTLDLSVLGQISDTALTREAAIEMNENGLPSTFVPGRNLLFLSFAATLAVRRNARHIVTGVCETDYSGYPDCRDDTIKALQVALNLGMETRLVLHTPLMWLDKAETWRLAERIGGSALVKLINRESHSCYLGDRTHLHEWGYGCGACPACDLRAKGWSSYVST

SEQ ID NO: 36120 - protein, 234 aa, Asanoa ishikariensis
  REGION 1..234: note = tr|A0A1H3UBF7|A0A1H3UBF7_9ACTN 7-cyano-7-deazaguanine synthase OS=Asanoa ishikariensis; OX = 137265 GN=queC PE=3 SV=1
MSDTKPKAVVLLSGGLDSATVLAMALREGYEAYALSFRYGQRHTVELKAAAAVAEQFGVRRHVIADIDLRAFGGSALTDDGIAVPHYASADELSQDIPVTYVPARNTIFLSFALAWAETLDASDVFIGVNALDYSGYPDCRPEFIAAYEAMANLATKAGVEGRQRLRIHTPLIELTKAQTIRSGLELGVDYSLTHSCYDPADDRACGTCDSCLLRGRGFAELGLSDPALAPAAG

SEQ ID NO: 36121 - protein, 246 aa, Asticcacaulis benevestitus
  REGION 1..246: note = tr|V4PFJ2|V4PFJ2_9CAUL 7-cyano-7-deazaguanine synthase OS=Asticcacaulis benevestitus DSM 16100 = ATCC BAA-896 OX=1121022 GN=queC PE=3 SV=1
MSASLDHVPAAKSALVLFSGGQDSSVCLAWALTHFERVETIGFDYGQRHAIEMTTRTTVLEKFREVFPLAATRLGEDHVCDLRGFGAVAESSLTRETEIVMTERGLPSSFVPGRNLVFFVYAAAVADRRGLDHLVGGMCETDFSGYPDCRNETLQAMQTVLQLGVERPFEIHTPLMWIDKAQTWAMSLELGGQPLVDLILEETTTCYKGERGERHPWGYGCGECPACQLRKTGFEHFIENAQPAER

SEQ ID NO: 36122 - protein, 241 aa, Asticcacaulis excentricus
  REGION 1..241: note = tr|A0A3G9G7Q0|A0A3G9G7Q0_9CAUL 7-cyano-7-deazaguanine synthase OS=Asticcacaulis excentricus OX=78587 GN=queC PE=3 SV=1
MTPSDLETVPADRSALVLFSGGQDSTACLAWALTHFERVETIGFDYGQRHAIEMTTRARVLQRFPEVFEPARTRLGDDHVVDLKGFGRVAESSLTREQEIRMGERGLPNSFVPGRNLVFFVYAAAVADRRGIDHLVGGMCETDFSGYPDCRKDTLEAMQTVLNLGIERPYIIDTPLMFLTKAETWALTHQLGGEALVDLVLEDTHTCYMGERGERHEWGYGCGTCPACDLRARGFEQWCNG

SEQ ID NO: 36123 - protein, 241 aa, Asticcacaulis excentricus
  REGION 1..241: note = tr|E8RV79|E8RV79_ASTEC 7-cyano-7-deazaguanine synthase OS=Asticcacaulis excentricus (strain ATCC 15261 / DSM 4724 / VKM B-1370 / CB 48) OX=573065 GN=queC PE=3 SV=1
MTPSDLETVPAECSALVLFSGGQDSTACLAWALTHFERVETIGFDYGQRHAIEMTTRARVLERFPEVFELARTRLGDDHVVDLKGFGRVAESSLTREQEIRMGERGLPNSFVPGRNLVFFVYAAAVADRRGIDHLVGGMCETDFSGYPDCRKDTLEAMQTVLNLGIERPYRIDAPLMFLTKAETWALTHQLGGDALVDLVLEDTHTCYMGERGQRHEWGYGCGTCPACELRARGFEQWRNR

SEQ ID NO: 36124 - protein, 207 aa, Asticcacaulis sp.
  REGION 1..207: note = tr|V4NBL2|V4NBL2_9CAUL 7-cyano-7-deazaguanine synthase OS=Asticcacaulis sp. YBE204 OX=1282363; GN = AEYBE204_09820 PE=3 SV=1
MKAAILLASGGLDSTTVGYKLAEDGFYVLPIFFDYGQHCVETEWAKVREVLPSHFEKPERNTISDLFRGSSSRLIAEANLWEDKVVDDDLYVPYRTLLFYAAAAARAQTLGILSVYTGFINSNHAKEIDCTAEFMNKLDGLSEEIGPVRFVSPFRYWSKFEVTQEALRLGVPIGKTFSCQAASELPCGACPNCVERLAALRQAGLLT

SEQ ID NO: 36125 - protein, 244 aa, Asticcacaulis sp.
  REGION 1..244: note = tr|V4P0C4|V4P0C4_9CAUL 7-cyano-7-deazaguanine synthase OS=Asticcacaulis sp. YBE204 OX=1282363 GN=queC; PE = 3 SV=1
MSDPVSSLEAVPAERSALVLFSGGQDSTACLAWALTQFDRVETVGFDYGQRHHIEMETRTKVLARMRREYVPAQTKLGEDHVVDLKGFGRVAESSLTRDQEIKMGERGLPNSFVPGRNLAFFVYAAAVADRRGIDHLVGGMCETDFSGYPDCRKDTLDAMERVLNLGIERPYIIDTPLMYLTKAETWAMTHDLGGDALVEVVLEETHTCYMGERGERHVWGYGCGTCPACELRANGFEQWRAAK

SEQ ID NO: 36126 - protein, 246 aa, Asticcacaulis taihuensis
  REGION 1..246: note = tr|A0A1G4PXR3|A0A1G4PXR3_9CAUL 7-cyano-7-deazaguanine synthase OS=Asticcacaulis taihuensis OX=260084 GN=queC PE=3 SV=1
MSASLDHVPAAKSALVLFSGGQDSSVCLAWALTHFERVETIGFDYGQRHSIEMTTRTTVLAKFRETFPHWAERLGEDHVCDLRGFGAVAESSLTRETEIVMTERGLPSSFVPGRNLVFFVYAAAVADRRGLDHLVGGMCETDFSGYPDCRNDTLQAMQTVLQLGIERPFEIHTPLMWIDKAQTWALSEELGGEALVDLILEETTTCYKGVRAERHPWGYGCGECPACQLRKTGFEHFLEARTPAER

SEQ ID NO: 36127 - protein, 181 aa, unidentified
  source 1..181: note = Atelocyanobacterium thalassa
  REGION 1..181: note = tr|D3EQS2|D3EQS2_ATETH 7-cyano-7-deazaguanine synthase OS=Atelocyanobacterium thalassa (isolate ALOHA); OX = 1453429 GN=UCYN_11530 PE=3 SV=1
MCDKSLAVVLLSGGLDSATSAAIAAAQGYKLVALSLRYGQLHHKELESAKTIAKELDINSHYIIDVDIAQWGGSSLTDESLSIPLDGVSPHNIPSTYVPGRNTVFIALALSLAEAKGAKAIFLGINMIDYSGYPDCRSEYLKAYQDLANISSKAGIEGNTIELIAPLIKKPKLILFKKLLN

SEQ ID NO: 36128 - protein, 231 aa, unidentified
  source 1..231: note = Atlantibacter hermannii
  REGION 1..231: note = tr|A0A447LK97|A0A447LK97_ATLHE 7-cyano-7-deazaguanine synthase OS=Atlantibacter hermannii; OX = 565 GN=queC PE=3 SV=1
MKRAVVVFSGGQDSTTCLIQALNQYDEVHCVTFDYGQRHRAENDIAKDLAHKLGARAHKVLDVGLLNELAVSSLTRDSIPVPDYDPDASGIPSTFVPGRNILFLTLTAIYAYQVQAEAIITGVCETDFSGYPDCRDEFVKALHHAVNLGMASNIRFETPLMWLNKAETWALADRWGKLDLVRNETLTCYNGIKGDGCGECAACHLRANGLNQYLADKTGVMAQLKRKMDLP

SEQ ID NO: 36129 - protein, 231 aa, unidentified; identical to SEQ ID NO: 36128
  source 1..231: note = Atlantibacter hermannii
  REGION 1..231: note = tr|H5UYG0|H5UYG0_ATLHE 7-cyano-7-deazaguanine synthase OS=Atlantibacter hermannii NBRC 105704 OX=1115512; GN = queC PE=3 SV=1

SEQ ID NO: 36130 - protein, 231 aa, unidentified
  source 1..231: note = Atlantibacter subterranea
  REGION 1..231: note = tr|A0A3R9EYD6|A0A3R9EYD6_9ENTR 7-cyano-7-deazaguanine synthase OS=Atlantibacter subterranea OX=255519 GN=queC PE=3 SV=1
MKRAVVVFSGGQDSTTCLIQALHQYDEVHCVTFDYGQRHRAEIEIAQQLAVKLGARAHKTLDVGLLNELAVSSLTRDSIPVPDYDPDASGIPSTFVPGRNILFLTLTAIYAYQVQAEAIITGVCETDFSGYPDCRDEFVKALHQAVNLGMASNIRFETPLMWLNKAETWALADRWGKLDLVRNETLTCYNGIKGDGCGECAACNLRANGLNQYLADKVGVMAQMKRKTGLN

SEQ ID NO: 36131 - protein, 215 aa, Atopobacter sp.
  REGION 1..215: note = tr|A0A421BEF1|A0A421BEF1_9LACT 7-cyano-7-deazaguanine synthase OS=Atopobacter sp. AH10; OX = 2315861 GN=queC PE=3 SV=1
MMKMVLLSGGVDSSTALALALKKDPNVLAVSFTYNQSHEKMEMKAAQDIADYYQVKRLVIDLATIFKGSHSSLNRANHMAITEGDYAKQESPNTEVEFRNGVFIAILASLAKQYGADEIFFGAHQDDSGTIYPDCSPEFIQAMDLAVQLGTGHQVSLSAPFKQVTKATIVKIGLELGVPYALTYSCYEGTNPPCGKCGTCIDRRKAFQANGLDLL

SEQ ID NO: 36132 - protein, 224 aa, Aulosira laxa
  REGION 1..224: note = tr|A0A1Z4TZ79|A0A1Z4TZ79_9CYAN 7-cyano-7-deazaguanine synthase OS=Aulosira laxa NIES-50; OX = 1541988 GN=queC PE=3 SV=1
MKAVILLSGGLDSSTILYQAKADGYECHALSFDYQQRHQRELESARLVAQKAGVVKHQVVNFDLRQWGGSALTDSSIDLPEERSLDEMSQNIPVTYVPARNTIFLSFALAYAEAIAAQRVYIGVNALDYSGYPDCRPDYIQAMQEVFRLGTKQGREGEPITIAAPLINLKKTEIIQLGNLLGVPWELTWSCYAGADVACGVCDSCRLRLAAFAELGLKDPVAYV

SEQ ID NO: 36133 - protein, 239 aa, Aurantimonas sp.
  REGION 1..239: note = tr|A0A1X0SV77|A0A1X0SV77_9RHIZ 7-cyano-7-deazaguanine synthase OS=Aurantimonas sp. 22II-16-19i OX=1317114 GN=queC PE=3 SV=1
MTEADGALVLFSGGQDSTTCLAVALERFAHVETIGFDYGQRHRVELEVRPRVLAALRAGFPHWAERLGPDHMIDMGVLGQISDTALTRDTAIAMEATGLPNTFVPGRNLLFLGFAGALAYRRGLKHIVTGVCETDYSGYPDCRDDTIKAMQLALNLGMEARFVIDTPLMFIDKAATFALAERLGGEALVDLVVEETHSCYEGDRTHRHAFGYGCGACPACELRARGFERYREAKAANAG

SEQ ID NO: 36134 - protein, 220 aa, unidentified
  source 1..220: note = Aureibacillus halotolerans
  REGION 1..220: note = tr|A0A4R6U3S3|A0A4R6U3S3_9BACI 7-cyano-7-deazaguanine synthase OS=Aureibacillus halotolerans OX=1508390 GN=queC PE=3 SV=1
MGLNEEKAVVVFSGGQDSTTCLFWAKQTFKEVIAVTFNYGQRHAAEIEVAQAIAAEQEVAHHVLDLSLLNQLAPNALTRADIEIEQKDGELPSTFVPGRNLVFLSFAGILAHQVGAKHLVTGVCETDFSGYPDCRDAFVKSLNVTLNLSMDKDFVLHTPLMWLDKADTWGMADDLGVLNYVQQKTLTCYEGIVGVGCGVCPACVLRANGLAAYLQRKEVR

SEQ ID NO: 36135 - protein, 1371 aa, unidentified
  source 1..1371: note = Aureicoccus marinus
  REGION 1..1371: note = tr|A0A2S7T5T6|A0A2S7T5T6_9FLAO Carrier domain-containing protein OS=Aureicoccus marinus OX=754435; GN = BST99_05685 PE=4 SV=1
MNENKRYQLTATQTQMWLAHQLYPEACVLNVVNTFELENSLDRELFDRSFAELQRQLSVFRLVFGIQENHPYQEVRPEPTRGLDWVECAPNEWKALVDHRKTQPLPIEETVFDACVYVLGEEHYVFYLNMHHSVEDATSSTFIWKALWTLYFGFQESGVFPSLDLIPFEQSLTEYGHESLASLDTQYWVQQSAAHIPQRFYGELSKNTLESQQLRYAIGKERLIKLKTLLKEPTFSSFSEDLGVFTILLTVYVAFLSRITQSEKVQLGIPVHHRSGLKARKSPGLWIEFFPFVTEVASGLSFKELYAQIKSEGAEFFKHALPGSSSAEANRSNQAIFNFIGAGFDNPTDWKVRTNWLHSGQSDPAHGIRCHYTKMGESGEPELWFDLNEALFKEDQRNRVGRHYLKLLDAFLDNVEQAFSEVLLEDSSLPAGDMPQVQEVPAVLGEKVNHFLRQADQIALVEGDQQFTYAQFNAALAELSSQLKRAGLQPGDRVGLCSERSSAYVAAVWTCLREGYVFVPLDPAQGAQRLQFIGENAEVSAILCSAEQEEAGLWRSTPHRLLSLSNQIFSSSACLGNPSFPNPDQAAYILYTSGSTGEPKGVVVNQGALSHYVQWAAEKYRPGNESLCMPFFTSIGFDLTLTSLLTPLATGGKVVVIGQKGSGPDLAVLELKNYQEINTVKLTPAHLQLWLSQGGVNPEIESCILGGEDLKNELSVRLFQAGVHRIYNEYGPTEATVGCIVGEFSPEKHREGSTPIGESVPYGGYLLLDEAGVEVVHGLVGQLYLYGANLAQGYWKRADRTAESFVEIAHYPGLRLYKTGDFARVNSDGDLIYLGRRDEQIKRNGFRIELGEIKSALRKQEGLDEVAIVYDQGESNEEVVAKEADTHCSNCGLPSNYPEADFDEEGVCHLCRAFEGYEIKVDQYFKTEDDLVRLLTSKQGRSSHYDCLALLSGGKDSTYVLARLVRMGLRVLAFTLDNGYISDQAKANIQKIVKQLGVDHVYGSTPHMNTIFVDSLHRHQNVCNGCFKTIYTLSTQIALEKDIPFIVTGLSRGQFFETRLTEELFWHTENSTDSIDKIILEARKLYHQEEDAVKSCLDVSMFREASTFEKVEYVDFYRYSHVSLTQMLQFLRTEIGWERPTDTGRSTNCLINQAGIHVHKKKKGYSNYAFPYSWDVRLGHKNRDESLDEINEAIDVTEVERMLDEIGYVDHEAQESNAKLLAFYTGKTNLNKEKVWAQLREVLPDYMVPNDVIQVEEIPLTSRGKVDRKELLSAYHTEGEEQAHAKQPENDIQALIQEIWQKVLRVESPGIESNFIQLGGHSLAAIRVTAQLNEDLGTELPLAWVFEFPTIESYAEALETHMRTLLEEENS

SEQ ID NO: 36136 - protein, 232 aa, Aureimonas altamirensis
  REGION 1..232: note = tr|A0A1M6K2T2|A0A1M6K2T2_9RHIZ 7-cyano-7-deazaguanine synthase OS=Aureimonas altamirensis DSM 21988 OX=1121026 GN=queC PE=3 SV=1
MNTLVVCSGGLDSVSLAYVLAEQGNLGAIVTFDYNQRHRREIDFARRAAERLGKPFHLIDIQPIGAVLSGSALTDAVDVPDGHYAEDTMKATIVPNRNAIMLTIAFGLAAAQKMDAVAIAVHGGDHFIYPDCRPGFIDNFAAMQARALDGFAQVRLLAPFVERSKADIVRAGAEAGTPFAQTWSCYKGGDVHCGRCGTCVERREAFDIAGVSDPTVYADADFWRDAVSRRCA

SEQ ID NO: 36137 - protein, 253 aa, unidentified
  source 1..253: note = Aureimonas flava
  REGION 1..253: note = tr|A0A3A1WI17|A0A3A1WI17_9RHIZ 7-cyano-7-deazaguanine synthase OS=Aureimonas flava; OX = 2320271 GN=queC PE=3 SV=1
MGERQDTALVLFSGGQDSTTCLAWALDRFARVETVGFDYGQRHRVELDVRPRILDRIRRDFPQWGDRIGQDHLLDMGLLAQISQTALTGEMAIAMQANGLPNTFVPGRNLLFLTFAAAIAYRRGARHLVTGVCETDYSGYPDCRDDTMKAMQIALNLGLEARLVVHTPLMWIDKAETFALAERLGGGSLLDLVCEETHTCYQGDRTHRHAWGYGCGACPACELRAQGWERFRCETASGKPTAGGHPAPGPASR

SEQ ID NO: 36138 - protein, 423 aa, unidentified
  source 1..423: note = Aureimonas flava
  REGION 1..423: note = tr|A0A3A1WG10|A0A3A1WG10_9RHIZ Uncharacterized protein OS=Aureimonas flava OX=2320271 GN=D3218_15125 PE=4; SV = 1
MVTRIPTRVLATPNAMRATAAVAHGDVGVALHHIGRPELAGLGGTLNQAAAALPRTPSVLAWDFLSIALAVHAADRFVIRKEAADSWTRMIALEVELADPEPWAAQAGAIEDTLRFLSSDIWSVRFRGGGARPPAVADRPTDRDCACLFSGGLDSLIGALDLRAEGRRPLLVSQASPKEGSVQRTLAGLIGMDAERFSARASERWRQPYEPSSRARSMLFLGYGAVAAASLARDGAPVDLFVPENGLISINAPLTHRRMASLSTRTTHPHFISSLQRVLDGVGLPARIRTPYALKTKGQMLAECRDELIHELAHRSYSCGKGKRLNQHCGRCVPCLIRRASFEAAGMRDGTDYWANDLSEHASNEDVAAARFAAATLERRDVARWASEAGPLPTDPDLRRGHVDVVRRGTAEVKAFLDAIAWP

SEQ ID NO: 36139 - protein, 232 aa, Aureimonas sp.
  REGION 1..232: note = tr|A0A0S2EUA5|A0A0S2EUA5_9RHIZ 7-cyano-7-deazaguanine synthase OS=Aureimonas sp. AU20; OX = 1349819 GN=queC PE=3 SV=1
MKTLVVCSGGLDSVSLAQKYAGEGDLAALVTFDYGQRHKREIDFAREAATRLAVPFHLLDIGPIGAVLSGSALTSDVAVPDGHYAEETMKATVVPNRNAILLTIAFGLAAAQNLDAVAVAVHGGDHFIYPDCRPDFIDAFRHMQAKALEGYASVDLLAPFVHRTKADIVREGARYGTPFERTWSCYKGGEVHCGRCGTCVERREAFHLAGVEDPTRYEDPDFWQAAVASRAG

SEQ ID NO: 36140 - protein, 232 aa, Aureimonas ureilytica
  REGION 1..232: note = tr|A0A175RLW9|A0A175RLW9_9RHIZ 7-cyano-7-deazaguanine synthase OS=Aureimonas ureilytica; OX = 401562 GN=queC PE=3 SV=1
MRTLVVCSGGLDSVSLAHQCAAEGHLGALVTFDYKQRHACEIDYAREAAARLGVPFHLIDIGPIGAVLTGSALTDDVAVPDGHYAEETMKATVVPNRNAIMLTIAFGLAAAQGMDQVALAVHGGDHFIYPDCRPGFIDAFRAMQAAALDGYASVALSAPFVNRTKADIVTAGARVGTPFERTWSCYKGGDVHCGRCGTCVERREAFHLAGVEDPTVYADPDFWQAAVAARAG

SEQ ID NO: 36141 - protein, 232 aa, Aureimonas ureilytica
  REGION 1..232: note = tr|A0A175RDR9|A0A175RDR9_9RHIZ 7-cyano-7-deazaguanine synthase OS=Aureimonas ureilytica; OX = 401562 GN=queC PE=3 SV=1
MRTLVVCSGGLDSVSLAHQCAAEGHLGALVTFDYKQRHACEIDYAREAAARLGVPFHLIDIGPIGAVLTGSALTDDVAVPDGHYAEETMKATVVPNRNAIMLTIAFGLAAAQGLDRVALAVHGGDHFIYPDCRPGFIDAFRAMQAAALDGFAQVALSAPFVNRTKADIVTAGARVGTPFERTWSCYKGGEVHCGRCGTCVERREAFHLAGVEDPTVYADLNFWQAAVAARAG

SEQ ID NO: 36142 - protein, 218 aa, unidentified; identical to SEQ ID NO: 35396
  source 1..218: note = Auricoccus indicus
  REGION 1..218: note = tr|A0A1Q1G311|A0A1Q1G311_9STAP 7-cyano-7-deazaguanine synthase OS=Auricoccus indicus; OX = 1849491 GN=queC PE=3 SV=1

SEQ ID NO: 36143 - protein, 227 aa, Avibacterium avium
  REGION 1..227: note = tr|A0A379AR78|A0A379AR78_AVIAV 7-cyano-7-deazaguanine synthase OS=Avibacterium avium; OX = 751 GN=queC PE=3 SV=1
MTTFKNHNRKAVVIFSGGQDSTTCLIQAIADYGVENVETVTFHYGQRHAIELEKAKWIAQDLGVKQTFIDTSVIKAITSNALMNENAEIKQEKDELPNTFVDGRNALFLLYTAIYAKGQGISDIITGVCETDFSGYPDCRDVFIKSMNVTLNLAMDYNFNLRTPLMYLTKAQTWALADSLGALDYVRNHTHTCYQGVEGGCGECPSCVLRNKGLDEYLQQKSAVQNV

SEQ ID NO: 36144 - protein, 227 aa, Avibacterium endocarditidis
  REGION 1..227: note = tr|A0A2S5AI00|A0A2S5AI00_9PAST 7-cyano-7-deazaguanine synthase OS=Avibacterium endocarditidis OX=380674 GN=queC PE=3 SV=1
MTTFKNHNHKAVVIFSGGQDSTTCLIQAIADYGVENVETVTFHYGQRHAIELEKAKWIAQDLGVKQTFIDTSVIKAITSNALMNENAEIKQEKDELPNTFVDGRNALFLLYTAIYAKGQGISDIITGVCETDFSGYPDCRDVFIKSMNVTLNLAMDYNFNLRTPLMYLTKAQTWALADNLGALDYVRNHTHTCYQGVDGGCGECPSCVLRNKGLDEYLKQKSAVQNV

SEQ ID NO: 36145 - protein, 227 aa, Avibacterium gallinarum
  REGION 1..227: note = tr|A0A379AXW2|A0A379AXW2_AVIGA 7-cyano-7-deazaguanine synthase OS=Avibacterium gallinarum; OX = 755 GN=queC PE=3 SV=1
MTTFKNHNRKAVVIFSGGQDSTTCLIQAIGDYGVENVETVTFHYGQRHAIELEKAKWIAQDLGVKQTFIDTSVIKAITSNALMNENAEIKQEKDELPNTFVDGRNALFLLYTAIYAKGQGISDIITGVCETDFSGYPDCRDVFIKSMNVTLNLAMDYNFNLRTPLMYLTKAQTWALADSLGALDYVRNHTHTCYQGVDGGCGECPSCVLRNKGLDEYLKQKSAVQNV

SEQ ID NO: 36146 - protein, 227 aa, Avibacterium paragallinarum
  REGION 1..227: note = tr|A0A0F5ET42|A0A0F5ET42_AVIPA 7-cyano-7-deazaguanine synthase OS=Avibacterium paragallinarum OX=728 GN=queC PE=3 SV=1
MTTTNIHRRQAVVIFSGGQDSTTCLIQAIADYGKENVQAVTFHYGQRHAIELEKAQWIAQDLGIKQTLIDTSVIKAITTNALMDDHAQIKQAKGELPNTFVDGRNALFLLYTAIYAKGQGISDIITGVCETDFSGYPDCRDVFIKSMNVTLNLAMDYNFNIRTPLMYLTKAQTWELADSLGALDYIRTHTHTCYMGVEGGCGECPSCILRNKGLEEYLQQKSAVQNV

SEQ ID NO: 36147 - protein, 227 aa, Avibacterium paragallinarum; identical to SEQ ID NO: 36146
  REGION 1..227: note = tr|S6FHA6|S6FHA6_AVIPA 7-cyano-7-deazaguanine synthase OS=Avibacterium paragallinarum JF4211 OX=1351754; GN = queC PE=3 SV=1

SEQ ID NO: 36148 - protein, 227 aa, Avibacterium volantium
  REGION 1..227: note = tr|A0A447SSU2|A0A447SSU2_AVIVO 7-cyano-7-deazaguanine synthase OS=Avibacterium volantium; OX = 762 GN=queC PE=3 SV=1
MTTFKNHNRKAVVIFSGGQDSTTCLIQAIADYGVENVETVTFHYGQRHAIELEKAKWIAQDLGVKQTFIDTSVIKAITSNALMNENAEIKQEKDELPNTFVDGRNALFLLYTAIYAKGQGISDIITGVCETDFSGYPDCRDVFIKSMNVTLNLAMDYNFNLRTPLMYLTKAQTWALADSLGALDYVRNHTHTCYQGVDGGCGECPSCVLRNKGLDEYLQQKSAVQNV

SEQ ID NO: 36149 - protein, 230 aa, Azoarcus communis
  REGION 1..230: note = tr|A0A2U8GTW0|A0A2U8GTW0_9RHOO 7-cyano-7-deazaguanine synthase OS=Azoarcus communis; OX = 41977 GN=queC PE=3 SV=1
MTSTPRAIVLLSGGLDSATCLAIAREQGFETYALSVAYGQRHVAELTASKRVAEALGASEHRLARVELGQFGGSALTDPGIAVPEDVEADGIPVTYVPARNTVMLSIAMAWAEVLGARDVFVGVNAVDYSGYPDCRPAFIEAFQTMANLATKAGIEGHGLRIHAPLMTLSKADIVRRGTALGVDYGLTVSCYQAADDGRACGRCDACRLRRAGFEAAGIPDPTPYQHRSA

SEQ ID NO: 36150 - protein, 230 aa, Azoarcus communis
  REGION 1..230: note = tr|A0A323V1I0|A0A323V1I0_9RHOO 7-cyano-7-deazaguanine synthase OS=Azoarcus communis SWub3 = DSM 12120 OX=1121029 GN=queC PE=3 SV=1
MNTTPRAVVLLSGGLDSATCLAIARDMGFETYALSVAYGQRHAAELTASKRVADALGAREHRLARVELGQFGGSALTDASIAVPEDGDTGGIPVTYVPARNTVMLSIAMAWAEVLDARDIFVGVNAVDYSGYPDCRPAFIEAFQAMANLATKAGVEGHGLRIHAPLIELSKADIICRGSALGVDYGLTVSCYQADDSGRACGRCDACRLRRAGFDAAGLPDPTPYQHRNG

SEQ ID NO: 36151 - protein, 230 aa, Azoarcus indigens
  REGION 1..230: note = tr|A0A4R6E289|A0A4R6E289_9RHOO 7-cyano-7-deazaguanine synthase OS=Azoarcus indigens; OX = 29545 GN=queC PE=3 SV=1
MTDKQRAVVLLSGGLDSATCLAIARDMGLETYALSVSYGQRHAAELTASKRVADALGAREHRLARVGLGQFGGSALTDPSIAVPEDVEAEGIPVTYVPARNTVMLSIALAWAEVLDARHIFVGVNAVDYSGYPDCRPAFIKAFETMANLATKAGVEGNGVTIHAPLIDLSKADIIRRGTALGVDYSLTVSCYQADDSGRACGRCDACRLRRAGFEAAGISDPTPYQPRNL

SEQ ID NO: 36152 - protein, 231 aa, Azoarcus sp.
  REGION 1..231: note = tr|A0A4S4AM21|A0A4S4AM21_9RHOO 7-cyano-7-deazaguanine synthase OS=Azoarcus sp. CC-YHH848; OX = 2565932 GN=queC PE=3 SV=1
MTQTRRAIVLLSGGLDSATCLAIARDMGFECYALSVAYGQRHAAELTASKRVAEALGAREHRLAMVNLGQFGGSALTDPTIPVPEEAGSGGIPVTYVPARNTVMLSIALAWAEVLGAHDIFVGVNAVDYSGYPDCRPEFIRAFETMANLATKAGVEDDARMTIHAPLIELSKAEIITLGTRLGVDYGLTVTCYQADDQGRACGRCEACRLRRAGFEAAGIADPTPYQQRGN

SEQ ID NO: 36153 - protein, 228 aa, Azoarcus sp.
  REGION 1..228: note = sp|A1K2H5|QUEC_AZOSB 7-cyano-7-deazaguanine synthase; OS = Azoarcus sp. (strain BH72) OX=62928 GN=queC PE=3 SV=1
MTDLPRAVVLLSGGLDSATCLAIARDMGLETYALSVAYGQRHAAELTASRRVAHALGAREHRVASVSLGEFGGSALTDPAIAVPEDAAPGGIPVTYVPARNTVMLSMALAWAEVLGARHIFVGVNAVDYSGYPDCRPAFIQAFETMANLATKAGVEGHPTTIHAPLIDLSKADIIRRGVALGVDYGLTVSCYQADDDGRACGRCDACRLRREGFAAAGIADPTRYQAR

SEQ ID NO: 36154 - protein, 227 aa, Azoarcus tolulyticus
  REGION 1..227: note = tr|A0A1N6N971|A0A1N6N971_9RHOO 7-cyano-7-deazaguanine synthase OS=Azoarcus tolulyticus; OX = 34027 GN=queC PE=3 SV=1
MPDHPKRAVILLSGGLDSATCLAIARDMGFETYALSVAYGQRHAAELDAARRVAASLGAREHRVASVELGQFGGSALTDEKIPVPVEGSSDGIPVTYVPARNTVMLSIALAWAEVLGANDIFVGVNAVDYSGYPDCRPEFIAAFETMANLATKAGVEGTRLQIHAPLIALSKADIIRRGSALGVDYSQTVSCYQADDAGHACGMCDACRLRRAGFEAAAVPDPTRYA

SEQ ID NO: 36155 - protein, 224 aa, Azomonas agilis
  REGION 1..224: note = tr|A0A562I183|A0A562I183_9GAMM 7-cyano-7-deazaguanine synthase OS=Azomonas agilis; OX = 116849 GN=queC PE=3 SV=1
MSTKKAIILLSGGLDSATVAAIARAEQYDCYSLSFDYGQRHRAELQASERVARHLGMREHKIIGLNLGSIGGSALTDERIAVPETPSQGIPVTYVPARNTVFLALALGWAEVVGAQDIFIGVNAVDYSGYPDCRPEFINAFEQLANLATKAGVEGQSFHIRTPLQYWTKAQIIQEGVKLGVDYRLTVSCYQADALGRACGKCDSCRLRAAGFAAAGVLDPTEYF

SEQ ID NO: 36156 - protein, 225 aa, Azonexus fungiphilus
  REGION 1..225: note = tr|A0A495VPM1|A0A495VPM1_9RHOO 7-cyano-7-deazaguanine synthase OS=Azonexus fungiphilus; OX = 146940 GN=queC PE=3 SV=1
MKEKAIVLLSGGLDSATCLAIARSQGFDCYCLSFDYGQRHSAELQAAERVVKALGAAEHRVINFGLAQFGGSALTDTSIAVPVDGLQSGIPVTYVPARNTIMLSLALAWAEVLGSRDIFVGVNAVDYSGYPDCRPEYIAAFEKMANLATRAGVEGQKLHIHAPLIDLSKAEIVRRGTALGVDYGLTVSCYQADELGRACGVCDSCRLRAEGFAAAGLPDPTPYRT

SEQ ID NO: 36157 - protein, 457 aa, Azonexus hydrophilus
  REGION 1..457: note = tr|A0A1R1I8F4|A0A1R1I8F4_9RHOO Uncharacterized protein OS=Azonexus hydrophilus OX=418702 GN=BJN45_07885; PE = 4 SV=1
MTSPLPLKELAVDVVEAGARRRKGMVPCRLGQNIDFDLEALESYSSIKWQTTVYDALVVAAVVEFCDRSLARSAMNWGRKFLVHIPVHDPDKWSEKTVTRALVEALNLLTGDDWHFEFRARKASAECPPQDRMRFPSNAEAVLAYSDGMDSCAVAGLESNRLGRRLVRVRVGSKQHDVSKKDRLRIPFTALPYSVKLDNGRNAENSARSRGFKFSVVSTMAAYLIDAPSVIVPESGQGALAPVFLPVGQGYEDYRSYPGFTALMARFFNALLGYQIQYRFPRLWMTKGETLREFVDVCGSEARWATTRSCWQQSRQVAVSGERRQCGVCAACMLRRLSVHAAGLNEPPETYVWESLKAATWESGAAKDFASFTLALREYSIAGVLHFEHFASLRESVQYELIKRRRTNELARSLSEPPAAVAQNLDRLLQQHAIEWSVFTNDLGSRSFVRQWIDDAL

SEQ ID NO: 36158 - protein, 225 aa, Azonexus hydrophilus
  REGION 1..225: note = tr|A0A1R1I3K5|A0A1R1I3K5_9RHOO 7-cyano-7-deazaguanine synthase OS=Azonexus hydrophilus; OX = 418702 GN=queC PE=3 SV=1
MNEKAVVLLSGGLDSATCLAIARSQGFDCYCLSFNYGQRHTAELQAADRVVKALGASEHRVLNLGLAQFGGSALTDTSIAVPVDGVQPGIPVTYVPARNTIMLSLALAWAEVLGSRDIFVGINAVDYSGYPDCRPDYLAAFETMANLATRAGVEGQKLSIHAPLINLTKADIIRTGHALGVDYGLTVSCYQADELGRACGVCDSCRLRAEGFAAAGIPDPTAYRT

SEQ ID NO: 36159 - protein, 241 aa, Azorhizobium caulinodans
  REGION 1..241: note = sp|A8IMX7|QUEC_AZOC5 7-cyano-7-deazaguanine synthase; OS = Azorhizobium caulinodans (strain ATCC 43989 / DSM 5975 / JCM 20966 / NBRC 14845 / NCIMB 13405 / ORS 571) OX=4 38753 GN=queC PE=3 SV=1
MSADAGPGSGALVLFSGGQDSTTTLAWALDRFERVETLGFDYGQRHRIELDCRVKVRAAMAALNPAWAAKLGEDHTLALDALGAVSDTALTRDVAIEMTEGGLPNTFVPGRNIVFLTFAAALAYRRGLKHIVGGMCETDFSGYPDCRDDTIKALQVALNLGMDRRFVLETPLMWIDKAETWRLAERLGGRALVDLIVEDTHTCYLGERGPRHPWGHGCGTCPACQLRAEGFARYEAARVSE

SEQ ID NO: 36160 - protein, 239 aa, Azorhizobium sp.
  REGION 1..239: note = tr|A0A258K9S7|A0A258K9S7_9RHIZ 7-cyano-7-deazaguanine synthase OS=Azorhizobium sp. 32-67-21 OX=1970319 GN=queC PE=3 SV=1
MSGPLQEGGALVLFSGGQDSTTCLAWALERFDRVETVGFDYGQRHRVELEHRKSLMVGLSRLNGAWARRLKDDHTLSLSALGKVSETALTRNVAIDMEEDGLPNTFVPGRNIIFLTFAAALAYRRGLKHIVGGMCETDYSGYPDCRDDTIKALQVAINLGMERRFVLDTPLMWIDKAATWRLAESLGGPALVDLIIEDTHTCYLGERGARHAWGHGCGTCPACILRAEGYARYRAEAVG

SEQ ID NO: 36161 - protein, 37 aa, Azorhizobium sp.
  REGION 1..37: note = tr|A0A258N2A7|A0A258N2A7_9RHIZ Uncharacterized protein (Fragment) OS=Azorhizobium sp. 35-67-15 OX=1970320; GN = B7Y65_03140 PE=4 SV=1
MTAEEGIVADGALVLFSGGQDSTTCLAWALERFARVE

SEQ ID NO: 36162 - protein, 229 aa, Azospira oryzae
  REGION 1..229: note = tr|G8QFE9|G8QFE9_AZOOP 7-cyano-7-deazaguanine synthase OS=Azospira oryzae (strain ATCC BAA-33 / DSM 13638 / PS) OX=640081 GN=queC PE=3 SV=1
MTDIRPAIVLLSGGLDSATCLAIAKSEGFAPYCLSFDYGQRHKAELQAAARVAAALGAKEHRVVRLDIGQFGGSALTDSSIAVPVEGVQAGGIPVTYVPARNTVMLSFALAWAEVLGAKDIFVGVNAVDYSGYPDCRPEFIAAFERMANLATKAGVEGAELHVHAPLIDLTKAQIIQRGTALGVDYGITVSCYQADDEGRACGVCDSCRLRAEGFRAAGLADPTPYRSA

SEQ ID NO: 36163 - protein, 228 aa, Azospira oryzae
  REGION 1..228: note = tr|A0A2W5HL27|A0A2W5HL27_9RHOO 7-cyano-7-deazaguanine synthase OS=Azospira oryzae; OX = 146939 GN=queC PE=3 SV=1
MANGAKKAVVLLSGGLDSATALAVAKNEGYDCYPLSVDYGQRHAAELKAAERVAQALGARALKRVKLDLTVFGGSALTDASIAVPEMPGPGIPVTYVPARNTILLSLALAYAEVLGVQHIFIGANAVDYSGYPDCRPEYLRAYEAMANLATKAAVEGARLTLHAPLVNLSKAEIIRRGVALGVDYAITVSCYQATEDGLACGRCDACRLRRAGFEAAGVPDPTRYQSR

SEQ ID NO: 36164 - protein, 229 aa, Azospira sp.
  REGION 1..229: note = tr|A0A5H2YDY3|A0A5H2YDY3_9RHOO 7-cyano-7-deazaguanine synthase OS=Azospira sp. I09; OX = 1765049 GN=queC PE=4 SV=1
MTDIRPAIVLLSGGLDSATCLAIAKSEGFAPYCLSFDYGQRHKAELQAAARVAAALGAKEHRVVRLDIGQFGGSALTDSSIAVPVEGVQAGGIPVTYVPARNTVMLSFALAWAEVLGAKDIFVGVNAVDYSGYPDCRPEFIAAFERMANLATKAGVEGAELHVHAPLIDLTKAQIVQRGTALGVDYGITVSCYQADDEGRACGVCDSCRLRAEGFRAAGLADPTPYRSA

SEQ ID NO: 36165 - protein, 231 aa, Azospira sp.
  REGION 1..231: note = tr|A0A2R5EHX9|A0A2R5EHX9_9RHOO 7-cyano-7-deazaguanine synthase OS=Azospira sp. I13; OX = 1765050 GN=queC PE=3 SV=1
MTSLRPAIVLLSGGLDSATCLAIAKSEGFAPYCLSFDYGQRHRAELQAAARVAAALGAQEHRTVRLDIGQFGGSALTDSAIAVPTDGVQPGIPVTYVPARNTVMLSFALAWAEVLGAQDIFVGVNAVDYSGYPDCRPEYIAAFEHMANLATKAGVEGHRLSIHAPLIDLSKARIIQTGSGLGVDYALTVSCYQADDQGRACGACDSCRLRKEGFNAAGLPDPTPYQPARQP

SEQ ID NO: 36166 - protein, 232 aa, Azospirillum brasilense
  REGION 1..232: note = tr|A0A060DJI1|A0A060DJI1_AZOBR 7-cyano-7-deazaguanine synthase OS=Azospirillum brasilense; OX = 192 GN=queC PE=3 SV=1
MTARNAVVLVSGGLDSTTVLAIAREQGYRLNALSFRYGQRHAVELEAAKRVAAAMAVDRHVIADIDLRAFGGSALTDAIDVPKHASAADLGTGIPVTYVPARNTVFLSFALAWAETLEASDIFIGVNALDYSGYPDCRPEYIAAFETMANLATKAGVEGASRFKIHAPLMTLDKAGIIRRGLELGVDYGLTHSCYDPAPDGAACGSCDSCLLRLKGFAEAGLADPVAYGGGA

SEQ ID NO: 36167 - protein, 232 aa, Azospirillum brasilense
  REGION 1..232: note = tr|G8AIV4|G8AIV4_AZOBR 7-cyano-7-deazaguanine synthase OS=Azospirillum brasilense Sp245 OX=1064539; GN = queC PE=3 SV=1
MNAKNAVVLVSGGLDSTTVLAIAREQGYRLNALSFRYGQRHAVELEAAKRVAAAMAVDRHVIADIDLRAFGGSALTDAIAVPKHASAADLGTGIPVTYVPARNTVFLSFALAWAETLQASDIFIGVNALDYSGYPDCRPEYIAAFETMANLATKAGVEGSSRFKIHAPLMTLDKAGIIRRGLELGVDYGLTHSCYDPAPDGTACGSCDSCLLRLKGFQEAGLSDPVAYGGGV

SEQ ID NO: 36168 - protein, 231 aa, Azospirillum doebereinerae
  REGION 1..231: note = tr|A0A433JFT1|A0A433JFT1_9PROT 7-cyano-7-deazaguanine synthase OS=Azospirillum doebereinerae OX=92933 GN=queC PE=3 SV=1
MKAKNAVVLVSGGLDSTTVLAIAKHEGYRVNALSFRYGQRHAVELEAARRVVAAMGVERHVIADIDLRAFGGSALTDAIDVPKHDHASDLGGGIPVTYVPARNTVFLSFALAWAETLGAQDLFIGVNAMDYSGYPDCRPEYIAAFETLANLATKAGVEGTSRFTIHAPLMTLDKAGIVQRGLELGVDYSLTHSCYDPAPDGTSCGACDSCLLRLRGFAEAGLADPIAYAKR

SEQ ID NO: 36169 - protein, 466 aa, Azospirillum doebereinerae
  REGION 1..466: note = tr|A0A433IZD8|A0A433IZD8_9PROT ATPase; OS = Azospirillum doebereinerae OX=92933 GN=EJ913_30870 PE=4; SV = 1
MSPVDYYLQRDLPRLNVDVVEDGNKPKRGFEGCIIGKDITFKADSIASYFFVSWNPTVHDALLVAASAEFCDRNQRRPSNGWGREFNLRIPVHEPGLWSSKPVSDALHDALRFLTGDRWDITFYARKKHKEPPPQILMELGRPVSAVIPYSDGLDSRAVAGLMGKKLGDGLVRVRLGTGGIDKKSRKKEPFMAVPYSVKTREHTPEPSARIRGFKFTLLSGLAAYLAKADTVFIPESGQGALGPTIVPVGQAYTDYRNHPLFTAKMETLLRRLLGYKVHFVFPQLWNTKGETLRMYMEECDIAPSRLVNTKSCWQGSRQVSINGSSRQCGICAACMLRRMSLHAAGVAEPSGNYVWEKLNTVTLEAGASQEFRRDKITPAMREYAIAGALHMDHLAALRHSPANSALISLSTFQLSQTLGLPPAIVRVHLDRLLAQHEKEWKEFMCSLGPTSFLAEWAVHGYDHAA

SEQ ID NO: 36170 - protein, 239 aa, unidentified
  source 1..239: note = Azospirillum humicireducens
  REGION 1..239: note = tr|A0A168YCS7|A0A168YCS7_9PROT 7-cyano-7-deazaguanine synthase OS=Azospirillum humicireducens OX=1226968 GN=queC PE=3 SV=1
MGVPKQAVVLVSGGLDSTTVLAIAKAEGYRVNALSFRYGQRHSVELEAARRVVAAMGVERHVIADIDLRAFGGSALTDSIDVPKHDSAAELEAGLEQGIPVTYVPARNTVFLSFALAWAETLGASDLFIGVNALDYSGYPDCRPDYIAAFETLANLATKAGVEGTSRFKIHAPLMTLDKAAIVRRGLELGVDYGLTHSCYDPTPEGLSCGACDSCLLRLKGFAEAGLSDPIRYDSGMIS

SEQ ID NO: 36171 - protein, 246 aa, Azospirillum lipoferum
  REGION 1..246: note = tr|A0A1X7PY31|A0A1X7PY31_AZOLI 7-cyano-7-deazaguanine synthase OS=Azospirillum lipoferum; OX = 193 GN=queC PE=3 SV=1
MTTRDAVVLVSGGLDSTTVLAIARHEGYRVNALSFRYGQRHSVELDAARRVVAAMGVERHVVADIDLRAFGGSALTDSIDVPKHETAADLGADIPVTYVPARNTVFLSFALAWAETLGAQDLFIGVNALDYSGYPDCRPEYIAAFETLANLATKAGVEGTSRFKIHAPLMTLDKAAIVRRGLELGVDYSLTHSCYDPAPDGTSCGTCDSCLLRLKGFSEAGMTDPIRYAAGNSPLGRTASTSAIST

SEQ ID NO: 36172 - protein, 246 aa, Azospirillum lipoferum
  REGION 1..246: note = tr|G7Z8R7|G7Z8R7_AZOL4 7-cyano-7-deazaguanine synthase OS=Azospirillum lipoferum (strain 4B) OX=862719; GN = queC PE=3 SV=1
MADQDKTMGAAKEAVVLVSGGLDSTTVLAIAKAEGYRVNALSFRYGQRHSVELEAARRVVAAMGVERHVIADIDLRAFGGSALTDSIDVPKHDSAAELEADPGQGIPVTYVPARNTVFLSFALAWAETLGASDLFIGVNALDYSGYPDCRPEYIAAFEALANLATKAGVEGTSRFKIHAPLMTLDKAGIVRRGLELGVDYSLTHSCYDPTPEGLSCGACDSCLLRLKGFSEAGMSDPIRYAAGTAP

SEQ ID NO: 36173 - protein, 238 aa, Azospirillum oryzae
  REGION 1..238: note = tr|A0A1X7GG44|A0A1X7GG44_9PROT 7-cyano-7-deazaguanine synthase OS=Azospirillum oryzae; OX = 286727 GN=queC PE=3 SV=1
MADLGESRQAVVLVSGGLDSTTVLAIAKAEGYRVNALSFRYGQRHSVELEAARRVVAAIGVERHVIADIDLRAFGGSALTDAIDVPKHDNAAGLGEGIPVTYVPARNTVFLSFALAWAETLGASDLFIGVNALDYSGYPDCRPEYIAAFETLANLATKAGVEGTSRFKIHAPLMQMDKAAIVRRGLELGVDYSLTHSCYDPTPEGLSCGACDSCLLRLKGFSEAGTTDPIRYASGTDK

SEQ ID NO: 36174 - protein, 242 aa, Azospirillum oryzae
  REGION 1..242: note = tr|A0A5A9GAQ9|A0A5A9GAQ9_9PROT 7-cyano-7-deazaguanine synthase OS=Azospirillum oryzae; OX = 286727 GN=queC PE=3 SV=1
MAALGESRQAVVLVSGGLDSTTVLAIAKAEGYRVNALSFRYGQRHSVELEAAQRVVAAMGVERHVIADIDLRAFGGSALTDSIDVPKHDSAADLAAGLGEGIPVTYVPARNTVFLSFALAWAETLGASDLFIGVNALDYSGYPDCRPEYIAAFETLANLATKAGVEGTSRFRIHAPLMRMDKAAIVRRGLELGVDYSLTHSCYDPTPEGLSCGACDSCLLRLKGFSEAGTTDPIRYANGTNK

SEQ ID NO: 36175 - protein, 242 aa, unidentified
  source 1..242: note = Azospirillum palustre
  REGION 1..242: note = tr|A0A2B8BA73|A0A2B8BA73_9PROT 7-cyano-7-deazaguanine synthase OS=Azospirillum palustre; OX = 2044885 GN=queC PE=3 SV=1
MADRNGVRDAVVLVSGGLDSTTVLAIAKAEGYRVNALSFRYGQRHSVELEAARRVVSAMGVERHVIADIDLRAFGGSALTDSIAVPKHDSAAGLQAGLGEGIPVTYVPARNTVFLSFALAWAETLGSSDLFIGVNALDYSGYPDCRPEYIAAFETLANLATKAGVEGTSRFKIHAPLMMLDKAAIVRRGLELGVDYSLTHSCYDPTPEGLSCGACDSCLLRLKGFSEAGMTDPIRYDTGTKA

SEQ ID NO: 36176 - protein, 242 aa, Azospirillum sp.
  REGION 1..242: note = tr|A0A2U1WEX3|A0A2U1WEX3_9PROT 7-cyano-7-deazaguanine synthase OS=Azospirillum sp. TSA6c; OX = 709813 GN=queC PE=3 SV=1
MADRNGVRDAVVLVSGGLDSTTVLAIAKAEGYRVNALSFRYGQRHSVELEAARRVVAAMGVERHVIADIDLRAFGGSALTDSIAVPKHDSAADLQAGLGEGIPVTYVPARNTVFLSFALAWAETLGSSDLFIGVNALDYSGYPDCRPEYIAAFETLANLATKAGVEGTSRFKIHAPLMTLDKAAIVRRGLELGVDYSLTHSCYDPTPEGLSCGACDSCLLRLKGFSEAGMTDPIRYDTGTKA

SEQ ID NO: 36177 - protein, 242 aa, Azospirillum sp.
  REGION 1..242: note = tr|A0A2U1X338|A0A2U1X338_9PROT 7-cyano-7-deazaguanine synthase OS=Azospirillum sp. TSH20; OX = 652754 GN=queC PE=3 SV=1
MADQDRSKPAVVLVSGGLDSTTVLAIAKAGGYRVNALSFRYGQRHSVELEAAQRVVAAMGVERHVIADIDLRAFGGSALTDAIDVPKHDSAADLAAGLGEGIPVTYVPARNTVFLSFALAWAETLGASDLFIGVNALDYSGYPDCRPEYVAAFETLANLATKAGVEGTSRFKIHAPLMQMDKAAIVRRGLELGVDYSLTHSCYDPTSEGLSCGACDSCLLRLKGFSEAGTTDPIRYASGTNK

SEQ ID NO: 36178 - protein, 238 aa, Azospirillum thiophilum
  REGION 1..238: note = tr|A0A0F2KZ00|A0A0F2KZ00_9PROT 7-cyano-7-deazaguanine synthase OS=Azospirillum thiophilum; OX = 528244 GN=queC PE=3 SV=1
MVERDGQKDAVVLVSGGLDSTTVLAIAKAEGYRVNALSFRYGQRHAVELEAARRVVAAMGVERHVVADIDLRAFGGSALTDAIAVPKHGSAAELGDGIPVTYVPARNTVFLSFALAWAETLGASDLFIGVNALDYSGYPDCRPEYIAAFETLANLATKAGVEGTSRFRIHAPLMTLDKAGIIRRGQELGVDYSLTHSCYDPTPDGQSCGTCDSCLLRLKGFSEAGMIDQIRYESGMNG

SEQ ID NO: 36179 - protein, 224 aa, Azotobacter beijerinckii
  REGION 1..224: note = tr|A0A1I4D8M0|A0A1I4D8M0_9GAMM 7-cyano-7-deazaguanine synthase OS=Azotobacter beijerinckii OX=170623 GN=queC PE=3 SV=1
MNERKAVILLSGGLDSATVVALARAEGYACYSMSFDYGQRHRAELRAAERVARQLGVVEHKVVGLDLGGIGGSALTDLAIAVPETPSEGIPVTYVPARNTVFLALALGWAEVLGARDIFIGVNAVDYSGYPDCRPAFIEAFERMANLATKAGVEGRGLRIQAPLQNLGKAEIIRAGLCHGVDYGLTVSCYQADEDGRACGKCDSCRLRVAGFAAAGVADPTRYV

SEQ ID NO: 36180 - protein, 224 aa, Azotobacter beijerinckii
  REGION 1..224: note = tr|A0A1H6RSF8|A0A1H6RSF8_9GAMM 7-cyano-7-deazaguanine synthase OS=Azotobacter beijerinckii OX=170623 GN=queC PE=3 SV=1
MNERKAVILLSGGLDSATVVALARAEGYACYSMSFDYGQRHRAELRAAERVARQLGVVEHKVVGLDLGGIGGSALTDLAIAVPETPSEGIPVTYVPARNTVFLALALGWAEVLGARDIFIGVNAVDYSGYPDCRPAFIEAFERMANLATKAGVEGQGLRILAPLQNLGKAEIIRVGLCHGVDYGLTVSCYQADEDGRACGKCDSCRLRVAGFAAAGVADPTRYV

SEQ ID NO: 36181 - protein, 224 aa, Azotobacter chroococcum
  REGION 1..224: note = tr|A0A0C4WR40|A0A0C4WR40_9GAMM 7-cyano-7-deazaguanine synthase OS=Azotobacter chroococcum NCIMB 8003 OX=1328314 GN=queC PE=3 SV=1
MSEKKAVILLSGGLDSATVLALAQAEGYACYSMSFDYGQRHRAELRAAERVARQLGVVEHKVIGLNLDGIGGSALTDSSIAVPEAPGEGIPVTYVPARNTVFLALALGWAEVLEAHEIFIGVNAVDYSGYPDCRPAFIEAFERLANLATKAGVEGRGFHIQAPLQNLGKAEIIQVGLRHGVDYGLTVSCYQADEEGRACGKCDSCRLRAAGFAAAGVADPTRYI

SEQ ID NO: 36182 - protein, 224 aa, Azotobacter chroococcum
  REGION 1..224: note = tr|A0A4U1KSY6|A0A4U1KSY6_9GAMM 7-cyano-7-deazaguanine synthase OS=Azotobacter chroococcum; OX = 353 GN=queC PE=3 SV=1
MSEKKAVILLSGGLDSATVLALAQAEGYACYSMSFDYGQRHRAELRAAERVARQLGVVEHKVIGLNLDGIGGSALTDSSIAVPEAPGEGIPVTYVPARNTVFLALALGWAEVLEAHEIFIGVNAVDYSGYPDCRPAFIEAFERLANLATRAGVEGRGFHIQAPLQNLGKAEIIQVGLRHGVDYGLTVSCYQADEEGRACGKCDSCRLRAAGFAAAGVADPTRYI

SEQ ID NO: 36183 - protein, 224 aa, Azotobacter vinelandii
  REGION 1..224: note = tr|M9YL54|M9YL54_AZOVI 7-cyano-7-deazaguanine synthase OS=Azotobacter vinelandii CA6 OX=1283331 GN=queC; PE = 3 SV=1
MNEKKAVILLSGGLDSATVAALAKTEGYACYSMSFDYGQRHRAELRAAERVARQLGMVEHKVIGLDLGGIGGSALTDPAIAVPESPCEGIPVTYVPARNTVFLALALGWAEVLGARDIFIGVNAVDYSGYPDCRPAFIEAFERMANLATKAGVEGQGFRIRAPLQNLGKDEIIRAGLRHGVDYGLTVSCYQADEEGRACGRCDSCRLRAAGFATAGVTDPTRYG

SEQ ID NO: 36184 - protein, 224 aa, Azotobacter vinelandii; identical to SEQ ID NO: 36183
  REGION 1..224: note = sp|C1DRE9|QUEC_AZOVD 7-cyano-7-deazaguanine synthase; OS = Azotobacter vinelandii (strain DJ / ATCC BAA-1303); OX = 322710 GN=queC PE=3 SV=1

SEQ ID NO: 36185 - protein, 219 aa, unidentified; identical to SEQ ID NO: 35689
  source 1..219: note = Bacillaceae bacterium
  REGION 1..219: note = tr|A0A3E0JRL0|A0A3E0JRL0_9BACI 7-cyano-7-deazaguanine synthase OS=Bacillaceae bacterium; OX = 1889774 GN=queC PE=3 SV=1

SEQ ID NO: 36186 - protein, 220 aa, unidentified
  source 1..220: note = Bacillaceae bacterium
  REGION 1..220: note = tr|A0A271M152|A0A271M152_9BACI 7-cyano-7-deazaguanine synthase OS=Bacillaceae bacterium SAOS 7 OX=2015052 GN=queC PE=3 SV=1
MKKEKAVVVFSGGQDSTTCLFWAKERFEEVIAVTFDYGQRHKLELECAADIAKDLQVPHHVLDMSLLNQLSPNALTRTDIEIDEKEGELPSTFVEGRNLLFLSFAAVLAKQYGAKHLITGVCETDFSGYPDCRDVFIKSLNVTLNLSMDTSFVIHTPLMWLDKAETWELADQLGAFDYVRERTLTCYNGIKGSGCGECPACKLRQRGLDQYLAKKGAEQA

SEQ ID NO: 36187 - protein, 219 aa, unidentified
  source 1..219: note = Bacilli bacterium
  REGION 1..219: note = tr|A0A0K0GBG4|A0A0K0GBG4_9FIRM 7-cyano-7-deazaguanine synthase OS=Bacilli bacterium VT-13-104 OX=1637974 GN=queC PE=3 SV=1
MEKDNAIVVFSGGQDSTTCLFWAKEQFKEVETVTFDYGQRHQLEIECAKEIAEDLGVKHHILDMSLLHQLAPNALTRDDMEIADGDGTRLPNTFVPGRNLLFLSFAGVLAKQVGARHLVTGVSETDFSGYPDCRDSFIKSLNVTLNLAMDEGFVIHTPLMWLDKKEVWRLSDDLGVMDLIREKTLTCYNGIKADGCGKCPACKLRNHGLEQYLLTKGEK

SEQ ID NO: 36188 - protein, 219 aa, Bacillus aerius
  REGION 1..219: note = tr|A0A3A9DHW0|A0A3A9DHW0_9BACI 7-cyano-7-deazaguanine synthase OS=Bacillus aerius; OX = 293388 GN=queC PE=3 SV=1
MKQEKAIVVFSGGQDSTTCLLWALRQFQEVEAVTFQYNQRHREEIEVAKKIAEKLGVKHHLLDMELLNQLAPNALTRDDIEIEAKEGELPSTFVPGRNLVFLSFASILAYQVGARHIITGVCETDFSGYPDCRDEFVKSCNVTVNLAMERPFVIHTPLMWLNKAETWELADELDALDFVKNETLTCYNGIIADGCGECPACKLRANGYNEYMKMKKERA

SEQ ID NO: 36189 - protein, 218 aa, Bacillus aerophilus
  REGION 1..218: note = tr|A0A410KUP2|A0A410KUP2_9BACI 7-cyano-7-deazaguanine synthase OS=Bacillus aerophilus; OX = 293389 GN=queC PE=3 SV=1
MKNEKAVVVFSGGQDSTTCLLWALQQFKEVETVTFHYNQRHQEEIDVAKRIADKLGVKNHLLDMSLLNQLAPNALTRDDIDIEEKEGELPSTFVPGRNLVFLSFASILAYQIGARHIITGVCETDFSGYPDCRDEFVKSCNVTVNLAMEKPFVIHTPLMWLNKAETWKLADELNALDFVKNETLTCYNGIISDGCGECPACKLRKNGYDTYMDMKEAN

SEQ ID NO: 36190 - protein, 222 aa, Bacillus akibai
  REGION 1..222: note = tr|W4QWK3|W4QWK3_BACA3 7-cyano-7-deazaguanine synthase OS=Bacillus akibai (strain ATCC 43226 / DSM 21942 / JCM 9157 / 1139) OX=1236973 GN=queC PE=3 SV=1
MREEKAVVVFSGGQDSTTCLLWALEQFKEVATVTFDYGQRHHEEIECAREIAQELGVSFHVLDMKLINQLSANALTREDIEVKAGKDGELPSTFVPGRNHLFLSFAAVYAQAIGARHIITGVCETDFSGYPDCRDSFVKSLNVTLNLAMDAQFVIHTPLMWLNKEETWKLADELNALDFVREKTLTCYHGIRGNGCGECPACELRKQGLNAYLDKKEGGKAK

SEQ ID NO: 36191 - protein, 220 aa, unidentified
  source 1..220: note = Bacillus albus
  REGION 1..220: note = tr|A0A1J9U5J2|A0A1J9U5J2_9BACI 7-cyano-7-deazaguanine synthase OS=Bacillus albus; OX = 2026189 GN=queC PE=3 SV=1
MKKEKAVVVFSGGQDSTTCLFWAIEQFAEVEAVTFNYNQRHKLEIDCAAEIAKELGIKHTVLDMSLLNQLAPNALTRTDMEITHEEGELPSTFVDGRNLLFLSFAAVLAKQVGARHIVTGVCETDFSGYPDCRDVFVKSLNVTLNLSMDYPFVIHTPLMWIDKAETWKLSDELGAFEFVREKTLTCYNGIIGDGCGECPACQLRKAGLDTYLQEREGANN

SEQ ID NO: 36192 - protein, 222 aa, Bacillus alcalophilus
  REGION 1..222: note = tr|A0A094XJ42|A0A094XJ42_BACAO 7-cyano-7-deazaguanine synthase OS=Bacillus alcalophilus ATCC 27647 = CGMCC 1.3604 OX=1218173 GN=queC PE=3 SV=1
MLKDEKAVVVFSGGQDSTTCLVWALKTFKEVATVTFDYGQRHRDEIECAKEIADELGVSFKVLDLQLISQLSANALTRDDIEIEAGKDGELPSTFVEGRNHLFLSFAAIYAKQIGARHVVTGVCETDFSGYPDCRDSFIKSLNVTLNLAMDHQFVIHTPLMWLDKKKTWQLADELGVLDFVRNKTLTCYEGVRGEGCGKCPACQLRKNGLDLYLEEKGEELS

SEQ ID NO: 36193 - protein, 218 aa, Bacillus altitudinis; identical to SEQ ID NO: 36189
  REGION 1..218: note = tr|A0A5K1N8K7|A0A5K1N8K7_9BACI 7-cyano-7-deazaguanine synthase QueC OS=Bacillus altitudinis OX=293387 GN=queC PE=4 SV=1

SEQ ID NO: 36194 - protein, 219 aa, Bacillus amyloliquefaciens
  REGION 1..219: note = tr|A0A0D7XYK1|A0A0D7XYK1_BACAM 7-cyano-7-deazaguanine synthase OS=Bacillus amyloliquefaciens OX=1390 GN=queC PE=3 SV=1
MKKEKAVVVFSGGQDSTTCLLWALQNFEEVETVTFHYNQRHQEEIDVAKSIAEKLGVKNHLLDMSLLNQLAPNALTRDDIEIEAKDGELPTTFVPGRNLVFLSFASILAYQIGARHIITGVCETDFSGYPDCRDEFVKSCNVTVNLAMEKPFVIHTPLMWLNKAETWKLADELGALDFVKNNTLTCYNGIIADGCGECPACLLRNKGYDEYMKMKGERN

SEQ ID NO: 36195 - protein, 227 aa, Bacillus amyloliquefaciens
  REGION 1..227: note = tr|I2C496|I2C496_BACAM 7-cyano-7-deazaguanine synthase OS=Bacillus amyloliquefaciens Y2 OX=1126211; GN = ykvJ PE=3 SV=1
MIDKGEKDMKKEKAVVVFSGGQDSTTCLLWALQNFEEVETVTFHYNQRHQEEIDVAKSIAEKLGVKNHLLDMSLLNQLAPNALTRDDIEIEAKDGELPTTFVPGRNLVFLSFASILAYQIGARHIITGVCETDFSGYPDCRDEFVKSCNVTVNLAMEKPFVIHTPLMWLNKAETWKLADELGALDFVKNNTLTCYNGIIADGCGECPACLLRNKGYDEYMKMKGERN

SEQ ID NO: 36196 - protein, 220 aa, Bacillus anthracis
  REGION 1..220: note = sp|Q81TC7|QUEC_BACAN 7-cyano-7-deazaguanine synthase; OS = Bacillus anthracis OX=1392 GN=queC PE=3 SV=1
MKKEKAVVVFSGGQDSTTCLFWAIEQFAEVEAVTFNYNQRHKLEIDCAVEIAKELGIKHTVLDMSLLNQLAPNALTRTDMEITHEEGELPSTFVDGRNLLFLSFAAVLAKQVGARHIVTGVCETDFSGYPDCRDVFVKSLNVTLNLSMDYPFVIHTPLMWIDKAETWKLSDELGAFEFVREKTLTCYNGIIGDGCGECPACQLRKAGLDTYLQEREGASN

SEQ ID NO: 36197 - protein, 220 aa, Bacillus anthracis
  REGION 1..220: note = tr|A0A1T3V7Q2|A0A1T3V7Q2_BACAN 7-cyano-7-deazaguanine synthase OS=Bacillus anthracis; OX = 1392 GN=queC PE=3 SV=1
MKKEKAVVVFSGGQDSTTCLFWAIEQFAEVEAVTFNYNQRHKLEIDCAAEIAKELGIKHTVLDMSLLNQLAPNALTRTDMEITHEEGELPSTFVDGRNLLFLSFAAVLAKQVGARHIVTGVCETDFSGYPDCRDVFVKSLNVTLNLSMDYPFVIHTPLMWIDKAETWKLSDELGAFEFVREKTLTCYNGIIGDGCGECPACQLRKAGLDTYLQEREGASN

SEQ ID NO: 36198 - protein, 229 aa, Bacillus aquimaris
  REGION 1..229: note = tr|A0A366EX90|A0A366EX90_9BACI 7-cyano-7-deazaguanine synthase OS=Bacillus aquimaris; OX = 189382 GN=queC PE=3 SV=1
MNTEKALVVFSGGQDSTTCLFWAKKSFKEVEAVTFNYGQRHVAELDCAKEIAEDLEVPHHVLDMSLLNQLAPSALTRADAEITHQDGELPSTFVPGRNLLFLSFAGILAKQIGARHIVTGVCETDFSGYPDCRDIFVKSLNVSLNLSMDDQFVIHTPLMWINKAQTWEMADDLGAFRYVQENTLTCYNGIKGSGCGECPACELRQKGLEEYKRTKKGERENDTTNLPDS

SEQ ID NO: 36199 - protein, 220 aa, Bacillus aquimaris
  REGION 1..220: note = tr|A0A5D4U5Y2|A0A5D4U5Y2_9BACI 7-cyano-7-deazaguanine synthase OS=Bacillus aquimaris; OX = 189382 GN=queC PE=3 SV=1
MKNEKALVVFSGGQDSTTCLIWAKKEFKEVEAVTFNYGQRHSEELVCASEIAQELEVPHHVLDMSLLNQLSPSALTRNEEITEKEGELPSTFVPGRNLLFLSFAGVLAKNIGAVHIVTGVCETDFSGYPDCRDMFVKSFNVTFNLAMDEGYVVHTPLMWLDKEATWKWADEMGMLQYVREKTLTCYNGIRGDGCGTCPSCKLRSKGLTAYLSSENGGAEL

SEQ ID NO: 36200 - protein, 221 aa, Bacillus aryabhattai
  REGION 1..221: note = tr|A0A2C5HIY1|A0A2C5HIY1_9BACI 7-cyano-7-deazaguanine synthase OS=Bacillus aryabhattai; OX = 412384 GN=queC PE=3 SV=1
MMKNEKAIVVFSGGQDSTTCLFWALKNFKEVETVTFQYGQRHSQEIEVAKAIAADLGVKHTVLDMSLLNQLAPNALTRDDIEIEQKEGELPTTFVDGRNLLFLSFAAVLAKNSGGRHIVTGVCETDFSGYPDCRDVFVKSLNVTLNLSMDFEFVIHTPLMWIDKAETWALADELGALEYVREKTLTCYNGIVADGCGECPACQLRKRGLDQYLQTKEGGEK

SEQ ID NO: 36201 - protein, 221 aa, Bacillus aryabhattai
  REGION 1..221: note = tr|A0A1G6Q7W3|A0A1G6Q7W3_9BACI 7-cyano-7-deazaguanine synthase OS=Bacillus aryabhattai B8W22 OX=1358420 GN=queC PE=3 SV=1
MMKNEKAIVVFSGGQDSTTCLFWALKNFKEVETVTFQYGQRHSQEIEVAKTIAADLGVKHTVLDMSLLNQLAPNALTRDDIDIEQKEGELPTTFVDGRNLLFLSFAAVLAKNSGGRHIVTGVCETDFSGYPDCRDVFVKSLNVTLNLSMDFEFVIHTPLMWIDKAETWALADELGALEYVREKTLTCYNGIVADGCGECPACQLRKRGLDQYLQTKEGGEK

SEQ ID NO: 36202 - protein, 219 aa, Bacillus asahii
  REGION 1..219: note = tr|A0A398BBP5|A0A398BBP5_9BACI 7-cyano-7-deazaguanine synthase OS=Bacillus asahii; OX = 228899 GN=queC PE=3 SV=1
MKKEKAVVVFSGGQDSTTCLFWALERFAEVEAVTFDYNQRHRLEIECAQNIANELGIKHHILDMSLLNQLAPNALTRNDIEVKDGEDGELPSTFVPGRNLLFLSFAGVIASQIGAKHIVTGVCETDFSGYPDCRDVFIKSLNVTLNLSMDDSFVIDTPLMWLNKEETWELADRLGAFEFVREKTLTCYNGIIADGCGECPACKLRQKGLVDYLSKRKES

SEQ ID NO: 36203 - protein, 219 aa, Bacillus asahii
  REGION 1..219: note = tr|A0A3Q9RLL9|A0A3Q9RLL9_9BACI 7-cyano-7-deazaguanine synthase OS=Bacillus asahii; OX = 228899 GN=queC PE=3 SV=1
MKKEKAVVVFSGGQDSTTCLFWALERFAEVEAVTFDYNQRHRLEIECAQNIANELGIKHHILDMSLLNQLAPNALTRDDIEVKDGEDGELPSTFVPGRNLLFLSFAGVIASQIGAKHIVTGVCETDFSGYPDCRDVFIKSLNVTLNLSMDNSFVIDTPLMWLNKEETWELADQLGAFEFVREKTLTCYNGIIADGCGECPACKLRQKGLVDYLSKRKES

SEQ ID NO: 36204 - protein, 219 aa, Bacillus atrophaeus
  REGION 1..219: note = tr|A0A0H3E0M3|A0A0H3E0M3_BACA1 7-cyano-7-deazaguanine synthase OS=Bacillus atrophaeus (strain 1942) OX=720555 GN=queC PE=3 SV=1
MKKEKAIVVFSGGQDSTTCLLWALKEFEEVETVTFHYNQRHQQEIDVAKAIAEELGVKNHLLDMSLLNQLAPNALTRDDIKIEAKDGELPSTFVPGRNLVFLSFASILAYQIGARHIITGVCETDFSGYPDCRDEFVKSCNVTVNLAMEKPFVIHTPLMWLNKAETWKLADELGALDFVKNNTLTCYNGIIADGCGECPACLLRNKGYEEYMEMKGERK

SEQ ID NO: 36205 - protein, 219 aa, Bacillus atrophaeus; identical to SEQ ID NO: 36204
  REGION 1..219: note = tr|A0A080UQ20|A0A080UQ20_BACAT 7-cyano-7-deazaguanine synthase OS=Bacillus atrophaeus; OX = 1452 GN=queC PE=3 SV=1

SEQ ID NO: 36206 - protein, 218 aa, unidentified
  source 1..218: note = Bacillus australimaris
  REGION 1..218: note = tr|A0A0N8HW51|A0A0N8HW51_9BACI 7-cyano-7-deazaguanine synthase OS=Bacillus australimaris; OX = 1326968 GN=queC PE=3 SV=1
MKNEKAVVVFSGGQDSTTCLLWALQQFEEVETVTFHYNQRHQEEIDVAKRIADKLGVKNHLLDMSLLNQLAPNALTRDDIDIEEKEGELPSTFVPGRNLVFLSFASILAYQIGARHIITGVCETDFSGYPDCRDEFVKSCNVTVNLAMEKPFVIHTPLMWLNKAETWKLADELNALDFVKNETLTCYNGIISDGCGECPACKLRKNGYDTYMEMKEAK

SEQ ID NO: 36207 - protein, 221 aa, Bacillus azotoformans
  REGION 1..221: note = tr|A0A072NVK5|A0A072NVK5_BACAZ 7-cyano-7-deazaguanine synthase OS=Bacillus azotoformans MEV2011 OX=1348973 GN=queC PE=3 SV=1
MKNDKAIVVFSGGQDSTTCLFWALKNFKEVEAVTFDYNQRHRLEIEVAKDIAKELGVRHHILDMSLLNQLAPNALTRDDIEVKAGEDGELPNTFVPGRNLLFLSFAGVLASQVGAKHIITGVCETDFSGYPDCRDIFVKSLNVTLNLSMDQTFVIHTPLMWINKAETWKLADELGALDFVRERTLTCYNGIIADGCGECPACKLRKAGLDQYMDSLKEGIE

SEQ ID NO: 36208 - protein, 221 aa, Bacillus azotoformans; identical to SEQ ID NO: 36207
  REGION 1..221: note = tr|K6CAY5|K6CAY5_BACAZ 7-cyano-7-deazaguanine synthase OS=Bacillus azotoformans LMG 9581 OX=1131731; GN = queC PE=3 SV=1

SEQ ID NO: 36209 - protein, 220 aa, unidentified
  source 1..220: note = Bacillus bacterium
  REGION 1..220: note = tr|A0A506QL77|A0A506QL77_9BACI 7-cyano-7-deazaguanine synthase OS=Bacillus bacterium; OX = 2053512 GN=queC PE=3 SV=1
MKKEKAVVVFSGGQDSTTCLFWAMQQFAEVEAVTFNYNQRHKLEIDCAAEIAKELGIKHTVLDMSLLNQLAPNALTRTDMEITHEEGELPSTFVDGRNLLFLSFAAVLAKQVGARHIVTGVCETDFSGYPDCRDVFVKSLNVTLNLSMDYPFVIHTPLMWIDKAETWKLSDELGAFEFVREKTLTCYNGIIGDGCGECPACQLRKAGLDTYLQEREGASN

SEQ ID NO: 36210 - protein, 222 aa, unidentified
  source 1..222: note = Bacillus bacterium
  REGION 1..222: note = tr|A0A3D0E4J9|A0A3D0E4J9_9BACI 7-cyano-7-deazaguanine synthase OS=Bacillus bacterium; OX = 2053512 GN=queC PE=3 SV=1
MLKDEKAIVVFSGGQDSTTCLFWALKTFKEVEVVTFNYNQRHKNEIECAKAIAQEVNVRHHLLDMHLLNQLAPSALTRNDIDIKDGGDGEQLSTFVPGRNLIFLSFAAVLASQVNAKHMITGVSETDFSGYPDCRDAFIKSLNVTINLSMDQEFVIHTPLMWLDKEETWKLADELDVLDYVREKTLTCYEGVIGDGCGECPACKLRKNGLEKYLASQKGVKE

SEQ ID NO: 36211 - protein, 220 aa, Bacillus badius
  REGION 1..220: note = tr|A0A162YV76|A0A162YV76_BACBA 7-cyano-7-deazaguanine synthase OS=Bacillus badius OX=1455; GN = queC PE=3 SV=1
MNKEKAVVVFSGGQDSTTCLFWAQQRFDEVIAVTFDYGQRHRLELECATEIANELNIPHHTLDMSLLNQLAPNALTRQDIEITEKDGEPPSTFVEGRNLLFLSFAAVLAKQYNARHLVTGVCETDFSGYPDCRDVFIKSLNVTLNLSMDYSFVIHTPLMWLDKAETWELADDLGAFDYVRERTLTCYNGIKGSGCGECPACKLRQNGLSKYLAKKEAGSK

SEQ ID NO: 36212 - protein, 236 aa, Bacillus badius
  REGION 1..236: note = tr|A0A0C2U7X8|A0A0C2U7X8_BACBA 7-cyano-7-deazaguanine synthase OS=Bacillus badius OX=1455; GN = queC PE=3 SV=1
MNLFLLSNEKKKGRGKMNKEKAVVVFSGGQDSTTCLFWAQQRFDEVIAVTFDYGQRHRLELECATEIANELNIPHHTLDMSLLNQLAPNALTRQDIEITEKDGEPPSTFVEGRNLLFLSFAAVLAKQYNARHLVTGVCETDFSGYPDCRDVFIKSLNVTLNLSMDYSFVIHTPLMWLDKAETWELADDLGAFDYVRERTLTCYNGIKGSGCGECPACKLRQNGLSKYLAKKEAGSK

SEQ ID NO: 36213 - protein, 220 aa, Bacillus bataviensis
  REGION 1..220: note = tr|A0A561DEN9|A0A561DEN9_9BACI 7-cyano-7-deazaguanine synthase OS=Bacillus bataviensis; OX = 220685 GN=queC PE=3 SV=1
MLKDEKAVVVFSGGQDSTTCLFWALKQFKEVEVVTFDYNQRHSLEIECAKNIANELGVRHHILDMSLLNQLAPNALTRNDIEVKEGEDGELPSTFVPGRNLLFISFAGVLASQVGAKHLVTGVCETDFSGYPDCRDIFIKSLNVTLNLSMDTEFVIHTPLMWLDKAETWQLADELDALEFVREKTLTCYNGIIADGCGECPSCLLRKKGLEKYLSTREAL

SEQ ID NO: 36214 - protein, 220 aa, unidentified; identical to SEQ ID NO: 36191
  source 1..220: note = Bacillus bombysepticus
  REGION 1..220: note = tr|A0A023P4J1|A0A023P4J1_9BACI 7-cyano-7-deazaguanine synthase OS=Bacillus bombysepticus str. Wang OX=1330043 GN=queC PE=3 SV=1

SEQ ID NO: 36215 - protein, 218 aa, Bacillus boroniphilus
  REGION 1..218: note = tr|W4RT46|W4RT46_9BACI 7-cyano-7-deazaguanine synthase OS=Bacillus boroniphilus JCM 21738 OX=1294265; GN = queC PE=3 SV=1
MKNEKAVVVFSGGQDSTTCLFWAMKEFGEVEAVTFDYNQRHRTEIQCAEEIASELGIKHHILDMSLLNQLAPNALTRNDIDVKDGEGGELPSTFVPGRNLLFLSFAGVLASQVKAKHIVTGVCETDFSGYPDCRDVFIKSLNVTLNLSMDQNFVIHTPLMWLNKAQTWKLADDLDAFEFVRSRTLTCYNGIIADGCGICPACKLRKKGLDDYLEGDVS

SEQ ID NO: 36216 - protein, 220 aa, Bacillus butanolivorans
  REGION 1..220: note = tr|A0A0M0F1K0|A0A0M0F1K0_9BACI 7-cyano-7-deazaguanine synthase OS=Bacillus butanolivorans; OX = 421767 GN=queC PE=3 SV=1
MKKEKAVVVFSGGQDSTTCLFWAMERFEEVEAVTFDYNQRHSLEIECAQKIAKELGITHHILDMSLLNQLAPNALTRSDIAVEDGEDGELPSTFVPGRNLLFLSFAGVLASQIGAKHIVTGVCETDFSGYPDCRDVFIKSLNVTLNLSMDQSFVIDTPLMWLNKEETWELADQLGAFDFVREKTLTCYNGIISDGCGECPACKLRKKGLDDYVSRRQVLK

SEQ ID NO: 36217 - protein, 223 aa, unidentified
  source 1..223: note = Bacillus caldolyticus
  REGION 1..223: note = tr|A0A2H5KM81|A0A2H5KM81_BACCL 7-cyano-7-deazaguanine synthase OS=Bacillus caldolyticus; OX = 1394 GN=queC PE=3 SV=1
MKMNEEKAVVVFSGGQDSTTCLFWAKKQFGEVEAVTFDYGQRHRREIDVAQAIADELGVRHTVLDLSLLGQLAPNALTRRDIAIEQKKGELPTTFVDGRNLLFLSFAAVFAKQRGARHIVTGVCETDFSGYPDCRDVFIKSLNVTLNLAMDYEFVIHTPLMWLTKAETWKLADELGALEFIRTKTLTCYNGIIADGCGECPACALRKRGLDEYLREKAEVESR

SEQ ID NO: 36218 - protein, 218 aa, unidentified
  source 1..218: note = Bacillus camelliae
  REGION 1..218: note = tr|A0A2N3LM40|A0A2N3LM40_9BACI 7-cyano-7-deazaguanine synthase OS=Bacillus camelliae; OX = 1707093 GN=queC PE=3 SV=1
MKKKEKAVVVFSGGQDSTTCLFWAKERFEEVVAVTFDYNQRHKLEIECAKNIANQLGVKHHILDMSLLNQLAPNALTRDDIQVKDGENGSLPSTFVPGRNLLFMSFAGVLASQVGAKHIVTGVCETDFSGYPDCRDIFVKSLNVTLNLSMDQDFVIHTPLMWLDKCETWKLADELDAFDFVRENTLTCYNGIIADGCGECPACKLRKHGLEEYLKIRK

SEQ ID NO: 36219 - protein, 220 aa, unidentified
  source 1..220: note = Bacillus campisalis
  REGION 1..220: note = tr|A0A0M2SZP5|A0A0M2SZP5_9BACI 7-cyano-7-deazaguanine synthase OS=Bacillus campisalis; OX = 1408103 GN=queC PE=3 SV=1
MKKNEKALVVFSGGQDSTTCLFWAMERFEEVEAVTFDYNQRHSSEIECAKTIAEELNIRHHILDMSLLNQLAPNALTRDDIEVKDGEGGGLPSTFVPGRNLLFMSFAGVLGSQVGARHIITGVCETDFSGYPDCRDIFVKSLNVTLNLSMDEDFVIHTPLMWLDKAETWQLADELGAFGFVREKTLTCYNGIIADGCGECPACRLRKNGLDEYLKVRKEQ

SEQ ID NO: 36220 - protein, 219 aa, Bacillus canaveralius
  REGION 1..219: note = tr|A0A3R9PB72|A0A3R9PB72_9BACI 7-cyano-7-deazaguanine synthase OS=Bacillus canaveralius; OX = 1403243 GN=queC PE=3 SV=1
MKKDKAVIVFSGGQDSTTCLFWALEQFDEVEVVTFDYNQRHKNEIECAKEITKELGIKHHILDMSLLNQLAPNALTRSEIKVEEGAEGALPSTFVPGRNLLFLSFAGVLASQIGAKHIVTGVCETDFSGYPDCRNVFIQSLNVTLNLAMNAEFVIHTPLMWLDKAATWKLADELNAFEFVRDKTLTCYNGVIASGCGECPACKLRQKGLDEYMKHRKEF

SEQ ID NO: 36221 - protein, 226 aa, Bacillus canaveralius
  REGION 1..226: note = tr|A0A2N5GGN5|A0A2N5GGN5_9BACI 7-cyano-7-deazaguanine synthase OS=Bacillus canaveralius; OX = 1403243 GN=CU635_20995 PE=3 SV=1
MEKALLLLSGGPDSSSLAYWIKQQGFELHTLTFNFGEKEGEAEKRTAKYIANHVSKTHKFISFENVLRDFYMSDGGPIHILRKAISREIQIKPFGAGIAISLAASYAAQIGANHLFYAVHKDDAVFRENNYEFFNLLSKAISIELGNEFKIHTPFLDKTKAEVLKIGFELGVPIEETWSCASNSTIHCGWCEPCKDRQHAFKDNGITDNTLYENKINKISEAEIKA

SEQ ID NO: 36222 - protein, 218 aa, unidentified
  source 1..218: note = Bacillus caseinilyticus
  REGION 1..218: note = tr|A0A1H3IJR5|A0A1H3IJR5_9BACI 7-cyano-7-deazaguanine synthase OS=Bacillus caseinilyticus; OX = 1503961 GN=queC PE=3 SV=1
MKKDKAVVVFSGGQDSTTCLFWALKHFKEVEAVTFNYNQRHQSEIEVAGKIAKELDVKHTILDMSLLNQLAPNALTRDDIPIEAKEGQLPSTFVDGRNLLFLSFAAVLAKQAGARHLVTGVCETDFSGYPDCRDVFIKSLNVTLNLAMDYQFVIHTPLMWLDKAETWKLADELNALEFVQTKTLTCYNGIIANGCGECPACILRKNGLDTYLNSNNSE

SEQ ID NO: 36223 - protein, 221 aa, unidentified
  source 1..221: note = Bacillus cavernae
  REGION 1..221: note = tr|A0A3S0TZJ3|A0A3S0TZJ3_9BACI 7-cyano-7-deazaguanine synthase OS=Bacillus cavernae; OX = 1674310 GN=queC PE=3 SV=1
MNKEKAVIVFSGGQDSTTCLFWAKERFAEVEAVTFDYNQRHSLEIECAKNIAKELGVKHHILDMSLLNQLAPNALTRNDIEVKDGEEGELPSTFVPGRNLLFLSFAGVLAKQINAKHIVTGVCETDFSGYPDCRDIFIKSLNVTLNLSMDHPFVIHTPLMWLNKTATWALADELGAFDFVREKTLTCYNGIIADGCGECPSCKLRKNGLDEYLKNRKEFSR

SEQ ID NO: 36224 - protein, 218 aa, Bacillus cellulosilyticus
  REGION 1..218: note = tr|E6TRB8|E6TRB8_BACCJ 7-cyano-7-deazaguanine synthase OS=Bacillus cellulosilyticus (strain ATCC 21833 / DSM 2522 / FERM P-1141 / JCM 9156 / N-4) OX=649639 GN=queC P E=3 SV=1
MNKNKVIVVFSGGQDSTTCLFWALKKYDEVEAVTFDYHQRHSEEIQVAKEITSELKVKHHILDMSLLNQLAPSALTREEIVVKDGEAGGLPSTFVPGRNLIFLSFATILARQIGAKHIVTGVCETDFSGYPDCRDVFIKSLNVSLNLSMDDQFVIHTPLMWLDKSETWKLADDLHALQYVRDKTLTCYNGIRGDGCGDCPACKLRKKGLEKYLIEKEN

SEQ ID NO: 36225 - protein, 220 aa, Bacillus cereus; identical to SEQ ID NO: 36197
  REGION 1..220: note = sp|C1EM49|QUEC_BACC3 7-cyano-7-deazaguanine synthase; OS = Bacillus cereus (strain 03BB102) OX=572264 GN=queC PE=3; SV = 1

SEQ ID NO: 36226 - protein, 220 aa, Bacillus cereus
  REGION 1..220: note = tr|J8IQK7|J8IQK7_BACCE 7-cyano-7-deazaguanine synthase OS=Bacillus cereus VD102 OX=1053228 GN=queC PE=3; SV = 1
MKKEKAVVVFSGGQDSTTCLFWAMEQFAEVEAVTFNYNQRHKLEIDCAAEIAKELGIKHTVLDMSLLNQLAPNALTRTDMEITHEEGELPSTFVDGRNLLFLSFAAVLAKQVGARHIVTGVCETDFSGYPDCRDVFVKSLNVTLNLSMDYPFVIHTPLMWIDKAETWKLSDELGAFEFVREKTLTCYNGIIGDGCGECPACQLRKAGLDTYLQEREGASN

SEQ ID NO: 36227 - protein, 219 aa, Bacillus circulans
  REGION 1..219: note = tr|A0A553SQ89|A0A553SQ89_BACCI 7-cyano-7-deazaguanine synthase OS=Bacillus circulans; OX = 1397 GN=queC PE=3 SV=1
MRDEKAVVVFSGGQDSTTCLFWALETFKEVEVVTFNYNQRHKAEIQCAIDIAEEVGVKHHLLDMELLNQLAPNALTRSDIEVKEGENGELPSTFVPGRNLVFLSFASILASQIGAKHIITGVCETDFSGYPDCRDSFVKSLNVTLNLAMDTSFVIHTPLMWLDKAETWKLADELGRLDYVREKTLTCYEGVIGNGCGQCPSCVLRKAGLDKYLQEKEAN

SEQ ID NO: 36228 - protein, 219 aa, Bacillus circulans
  REGION 1..219: note = tr|A0A0J1IM11|A0A0J1IM11_BACCI 7-cyano-7-deazaguanine synthase OS=Bacillus circulans; OX = 1397 GN=queC PE=3 SV=1
MKNEKAVVVFSGGQDSTTCLFWAIKNFKEVVAVTFDYNQRHITEIECAQKITEELGIKHHILDMSLLNQLAPNALTRDDIAVEDGKEGELPSTFVPGRNLLFMSFAGVLASQIQAKHIVTGVCETDFSGYPDCRDIFVKSLNVTLNLSMDNQFVIHTPLMWLNKEETWGLADELGAFDFVREKTLTCYNGIVADGCGECPACKLRKKGLNDYLAVRKGL

SEQ ID NO: 36229 - protein, 221 aa, Bacillus clausii
  REGION 1..221: note = sp|Q5WG41|QUEC_BACSK 7-cyano-7-deazaguanine synthase; OS = Bacillus clausii (strain KSM-K16) OX=66692 GN=queC PE=3; SV = 1
MLEDKAVVVFSGGQDSTTCLFWAKERYRSLHAVIFDYGQRHKEEIQCAVDIANEQGVPYKVFDMGLLNQLTANALTRENISVQAGEAGESPSTFVAGRNHLFLSFAAVYAREMGAKHIITGVCETDFSGYPDCRDVFVKSLNVTLNLAMDEQFVIHTPLMWLNKKETWALADKMGQLEYIRAKTLTCYEGIRGDGCGTCPSCQLRQNGLDLYLREKAGAGQ

SEQ ID NO: 36230 - protein, 221 aa, Bacillus clausii
  REGION 1..221: note = tr|A0A268RVL4|A0A268RVL4_BACCS 7-cyano-7-deazaguanine synthase OS=Bacillus clausii; OX = 79880 GN=queC PE=3 SV=1
MLEDKAVVVFSGGQDSTTCLFWAKERYRSLHAVIFDYGQRHKEEIQCAVDIANEQGVPYKVFDMGLLNQLTANALTRENILVQAGEAGESPSTFVAGRNHLFLSFAAVYAREIGAKHIITGVCETDFSGYPDCRDVFVKSLNVTLNLAMDEQFVIHTPLMWLNKKETWALADKMGQLEYIRANTLTCYEGIRGDGCGTCPSCQLRQNGLDLYLREKAGASR

SEQ ID NO: 36231 - protein, 221 aa, Bacillus coagulans
  REGION 1..221: note = tr|G2TKN5|G2TKN5_BACCO 7-cyano-7-deazaguanine synthase OS=Bacillus coagulans 36D1 OX=345219 GN=queC PE=3; SV = 1
MKKEKAVVVFSGGQDSTTCLFWAKKKFQEVEAVTFDYGQRHRLEIECAKNIAEELGVKQHILDMQLLNQLAPNALTRESITVKAGADGELPNTFVPGRNLLFLSFAGVLASQIGARHIVTGVCETDFSGYPDCRDIFIKSLNVTLNLSMDQQFVIHTPLMWRNKAETWALADELGAFDFVREKTLTCYNGIIADGCGECPACKLRKRGLEQYLAIRNGQSE

SEQ ID NO: 36232 - protein, 221 aa, Bacillus coagulans
  REGION 1..221: note = tr|A0A150JQ75|A0A150JQ75_BACCO 7-cyano-7-deazaguanine synthase OS=Bacillus coagulans; OX = 1398 GN=queC PE=3 SV=1
MKKEKAVVVFSGGQDSTTCLFWAKQKFQEVEAVTFDYGQRHRLEIACAKNIAEELGVKQHILDMQLLNQLAPNALTREDMTVKAGADGELPNTFVPGRNLLFLSFAGVLASQIGARHIVTGVCETDFSGYPDCRDIFVKSLNVTLNLSMDQQFVIHTPLMWRNKAETWALADELGAFDFVREKTLTCYNGIIADGCGECPACKLRKRGLEQYLAIRNGQPE

SEQ ID NO: 36233 - protein, 219 aa, Bacillus cohnii
  REGION 1..219: note = tr|A0A223KPL9|A0A223KPL9_9BACI 7-cyano-7-deazaguanine synthase OS=Bacillus cohnii; OX = 33932 GN=queC PE=3 SV=1
MKKNEKAIVVFSGGQDSTTCLFWALEQFEEVETVTFHYGQRHNLEIECAKKIASDLGVKHRVLDMSLLSQLSANALTRDDIDIEEKKGEVPNTFVDGRNLLFLSFAAVAAKQVGARHIITGVCETDFSGYPDCRDVFIKSLNVTLNLSMDYQFVIHTPLMWLNKAETWKLADELHALDYIKEKTLTCYNGIVADGCGECPACKLRKRGLEQYLETKGNN

SEQ ID NO: 36234 - protein, 220 aa, unidentified
  source 1..220: note = Bacillus cucumis
  REGION 1..220: note = tr|A0A2N5HSM4|A0A2N5HSM4_9BACI 7-cyano-7-deazaguanine synthase OS=Bacillus cucumis; OX = 1740721 GN=queC PE=3 SV=1
MLKDEKAVVVFSGGQDSTTCLFWALKQFKEVEVVTFDYNQRHRLEIECAKNIADELGVRHHILDMSLLNQLAPNALTRNDIEVKEGEDGELPSTFVPGRNLLFISFAGVLASQVGAKHIVTGVCETDFSGYPDCRDIFIKSLNVTLNLSMDKEFVIHTPLMWLDKAETWQLADELNALDFVREKTLTCYNGVIADGCGECPACQLRRKGLEKYLTTREAL

SEQ ID NO: 36235 - protein, 220 aa, unidentified
  source 1..220: note = Bacillus cytotoxicus
  REGION 1..220: note = sp|A7GMN2|QUEC_BACCN 7-cyano-7-deazaguanine synthase; OS = Bacillus cytotoxicus (strain DSM 22905 / CIP 110041 / 391-98 / NVH 391-98) OX=315749 GN=queC PE=3 SV=1
MKKEKAVVVFSGGQDSTTCLFWAMQQFAEVEAVTFNYNQRHKLEIECAANIAKELGIKHTVLDMSLLNQLAPNALTRTDIDITHEEGELPSTFVEGRNLLFLSFAAVLAKQVGARHIVTGVCETDFSGYPDCRDAFVKSLNVTLNLSMDYPFVIHTPLMWIDKADTWKLSDELGAFDFVREKTLTCYNGIIGDGCGECPACQLRKAGLDTYLQEREGAKA

SEQ ID NO: 36236 - protein, 220 aa, unidentified; identical to SEQ ID NO: 36235
  source 1..220: note = Bacillus cytotoxicus
  REGION 1..220: note = tr|A0A2S1A8G1|A0A2S1A8G1_9BACI 7-cyano-7-deazaguanine synthase OS=Bacillus cytotoxicus; OX = 580165 GN=queC PE=3 SV=1

SEQ ID NO: 36237 - protein, 218 aa, Bacillus daliensis
  REGION 1..218: note = tr|A0A1G9ZJ22|A0A1G9ZJ22_9BACI 7-cyano-7-deazaguanine synthase OS=Bacillus daliensis; OX = 745820 GN=queC PE=3 SV=1
MKKQEKAVVVFSGGQDSTTCLLWAMKQFDEVEAVTFDYNQRHRLEIKVAEDIAEELNIPHTVLDMSLLNQLAPNALTRDDIEIEQKEGELPTTFVDGRNHLFLTFAAIKGKQNDARHIITGVCETDFSGYPDCRDVFVKSLNVTLNLAMDYDFVLHTPLMWLDKAETWELADQLQGLEFVRNKTLTCYNGVIADGCGECPACELRNQGLDAYLNRKEA

SEQ ID NO: 36238 - protein, 219 aa, unidentified
  source 1..219: note = Bacillus deserti
  REGION 1..219: note = tr|A0A2N5M839|A0A2N5M839_9BACI 7-cyano-7-deazaguanine synthase OS=Bacillus deserti; OX = 673318 GN=queC PE=3 SV=1
MKRDKAVVVFSGGQDSTTCLFWALEQFEEVEAVTFDYNQRHKLEIDCAKAITEELNVRHHILDMSLLNQLAPNALTRADIPVSDGKDGELPSTFVPGRNLLFLSFAGILARGIGAKHIVTGVCETDFSGYPDCRDIFIKSLNVTLNLSMDENLVIHTPLMWLNKAETWEMADNLNAFDFVREKTLTCYNGIIADGCGECPACHLRQNGLNQYLAEKGVL

SEQ ID NO: 36239 - protein, 220 aa, unidentified
  source 1..220: note = Bacillus enclensis
  REGION 1..220: note = tr|A0A0V8HIT2|A0A0V8HIT2_9BACI 7-cyano-7-deazaguanine synthase OS=Bacillus enclensis; OX = 1402860 GN=queC PE=3 SV=1
MKQEKALVVFSGGQDSTTCLFWAKKEFREVEAVTFNYGQRHAAELDCAKEIAEDLNVSHHTLDMSLLNQLAPSALTRKDEAITHEEGELPSTFVPGRNLLFLSFAGVLAKQIGAKHIITGVCETDFSGYPDCRDIFVKSLNVSLNLSMDAQFVIHTPLMWIDKAQTWEMADRLGVLDYIRENTLTCYNGVKGDGCGECPACELRQRGLNQYLLKKQGGEE

SEQ ID NO: 36240 - protein, 231 aa, Bacillus endophyticus
  REGION 1..231: note = tr|A0A3N6DJH6|A0A3N6DJH6_9BACI 7-cyano-7-deazaguanine synthase OS=Bacillus endophyticus; OX = 135735 GN=queC PE=3 SV=1
MLKNEKAVVVFSGGQDSTTCLFWALENFAEVETVTFHYGQRHNKEIEVAEEIAKDLGVENTVLDMSLLNQLAPNALTRSDIEIEEKEGELPTTFVDGRNLLFLSFASIMAKQKGARHLVTGVCETDFSGYPDCRDIFVKSLNVTLNLSMDHNFVIHTPLMWIDKKDTWKLADELGALDYIRYNTLTCYNGIKADGCGECPACKLRKNGLDQYLAEKEEEKNATANLSERRS

SEQ ID NO: 36241 - protein, 230 aa, Bacillus endophyticus
  REGION 1..230: note = tr|A0A329ENG8|A0A329ENG8_9BACI 7-cyano-7-deazaguanine synthase OS=Bacillus endophyticus; OX = 135735 GN=queC PE=3 SV=1
MKNEKAVVVFSGGQDSTTCLFWALENFAEVETVTFHYGQRHNKEIEVAEEIAKDLGVENTVLDMSLLNQLAPNALTRSNIEIEEKEGELPTTFVDGRNLLFLSFASIMAKQKGARHLVTGVCETDFSGYPDCRDIFVKSLNVTLNLSMDHNFVIHTPLMWIDKKDTWRLADELGALDYIRYNTLTCYNGIKADGCGECPACKLRKNGLDQYLAEKEEEKNATANLSERRS

SEQ ID NO: 36242 - protein, 219 aa, unidentified
  source 1..219: note = Bacillus endozanthoxylicus
  REGION 1..219: note = tr|A0A5J5HTX2|A0A5J5HTX2_9BACI 7-cyano-7-deazaguanine synthase QueC OS=Bacillus endozanthoxylicus OX=2036016 GN=queC PE=4 SV=1
MKNEKAVVVFSGGQDSTTCLFWAIKNFAEVEAVTFHYNQRHSAEIDCAKNIASTLGIKHHILDMSLLNQLAPNALTRNEIEIEENKSGGLPSTFVPGRNLLFLSFAGVLAYQIGARHIITGVCETDFSGYPDCRDSFIKALNVSLNLSMDKSFVIHTPLMWLNKAETWELADELDAFDFIRENTLTCYNGIMADGCGECPACKLRRKGLEEYLNVRRDL

SEQ ID NO: 36243 - protein, 231 aa, unidentified
  source 1..231: note = Bacillus filamentosus
  REGION 1..231: note = tr|A0A1X7EZ87|A0A1X7EZ87_9BACI 7-cyano-7-deazaguanine synthase OS=Bacillus filamentosus; OX = 1402861 GN=queC PE=3 SV=1
MLKNEKAVVVFSGGQDSTTCLFWALENFEEVETVTFHYGQRHNKEIEVAEEIAKDLGVENTVLDMSLLNQLAPNALTRSDIEIEEKEGELPTTFVDGRNLLFLSFASIMAKGKGARHLVTGVCETDFSGYPDCRDIFVKSLNVTLNLSMDHNFVIHTPLMWIDKKDTWKLADELGALDYIRYNTLTCYNGIKADGCGECPACKLRKNGLDQYLAEKEEEKNATANLSERRS

SEQ ID NO: 36244 - protein, 230 aa, unidentified
  source 1..230: note = Bacillus filamentosus
  REGION 1..230: note = tr|A0A0H4KFB7|A0A0H4KFB7_9BACI 7-cyano-7-deazaguanine synthase OS=Bacillus filamentosus; OX = 1402861 GN=queC PE=3 SV=1
MKNEKAVVVFSGGQDSTTCLFWALENFEEVETVTFHYGQRHNKEIEVAEEIAKDLGVENTVLDMSLLNQLAPNALTRSDIEIEEKEGELPTTFVDGRNLLFLSFASIMAKGKGARHLVTGVCETDFSGYPDCRDIFVKSLNVTLNLSMDHNFVIHTPLMWIDKKDTWKLADELGALDYIRYNTLTCYNGIKADGCGECPACKLRKNGLDQYLAEKEEEKNATANLSERRS

SEQ ID NO: 36245 - protein, 219 aa, Bacillus firmus
  REGION 1..219: note = tr|W7LDW6|W7LDW6_BACFI 7-cyano-7-deazaguanine synthase OS=Bacillus firmus DS1 OX=1307436 GN=queC PE=3; SV = 1
MKNDKALVVFSGGQDSTTCLFWAKERFAEVEAVTFNYNQRHKLEIECAKQIAKDLGIRHHILDMSLLNQLAPNALTRDDIEVKEGEEGGLPSTFVPGRNLLFMSFAGVLASQINARHIITGVCETDFSGYPDCRDIFIKSLNVTLNLSMDGQFVIHTPLMWLNKAETWKLADDLDALEYVRNNTLTCYNGIPADGCGECPACDLRQKGLEEYLNEKGEL

SEQ ID NO: 36246 - protein, 219 aa, Bacillus firmus
  REGION 1..219: note = tr|A0A366K404|A0A366K404_BACFI 7-cyano-7-deazaguanine synthase OS=Bacillus firmus OX=1399; GN = queC PE=3 SV=1
MKNDKALVVFSGGQDSTTCLFWAKERFAEVEAVTFNYNQRHKLEIECAQQIAKELGIRHHILDMSLLNQLAPNALTRDEIEVKDGEEGELPSTFVPGRNLLFLSFAGVLASQINAKHIITGVCETDFSGYPDCRDIFIKSLNVTLNLSMDHQFVIHTPLMWLNKAETWKLADELNALDYVREKTLTCYNGIPADGCGECPACHLRKNGLEEYLKEKEEL

SEQ ID NO: 36247 - protein, 220 aa, Bacillus flexus
  REGION 1..220: note = tr|A0A4P8XAM5|A0A4P8XAM5_9BACI 7-cyano-7-deazaguanine synthase OS=Bacillus flexus; OX = 86664 GN=queC PE=3 SV=1
MKNEKAIVVFSGGQDSTTCLFWALKNFKEVETVTFGYGQRHSKEIEVAEAIAKDLGVKHTILDMSLLSQLAPNALTRDDIDISQEEGELPTTFVDGRNLLFLSFAAVLAKNSGARHLVTGVCETDFSGYPDCRDVFVKSLNVTLNLSMDFEFVIHTPLMWIDKAETWGLADELGALDYVREHTLTCYNGIIADGCGECPACKLRKRGLEQYLDTKQGGEQ

SEQ ID NO: 36248 - protein, 219 aa, Bacillus foraminis
  REGION 1..219: note = tr|A0A4R2BMM7|A0A4R2BMM7_9BACI 7-cyano-7-deazaguanine synthase OS=Bacillus foraminis; OX = 279826 GN=queC PE=3 SV=1
MKKEKAVVVFSGGQDSTTCLFWAMEQFSEVVAVTFDYNQRHQQEIDCAKAITGELGIQHHILDMSLLNQLAPNALTRDDIEVKDGENGDLPSTFVPGRNLLFMSFAGILARQIGARHIVTGVCETDFSGYPDCRDIFIKSLNVTLNLSMDDNFVIHTPLMWLNKAETWKLADDLGAFEFVREKTLTCYNGIVSDGCGECPACRLRKNGLDEYLKMKEGL

SEQ ID NO: 36249 - protein, 222 aa, unidentified
  source 1..222: note = Bacillus freudenreichii
  REGION 1..222: note = tr|A0A448FGF4|A0A448FGF4_9BACI 7-cyano-7-deazaguanine synthase OS=Bacillus freudenreichii; OX = 1783501 GN=queC PE=3 SV=1
MLKDEKAIVVFSGGQDSTTCLFWALKTFKEVEVVTFNYNQRHKSEIECAKAIAQELDIRHHLLDMGLLNQLAPNALTRSDIEITDGEEGELPSTFVPGRNLIFLSFAAVLASQVNAKHIITGVSETDFSGYPDCRDAFIKSLNVSINLSMDQQFVIHTPLMWLDKEETWKLADDLNVLDYVREKTLTCYEGVIGDGCGECPACKLRKNGLEKYLTSRKGGKV

SEQ ID NO: 36250 - protein, 220 aa, unidentified
  source 1..220: note = Bacillus gaemokensis
  REGION 1..220: note = tr|A0A073KAR3|A0A073KAR3_9BACI 7-cyano-7-deazaguanine synthase OS=Bacillus gaemokensis; OX = 574375 GN=queC PE=3 SV=1
MKKEKAVVVFSGGQDSTTCLFWAMQQFEEVEAVTFNYNQRHKLEIDCAADIAKELGIKHTVLDMSLLNQLAPNALTRTDMEITHEEGELPSTFVDGRNLLFLSFAAVLAKQVGARHIVTGVCETDFSGYPDCRDVFVKSLNVTLNLSMDYPFVIHTPLMWIDKAETWKLSDELGAFQFVREKTLTCYNGIIGDGCGECPACKLRKAGLDTYLQEREGANV

SEQ ID NO: 36251 - protein, 221 aa, Bacillus galactosidilyticus
  REGION 1..221: note = tr|A0A177ZI50|A0A177ZI50_9BACI 7-cyano-7-deazaguanine synthase OS=Bacillus galactosidilyticus OX=217031 GN=queC PE=3 SV=1
MDDRKAVVVFSGGQDSTTCLFWALEKFEHVEAVTFQYGQRHIAELECAREICMKLNVHHHELDMTLLNQLAPNALTRDDMEIKEGDNELPSTFVPGRNLLFLSFAAVLAKQINAKHLITGVSETDFSGYPDCRDGFIKSLNVTLNLSMDETFVIHTPLMWRDKSDVWALSDQLGAFDFVKEHTLTCYNGIKASGCGECPACQLRNRGLEQYEELRQGGTIK

SEQ ID NO: 36252 - protein, 234 aa, Bacillus galactosidilyticus
  REGION 1..234: note = tr|A0A0Q9Y561|A0A0Q9Y561_9BACI 7-cyano-7-deazaguanine synthase OS=Bacillus galactosidilyticus OX=217031 GN=queC PE=3 SV=1
MREENNSGDDRKAVVVFSGGQDSTTCLFWALEKFEHVEAVTFQYGQRHIAELECAREICMKLNVHHHELDMTLLNQLAPNALTRDDMEIKEGDNELPSTFVPGRNLLFLSFAAVLAKQINAKHLITGVSETDFSGYPDCRDGFIKSLNVTLNLSMDETFVIHTPLMWRDKSDVWALSDQLGAFDFVKEHTLTCYNGIKASGCGECPACQLRNALHVNCAIVGLSNMKSFGKEEQ

SEQ ID NO: 36253 - protein, 219 aa, Bacillus ginsengihumi
  REGION 1..219: note = tr|A0A0A6Y3T5|A0A0A6Y3T5_9BACI 7-cyano-7-deazaguanine synthase OS=Bacillus ginsengihumi; OX = 363870 GN=queC PE=3 SV=1
MKKDKAIVVFSGGQDSTTCLFWAMQRFEEVIAVTFDYNQRHKQEIECAQNITKELGIKHHILDMGLLNQLAPNALTRNDIEVKAGENGDLPSTFVSGRNLLFLSFAGVLASQVGAKHIVTGVCETDFSGYPDCRDIFIKSLNVTLNLSMDEQFVIHTPLMWLNKAETWKLADELNAFDFVREKTLTCYNGIVADGCGECPACKLRKRGLEEYLEEKYQA

SEQ ID NO: 36254 - protein, 234 aa, unidentified
  source 1..234: note = Bacillus glycinifermentans
  REGION 1..234: note = tr|A0A1C3SEQ0|A0A1C3SEQ0_9BACI 7-cyano-7-deazaguanine synthase OS=Bacillus glycinifermentans OX=1664069 GN=queC PE=3 SV=1
MFNIKKNNKKAVVVLSGGLDSATCMGIAENEGYKLHALTFYYGQRHSREVEQAKKIAEHYQVQEHKIVNIDFLKELGGSALTDENIDVPKKMNQDNIPVTYVPARNLIFLSCASAYAEVIKAEAIYTGVSRVDYSGYPDCRPEFIESLNNTVRLATKRNIEGEKTNIFTPLINLSKADTITLGLKLNVPYELTTSCYNGEEYACGECDSCTLRLKGFKEAGYKDPIPYKNIQMI

SEQ ID NO: 36255 - protein, 219 aa, unidentified
  source 1..219: note = Bacillus glycinifermentans
  REGION 1..219: note = tr|A0A1C3SC93|A0A1C3SC93_9BACI 7-cyano-7-deazaguanine synthase OS=Bacillus glycinifermentans OX=1664069 GN=queC PE=3 SV=1
MKQEKAVVVFSGGQDSTTCLLWALQQFEEVETVTFHYNQRHQQEIEVAGNIAGKLGVKNHLLDMALLNQLAPNALTRDDIEIEAKEGELPSTFVPGRNLVFLSFASILAYQIGARHIVTGVCETDFSGYPDCRDEFVKSCNVTVNLAMERPFVIHTPLMWLNKAETWKLADELGALDFVKNETLTCYNGIIADGCGECPACKLRANGYQEYMKMKRERA

SEQ ID NO: 36256 - protein, 218 aa, unidentified
  source 1..218: note = Bacillus gobiensis
  REGION 1..218: note = tr|A0A0M5JB60|A0A0M5JB60_9BACI 7-cyano-7-deazaguanine synthase OS=Bacillus gobiensis; OX = 1441095 GN=queC PE=3 SV=1
MRKEKAVVVFSGGQDSTTCLVWALQEFAEVETVTFHYNQRHQLETEVAGKIAKKLNVKNHLLDMSLLNQLAPNALTRDEMEIKMNEDGLPSTFVPGRNLVFLSFASILAYQIGARHIVTGVCETDFSGYPDCRDSFIKSCNVTVNLAMDKPFVIHTPLMWLNKKETWKLADELHALDLVRNETLTCYNGIIADGCGECPACVLRKNGLNEYLHEKGGN

SEQ ID NO: 36257 - protein, 223 aa, Bacillus halodurans
  REGION 1..223: note = sp|Q9KAP3|QUEC_BACHD 7-cyano-7-deazaguanine synthase; OS = Bacillus halodurans (strain ATCC BAA-125 / DSM 18197 / FERM 7344 / JCM 9153 / C-125) OX=272558 GN=queC PE=3 S V=1
MENKKKKAVVVFSGGQDSTTCLFWALKTFDEVATVTFDYGQRHAEEIECAKEIAEQLGVSFRVLDMTLLNQLTESALTREEIAVKDGENGELPSTFVPGRNQLFLSFAAVYAKQIGARHLVTGVCETDYSGYPDCRDVFIKSLNVTLNLAMDDQFVIHTPLMWLDKAETWKLADELGALDFVREKTLTCYHGIRGDGCGECPACMLRRRGLELYLAEKEGDRA

SEQ ID NO: 36258 - protein, 223 aa, Bacillus halodurans; identical to SEQ ID NO: 36257
  REGION 1..223: note = tr|A0A4Y7X1Y6|A0A4Y7X1Y6_BACHO 7-cyano-7-deazaguanine synthase OS=Bacillus halodurans; OX = 86665 GN=queC PE=3 SV=1

SEQ ID NO: 36259 - protein, 108 aa, unidentified
  source 1..108: note = Bacillus halotolerans
  REGION 1..108: note = tr|A0A2S9WDN6|A0A2S9WDN6_9BACI 7-cyano-7-deazaguanine synthase (Fragment) OS=Bacillus halotolerans OX=260554 GN=C7B72_22095 PE=3 SV=1
DIFIGVSEVDYSGYPDCRPEYIEAFAKMANLATKVGTQGNKLNIHAPLSHLSKAQTIHAGLKLGVDYSLTVSCYRADHTGRACGQCDSCTYRKKGFIEAGVTDPTLYY

SEQ ID NO: 36260 - protein, 219 aa, unidentified
  source 1..219: note = Bacillus halotolerans
  REGION 1..219: note = tr|A0A2S9WEN6|A0A2S9WEN6_9BACI 7-cyano-7-deazaguanine synthase OS=Bacillus halotolerans; OX = 260554 GN=queC PE=3 SV=1
MKKEKAIVVFSGGQDSTTCLLWALKEFEEVETVTFHYNQRHSQEVEVAKGIADKLGVKNHLLDMSLLNQLAPNALTRNDIEIEAKDGELPSTFVPGRNLVFLSFASILAYQIGARHIITGVCETDFSGYPDCRDEFVKSCNVTVNLAMEKPFVIHTPLMWLNKAETWKLADELGALDFVKNNTLTCYNGIIADGCGECPACHLRSRGYEEYMAMKGERA

SEQ ID NO: 36261 - protein, 219 aa, unidentified
  source 1..219: note = Bacillus haynesii
  REGION 1..219: note = tr|W7RBR0|W7RBR0_9BACI 7-cyano-7-deazaguanine synthase OS=Bacillus haynesii OX=1925021 GN=queC PE=3 SV=1
MKQEKAIVVFSGGQDSTTCLLWALRQFQEVEAVTFQYNQRHKQEIEVAKKIAEKLGVKHHLLDMELLNQLAPNALTRDDIEIEAKEGELPSTFVPGRNLVFLSFASILAYQVGARHIITGVCETDFSGYPDCRDEFVKSCNVTVNLAMERPFVIHTPLMWLNKAETWELADELDALDFVKNETLTCYNGIIADGCGECPACKLRANGYNEYMKMKKERA

SEQ ID NO: 36262 - protein, 222 aa, unidentified
  source 1..222: note = Bacillus haynesii
  REGION 1..222: note = tr|W7R682|W7R682_9BACI 7-cyano-7-deazaguanine synthase OS=Bacillus haynesii OX=1925021 GN=M769_0124655; PE = 3 SV=1
MEKALLMLSGGPDSSTLAYWIKHKGYELHTLTFNFGEEEGEAEKRTANFIAKDISKSHKFISFESVLREFYMEDDPIHILRIAHLPSPIKAFGAGIAISLAASYAAENDIHHLFYAVHKDDTIFRENNYEFFNLLSKAISIELGREFRIHTPFLDKTKAEVLKIGFDLGVPLEETWSCASNSTIHCGWCDPCKNRQKAFKDNGITDNTLYENVNSKNSSVNV

SEQ ID NO: 36263 - protein, 73 aa, Bacillus hemicellulosilyticus
  REGION 1..73: note = tr|W4QFV2|W4QFV2_9BACI 7-cyano-7-deazaguanine synthase OS=Bacillus hemicellulosilyticus JCM 9152; OX = 1236971 GN=JCM9152_2374 PE=3 SV=1
MDQQFVIHTPLMWLNKAETWELADQLNALSFVRERTLTCYHGVRGDGCGECPSCKLRMQGLKQYENQKERREE

SEQ ID NO: 36264 - protein, 137 aa, Bacillus hemicellulosilyticus
  REGION 1..137: note = tr|W4QFS6|W4QFS6_9BACI 7-cyano-7-deazaguanine synthase OS=Bacillus hemicellulosilyticus JCM 9152; OX = 1236971 GN=JCM9152_2373 PE=3 SV=1
MKKDKAVVVFSGGQDSTTCLLWALKEFKEVATVTFDYGQRHYEEINCAKDIAKELEVSFHLLDMTFMNQLSPNALTHHDMKVEDGVAGELPSTFVPGRNHLFLSFAAVYAHSIGAKHIVTGVCETDYSGYPDCVINS

SEQ ID NO: 36265 - protein, 224 aa, unidentified
  source 1..224: note = Bacillus hisashii
  REGION 1..224: note = tr|A0A267TX26|A0A267TX26_9BACI 7-cyano-7-deazaguanine synthase OS=Bacillus hisashii; OX = 996558 GN=queC PE=3 SV=1
MLKDEKAVVVFSGGQDSTTCLFWALNTFQNVEAVTFDYNQRHKKEIECAKSIAEELKVKHHILDMNLLNQLSPSALTRMDIDVKAGKSGELPSSFVPGRNLIFLSMAAILAQQIGAKHLVTGVCETDFSGYPDCRDVFVKSLNVTINLAMGQEFVIHTPLMWLDKAATWKMADDLNVLKLIKERTLTCYEGIIGDGCGKCPACQLRRQGYEKYMQMKANVSTAI

SEQ ID NO: 36266 - protein, 223 aa, Bacillus horikoshii
  REGION 1..223: note = tr|A0A1Y0CKZ0|A0A1Y0CKZ0_9BACI 7-cyano-7-deazaguanine synthase OS=Bacillus horikoshii; OX = 79883 GN=queC PE=3 SV=1
MKQKEKAMVVFSGGQDSTTCLIWAMKEFDEVEAVTFHYGQRHELEIDCATSIAKELGVKHRILDMSLLGQLTPNALTRDDIEIEEKEGELPSTFVDGRNLLFLSFAAVAAKQIGARHIVTGVCETDFSGYPDCRDVFIKSMNVTLNLSMDYPFVIHTPLMWLNKEETWELADDLDALDFVRTKTLTCYNGVIADGCGECPACKLRKRGLDDYLDKKNKGVVSS

SEQ ID NO: 36267 - protein, 223 aa, Bacillus horikoshii
  REGION 1..223: note = tr|A0A5D4TCR3|A0A5D4TCR3_9BACI 7-cyano-7-deazaguanine synthase OS=Bacillus horikoshii; OX = 79883 GN=queC PE=3 SV=1
MKQKEKAMVVFSGGQDSTTCLIWAMKEFDEVEAVTFHYGQRHELEIDCATSIAKELGVKHRILDMSLLGQLTPNALTRDNIEIEEKEGELPSTFVDGRNLLFLSFAAVAAKQIGARHIVTGVCETDFSGYPDCRDVFIKSMNVTLNLSMDYPFVIHTPLMWLNKEETWELADDLDALDFVRTKTLTCYNGIIADGCGECPACKLRKRGLDDYLVKKNKGVVSS

SEQ ID NO: 36268 - protein, 219 aa, Bacillus horneckiae
  REGION 1..219: note = tr|A0A2N0ZEZ5|A0A2N0ZEZ5_9BACI 7-cyano-7-deazaguanine synthase OS=Bacillus horneckiae; OX = 549687 GN=queC PE=3 SV=1
MKKEKAVVVFSGGQDSTTCLFWALDKFEEVVAVTFDYNQRHAAEIECAKAIAEELGVEHHILDMGLLNQLAPNALTRSEIVVKDGTGGSLPSTFVPGRNLLFMSFAGVLASQLGAKHIITGVCETDFSGYPDCRDIFVKSLNVTLNLSMDEQFVIHTPLMWLNKAETWEMADKLGCFSFVRKKTLTCYNGVVSDGCGECPACKLRKQGLEDYLKVRAAI

SEQ ID NO: 36269 - protein, 224 aa, Bacillus hwajinpoensis
  REGION 1..224: note = tr|A0A4U1MMP7|A0A4U1MMP7_9BACI 7-cyano-7-deazaguanine synthase OS=Bacillus hwajinpoensis; OX = 208199 GN=queC PE=3 SV=1
MSKKAVIVLSGGLDSTTCMGMAKEKGYELYPITFHYGQKHNREVEQAKKVADYYDAPDHRIVNISFLNQIGGSALTDDSIDVPKDMDEDEIPVTYVPARNMIFLSLASAYAEVIGAEAIYIGVSAVDYSGYPDCRPEFIQSMNETVNLATKAGATGSEMKIETPLIDLTKADTVSEGLRLNVPYDLTTSCYNGEEEACGECDSCRLRLKGFEEAGAVDPIPYKS

SEQ ID NO: 36270 - protein, 220 aa, Bacillus indicus
  REGION 1..220: note = tr|A0A084H2U0|A0A084H2U0_BACID 7-cyano-7-deazaguanine synthase OS=Bacillus indicus; OX = 246786 GN=queC PE=3 SV=1
MKNEKALVVFSGGQDSTTCLFWAKKQFKEVEAVTFNYNQRHKLEIDVAEQIAKELDVRHHLLDMSLLNQLAPNALTRDDIAIEHKEGELPSTFVPGRNLLFLTFASVLAKQIGAKHIVTGVCETDFSGYPDCRDVFVKSCNVTINLAMDDQFVIHTPLMWIDKAETWKLADELSALEYVRDKTLTCYNGIIADGCGECPACRLRKKGLDEYISAKGGEAS

SEQ ID NO: 36271 - protein, 218 aa, Bacillus infantis
  REGION 1..218: note = tr|U5LCZ8|U5LCZ8_9BACI 7-cyano-7-deazaguanine synthase OS=Bacillus infantis NRRL B-14911 OX=1367477; GN = queC PE=3 SV=1
MKNEKAIVVFSGGQDSTTCLFWAKKNFKEVEAVTFDYGQRHIAELECARRIAADLAIQHHVLDMSLLNQLAPNALTRKDIKVEEKEGELPSTFVPGRNLLFLSFAGVLASQVAAKHIITGVCETDFSGYPDCRDQFVKSLNVTLNLSMDSQFVIHTPLMWLNKAETWKLADELGALEYVRKQTLTCYEGVIADGCGECPACRLRKRGLEDYLAERQGV

SEQ ID NO: 36272 - protein, 218 aa, Bacillus infantis
  REGION 1..218: note = tr|A0A5D4R8V6|A0A5D4R8V6_9BACI 7-cyano-7-deazaguanine synthase OS=Bacillus infantis; OX = 324767 GN=queC PE=3 SV=1
MKNEKAIVVFSGGQDSTTCLFWAKNNFKEVEAVTFDYGQRHIAELDSARRIAADLAIKHHVLDMSLLNQLAPNALTRKDIKVEEKEGELPSTFVPGRNLLFLSFAGVLASQVAAKHIITGVCETDFSGYPDCRDQFVKSLNVTLNLSMDSQFVIHTPLMWLNKAETWKLADELGALDYVREQTLTCYEGIIADGCGECPACRLRKRGLEDYLAERQGV

SEQ ID NO: 36273 - protein, 219 aa, unidentified
  source 1..219: note = Bacillus intestinalis
  REGION 1..219: note = tr|A0A0K6LLU3|A0A0K6LLU3_9BACI 7-cyano-7-deazaguanine synthase OS=Bacillus intestinalis; OX = 1963032 GN=queC PE=3 SV=1
MKKEKAIVVFSGGQDSTTCLLWALKEFEEVETVTFHYNQRHSQEIEVAKSIAEKLGVKNHLLDMSLLNQLAPNALTRNDIDIEVKDGELPSTFVPGRNLVFLSFASILAYQIGARHIITGVCETDFSGYPDCRDEFVKSCNVTVNLAMEKPFVIHTPLMWLNKAETWKLADELDALDFVKNNTLTCYNGIIADGCGECPACHLRSKGYEEYMAMKGERA

SEQ ID NO: 36274 - protein, 212 aa, Bacillus kochii
  REGION 1..212: note = tr|A0A248TEM7|A0A248TEM7_9BACI 7-cyano-7-deazaguanine synthase OS=Bacillus kochii; OX = 859143 GN=queC PE=3 SV=1
MVVFSGGQDSTTCLFWALEHFTEVVAVTFDYNQRHAIEIDCAKAITADLQIEHHILDMTLLNQLAPNALTRSNIDVKNGEDGALPSTFVPGRNLVFLSFAGILAYQIGARHIITGVCETDFSGYPDCRDQFIKSLNVTLNLSMERPFVIHTPLMWLNKAETWAMADDFGKLDYVRNKTLTCYNGVIADGCGECPACELRMQGLTQYLQVKMS

SEQ ID NO: 36275 - protein, 221 aa, Bacillus koreensis
  REGION 1..221: note = tr|A0A0M0LJP2|A0A0M0LJP2_9BACI 7-cyano-7-deazaguanine synthase OS=Bacillus koreensis; OX = 284581 GN=queC PE=3 SV=1
MKQEKAVVVFSGGQDSTTCLFWALQNFKEVETVTFQYGQRHSQEIDVAKSIAAELGVENTVLDMSLLNQLAPNALTRGDIEIEQKEGELPSTFVDGRNHLFLSFAAVMAKQKGARHLVTGVCETDFSGYPDCRDVFVKSLNVTLNLAMDYQFVIHTPLMWINKAETWGLADELGALDFVREKTLTCYNGVIADGCGECPACLLRKRGLDEYLEQKNGGERK

SEQ ID NO: 36276 - protein, 222 aa, Bacillus krulwichiae
  REGION 1..222: note = tr|A0A1X9MBI9|A0A1X9MBI9_9BACI 7-cyano-7-deazaguanine synthase OS=Bacillus krulwichiae; OX = 199441 GN=queC_1 PE=3 SV=1
MRNEKAVVVFSGGQDSTTCLLWALDQFKEVATVTFDYGQRHLDEINCAREIAEELGVSFHVLDMKLINQLSANALTRKDIEVTAGEEGELPSTFVPGRNHLFLSFAAVYAQTIGARHIITGVCETDFSGYPDCRDSFVKSLNVTLNLAMDEQFVIHTPLMWLNKAETWKLADELNALDFVREKTLTCYHGIRGDGCGNCPACDLRKKGLESYLEKKQGGTKL

SEQ ID NO: 36277 - protein, 402 aa, Bacillus krulwichiae
  REGION 1..402: note = tr|A0A1X9MD55|A0A1X9MD55_9BACI 7-cyano-7-deazaguanine synthase OS=Bacillus krulwichiae; OX = 199441 GN=queC_2 PE=4 SV=1
MQFTIDSLSNLHTILLKDVNYDYKGKSTIILDLVTTMGAIYCADVKTSKVNDKPRYIELTIPVFNPDIWTKNVIQIEELVKWVSEDTMKITFIGSSDTIDGYVNGLIPGTNNVVTLFSGGLDSFAGAYYNYKNNIKSDYLGFINKGEEKTKQLDVKEFYQQIFDDATEIILIDKPIKKKQTFIQSTRSLLYLALAIAKAHFNSSKEVYLYENGILSLNPEIQNRYTTKTTHPKTMFIYKSLLEKLSIDIKINHPFLFMTKGQITNDMNAEFKKAIEHTFTCGQGRSHPERSHSGQCGICIPCVLRKISLAAYDNEIFDVNYEYPYDVKISDIKEGNYRKDYASNINYFKTYYDLIKSNQIYYQLQIREKYYEEDPKFRISNQKMFSKFAEEYERFMKKYAPY

SEQ ID NO: 36278 - protein, 222 aa, unidentified
  source 1..222: note = Bacillus kyonggiensis
  REGION 1..222: note = tr|A0A4U1D9A3|A0A4U1D9A3_9BACI 7-cyano-7-deazaguanine synthase OS=Bacillus kyonggiensis; OX = 1037680 GN=queC PE=3 SV=1
MLKDEKAIVVFSGGQDSTTCLFWALKTFKEVEAVTFNYNQRHKQEIDCAIEIAKELNVRHHILDMNLLNQLAPNALTRDDIEIKEGEDGELPSTFVPGRNLIFLSFAAVLASQVGAKHIITGVCETDFSGYPDCRDSFVKSLNVSINLSMDKEFVIHTPLMWLDKAETWGLANDLNALDFVREKTLTCYNGMIGDGCGECPSCKLRENGLDNYLSTREGAAK

SEQ ID NO: 36279 - protein, 220 aa, Bacillus lehensis
  REGION 1..220: note = tr|A0A4Y7WQ06|A0A4Y7WQ06_9BACI 7-cyano-7-deazaguanine synthase OS=Bacillus lehensis; OX = 300825 GN=queC PE=3 SV=1
MKKEKAIVVFSGGQDSTTCLFWALEQFTDVSVLIFDYGQRHKNEIKVAKSIAVEAGVRAKVIDLQVLSQLNANALTNPTIAIEEGQEGELPNTFVPGRNHLFLSFAAVVAKDLGAKHIITGVCETDFSGYPDCRDVFVKSLNVTLNLAMNEQFVIHTPLMWLNKEETWAMADQLGKLRFIREKTLTCYEGVIGDGCGRCPACKLRMNGLQAYLQKGEASV

SEQ ID NO: 36280 - protein, 220 aa, Bacillus lehensis
  REGION 1..220: note = tr|A0A060LTZ0|A0A060LTZ0_9BACI 7-cyano-7-deazaguanine synthase OS=Bacillus lehensis G1; OX = 1246626 GN=queC PE=3 SV=1
MKKEKAIVVFSGGQDSTTCLFWALEQFTDVSVLIFDYGQRHKNEIKVAKSIAAEAGVRAKVIDLQVLSQLNANALTNPTIAIEEGQEGDLPNTFVPGRNHLFLSFAAVVAKDLGAKHIITGVCETDFSGYPDCRDVFVKSLNVTLNLAMNEQFVIHTPLMWLNKEETWAMADQLGKLRFIREKTLTCYEGVIGDGCGRCPACKLRMNGLQAYLQKGEASV

SEQ ID NO: 36281 - protein, 226 aa, Bacillus lentus
  REGION 1..226: note = tr|A0A2X4YPY3|A0A2X4YPY3_BACLE 7-cyano-7-deazaguanine synthase OS=Bacillus lentus OX=1467; GN = queC PE=3 SV=1
MMKKDKAVVVFSGGQDSTTCLFWALERFAEVEAVTFDYNQRHQSEITCAKKITEELGVKHHILDMSLLHQLAPNALTRDEIDVEDGENGDLPSTFVPGRNLLFMSFAGVLAHQIKAKHLITGVSETDFSGYPDCTDMFMKSLNVTLNLSMEKDFTIHTPLMWLNKEETWELADQLEAFEFIRENTLTCYNGIIADGCGECPACKLRKRGLDDYLKHRKEMDNDVWL

SEQ ID NO: 36282 - protein, 219 aa, Bacillus licheniformis
  REGION 1..219: note = sp|Q65KI6|QUEC_BACLD 7-cyano-7-deazaguanine synthase; OS = Bacillus licheniformis (strain ATCC 14580 / DSM 13 / JCM 2505 / NBRC 12200 / NCIMB 9375 / NRRL NRS-1264 / Gib son 46) OX=279010 GN=queC PE=3 SV=1
MKQEKAIVVFSGGQDSTTCLLWALRQFQEVEAVTFQYNQRHKQEIEVAKKIAAKLGVKHHLLDMELLNQLAPNALTRDDIEIEAKEGELPSTFVPGRNLVFLSFASILAYQVGARHIITGVCETDFSGYPDCRDEFVKSCNVTVNLAMERPFVIHTPLMWLNKAETWELADELDALDFVKNETLTCYNGIIADGCGECPACKLRANGYNEYMKMKKERA

SEQ ID NO: 36283 - protein, 219 aa, Bacillus licheniformis; identical to SEQ ID NO: 36282
  REGION 1..219: note = tr|A0A1Y0YE30|A0A1Y0YE30_BACLI 7-cyano-7-deazaguanine synthase OS=Bacillus licheniformis; OX = 1402 GN=queC PE=3 SV=1

SEQ ID NO: 36284 - protein, 220 aa, Bacillus litoralis
  REGION 1..220: note = tr|A0A179T0F5|A0A179T0F5_9BACI 7-cyano-7-deazaguanine synthase OS=Bacillus litoralis; OX = 152268 GN=queC PE=3 SV=1
MKNEKAVVVFSGGQDSTTCLFWALKQFKEVIAVTFNYNQRHSLEIDVAKSITEELGIKHHILDMSLLNQLAPNALTREDIEIEHKDGELPSTFVPGRNLLFLSFATILANQIGAKHIVTGVCETDFSGYPDCRDAFVKSCNVTLNLALDKPFVIHTPLMWINKAETWKLADDLGVLDFIRKKTLTCYNGIIAEGCGECPACRLRKNGLDEFLLEKGVVEK

SEQ ID NO: 36285 - protein, 220 aa, Bacillus litoralis
  REGION 1..220: note = tr|A0A5C6W3P2|A0A5C6W3P2_9BACI 7-cyano-7-deazaguanine synthase OS=Bacillus litoralis; OX = 152268 GN=queC PE=3 SV=1
MKNEKAVVVFSGGQDSTTCLFWALKQFKEVVAVTFNYNQRHSLEIEVAESIAEELGVQHHVLDMSLLNQLAPNALTRSDIEIEQKEGELPSTFVPGRNLLFLSFATILANQIGAKHIVTGVCETDFSGYPDCRDAFVKSCNVTLNLALDKPFVIHTPLMWINKAETWKLADDLGVLDFVRQKTLTCYNGIIAEGCGECPACELRKKGLDDYLLEKGVDGQ

SEQ ID NO: 36286 - protein, 219 aa, unidentified
  source 1..219: note = Bacillus loiseleuriae
  REGION 1..219: note = tr|A0A0K9GQ74|A0A0K9GQ74_9BACI 7-cyano-7-deazaguanine synthase OS=Bacillus loiseleuriae; OX = 1679170 GN=queC PE=3 SV=1
MKQEKAVVVFSGGQDSTTCLFWAMKQFKEVEAVTFDYNQRHRLEIDCAKQIADELGIKHHILDMSLLNQLAPNALTRDDIAVSDGEEGELPSTFVPGRNLLFLSFAGVLASQVGAKHIITGVCETDFSGYPDCRDIFIKSLNVTLNLSMDQPFVIHTPLMWMNKAEAWGMADELDVLEFVRNKTLTCYNGIMADGCGDCPACKLRRKGLDDYLSQKVKN

SEQ ID NO: 36287 - protein, 223 aa, unidentified
  source 1..223: note = Bacillus lonarensis
  REGION 1..223: note = tr|A0A1G6H6W4|A0A1G6H6W4_9BACI 7-cyano-7-deazaguanine synthase OS=Bacillus lonarensis; OX = 1464122 GN=queC PE=3 SV=1
MKKNDSAVVVFSGGQDSTTCLFWALEKFDHVSALTFAYGQRHAAEIACAKDIARKAGVPLRILEVPTLNDITSNALTRNDIEITDQNENNALPSTFVPGRNHLFLSFAAIYAKEIGAKHLVTGVCETDFSGYPDCRDIFIKSLNVTLNLAMDTDFVIHTPLMWLNKTATWALADQLGKLETVQHDTLTCYEGIKGTGCTTCPACKLRAAGLAAYLEQKAGAPQ

SEQ ID NO: 36288 - protein, 221 aa, Bacillus luciferensis
  REGION 1..221: note = tr|A0A1E2W1N3|A0A1E2W1N3_9BACI 7-cyano-7-deazaguanine synthase OS=Bacillus luciferensis; OX = 178774 GN=queC PE=3 SV=1
MKNEKAIVVFSGGQDSTTCLFWAMQNFGEVEAVTFNYNQRHKLELDVAADICKELNIPHHILDMSLLNQLAPNALTRSDIDITHEEGELPSTFVDGRNLLFLSFAAVLAKQKGAKHIITGVCETDFSGYPDCRDIFVKSLNVTLNLSMDYPFVIHTPLMWIDKADTWKLADDLGAFEYVKNKTLTCYNGIISDGCGECPACELRQAGLDRYLQSKGAAKNV

SEQ ID NO: 36289 - protein, 220 aa, unidentified; identical to SEQ ID NO: 36197
  source 1..220: note = Bacillus luti
  REGION 1..220: note = tr|A0A1K0AKZ4|A0A1K0AKZ4_9BACI 7-cyano-7-deazaguanine synthase OS=Bacillus luti; OX = 2026191 GN=queC PE=3 SV=1

SEQ ID NO: 36290 - protein, 220 aa, unidentified
  source 1..220: note = Bacillus manliponensis
  REGION 1..220: note = tr|A0A073K1R4|A0A073K1R4_9BACI 7-cyano-7-deazaguanine synthase OS=Bacillus manliponensis; OX = 574376 GN=queC PE=3 SV=1
MKKEKAVVVFSGGQDSTTCLFWAMQQFAEVETVTFNYNQRHKLEIDCAAAIAKELGVKHTVLDMSLLNQLAPNALTRTDIDITETEGELPSTFVDGRNLLFLSFAGVFAKQVGARHIVTGVCETDFSGYPDCRDIFVKSLNVTLNLSMDYPFVIHTPLMWIDKAETWKLADDLGAFEYVREKTLTCYNGIIGDGCGECPACKLRKAGLDTYLQEREGEKA

SEQ ID NO: 36291 - protein, 194 aa, unidentified
  source 1..194: note = Bacillus manliponensis
  REGION 1..194: note = tr|A0A073KCB8|A0A073KCB8_9BACI 7-cyano-7-deazaguanine synthase OS=Bacillus manliponensis; OX = 574376 GN=BAMA_19275 PE=3 SV=1
MLVDRRDSKSILILASGGIDSTALIHYYVSQGFNIKGIHFNYGQMACKKEEQAVKKIGEYYDIEIESKSFGFSFNHIKGEFIARNPLFILAASNLLPKTYSKIGIGIHSGTPYYDCTRTFINDCQKILDGYFAGTVIIEAPFLLYDKRSVLKFCLRNQVPIELTYSCEFNDEEPCGECLSCKDRRILSELSGSM

SEQ ID NO: 36292 - protein, 220 aa, Bacillus marisflavi
  REGION 1..220: note = tr|A0A0M0GS84|A0A0M0GS84_9BACI 7-cyano-7-deazaguanine synthase OS=Bacillus marisflavi; OX = 189381 GN=queC PE=3 SV=1
MKNDKAVVVFSGGQDSTTCLFWAKKNFKEVEAVTFNYGQRHVAELDCAREIAEELNIPHHVLDMSLLNQLAPSALTRDEDIVQKDGELPSTFVPGRNLMFLSFAGVLAKQIGAKHIVTGVCETDFSGYPDCRDVFVKSLNVTLNLSMDDEFVIHTPLMWIDKAETWELADQLGAFEYVQEKTLTCYNGIKGAGCGECPACELRQRGLDQYLERRVGGDTE

SEQ ID NO: 36293 - protein, 220 aa, Bacillus marisflavi
  REGION 1..220: note = tr|A0A5D4RWL3|A0A5D4RWL3_9BACI 7-cyano-7-deazaguanine synthase OS=Bacillus marisflavi; OX = 189381 GN=queC PE=3 SV=1
MKNDKAVVVFSGGQDSTTCLFWAKKNFKEVEAVTFNYGQRHVAELDCAREIAQELDIPHHVLDMSLLNQLAPSALTRDEDIVQKDGELPSTFVPGRNLMFLSFAGVLAKQIGAKHIVTGVCETDFSGYPDCRDVFVKSLNVTLNLSMDDEFVIHTPLMWIDKAETWELADQLGAFEYVQEKTLTCYNGIKGAGCGECPACELRQRGLDQYLERRAGGDTE

SEQ ID NO: 36294 - protein, 222 aa, Bacillus marmarensis
  REGION 1..222: note = tr|U6SQ33|U6SQ33_9BACI 7-cyano-7-deazaguanine synthase OS=Bacillus marmarensis DSM 21297 OX=1188261; GN = queC PE=3 SV=1
MKQDKAVVVFSGGQDSTTCLFWALKEFKEVATVTFDYGQRHSKEIECARKIADELGVSFHVLDMGLLNQLSPNALTRADIEVEAGDDGELPSTFVEGRNLLFLSFAAIYGKQIGAKHIITGVCETDFSGYPDCRDIFVKSLNVTLNLSMDDQFVIHTPLMWLNKEQTWKLADDLGALSFVREKTLTCYNGIIGDGCGECPACVLRKKGLDDYLASTEAGEES

SEQ ID NO: 36295 - protein, 220 aa, Bacillus megaterium
  REGION 1..220: note = tr|D5DZE3|D5DZE3_BACMQ 7-cyano-7-deazaguanine synthase OS=Bacillus megaterium (strain ATCC 12872 / QMB1551) OX=545693 GN=queC PE=3 SV=1
MKNEKAIVVFSGGQDSTTCLFWALKNFKEVETVTFQYGQRHSQEIEVAKAIAADLGVKHTVLDMSLLNQLAPNALTRDDIEIEQKEGELPTTFVDGRNLLFLSFAAVLAKNSGGRHIVTGVCETDFSGYPDCRDVFVKSLNVTLNLSMDFEFVIHTPLMWIDKAETWALADELGALEYVREKTLTCYNGIVADGCGECPACQLRKRGLDQYMQTKEGGEE

SEQ ID NO: 36296 - protein, 221 aa, Bacillus megaterium
  REGION 1..221: note = tr|A0A1I2SYY7|A0A1I2SYY7_BACME 7-cyano-7-deazaguanine synthase OS=Bacillus megaterium; OX = 1404 GN=queC PE=3 SV=1
MMKNEKAIVVFSGGQDSTTCLFWALKNFKEVETVTFQYGQRHSQEIEVAKAIAADLGVKHTVLDMSLLNQLAPNALTRDDIEIEQKEGELPTTFVDGRNLLFLSFAAVLAKNSGGRHIVTGVCETDFSGYPDCRDVFVKSLNVTLNLSMDFEFVIHTPLMWIDKAETWALADELGALEYVREKTLTCYNGIVADGCGECPACQLRKRGLDQYMQTKEGGEE

SEQ ID NO: 36297 - protein, 218 aa, unidentified
  source 1..218: note = Bacillus mesonae
  REGION 1..218: note = tr|A0A3Q9QY84|A0A3Q9QY84_9BACI 7-cyano-7-deazaguanine synthase OS=Bacillus mesonae; OX = 1193713 GN=queC PE=3 SV=1
MKNEKAVVVFSGGQDSTTCLFWALKNFREVEAVTFDYNQRHRLEIECAERIANEVGVRHHILDMSLLNQLAPNALTRSEIEVKDGAEGELPSTFVPGRNLLFLSFAGVLASQIGAKHIITGVCETDFSGYPDCRDMFVKSLNVTLNLAMDDNFVIHTPLMWINKAQTWALADELGKLDFVREKTLTCYNGIISDGCGECPACVLRKRGLEEYLSGGSK

SEQ ID NO: 36298 - protein, 219 aa, Bacillus methanolicus
  REGION 1..219: note = tr|I3E8Y2|I3E8Y2_BACMM 7-cyano-7-deazaguanine synthase OS=Bacillus methanolicus (strain MGA3 / ATCC 53907) OX=796606 GN=queC PE=3 SV=1
MKKDKAIVVFSGGQDSTTCLFWAMKQFEEVIAVTFDYNQRHKMEIECAKNITKELGIKHHILDMSLLNQLAPNALTRDNIPVKAGEEGELPSTFVPGRNLLFLSFAGVLANQVGAKHIVTGVCETDFSGYPDCRDIFIKSLNVTLNLSMDYQFVIHTPLMWLNKAETWKLADELGAFDFVREKTLTCYNGIIADGCGECPACKLRRKGLEDYLKIRKEL

SEQ ID NO: 36299 - protein, 219 aa, Bacillus methanolicus
  REGION 1..219: note = tr|I3DVL5|I3DVL5_BACMT 7-cyano-7-deazaguanine synthase OS=Bacillus methanolicus PB1 OX=997296 GN=queC; PE = 3 SV=1
MKKEKAIVVFSGGQDSTTCLFWAMKQFEEVIAVTFDYNQRHKTEIECAKNITKELGIKHHILDMSLLNQLAPNALTRDEIPVKDGGEGELPSTFVPGRNLLFLSFAGVLANQVGAKHIVTGVCETDFSGYPDCRDVFIKSLNVTLNLSMDYQFVIHTPLMWLNKAETWKLADELGAFDFVREKTLTCYNGIIADGCGECPACKLRKKGLEEYLKVRGGL

SEQ ID NO: 36300 - protein, 220 aa, unidentified
  source 1..220: note = Bacillus mobilis
  REGION 1..220: note = tr|A0A386V0A5|A0A386V0A5_9BACI 7-cyano-7-deazaguanine synthase OS=Bacillus mobilis; OX = 2026190 GN=queC PE=3 SV=1
MKKEKAVVVFSGGQDSTTCLFWAIEQFAEVEAVTFNYNQRHKLEIDCAAEIAKELGIKHTVLDMSLLNQLAPNALTRTDLEITHEEGELPSTFVDGRNLLFLSFAAVLAKQVGARHIVTGVCETDFSGYPDCRDVFVKSLNVTLNLSMDYPFVIHTPLMWIDKAETWKLSDELGAFEFVREKTLTCYNGIIGDGCGECPACQLRKAGLDTYLQEREGASN

SEQ ID NO: 36301 - protein, 220 aa, unidentified; identical to SEQ ID NO: 36197
  source 1..220: note = Bacillus mobilis
  REGION 1..220: note = tr|A0A1K0ADF7|A0A1K0ADF7_9BACI 7-cyano-7-deazaguanine synthase OS=Bacillus mobilis; OX = 2026190 GN=queC PE=3 SV=1

SEQ ID NO: 36302 - protein, 221 aa, Bacillus muralis
  REGION 1..221: note = tr|A0A1B3XSN6|A0A1B3XSN6_9BACI 7-cyano-7-deazaguanine synthase OS=Bacillus muralis; OX = 264697 GN=queC PE=3 SV=1
MNKKEKAVVVFSGGQDSTTCLFWAMERFEEVEAVTFDYNQRHSLEIECAQQIAKELGINHHILDMSLLNQLAPNALTRSDIAVEDGEDGELPSTFVPGRNLLFLSFAGVLASQIGAKHIVTGVCETDFSGYPDCRDVFVKSMNVTLNLSMDQSFVIDTPLMWLNKEETWELADQLGAFEFVRDKTLTCYNGVISDGCGECPACKLRQKGLDDYVSRRGDLS

SEQ ID NO: 36303 - protein, 220 aa, Bacillus mycoides
  REGION 1..220: note = sp|A9VKR8|QUEC_BACMK 7-cyano-7-deazaguanine synthase; OS = Bacillus mycoides (strain KBAB4) OX=315730 GN=queC PE=3; SV = 1
MKKEKAVVVFSGGQDSTTCLFWAIQQFEEVEAVTFNYNQRHKLEIDCAVEIAKELGIKHTILDMSLLNQLAPNALTRTDMEITHEEGELPSTFVDGRNLLFLSFAAVLAKQVGARHIVTGVCETDFSGYPDCRDVFVKSLNVTLNLSMDYPFVIHTPLMWIDKAETWKLSDELGAFEFVREKTLTCYNGIIGDGCGECPACQLRKAGLDTYLQEREGASN

SEQ ID NO: 36304 - protein, 220 aa, Bacillus mycoides
  REGION 1..220: note = tr|A0A1D3N4G4|A0A1D3N4G4_BACMY 7-cyano-7-deazaguanine synthase OS=Bacillus mycoides; OX = 1405 GN=queC PE=3 SV=1
MKKEKAVVVFSGGQDSTTCLFWAIQQFAEVEAVTFNYNQRHKLEIDCAAEIAKELGIKHTVLDMSLLNQLAPNALTRTDMEITHEEGELPSTFVDGRNLLFLSFAAVLAKQVGARHIVTGVCETDFSGYPDCRDVFVKSLNVTLNLSMDYPFVIHTPLMWIDKAETWKLSDELGAFEFVREKTLTCYNGIIGDGCGECPACQLRKAGLDTYLQEREGASN

SEQ ID NO: 36305 - protein, 219 aa, unidentified
  source 1..219: note = Bacillus nakamurai
  REGION 1..219: note = tr|A0A150F287|A0A150F287_9BACI 7-cyano-7-deazaguanine synthase OS=Bacillus nakamurai; OX = 1793963 GN=queC PE=3 SV=1
MKKEKAVVVFSGGQDSTTCLLWALQNFEEVETVTFHYNQRHQEEIDVAKAIAEKLGVKNHLLDMSLLNQLAPNALTRDDIEIEAKDGELPTTFVPGRNLVFLSFASILAYQIGARHIITGVCETDFSGYPDCRDEFVKSCNVTVNLAMEKSFVIHTPLMWLNKAETWKLADELDALDFVKNNTLTCYNGIIADGCGECPACLLRNKGYDEYMKMKGERK

SEQ ID NO: 36306 - protein, 222 aa, Bacillus nanhaiisediminis
  REGION 1..222: note = tr|A0A562QR59|A0A562QR59_9BACI 7-cyano-7-deazaguanine synthase OS=Bacillus nanhaiisediminis OX=688079 GN=queC PE=3 SV=1
MRNEKAVVVFSGGQDSTTCLLWALKQFKEVATVTFDYGQRHSYEIECAREIAEEIGVSFHVLDMKLINQLSANALTRSDIEVKEGENGELPSTFVPGRNHLFLSFAAVYAQSIGARHIITGVCETDFSGYPDCRDVFVKSLNVTLNLAMEEQFVIHTPLMWLNKAETWKLADDLGALSFIREKTLTCYEGIRGDGCGKCPACKLRKQGLDSYLAQKQGGGSL

SEQ ID NO: 36307 - protein, 221 aa, Bacillus nealsonii
  REGION 1..221: note = tr|A0A2N0Z2Y5|A0A2N0Z2Y5_9BACI 7-cyano-7-deazaguanine synthase OS=Bacillus nealsonii; OX = 115979 GN=queC PE=3 SV=1
MLKDEKAVVVFSGGQDSTTCLFWALNTFKEVEAVTFNYNQRHKEEIECAKKIAKDFKVNHHILDMALLNQLAPNALTRNDIEVKEGENGELPSTFVPGRNLLFLSFAAVLASQVGAKHIITGVCETDFSGYPDCRDSFVKSLNVSINLAMDSQFVIHTPLMWLDKADTWKLADDLQQLDYIRTQTLTCYEGIIGNGCGECPACKLRKAGLDQYLTSKQKAE

SEQ ID NO: 36308 - protein, 219 aa, Bacillus nealsonii
  REGION 1..219: note = tr|R9CJ29|R9CJ29_9BACI 7-cyano-7-deazaguanine synthase OS=Bacillus nealsonii AAU1 OX=1202533 GN=queC; PE = 3 SV=1
MKNEKAVVVFSGGQDSTTCLFWAMKNFKEVVAVTFDYNQRHITEIECAKKITEELGIKHHILDMSLLNQLAPNALTREDIAVEEGKDGALPSTFVPGRNLLFMSFAGVLASQIQAKHIVTGVCETDFSGYPDCRDIFIKSLNVTLNLSMDNQFVIHTPLMWLNKAETWGLADQLNAFDFVREKTLTCYNGIVADGCGECPACKLRKKGLDDYLAGRKGV

SEQ ID NO: 36309 - protein, 220 aa, unidentified
  source 1..220: note = Bacillus notoginsengisoli
  REGION 1..220: note = tr|A0A417YXU9|A0A417YXU9_9BACI 7-cyano-7-deazaguanine synthase OS=Bacillus notoginsengisoli OX=1578198 GN=queC PE=3 SV=1
MKDEKAVVVFSGGQDSTTCLFWAMEQFAEVTAVTFDYNQRHLTEIESAKNITKELGVKHHILDMSLLNQLAPNALTRDEIEVKDGEDGGLPSTFVPGRNLLFMSFAGVLASQIGAKHIITGVSETDFSGYPDCRDMFVKSLNVTLNLSMDQNFAIHTPLMWLNKAEVWKLADELGAFDFVRIKTLTCYNGVIADGCGECPACVLRKKGLDDYLAERNELV

SEQ ID NO: 36310 - protein, 218 aa, unidentified
  source 1..218: note = Bacillus obstructivus
  REGION 1..218: note = tr|A0A1L8ZNE6|A0A1L8ZNE6_9BACI 7-cyano-7-deazaguanine synthase OS=Bacillus obstructivus; OX = 1914540 GN=queC PE=3 SV=1
MKKEKAIVVFSGGQDSTTCLFWALKRFEEVIAVTFDYNQRHKAEIDCAINITQELGIVHHILDMQLLNQLAPNALTRVDIDVTDGEEGELPSTFVPGRNLLFLSFAGVVASQVGAKHIITGVCETDFSGYPDCKDIFIKSLNVTLNLAMDKQFIIHTPLMWINKAETWKLADELGALDFVRTKTLTCYNGIIAEGCGECPACKLRKRGYDDYIKTKVR

SEQ ID NO: 36311 - protein, 219 aa, Bacillus oceanisediminis
  REGION 1..219: note = tr|A0A562JA81|A0A562JA81_9BACI 7-cyano-7-deazaguanine synthase OS=Bacillus oceanisediminis OX=665099 GN=queC PE=3 SV=1
MKKDKALVVFSGGQDSTTCLFWAKERFGEVEAVTFNYNQRHKLEIECAQEIAKELGVKHHILDMSLLNQLAPNALTRDEIEVKDGEEGELPSTFVPGRNLLFLSFAGVLASQISAKHIITGVCETDFSGYPDCRDVFIKSLNVTLNLSMDQQFVIHTPLMWLNKAETWKLADELNALDYVREKTLTCYNGIPSDGCGECPACHLRRKGLEEYLQEKGEL

SEQ ID NO: 36312 - protein, 219 aa, Bacillus oceanisediminis
  REGION 1..219: note = tr|A0A160MB32|A0A160MB32_9BACI 7-cyano-7-deazaguanine synthase OS=Bacillus oceanisediminis 2691 OX=1196031 GN=queC PE=3 SV=1
MKNDKALVVFSGGQDSTTCLFWAKERFEEVEAVTFNYNQRHKLEIECAQQIAKELGIRHHILDMSLLNQLAPNALTRDEIKVKDGEEGGLPSTFVPGRNLLFLSFAGVLASQINAKHIITGVCETDFSGYPDCRDIFIKSLNVTLNLSMDEQFVIHTPLMWLNKAETWKLADELNALDYVREKTLTCYNGIPADGCGECPACHLRKNGLEEYLKEKEEL

SEQ ID NO: 36313 - protein, 222 aa, Bacillus okhensis
  REGION 1..222: note = tr|A0A0B0IGP6|A0A0B0IGP6_9BACI 7-cyano-7-deazaguanine synthase OS=Bacillus okhensis; OX = 333138 GN=queC PE=3 SV=1
MRNEKAVVVFSGGQDSTTCLLWALDQFQEVATVTFDYGQRHHDEIECAREIAEELGVSFHVLDMTLINQLSANALTRKDIEVKEGENGELPSTFVPGRNHLFLSFAAVYAQAIGARHIITGVCETDFSGYPDCRDSFVKSLNVTLNLAMDEQFVIHTPLMWLNKAETWKLADQLDALAFIREKTLTCYHGIRGDGCGECPSCNLRKKGLEDYLKEKQGGSDV

SEQ ID NO: 36314 - protein, 223 aa, Bacillus okuhidensis; identical to SEQ ID NO: 36257
  REGION 1..223: note = tr|A0A0M0KJD7|A0A0M0KJD7_9BACI 7-cyano-7-deazaguanine synthase OS=Bacillus okuhidensis; OX = 136160 GN=queC PE=3 SV=1

SEQ ID NO: 36315 - protein, 220 aa, unidentified
  source 1..220: note = Bacillus oleivorans
  REGION 1..220: note = tr|A0A285CMS5|A0A285CMS5_9BACI 7-cyano-7-deazaguanine synthase OS=Bacillus oleivorans; OX = 1448271 GN=queC PE=3 SV=1
MKKEKAIVVFSGGQDSTTCLYWALQHFQEVEAVTFNYNQRHKLEIEVAENIARELKVKHTVLDLSLLNQLAPNALTRENIQIEQKDGELPTTFVDGRNLLFLSFAAILAKQSGARHIITGVCETDFSGYPDCRDVFIKSLNVTLNLAMDYRFVIHTPLMWLNKAETWKLADQLGVLEYVRQKTLTCYNGILSDGCGTCPACLLRKKGLDEYLSMKEGIKH

SEQ ID NO: 36316 - protein, 220 aa, unidentified; identical to SEQ ID NO: 36197
  source 1..220: note = Bacillus pacificus
  REGION 1..220: note = tr|A0A1J9ZDI7|A0A1J9ZDI7_9BACI 7-cyano-7-deazaguanine synthase OS=Bacillus pacificus; OX = 2026187 GN=queC PE=3 SV=1

SEQ ID NO: 36317 - protein, 220 aa, unidentified
  source 1..220: note = Bacillus pacificus
  REGION 1..220: note = tr|A0A5C4ZGN7|A0A5C4ZGN7_9BACI 7-cyano-7-deazaguanine synthase OS=Bacillus pacificus; OX = 2026187 GN=queC PE=3 SV=1
MKKEKAVVVFSGGQDSTTCLFWAIEQFAEVEAVTFNYNQRHKLEIDCATEIAKELGIKHTVLDMSLLNQLAPNALTRTDMEITHEEGELPSTFVDGRNLLFLSFAAVLAKQVGARHIVTGVCETDFSGYPDCRDVFVKSLNVTLNLSMDYPFVIHTPLMWIDKAETWKLSDELGAFEFVREKTLTCYNGIIGDGCGECPACQLRKAGLDTYLQEREGASN

SEQ ID NO: 36318 - protein, 219 aa, unidentified
  source 1..219: note = Bacillus paralicheniformis
  REGION 1..219: note = tr|A0A1Q8GGH9|A0A1Q8GGH9_9BACI 7-cyano-7-deazaguanine synthase OS=Bacillus paralicheniformis OX=1648923 GN=queC PE=3 SV=1
MKQEKAIVVFSGGQDSTTCLLWALRQFQEVEAVTFQYNQRHREEIEVAKKIAEKLGVKHHLLDMELLNQLAPNALTRDDIEIEAKEGELPSTFVPGRNLVFLSFASILAYQVSARHIITGVCETDFSGYPDCRDEFVKSCNVTVNLAMERPFVIHTPLMWLNKAETWELADELDALDFVKNETLTCYNGIIADGCGECPACKLRANGYNEYMKMKKERA

SEQ ID NO: 36319 - protein, 219 aa, unidentified; identical to SEQ ID NO: 36188
  source 1..219: note = Bacillus paralicheniformis
  REGION 1..219: note = tr|A0A5C1Y0P8|A0A5C1Y0P8_9BACI 7-cyano-7-deazaguanine synthase OS=Bacillus paralicheniformis OX=1648923 GN=queC PE=3 SV=1

SEQ ID NO: 36320 - protein, 220 aa, unidentified
  source 1..220: note = Bacillus paramycoides
  REGION 1..220: note = tr|A0A1J9VFN7|A0A1J9VFN7_9BACI 7-cyano-7-deazaguanine synthase OS=Bacillus paramycoides; OX = 2026194 GN=queC PE=3 SV=1
MKKEKAVVVFSGGQDSTTCLFWAMQQFAEVEAVTFNYNQRHKLEIDCAAEIAKELGIKHTVLDMSLLNQLAPNALTRTDMEITHEEGELPSTFVDGRNLLFLSFASVLAKQVGARHIVTGVCETDFSGYPDCRDVFVKSLNVTLNLSMDYPFVIHTPLMWIDKAETWKLSDELGAFEFVREKTLTCYNGIIGDGCGECPACQLRKAGLDTYLQEREGANN

SEQ ID NO: 36321 - protein, 220 aa, unidentified; identical to SEQ ID NO: 36226
  source 1..220: note = Bacillus paranthracis
  REGION 1..220: note = tr|A0A1J9YPI9|A0A1J9YPI9_9BACI 7-cyano-7-deazaguanine synthase OS=Bacillus paranthracis; OX = 2026186 GN=queC PE=3 SV=1

SEQ ID NO: 36322 - protein, 220 aa, unidentified; identical to SEQ ID NO: 36197
  source 1..220: note = Bacillus paranthracis
  REGION 1..220: note = tr|A0A4P9F5Y0|A0A4P9F5Y0_9BACI 7-cyano-7-deazaguanine synthase OS=Bacillus paranthracis; OX = 2026186 GN=queC PE=3 SV=1

SEQ ID NO: 36323 - protein, 219 aa, unidentified
  source 1..219: note = Bacillus persicus
  REGION 1..219: note = tr|A0A1H8AH04|A0A1H8AH04_9BACI 7-cyano-7-deazaguanine synthase OS=Bacillus persicus; OX = 930146 GN=queC PE=3 SV=1
MKNDKAVVVFSGGQDSTTCLFWAMEQFADVTAVTFDYNQRHITEIECAKKITKELGITHHILDMSLLNQLAPNALTRQNIEVTDGEEGELPSTFVPGRNLLFMSFAGVLASQIGAKHIVTGVCETDFSGYPDCRDVFIKSLNVTLNLSMDQQFVIHTPLMWLNKAETWKMADELGAFDFVREKTLTCYNGIVADGCGECPACKLRKNGLDEYLNVRKER

SEQ ID NO: 36324 - protein, 222 aa, Bacillus pseudofirmus
  REGION 1..222: note = tr|A0A1Q9PTH2|A0A1Q9PTH2_BACPF 7-cyano-7-deazaguanine synthase OS=Bacillus pseudofirmus; OX = 79885 GN=queC PE=3 SV=1
MKQDKAVVVFSGGQDSTTCLFWALKEFKEVATVTFDYGQRHSKEIECARKIADELGVSFHVLDMGLLNQLSPNALTRADIEVKAGDDGELPSTFVEGRNLLFLSFAAIYGKQIGAKHIITGVCETDFSGYPDCRDIFVKSLNVTLNLSMDDQFVIHTPLMWLNKEQTWKLADDLGALSFVREKTLTCYNGIIGDGCGECPACVLRKKGLDDYLASTEAGAES

SEQ ID NO: 36325 - protein, 222 aa, Bacillus pseudofirmus; identical to SEQ ID NO: 36294
  REGION 1..222: note = tr|D3FSX7|D3FSX7_BACPE 7-cyano-7-deazaguanine synthase OS=Bacillus pseudofirmus (strain OF4) OX=398511; GN = queC PE=3 SV=1

SEQ ID NO: 36326 - protein, 220 aa, Bacillus pseudomycoides
  REGION 1..220: note = tr|A0A2A8BCW0|A0A2A8BCW0_9BACI 7-cyano-7-deazaguanine synthase OS=Bacillus pseudomycoides; OX = 64104 GN=queC PE=3 SV=1
MKKEKAVVVFSGGQDSTTCLFWAMQQFAEVEAVTFNYNQRHKLEIDCAADIAKELGIKHTVLDMSLLNQLAPNALTRTDMEITHEEGELPSTFVDGRNLLFLSFAAVLAKQVGARHIVMGVCETDFSGYPDCRDVFVKSLNVTLNLSMDYPFVIHTPLMWIDKAETWKLSDELGAFEFVREKTLTCYNGIIGDGCGECPACKLRKAGLDTYLQEREGANA

SEQ ID NO: 36327 - protein, 220 aa, Bacillus pseudomycoides
  REGION 1..220: note = tr|A0A2C3W895|A0A2C3W895_9BACI 7-cyano-7-deazaguanine synthase OS=Bacillus pseudomycoides; OX = 64104 GN=queC PE=3 SV=1
MKKEKAVVVFSGGQDSTTCLFWAMQQFAEVEAVTFNYNQRHKLEIDCAADIAKELGIKHTVLDMSLLNQLAPNALTRTDMEITHEEGELPSTFVDGRNLLFLSFAAVLAKQVGARHIVTGVCETDFSGYPDCRDVFVKSLNVTLNLSMDYPFVIHTPLMWIDKAETWKLSDELDAFEFVREKTLTCYNGIIGDGCGECPACKLRKAGLDTYLQEREGANA

SEQ ID NO: 36328 - protein, 218 aa, Bacillus pumilus
  REGION 1..218: note = sp|A8FCH9|QUEC_BACP2 7-cyano-7-deazaguanine synthase; OS = Bacillus pumilus (strain SAFR-032) OX=315750 GN=queC; PE = 3 SV=1
MKNEKAVVVFSGGQDSTTCLLWALQQFEEVETVTFHYNQRHQEEIDVAKRIADKLGVKNHLLDMSLLNQLAPNALTRDDIDIEEKEGELPSTFVPGRNLVFLSFASILAYQIGARHIITGVCETDFSGYPDCRDEFVKSCNVTVNLAMEKPFVIHTPLMWLNKAETWKLADELNALDFVKNETLTCYNGIISDGCGECPACKLRKKGYDTYMEMKEAK

SEQ ID NO: 36329 - protein, 218 aa, Bacillus pumilus; identical to SEQ ID NO: 36206
  REGION 1..218: note = tr|A0A2P1F4U6|A0A2P1F4U6_BACPU 7-cyano-7-deazaguanine synthase OS=Bacillus pumilus; OX = 1408 GN=queC PE=3 SV=1

SEQ ID NO: 36330 - protein, 234 aa, Bacillus safensis
  REGION 1..234: note = tr|A0A5C0WAQ8|A0A5C0WAQ8_9BACI 7-cyano-7-deazaguanine synthase OS=Bacillus safensis; OX = 561879 GN=queC PE=3 SV=1
MQCCTVVPSAKGGEQKMKNEKAVVVFSGGQDSTTCLLWALQQFEEVETVTFHYNQRHQEEIDVAKRIADKLGVKNHLLDMSLLNQLAPNALTRDDIDIEEKEGELPSTFVPGRNLVFLSFASILAYQIGARHIITGVCETDFSGYPDCRDEFVKSCNVTVNLAMEKPFVIHTPLMWLNKAETWKLADELNALDFVKNETLTCYNGIISDGCGECPACKLRKNGYDTYMEMKEAK

SEQ ID NO: 36331 - protein, 218 aa, Bacillus safensis; identical to SEQ ID NO: 36206
  REGION 1..218: note = tr|A0A494TVX9|A0A494TVX9_9BACI 7-cyano-7-deazaguanine synthase OS=Bacillus safensis; OX = 561879 GN=queC PE=3 SV=1

SEQ ID NO: 36332 - protein, 220 aa, unidentified
  source 1..220: note = Bacillus salacetis
  REGION 1..220: note = tr|A0A3A1R0P1|A0A3A1R0P1_9BACI 7-cyano-7-deazaguanine synthase OS=Bacillus salacetis; OX = 2315464 GN=queC PE=3 SV=1
MKNEKALVVFSGGQDSTTCLIWAKKEFKEVEAVTFNYGQRHLDELACAKEIAEEFNIQHHVLDMSLLNQLSPSALTRNEEITEKEGELPSTFVPGRNLLFLSFAGVLARNIGAGHIITGVCETDFSGYPDCRDMFVKSFNVTLNLALDEGYAVHTPLMWLDKKATWKWADEMGMLQYVREKTLTCYNGIRGDGCGECPSCRLRNKGLREYLSEKKGGGSL

SEQ ID NO: 36333 - protein, 223 aa, Bacillus salarius
  REGION 1..223: note = tr|A0A3R9QMV2|A0A3R9QMV2_9BACI 7-cyano-7-deazaguanine synthase OS=Bacillus salarius; OX = 284579 GN=queC PE=3 SV=1
MSLADEKAVVVFSGGQDSTTCLFWALERFKEVSAVTFDYGQRHDKEIKVAEDIAQELGVEHKVLDMSLLNQLAPNALTRDDMEVKAGENGEMPTTFVEGRNLLFFSFASIYASQWGAKHVVTGVCETDYSGYPDCRDVFVKSLNVSLNLGIGKEFVLHTPLMWLDKKETWELADNLGRLSYVKNKTLTCYHGILGDGCGECPACQLRQAGYDQYRKEKEREAL

SEQ ID NO: 36334 - protein, 221 aa, Bacillus salarius
  REGION 1..221: note = tr|A0A3R9Q0V5|A0A3R9Q0V5_9BACI 7-cyano-7-deazaguanine synthase OS=Bacillus salarius; OX = 284579 GN=queC PE=3 SV=1
MADEKAVVVFSGGQDSTTCLFWALERFKEVSTVTFDYGQRHDKEIKVAEDIAAELGIEHQIMDMSLLNQLAPNALTRDDMEVHAGEDGELPTTFVEGRNLLFFSFASIFASQRGAKHVVTGVCETDYSGYPDCRDVFVKSLNVSLNLGMGKEFVLHTPLMWLDKKETWALADKLGKLSYVKNKTLTCYHGIQGDGCGECPACELRQAGYDQYMQEKEREAL

SEQ ID NO: 36335 - protein, 221 aa, unidentified
  source 1..221: note = Bacillus salsus
  REGION 1..221: note = tr|A0A1H0Q5J0|A0A1H0Q5J0_9BACI 7-cyano-7-deazaguanine synthase OS=Bacillus salsus; OX = 930152 GN=queC PE=3 SV=1
MMLKNEKAIIVFSGGQDSTTCLFWAMKQFKEVEAVTFNYNQRHVTEIECAKNIASELGIKHHILDMSLLNQLAPNALTRDDIEVKDGEEGELPSTFVPGRNLLFMSFAGVLARQVNAKHIVTGVCETDFSGYPDCRDIFIKSLNVTLNLSMDAQFVIHTPLMWINKAETWEMADDLGAFEFVQEKTLTCYNGIIAEGCGECPACKLRQKGLDDYLEIRGER

SEQ ID NO: 36336 - protein, 218 aa, Bacillus selenatarsenatis
  REGION 1..218: note = tr|A0A0A8X2P0|A0A0A8X2P0_9BACI 7-cyano-7-deazaguanine synthase OS=Bacillus selenatarsenatis SF-1 OX=1321606 GN=queC PE=3 SV=1
MKNEKAVVVFSGGQDSTTCLFWAIKEFGEVEAVTFDYNQRHRTEIHCAEEIASELGIKHHVLDMSLLNQLAPNALTRNDIDVEDGEGGELPSTFVPGRNLLFLSFAGVLASQVRAKHIVTGVCETDFSGYPDCRDVFIKSLNVTLNLSMDQNFVIHTPLMWLNKAQTWKMADDLDAFEFVRSRTLTCYNGIIADGCGVCPACKLRKKGLDKFLEGDVS

SEQ ID NO: 36337 - protein, 219 aa, Bacillus selenitireducens
  REGION 1..219: note = tr|D6XXU4|D6XXU4_BACIE 7-cyano-7-deazaguanine synthase OS=Bacillus selenitireducens (strain ATCC 700615 / DSM 15326 / MLS10) OX=439292 GN=queC PE=3 SV=1
MLNEEKALVVFSGGQDSTTCLFWALERFKEVETVTFDYHQRHSQEIEVAEGIAKELGVKNTVLDLSLLNQLSANALTRSDIAIEQKDRELPSTFVPGRNHLFLSFAGVMAKSMGAKHIVTGVCETDFSGYPDCRDVFIKSLNVTLNLAMDDTFVIDTPLMWLNKKETWALADELGALDFVREKTLTCYNGILADGCGECPACELRKNGLDDYLNEKVNG

SEQ ID NO: 36338 - protein, 218 aa, Bacillus shackletonii
  REGION 1..218: note = tr|A0A0Q3WYN4|A0A0Q3WYN4_9BACI 7-cyano-7-deazaguanine synthase OS=Bacillus shackletonii; OX = 157838 GN=queC PE=3 SV=1
MKKKEKAVVVFSGGQDSTTCLFWAKERFEEVVAVTFDYNQRHKLEIECAKNITNQLGVKHHILDMSLLNQLAPNALTRDDIQVKDGENGSLPSTFVPGRNLLFMSFAGVLASQVGAKHIVTGVCETDFSGYPDCRDIFVKSLNVTLNLSMDQDFVIHTPLMWLDKCETWKLADELDAFDFVREKTLTCYNGIIADGCGECPACKLRKNGLEEYLKIRK

SEQ ID NO: 36339 - protein, 219 aa, Bacillus siamensis; identical to SEQ ID NO: 36194
  REGION 1..219: note = tr|A0A2K9KCQ5|A0A2K9KCQ5_9BACI 7-cyano-7-deazaguanine synthase OS=Bacillus siamensis; OX = 659243 GN=queC PE=3 SV=1

SEQ ID NO: 36340 - protein, 219 aa, Bacillus siamensis
  REGION 1..219: note = tr|A0A268DYA5|A0A268DYA5_9BACI 7-cyano-7-deazaguanine synthase OS=Bacillus siamensis; OX = 659243 GN=queC PE=3 SV=1
MKKEKAVVVFSGGQDSTTCLLWALQNFEEVETVTFHYNQRHQEEIDVAKSIAEKLGVKNHLLDMSLLNQLAPNALTRDDIEIEAKDGELPTTFVPGRNLVFLSFASILAYQIGARHIITGVCETDFSGYPDCRDEFVKSCNVTINLAMEKPFVIHTPLMWLNKAETWKLADELGALDFVKNNTLTCYNGIIADGCGECPACLLRNKGYDEYMKMKGERN

SEQ ID NO: 36341 - protein, 221 aa, Bacillus simplex
  REGION 1..221: note = tr|A0A270AHN0|A0A270AHN0_9BACI 7-cyano-7-deazaguanine synthase OS=Bacillus simplex; OX = 1478 GN=queC PE=3 SV=1
MKKKEKAVVVFSGGQDSTTCLFWALERFEEVEAVTFDYNQRHSLEIECAQNIAKELGVNHHILDMSLLNQLAPNALTRSDIAVADGEEGELPSTFVPGRNLLFLSFAGVLASQIGAKHIITGVCETDFSGYPDCRDVFIKSLNVTLNLSMDQSFVIDTPLMWLNKEETWELADQLGAFDFVREKTLTCYNGIISDGCGDCPACNLRKKGLDDYVSRRKVLS

SEQ ID NO: 36342 - protein, 221 aa, Bacillus simplex
  REGION 1..221: note = tr|A0A098FKH2|A0A098FKH2_9BACI 7-cyano-7-deazaguanine synthase OS=Bacillus simplex; OX = 1478 GN=queC PE=3 SV=1
MKKKEKAVVVFSGGQDSTTCLFWALERFEEVEAVTFDYNQRHSLEIECAQNIAKELGVNHHILDMSLLNQLAPNALTRSDIAVADGEEGELPSTFVPGRNLLFLSFAGVLASQIGAKHIVTGVCETDFSGYPDCRDVFIKSLNVTLNLSMDQSFVIDTPLMWLNKEETWELADQLGAFDFVREKTLTCYNGIISDGCGDCPACNLRKKGLDDYVSRRKVLS

SEQ ID NO: 36343 - protein, 221 aa, Bacillus smithii
  REGION 1..221: note = tr|G9QLL9|G9QLL9_9BACI 7-cyano-7-deazaguanine synthase OS=Bacillus smithii 7_3_47FAA OX=665952 GN=queC; PE = 3 SV=1
MLNEEKAVVVFSGGQDSTTCLFWALKNFQEVQAVTFDYGQRHRKEIEVAKTIAHDLGVKHTVLDMSLLNQLAPNALTRKEIEIEQKEGELPTTFVDGRNLLFLSFAAVLAKQSGARHIITGVCETDFSGYPDCRDVFIKSLNVTLNLAMDYEFVIHTPLMWLNKAQTWELADQLGALEYVRENTLTCYNGIMADGCGHCPACKLRKRGLDEYLSKKNGGSK

SEQ ID NO: 36344 - protein, 221 aa, Bacillus smithii
  REGION 1..221: note = tr|A0A0H4P0S4|A0A0H4P0S4_9BACI 7-cyano-7-deazaguanine synthase OS=Bacillus smithii; OX = 1479 GN=queC PE=3 SV=1
MLNEEKAVVVFSGGQDSTTCLFWALKNFQEVQAVTFDYGQRHRKEIEVAKTIADDLGVKHTVLDMSLLNQLAPNALTRKEIEIEQKEGELPTTFVDGRNLLFLSFAAVLAKQSGARHIITGVCETDFSGYPDCRDVFIKSLNVTLNLAMDYEFVIHTPLMWLNKAQTWELADQLGALDYVRENTLTCYNGIMADGCGHCPACKLRKRGLNEYLSKKNGGSK

SEQ ID NO: 36345 - protein, 222 aa, unidentified
  source 1..222: note = Bacillus solimangrovi
  REGION 1..222: note = tr|A0A1E5LFC3|A0A1E5LFC3_9BACI 7-cyano-7-deazaguanine synthase OS=Bacillus solimangrovi; OX = 1305675 GN=queC PE=3 SV=1
MKKLGKAIVVFSGGQDSTTCLFWALKHFEQVETVTFDYNQRHNHEIECAKEIAKELGVNNTVLDMSLLNQLAPNALTRNDIEVKAGEEGELPNTFVPGRNLMFLSFAAVMAKQINAQHLITGVCETDFSGYPDCRDIFIKSLNVTLNLSMDDEFYIHTPLMHLNKAETWELADELGVLDYVREKTLTCYNGVRGDGCGTCPACELRQRGLEQYLAQKSGETL

SEQ ID NO: 36346 - protein, 231 aa, Bacillus sonorensis
  REGION 1..231: note = tr|M5PFF4|M5PFF4_9BACI 7-cyano-7-deazaguanine synthase OS=Bacillus sonorensis L12 OX=1274524 GN=queC; PE = 3 SV=1
MKKNEKKAVVVLSGGLDSATCMGIAEKEGYMLHAITFDYGQRHSREVEQAKKIAAHYQVHDHRIVNIEFFKEIGGSALTDEHIDVPKKMNQDAIPATYVPARNLIFLSCAAAYAEVIKAEAIYTGVSGVDYSGYPDCRPEFIDSLNHTIRLATKRNIEGKKTNIYTPLINLSKADTVTLGLRLHVPYELTTSCYNGEEYACGECDSCTLRLKGFKEAGCKDPIPYKNTQVI

SEQ ID NO: 36347 - protein, 206 aa, Bacillus sonorensis
  REGION 1..206: note = tr|M5P828|M5P828_9BACI 7-cyano-7-deazaguanine synthase OS=Bacillus sonorensis L12 OX=1274524; GN = BSONL12_04698 PE=3 SV=1
MAYWIKHQGYELHTLTFNFGEEEGEAEKRTANFIAKDISKSHKFISFESVLREFYMEDDPIHILRIAHLPSPIKAFGAGIAISLAASYAAENDIHHLFYAVHKDDTIFRENNYEFFNLLSKAISIELGREFKIHTPFLDKTKAEVLKIGFDLGVPLEETWSCASNSTIHCGWCDPCKNRQKAFKDNGITDNTLYENVNSKNSSVNV

SEQ ID NO: 36348 - protein, 221 aa, Bacillus sp.
  REGION 1..221: note = tr|A0A0Q9I3F4|A0A0Q9I3F4_9BACI 7-cyano-7-deazaguanine synthase OS=Bacillus sp. Root239; OX = 1736499 GN=queC PE=3 SV=1
MMKNEKAIVVFSGGQDSTTCLFWALKNFKEVETVTFQYGQRHSQEIEVAKAIAADLGVKHTVLDMSLLNQLAPNALTRDDIEIEQKEGELPTTFVDGRNLLFLSFAAVLAKNNGGRHIVTGVCETDFSGYPDCRDVFVKSLNVTLNLSMDFEFVIHTPLMWIDKAETWALADELGALEYVREKTLTCYNGIVADGCGECPACQLRKRGLDQYLQTKEGGEK

SEQ ID NO: 36349 - protein, 220 aa, Bacillus sp.
  REGION 1..220: note = tr|A0A3S2TRP1|A0A3S2TRP1_9BACI 7-cyano-7-deazaguanine synthase OS=Bacillus sp. M5HDSG1-1; OX = 2499688 GN=queC PE=3 SV=1
MLRDEKAVVVFSGGQDSTTCLFWALETFKEVEVVTFNYNQRHKAEIQCAIDIAGELGVKHHLLDMELLNQLAPNALTRSDIEVKEGENGELPSTFVPGRNLVFLSFASILASQIGAKHIITGVCETDFSGYPDCRDSFVKSLNVTLNLAMDTSFVIHTPLMWLDKAETWKLADELGRLDYVREKTLTCYEGVIGDGCGQCPSCVLRKAGLDKYLQEKEAN

SEQ ID NO: 36350 - protein, 218 aa, Bacillus sporothermodurans
  REGION 1..218: note = tr|A0A150KMS9|A0A150KMS9_9BACI 7-cyano-7-deazaguanine synthase OS=Bacillus sporothermodurans OX=46224 GN=queC PE=3 SV=1
MKKKEKAVVVFSGGQDSTTCLFWAMERFEEVVAVTFDYNQRHKQEIECAKNIANELGVPHHILDMSLLNQLAPNALTRENIQVKDGENGSLPSTFVPGRNLLFLSFAGVLASQVGAKHIVTGVCETDFSGYPDCRDIFVKSLNVTLNLSMDQDFVIHTPLMWLDKSETWKLADELHAFEFVREKTLTCYNGIIADGCGECPACKLRKNGLEEFLKIRN

SEQ ID NO: 36351 - protein, 234 aa, Bacillus stratosphericus
  REGION 1..234: note = tr|M5RHY5|M5RHY5_9BACI 7-cyano-7-deazaguanine synthase OS=Bacillus stratosphericus LAMA 585 OX=1236481; GN = queC PE=3 SV=1
MQLCAVVRVCKRRKRKMKNEKAVVVFSGGQDSTTCLLWALQQFKEVETVTFHYNQRHQEEIDVAKRIADKLGVKNHLLDMSLLNQLAPNALTRDDIDIEEKEGELPSTFVPGRNLVFLSFASILAYQIGARHIITGVCETDFSGYPDCRDEFVKSCNVTVNLAMEKPFVIHTPLMWLNKAETWKLADELNALDFVKNETLTCYNGIISDGCGECPACKLRKNGYDTYMDMKEAN

SEQ ID NO: 36352 - protein, 218 aa, Bacillus stratosphericus; identical to SEQ ID NO: 36206
  REGION 1..218: note = tr|A0A4Y9K128|A0A4Y9K128_9BACI 7-cyano-7-deazaguanine synthase OS=Bacillus stratosphericus OX=293386 GN=queC PE=3 SV=1

SEQ ID NO: 36353 - protein, 218 aa, Bacillus subterraneus
  REGION 1..218: note = tr|A0A3R9FD89|A0A3R9FD89_9BACI 7-cyano-7-deazaguanine synthase OS=Bacillus subterraneus; OX = 285983 GN=queC PE=3 SV=1
MKKEKAVVVFSGGQDSTTCLFWAMKEFSSVEAVTFDYNQRHRTEIDCARAITSELGIKHHVLDMSLLNQLAPNALTREEIAVEDGEEGGLPSTFVPGRNLLFMSFAGVLASQVQAKHIVTGVCETDFSGYPDCRDIFVKSLNVTLNLSMDQDFVIHTPLMWLNKAETWKLADELGALDFVRTKTLTCYNGIIADGCGVCPACKLRKKGLDQFLEGDVS

SEQ ID NO: 36354 - protein, 428 aa, Bacillus subterraneus
  REGION 1..428: note = tr|A0A0D6Z7U6|A0A0D6Z7U6_9BACI ATPase OS=Bacillus subterraneus OX=285983 GN=UB32_17855 PE=4 SV=1
MELVYKFNADDDYPVPEGGNLCEMNDYRYTFWNSQLETLPNYISTKGIDLLMLSLAVYGADRYFLRKDAADGWKRDIHIHLPVLNIDSMNEKKELIKDILDFLSGDNWKVSFRKRDFTDKEKVYRDKYEKSKKVKIHANRICMLSGGLDSFIGAIDLLQDNVNDTIFVSHYGGGKGVREYQELLQKEFIKEFKISDNNFFSFFAAPPGGIEDTMRTRSFMFFSHAIALAPCFEGDIDLIVPENGFISLNVPLTYSRMGTSSTRTTHPYYMGLLQQLLDELGFKIHIKNPYQFKTKGEMIIECKNQGFLKENIAKTMSCSHPDVGRMRGESETQHCGTCLPCVIRRASIKKAGFDESTHYYDPNFTSGDTARTNLNSYLLGLQKYDDKKAFLTIQTSGPLMDNIERYESIYKRGIAELKSLLEEYNENP

SEQ ID NO: 36355 - protein, 219 aa, Bacillus subtilis
  REGION 1..219: note = sp|O31675|QUEC_BACSU 7-cyano-7-deazaguanine synthase; OS = Bacillus subtilis (strain 168) OX=224308 GN=queC PE=1; SV = 1
MKKEKAIVVFSGGQDSTTCLLWALKEFEEVETVTFHYNQRHSQEVEVAKSIAEKLGVKNHLLDMSLLNQLAPNALTRNDIEIEVKDGELPSTFVPGRNLVFLSFASILAYQIGARHIITGVCETDFSGYPDCRDEFVKSCNVTVNLAMEKPFVIHTPLMWLNKAETWKLADELGALDFVKNNTLTCYNGIIADGCGECPACHLRSKGYEEYMVMKGERA

SEQ ID NO: 36356 - protein, 219 aa, Bacillus subtilis
  REGION 1..219: note = tr|A0A164YHN8|A0A164YHN8_BACIU 7-cyano-7-deazaguanine synthase OS=Bacillus subtilis; OX = 1423 GN=queC PE=3 SV=1
MKKEKAIVVFSGGQDSTTCLLWALKEFEEVETVTFHYNQRHSQEVEVAKSIAEKLGVKNHLLDMSLLNQLAPNALTRNDIEIEVKDGELPSTFVPGRNLVFLSFASILAYQIGARHIITGVCETDFSGYPDCRDEFVKSCNVTVNLAMEKPFVIHTPLMWLNKAETWKLADELGALDFVKNNTLTCYNGIIADGCGECPACHLRSKGYEEYMMMKGERA

SEQ ID NO: 36357 - protein, 219 aa, unidentified
  source 1..219: note = Bacillus swezeyi
  REGION 1..219: note = tr|A0A5D4QJH9|A0A5D4QJH9_9BACI 7-cyano-7-deazaguanine synthase OS=Bacillus swezeyi; OX = 1925020 GN=queC PE=3 SV=1
MKQEKAVVVFSGGQDSTTCLLWALKQFEEVEAVTFHYNQRHQQEIDAATHIAEKLGVKHHLLDMALLNQLAPNALTRDDIEIEAKEGELPSTFVPGRNLVFLSFASILAYQIGARHIVTGVCETDFSGYPDCRDEFVKSCNVTVNLAMERPFVIHTPLMWLNKAETWELADELEALEFVKNETLTCYNGIIADGCGECPACKLRANGYNEYMKIKRERA

SEQ ID NO: 36358 - protein, 219 aa, unidentified
  source 1..219: note = Bacillus swezeyi
  REGION 1..219: note = tr|A0A1R1RGM4|A0A1R1RGM4_9BACI 7-cyano-7-deazaguanine synthase OS=Bacillus swezeyi; OX = 1925020 GN=queC PE=3 SV=1
MKQEKAVVVFSGGQDSTTCLLWALKQFEEVEAVTFHYNQRHQQEIDAAKHIAEKLGVKHHLLDMALLNQLAPNALTRDDIEIEAKEGELPSTFVPGRNLVFLSFASILAYQIGARHIVTGVCETDFSGYPDCRDEFVKSCNVTVNLAMERPFVIHTPLMWLNKAETWELADELEALEFVKNETLTCYNGIIADGCGECPACKLRANGYNEYMKMKRERA

SEQ ID NO: 36359 - protein, 228 aa, Bacillus taeanensis
  REGION 1..228: note = tr|A0A366Y5D9|A0A366Y5D9_9BACI 7-cyano-7-deazaguanine synthase OS=Bacillus taeanensis; OX = 273032 GN=queC PE=3 SV=1
MSKKAVIVLSGGLDSTTCMGIAKEKGYELYPITFSYGQRHDREVEQAKKVAQHFEVSDHRLVDISFLNQIGGSALTDQSIEVPTEGVKDDIPATYVPARNMIFLSLASAYAEVIGAEVIYIGVSAVDYSGYPDCRPEFIESMTETVNLATKAGTTGDRIKIESPLIHLTKKETIEAGLRLNVPYHLTTSCYLGEEEACGVCDSCQLRIKGFKEAGAKDEIAYAVNINW

SEQ ID NO: 36360 - protein, 219 aa, Bacillus tequilensis
  REGION 1..219: note = tr|A0A2X0X9K3|A0A2X0X9K3_9BACI 7-cyano-7-deazaguanine synthase OS=Bacillus tequilensis; OX = 227866 GN=ykvJ PE=3 SV=1
MKKEKAIVVFSGGQDSTTCLLWALKEFEEVETVTFHYNQRHAQEIEVAQSIAEKLGVKNHLLDMSLLNQLAPNALTRDDIEIEVKDGELPSTFVPGRNLVFLSFASILAYQIGARHIITGVCETDFSGYPDCRDEFVKSCNVTVNLAMEKPFVIHTPLMWLNKAETWKLADELGALDFVKNNTLTCYNGIIADGCGECPACHLRSKGYEEYMVMKGERA

SEQ ID NO: 36361 - protein, 222 aa, unidentified
  source 1..222: note = Bacillus terrae
  REGION 1..222: note = tr|A0A429X5J2|A0A429X5J2_9BACI 7-cyano-7-deazaguanine synthase OS=Bacillus terrae; OX = 1914933 GN=queC PE=3 SV=1
MLKDEKAIVVFSGGQDSTTCLFWALKTFKEVEVVTFNYNQRHKNEIECAKTIAEELNVRHHLLDMQLLNQLAPNALTRNDIEIKDGGEGELPSTFVPGRNLIFLSFAAVLASQVNAKHIITGVSETDFSGYPDCRDAFIKSLNVSINLSMDKQFVIHTPLMWLDKEETWKLADELNVLEYIRTKTLTCYEGVIGDGCGVCPACKLRKNGLEKYLTSRKGGDV

SEQ ID NO: 36362 - protein, 79 aa, Bacillus thermoamylovorans
  REGION 1..79: note = tr|A0A0D0EQ51|A0A0D0EQ51_9BACI 7-cyano-7-deazaguanine synthase OS=Bacillus thermoamylovorans OX=35841 GN=B4064_3648 PE=3 SV=1
MLNEEKAVVVFSGGQDSTTCLFWALKNFQEVQAVTFDYGQRHRKEIEVAKTIAHDLGVKHTVLDMSMEFDVHVIISFNS

SEQ ID NO: 36363 - protein, 224 aa, Bacillus thermoamylovorans; identical to SEQ ID NO: 36265
  REGION 1..224: note = tr|A0A090IZ59|A0A090IZ59_9BACI 7-cyano-7-deazaguanine synthase OS=Bacillus thermoamylovorans OX=35841 GN=queC PE=3 SV=1

SEQ ID NO: 36364 - protein, 221 aa, unidentified
  source 1..221: note = Bacillus thermocopriae
  REGION 1..221: note = tr|A0A410XHY7|A0A410XHY7_9BACI 7-cyano-7-deazaguanine synthase OS=Bacillus thermocopriae; OX = 1215031 GN=queC PE=3 SV=1
MKKEKAVVVFSGGQDSTTCLFWAKKHFAEVEAVTFDYNQRHRLEIDVAASIAKELNVPHTVLDMSLLNQLAPNALTRSDIAIEQKEGQLPSTFVDGRNLLFLSFAAVLAKQKGARHLVTGVCETDFSGYPDCRDVFIKSLNVTLNLAMDYEFVIHTPLMWLNKAETWKLADELGALEFVRNKTLTCYNGIIADGCGECPACVLRKRGFEQYMNEKKGANAQ

SEQ ID NO: 36365 - protein, 220 aa, Bacillus thuringiensis; identical to SEQ ID NO: 36197
  REGION 1..220: note = sp|A0RBG1|QUEC_BACAH 7-cyano-7-deazaguanine synthase; OS = Bacillus thuringiensis (strain Al Hakam) OX=412694; GN = queC PE=3 SV=2

SEQ ID NO: 36366 - protein, 220 aa, Bacillus thuringiensis; identical to SEQ ID NO: 36191
  REGION 1..220: note = tr|W8XZZ9|W8XZZ9_BACTU 7-cyano-7-deazaguanine synthase OS=Bacillus thuringiensis DB27 OX=1431339 GN=queC; PE = 3 SV=1

SEQ ID NO: 36367 - protein, 221 aa, unidentified
  source 1..221: note = Bacillus timonensis
  REGION 1..221: note = tr|A0A4S3PML0|A0A4S3PML0_9BACI 7-cyano-7-deazaguanine synthase OS=Bacillus timonensis; OX = 1033734 GN=queC PE=3 SV=1
MKREKAIVVFSGGQDSTTCLFWARERFEEVEVVTFDYGQKHRLEIQCAKDIAAELGVKHHILDMSLLNQLAPNALTRHDIKIEEGENGELPSTFVPGRNLLFLSFAGVLARQVGAKHIVTGVSETDFSGYPDCRDIFMKSLNVTLNLSMDASFVIDTPLMWLNKAQTWELADQLGALEFVRERTLTCYNGVIADGCGECPACKLRKKGLDEFYLGKSNLEE

SEQ ID NO: 36368 - protein, 148 aa, unidentified
  source 1..148: note = Bacillus toyonensis
  REGION 1..148: note = tr|A0A2C4KWS9|A0A2C4KWS9_9BACI 7-cyano-7-deazaguanine synthase (Fragment) OS=Bacillus toyonensis OX=155322 GN=queC PE=3 SV=1
MYSNDKAIVVFSGGQDSTTCLFWAIEQFAEVEAVTFNYNQRHKLEIDCAAEIANELGIKHTVIDMSLLNQLAPNALTRIDMEITHEEGELPSTFVDGRNLLFLSFAAVLAKQVGARHIVTGVCETDFSGYPDCRDVFVKSLNVTLNLS

SEQ ID NO: 36369 - protein, 220 aa, unidentified; identical to SEQ ID NO: 36191
  source 1..220: note = Bacillus toyonensis
  REGION 1..220: note = tr|A0A2A2PBI7|A0A2A2PBI7_9BACI 7-cyano-7-deazaguanine synthase OS=Bacillus toyonensis; OX = 155322 GN=queC PE=3 SV=1

SEQ ID NO: 36370 - protein, 220 aa, unidentified; identical to SEQ ID NO: 36317
  source 1..220: note = Bacillus tropicus
  REGION 1..220: note = tr|A0A5C5A691|A0A5C5A691_9BACI 7-cyano-7-deazaguanine synthase OS=Bacillus tropicus; OX = 2026188 GN=queC PE=3 SV=1

SEQ ID NO: 36371 - protein, 220 aa, unidentified; identical to SEQ ID NO: 36197
  source 1..220: note = Bacillus tropicus
  REGION 1..220: note = tr|A0A4Y6F856|A0A4Y6F856_9BACI 7-cyano-7-deazaguanine synthase OS=Bacillus tropicus; OX = 2026188 GN=queC PE=3 SV=1

SEQ ID NO: 36372 - protein, 220 aa, unidentified
  source 1..220: note = Bacillus urumqiensis
  REGION 1..220: note = tr|A0A2P6MEV3|A0A2P6MEV3_9BACI 7-cyano-7-deazaguanine synthase OS=Bacillus urumqiensis; OX = 1548213 GN=queC PE=3 SV=1
MSFNGEKAIVVFSGGQDSTTCLLWALKQFDEVFTVTFDYGQRHRKEIEQAEAIAEELNVSHRVLDMSLLNQLAPNALTREDIEIEESEDGPPSTFVEGRNHLFFSFAAVLGRQLGARHIITGVCETDFSGYPDCRDSFVKSLNVTLNLAMDADFVIHTPLMWLDKKETWQLADELSGLEFIRTRTLTCYNGIVGDGCGKCPACVLRCRGLEQYLEEKEQS

SEQ ID NO: 36373 - protein, 219 aa, Bacillus vallismortis
  REGION 1..219: note = tr|A0A410WHN1|A0A410WHN1_BACVA 7-cyano-7-deazaguanine synthase OS=Bacillus vallismortis; OX = 72361 GN=queC PE=3 SV=1
MKKEKAIVVFSGGQDSTTCLLWALQEFKEVETVTFHYNQRHSQEVEVAKSIAEKLGVKNHLLDMSLLNQLAPNALTRNDIDIEAKDGELPSTFVPGRNLVFLSFASILAYQIGARHIITGVCETDFSGYPDCRDEFVKSCNVTVNLAMEKPFVIHTPLMWLNKAETWKLADELGALDFVKNNTLTCYNGIIADGCGECPACHLRSRGYEEYMAMKGERA

SEQ ID NO: 36374 - protein, 219 aa, Bacillus vallismortis; identical to SEQ ID NO: 36194
  REGION 1..219: note = tr|A0A1W6HHS5|A0A1W6HHS5_BACVA 7-cyano-7-deazaguanine synthase OS=Bacillus vallismortis; OX = 72361 GN=queC PE=3 SV=1

SEQ ID NO: 36375 - protein, 219 aa, unidentified; identical to SEQ ID NO: 36194
  source 1..219: note = Bacillus velezensis
  REGION 1..219: note = sp|A7Z3Y6|QUEC_BACVZ 7-cyano-7-deazaguanine synthase; OS = Bacillus velezensis (strain DSM 23117 / BGSC 10A6 / FZB42) OX=326423 GN=queC PE=3 SV=2

SEQ ID NO: 36376 - protein, 219 aa, unidentified; identical to SEQ ID NO: 36194
  source 1..219: note = Bacillus velezensis
  REGION 1..219: note = tr|A0A1D9PIK5|A0A1D9PIK5_9BACI 7-cyano-7-deazaguanine synthase OS=Bacillus velezensis; OX = 492670 GN=queC PE=3 SV=1

SEQ ID NO: 36377 - protein, 221 aa, Bacillus vietnamensis
  REGION 1..221: note = tr|A0A0P6WKQ3|A0A0P6WKQ3_9BACI 7-cyano-7-deazaguanine synthase OS=Bacillus vietnamensis; OX = 218284 GN=queC PE=3 SV=1
MNTEKALVVFSGGQDSTTCLFWAKKAFKEVEAVTFNYGQRHVAELDCAREIAEDLNVPHHVLDMSLLNQLAPSALTRTDEEITQKEGELPSTFVPGRNLLFLSFAGILAKQIGAKHIVTGVCETDFSGYPDCRDIFVKSLNVSLNLSMDEQFVIHTPLMWINKAETWEMADELGAFHYIQENTLTCYNGLKGSGCGECPACELRQKGLDEYINEKKGGEGL

SEQ ID NO: 36378 - protein, 220 aa, Bacillus vietnamensis; identical to SEQ ID NO: 36199
  REGION 1..220: note = tr|A0A5D4K9M5|A0A5D4K9M5_9BACI 7-cyano-7-deazaguanine synthase OS=Bacillus vietnamensis; OX = 218284 GN=queC PE=3 SV=1

SEQ ID NO: 36379 - protein, 222 aa, Bacillus wakoensis
  REGION 1..222: note = tr|W4PYC4|W4PYC4_9BACI 7-cyano-7-deazaguanine synthase OS=Bacillus wakoensis JCM 9140 OX=1236970 GN=queC; PE = 3 SV=1
MRNEKAVVVFSGGQDSTTCLLWALKQFKEVATVTFDYGQRHHEEITCAREIAEELGVSFHVLDMTLINQLSANALTRKDIEVKAGENGELPSTFVPGRNHLFLSFAAVYAQAIGARHIITGVCETDFSGYPDCRDSFVKSLNVTLNLAMDEQFVIHTPLMWLNKAETWKLADQLGSLEFIRAKTLTCYHGVRGDGCGECPACQLRKKGLDDYLTEKQGGSTI

SEQ ID NO: 36380 - protein, 218 aa, unidentified
  source 1..218: note = Bacillus weihaiensis
  REGION 1..218: note = tr|A0A1L3MXM9|A0A1L3MXM9_9BACI 7-cyano-7-deazaguanine synthase OS=Bacillus weihaiensis; OX = 1547283 GN=queC PE=3 SV=1
MKNDKAVVVFSGGQDSTTCLFWAMKQFKEVVAVTFNYNQRHSAEIEVASSIAKELGIQHHLLDMSLLNQLAPNALTRADIEIEQKDGELPSTFVPGRNLLFLSFATILANQIGAKHIVTGVCETDFSGYPDCRDAFVKSCNVTLNLALDKPFVIHTPLMWINKAETWKLADDLGVLNFVREKTLTCYNGIIADGCGECPACELRQKGLNEYLHEKGVK

SEQ ID NO: 36381 - protein, 221 aa, unidentified
  source 1..221: note = Bacillus wiedmannii
  REGION 1..221: note = tr|A0A2C4Q0N5|A0A2C4Q0N5_9BACI 7-cyano-7-deazaguanine synthase OS=Bacillus wiedmannii; OX = 1890302 GN=queC PE=3 SV=1
MYSNDKAIVVFSGGQDSTTCLFWAMQQFAEVEAVTFNYNQRHKLEIDCAAEIVNELGIKHTVIDMSLLNQLAPSALTRIDMEITHEEGELPSTFVDGRNLLFLSFAAVLAKQVGARHIVTGVCETDFSGYPDCRDVFVKSLNVTLNLSMDYPFVIHTPLMWIDKADTWKLSDELGAFEFIREKTLTCYNGIIGDGCGECPACQLRKAGLDTYLQERKEGNK

SEQ ID NO: 36382 - protein, 220 aa, unidentified; identical to SEQ ID NO: 36191
  source 1..220: note = Bacillus wiedmannii
  REGION 1..220: note = tr|A0A1A9PNF5|A0A1A9PNF5_9BACI 7-cyano-7-deazaguanine synthase OS=Bacillus wiedmannii; OX = 1890302 GN=queC PE=3 SV=1

SEQ ID NO: 36383 - protein, 220 aa, unidentified
  source 1..220: note = Bacillus wudalianchiensis
  REGION 1..220: note = tr|A0A1B9AC31|A0A1B9AC31_9BACI 7-cyano-7-deazaguanine synthase OS=Bacillus wudalianchiensis OX=1743143 GN=queC PE=3 SV=1
MSKEKAVVVFSGGQDSTTCLFWAKERFDEVIAVTFDYGQRHRLELECAADIAKDLNIPHHILDMSLLNQLAPNALTRTDIDITEKDGEPPSTFVEGRNLLFLSFAAVLAKQYDARHIITGVCETDFSGYPDCRDVFIKSLNVTLNLSMDYSFVIHTPLMWLDKAETWELADELGAFDYVRERTLTCYNGIKGSGCGECPACKLRQNGLNKYVAKREAGSK

SEQ ID NO: 36384 - protein, 218 aa, unidentified
  source 1..218: note = Bacillus xiamenensis
  REGION 1..218: note = tr|K2MEZ1|K2MEZ1_9BACI 7-cyano-7-deazaguanine synthase OS=Bacillus xiamenensis OX=1178537 GN=queC PE=3; SV = 1
MRNEKAVVVFSGGQDSTTCLLWALQQFKEVETVTFHYNQRHQEEIDVAKRIADKLGVKNHLLDMSLLNQLAPNALTRDDIDIEEKEGELPSTFVPGRNLVFLSFASILAYQIGARHIITGVCETDFSGYPDCRDEFVKSCNVTVNLAMEKPFVIHTPLMWLNKAETWKLADDLNALDFVKNETLTCYNGIISDGCGECPACKLRKNGYDTYMKMKEAN

SEQ ID NO: 36385 - protein, 220 aa, unidentified
  source 1..220: note = Bacillus zeae
  REGION 1..220: note = tr|A0A398B187|A0A398B187_9BACI 7-cyano-7-deazaguanine synthase OS=Bacillus zeae; OX = 1917180 GN=queC PE=3 SV=1
MLKDEKALVVFSGGQDSTTCLFWALETFREVEAVTFDYNQRHHQEIQCAQAIAKEFGIVHHTLDMSLLNQLAPNALTRPDIEVADGKEGELPSTFVPGRNLVFLSFAGILARQTGAKHVVTGVCETDFSGYPDCRDVFVKSLNVTLNLSMADEFVIHTPLMWLNKAETWKLADDLGRLDFVRERTLTCYNGIIADGCGECPACKLRKNGLEEYLLSRKGE

SEQ ID NO: 36386 - protein, 218 aa, unidentified
  source 1..218: note = Bacillus zhangzhouensis
  REGION 1..218: note = tr|A0A081L6Z8|A0A081L6Z8_9BACI 7-cyano-7-deazaguanine synthase OS=Bacillus zhangzhouensis; OX = 1178540 GN=queC PE=3 SV=1
MKNEKAVVVFSGGQDSTTCLLWALQQFEEVETVTFHYNQRHQEEIDVAKRIADKLGVKNHLLDMSLLNQLAPNALTRDDIDIVEKEGELPSTFVPGRNLVFLSFASILAYQIGARHIITGVCETDFSGYPDCRDEFVKSCNVTVNLAMEKPFVIHTPLMWLNKAETWKLADELDALDFVKNETLTCYNGIISDGCGECPACKLRKNGYDTYMEMKEAK

SEQ ID NO: 36387 - protein, 231 aa, unidentified
  source 1..231: note = Unknown
  REGION 1..231: note = tr|A0A0J8YVB3|A0A0J8YVB3_9GAMM 7-cyano-7-deazaguanine synthase OS=bacteria symbiont BFo2 of Frankliniella occidentalis OX=1628856 GN=queC PE=3 SV=1
MKKAVVVFSGGQDSTTCLVQAIQHYDEVHCITFDYGQRHQQEIAIAKQLTERLGVAAHKVMDVTLLNELAISSLTRDNIPVPGYQPNATELPSTFVPGRNILFLTLASIYAYQVEAEAVITGVCETDFSGYPDCRDEFVKALNQAVVLGMAKDVRFETPLMWLNKAETWALADYWGQLPLIKDHTLTCYNGIAGSGCGECAACHLRAKGLEQYLNAPDETMKELKSKNHLS

SEQ ID NO: 36388 - protein, 231 aa, unidentified
  source 1..231: note = Unknown
  REGION 1..231: note = tr|A0A0J8YHN1|A0A0J8YHN1_9GAMM 7-cyano-7-deazaguanine synthase OS=bacteria symbiont BFo1 of Frankliniella occidentalis OX=1628855 GN=queC PE=3 SV=1
MKRAVVVFSGGQDSTTCLIQALQQYDEVHCITFDYGQRHRAEIDIAGELSQALGARAHKVLDVTMLNELAVSSLTRDNIPVPTYDPEASGLPSTFVPGRNILFLTLASIYAYQIEAEAVIAGVCETDFSGYPDCRDEFVKALNHAVALGMARDVRFETPLMWLNKAETWALADYWQQLALVRDQTLTCYNGIKGSGCGDCAACHLRANGLQEYQQNPSAVMQAMKTKTGLQ

SEQ ID NO: 36389 - protein, 216 aa, unidentified
  source 1..216: note = Bacteriodetes bacterium
  REGION 1..216: note = tr|A0A521WPF2|A0A521WPF2_9BACT 7-cyano-7-deazaguanine synthase OS=Bacteriodetes bacterium; OX = 2507565 GN=queC PE=3 SV=1
MDSCVTAAIAHREYELAFLHLNYGQRTERRELQAFNDIADFYNVRKRLVVDVQHLKNIGGSSLTDATIEVSQADLARKGIPSSYVPFRNANILSIAVSWGEVLQAKKIFIGAVEEDSSGYPDCRREFYDAFNTVIRLGTKPETTLEIITPVILMKKFEIVRKGIELAAPLQLSWSCYRNEEVACGECDSCALRLRGFQMAGIEDPISYSVRPNYLV

SEQ ID NO: 36390 - protein, 228 aa, unidentified
  source 1..228: note = Bacteriodetes bacterium
  REGION 1..228: note = tr|A0A522FV33|A0A522FV33_9BACT 7-cyano-7-deazaguanine synthase OS=Bacteriodetes bacterium; OX = 2507565 GN=queC PE=3 SV=1
MKSKSAIVLMSGGMDSAVCTGIARSEGYEIAALHLNYGQRTESRELKSYYDLCNYYKIEKKLVVNVEHLSLIGGSALTDEKITIENADLSRKDIPLTYVPFRNANILSIAVSWAEVIGAEVIYIGATQADSSGYPDCRKEFFLAFQDAINEGTKSETNIKIITPLIEMTKMDIVVAGYELKVPFELTWSCYQESETACGVCDSCALRLRGFQQAGIDDPLSYKIKPIY

SEQ ID NO: 36391 - protein, 220 aa, unidentified
  source 1..220: note = Bacterioplanes sanyensis
  REGION 1..220: note = tr|A0A222FPU5|A0A222FPU5_9GAMM 7-cyano-7-deazaguanine synthase OS=Bacterioplanes sanyensis OX=1249553 GN=queC PE=3 SV=1
MADKAVVIYSGGMDSFTILNKAKQQGHELYALTFDYGQKHKKEIEFAKRVCSELDVHHKIIDITAINQLLQSSSLTSDKDIPEGHYEDQNMKSTVVPNRNMILLSLAIGYAVDIGASKVFYGAHSGDHAIYPDCRPEFVLAMNDVAKLANYEPVDIVTPYLNSDKIEILKDGLAMGLDYGKSWTCYNGREKACGKCGSCVERLEAFEKNNAADPLAYEAS

SEQ ID NO: 36392 - protein, 232 aa, Bacteriovorax sp.
  REGION 1..232: note = tr|T0DF83|T0DF83_9PROT 7-cyano-7-deazaguanine synthase OS=Bacteriovorax sp. BAL6_X OX=1201290 GN=queC; PE = 3 SV=1
MKSDKLAVVLVSGGMDSLVCAAIANEKHKNLAFLHLNYGQKTEERELDCFQKIADYYGVDKSLRKVIDVSFLKQIGGSSLTDDGIDVKQYKGESEEIPDSYVPFRNTHIIAMAVSWSEVVGAKNIYIGAVNEDSSGYPDCRPSYYAAYNELIKQGTKDGDIEIITPVIDMAKNEIVQKAVDLGAPLKFSYSCYARGDKACGVCDSCALRLRGFQKAGIEDPIEYDQRPNYLS

SEQ ID NO: 36393 - protein, 232 aa, Bacteriovorax sp.
  REGION 1..232: note = tr|T0SJ90|T0SJ90_9PROT 7-cyano-7-deazaguanine synthase OS=Bacteriovorax sp. Seq25_V OX=1201288 GN=queC; PE = 3 SV=1
MSKSKELAVVLVSGGMDSLVSAAIANEAHEHLAFLHLNYGQKTEERELDCFHKIADHYGVDPSLRKIIDVSFLKQIGGSSLTDDGIDVKQFKGDSEEIPDSYVPFRNTHIIAMAVSWSEVVGAKKIYIGAVDEDSSGYPDCRPSYYAAYNNLIKEGTKAGDISIITPVISLKKHEIVNKALELKAPLIHSYSCYARGDKACGVCDSCALRLRGFQKAGVEDPIEYVTRPNYA

SEQ ID NO: 36394 - protein, 278 aa, Bacteriovorax stolpii
  REGION 1..278: note = tr|A0A2K9NWP1|A0A2K9NWP1_9PROT Uncharacterized protein OS=Bacteriovorax stolpii OX=960 GN=C0V70_17870; PE = 4 SV=1
MNPSGKAVAILFSGGTDSTLTAAMLQENFEKVHLVTYDRFGFHATDNTAVQTQALKERYGEDRFVHTFLNVDKLFQHVSYENYFENIKKHGLFNLSTCGLCKLSMHVRTIKYCIDNEVYFVADGANQAMTMEPAQMKPVIDEMKRMYAHFGITYFNPVFEMDGPEDKDFINKSNAKLLARESDYSVASFENEKTPGFRLYKMGLAPSPNVKGSDYDKKRQPRCFQFIIFNIFALKYFMANKTYEEYTDLTTKFYSDKIKSMIKLIENRNDKKVKEMLD

SEQ ID NO: 36395 - protein, 232 aa, Bacteriovorax stolpii
  REGION 1..232: note = tr|A0A2K9NRZ5|A0A2K9NRZ5_9PROT 7-cyano-7-deazaguanine synthase OS=Bacteriovorax stolpii; OX = 960 GN=queC PE=3 SV=1
MTQKSRDLAVCLVSGGMDSLVCAAIANTEYENLAFLHLNYGQKTEERELESFKKIAEFYKVPKNLQKIIDVSFLKQIGGSSLTDDNIDVKKYKGDSEEIPDSYVPFRNTHIISMAVSWAEVVGAKKIFIGAVYEDSSGYPDCRPSYYKAVNALIKEGTKNGDIEVITPVIFMKKDEIVKKAVELHAPLEFSYSCYERNDKACGVCDSCALRLRGFQKAGIEDPIEYVTRPKY

SEQ ID NO: 36396 - protein, 223 aa, unidentified
  source 1..223: note = Unknown
  REGION 1..223: note = tr|A0A4Q3V215|A0A4Q3V215_9BACT 7-cyano-7-deazaguanine synthase OS=bacterium OX=1869227; GN = queC PE=3 SV=1
MKSVVLLSGGLDSATCLAMARADGTEPYALTVLYGQRHTEEIEASKKVAEALGAVEHKFVRVELNAIGGSALTDDIEVPKDRDESEMADIPVTYVPARNTVMLSLALGYAEVTGAEAIYAGVNAVDYSGYPDCRPEYIAAFQELARLATKAGVEGRPLEIRVPLIQLTKPEIIRRGLALGVDYGITHSCYDPIDGKPCGRCDACLIRQKAFAELGMEDPALAR

SEQ ID NO: 36397 - protein, 243 aa, unidentified
  source 1..243: note = Unknown
  REGION 1..243: note = tr|A0A2E3WJA9|A0A2E3WJA9_9BACT 7-cyano-7-deazaguanine synthase OS=bacterium OX=1869227; GN = queC PE=3 SV=1
MKQALVILSGGQDSITCLFWAISNGYNCSALTFDYDQLHNIEIESAKKAAQIAGIKNHEISTIGPLFSGNSPLTNKSIELEQYSNLADVSPGIQKTFVPGRNLLFLSLAANKAYSMNIDTMITGICQEDFGGYPDCRSDFIKSLEETIKLGMEKEIKILTPLMDMKKSEIVMMGKNLPKECWEALSFSHTSYDGKYPPTSNDHANLLRARGFEEAGLPDPLVERAVAENLMELPKTRNYENQD

SEQ ID NO: 36398 - protein, 222 aa, unidentified
  source 1..222: note = Unknown
  REGION 1..222: note = tr|A0A532U2A6|A0A532U2A6_9BACT 7-cyano-7-deazaguanine synthase OS=bacterium (candidate division B38) B3_B38 OX=2012999 GN=queC PE=3 SV=1
MKQLAIVLVSGGVDSCVTAAIANLNHDLALLHLNYRQRTEERELRAFHDIADFYKVKKRLVTDVDYLRQIGGSSLTDESIEVTPARPGGLALPATYVPFRNTHLLSIAVSWGEVIRARKIFIGASQHDSPGYPDCRPEYYRAFNRLIEVGTRPQTTLEVVTPLINLTKREIVLKGMELAAPLHLTWSCYQRNDLACGVCHSCMQRRKAFQEAGISDPIPYLT

SEQ ID NO: 36399 - protein, 249 aa, unidentified
  source 1..249: note = Unknown
  REGION 1..249: note = tr|A0A2M7GWG5|A0A2M7GWG5_9BACT 7-cyano-7-deazaguanine synthase OS=bacterium (Candidatus Ratteibacteria) CG15_BIG_FIL_POST_REV_8_21_14_020_41_12; OX = 2014291 GN=queC PE =3 SV=1
MKKAIILLSGGIDSSTTLYLAKSQGYQPTALIFDYHQRHKKEIESAKKIAKSAPSSYKLVKISFPEGGSSLLDPNLPLRLHPHLPPGASLPSRGRIEERGREKIPFTYVPARNIIFLSYALSCAETWGSRAIFIGANQVDYSGYPDCRASFIAAFNRMVKEGTKSKNIKVIAPLMKMNKGEIIKLGMKLGVPYHLTWSCYEGKEKPCLKCDSCKFRLKGFREAGITDPLLFNHRGTENTEKKLPRNHEI

SEQ ID NO: 36400 - protein, 222 aa, unidentified
  source 1..222: note = Unknown
  REGION 1..222: note = tr|A0A2G9Y9K4|A0A2G9Y9K4_9BACT 7-cyano-7-deazaguanine synthase OS=bacterium (Candidatus Ratteibacteria) CG23_combo_of_CG06-09_8_20_14_all_48_7; OX = 2014292 GN=queC PE= 3 SV=1
MKKTVVLLSGGLDSATVLYWAKKRGYTIFPLAFDYGQRHKNEISAAKKLARAAGVGLEVIRISLPWKGSSLLDPKVPLPQSSSLQKVGAAIPSTYVPGRNLIFLAFGFSYAEAIGASFVLIGANSIDFSGYPDCRPQFFRILNRLVLEGTKKGIEGKPMKVLAPLVRLSKAGIIRLGMRLKVPYRLTWSCYAGGKKPCGKCDSCLLRAKGFAEAGIPDPLVY

SEQ ID NO: 36401 - protein, 248 aa, unidentified
  source 1..248: note = Unknown
  REGION 1..248: note = tr|A0A3A8ZTT8|A0A3A8ZTT8_9BACT ATP-dependent sacrificial sulfur transferase LarE OS=bacterium 0.1xD8-71; OX = 2320099 GN=larE PE=4 SV=1
MDLSHFFKDTPKAALAFSGGVDSAYLLYAAMHLGADVRAYYVKSAFQPQFELEDARRLAGQLSADLRILEVDVLTDSNIAENPCDRCYHCKKRIFAAIAQAAAEDGYQVLLDGTNASDEEGDRPGMRALRELEVRSPLRECGLTKETIRGLSKEAGLFTWDKPAYACLATRIPTGETITGEKLQAAEAAEDYLFTLGFTDFRVRRLGEAARLQFPAGQMEKVLFKREEILTELKRYYQAVLLDLEGRE

SEQ ID NO: 36402 - protein, 230 aa, unidentified
  source 1..230: note = Unknown
  REGION 1..230: note = tr|A0A3A9FMW3|A0A3A9FMW3_9BACT 7-cyano-7-deazaguanine synthase OS=bacterium 1XD42-54; OX = 2320110 GN=queC PE=3 SV=1
MKEKAMVLFSGGVDSTTCLGVAIDRFGKENVIPLSIVYGQKHEKEMEAARKVLAYYGLKGMELDLTPIFAESDCSLLSHSGRKIPEGSYASQLEGQGGVPVSTYVPFRNGLFLASAASMALSMKCSYIYYGAHRDDAAGNAYPDCSEAFFDSMNQAVYEGCGKALRIEAPFIHCNKADVVKEGLRLGVPYELTWSCYEGGEYPCGHCGTCIDRQKAFEANGMSDPALLHK

SEQ ID NO: 36403 - protein, 248 aa, unidentified
  source 1..248: note = Unknown
  REGION 1..248: note = tr|A0A3A9A036|A0A3A9A036_9BACT ATP-dependent sacrificial sulfur transferase LarE OS=bacterium 1xD42-87; OX = 2320113 GN=larE PE=4 SV=1
MNLSTFFKENPKAAVAFSGGVDSAYLLCAAKTAGADVRAYYVKSAFQPRFELEDAKRLCGELDIELKILTVDVLADRAVRENPADRCYHCKRLIFTTIAEAAEEDGYKMLLDGTNASDEAGERPGMRALRELSVCSPLRECGLTKQEIRRLSREAGLFTWEKPAYACLATRIPAGEEITEEKLNSTEAAEDFLFSLGFTDFRVRRFGEAARLQFPASQFGRVLEKREGIIKELKRYYKAVLLDMEARA

SEQ ID NO: 36404 - protein, 229 aa, unidentified
  source 1..229: note = Unknown
  REGION 1..229: note = tr|A0A3A8YQ76|A0A3A8YQ76_9BACT 7-cyano-7-deazaguanine synthase OS=bacterium 1xD8-6; OX = 2320116 GN=queC PE=3 SV=1
MKAMVLFSGGIDSSTCLGMAVERYGKENVIALSISYGQKHEKEMQAGAAVADYYGVSHICLDMAEIFKYSDCSLLKHSAMEIPEEAYAEQLKKTEGQPVSTYVPFRNGLFLSTAASIALSKGCSVIYYGAHADDAVGNAYPDCSSSFNRAISEAIYIGSGNQLRVEAPFVNMTKAQIVKIGLERKVPYQLTWSCYEGKDRPCGVCGTCIDRAEAFRLNGVKDPLDGMED

SEQ ID NO: 36405 - protein, 401 aa, unidentified
  source 1..401: note = Unknown
  REGION 1..401: note = tr|A0A4Q2B0B0|A0A4Q2B0B0_9BACT Uncharacterized protein OS=bacterium 1XD8-92 OX=2320884 GN=D6D47_44970; PE = 4 SV=1
MIIAHTQDGVVELRLNQLISDMSFVEIDNTMVIDLLNIFLEIYVADISFKRQSDHPRFLQIIAYVDSKNCPIWRENTKLIEKLAGFVTEGDGDKWQIDIEPVEYEFEAQQLSFIKTTADNISLLSGGLDSFCGAYRNEIEGKKTLYCGYKTSNVDTSAINNVANFLNNRIGNLGIRTYSRVNQKKFTYTQRTRSLLFFSLAVMTAVKEGIGIVNINENGIMTLNPSFQSRGTTKTTHPKTIYLYQTILKNVGIRVQLNHPFLFMTKGEMVNLLSLDYKRHIKDTRSCSRSMHDPRYDTSTKVSCGTCVPCLLRKISMAAYDLEKYDNEYDIPYEGNMDEEEYRSSLNYYTTFYDYIKSGEIFSELVIKQRYYHNVDYYERTFEMLKKFSVEFEVFIKKYGG

SEQ ID NO: 36406 - protein, 228 aa, unidentified
  source 1..228: note = Unknown
  REGION 1..228: note = tr|A0A0S4M8Q3|A0A0S4M8Q3_9BACT 7-cyano-7-deazaguanine synthase OS=bacterium 2013Arg42i; OX = 1561003 GN=queC PE=3 SV=1
MPEDNSRRGVVLVSGGMDSAVLIAHLANQGYELYAISFEYGQRSCYETVLARELCHTYGVLRHWVQRIDFPWGGSSLIDKSKDIPQRLPSSDEVHNTYVPGRNTIFLSFALSCAEVVGASKVFIGANELDYSNYPDCRKNYFDAYNNLVTQAVPRAVGFHSISIEAPFVNFSKSDIVVLGYSLCVDFSRTLSCYQAIDNVLACGCCSACLFRRRAFVVSGVPDTTLYA

SEQ ID NO: 36407 - protein, 626 aa, unidentified
  source 1..626: note = Unknown
  REGION 1..626: note = tr|A0A1H7ZGM2|A0A1H7ZGM2_9BACT Queuosine biosynthesis protein QueC OS=bacterium A37T11 OX=1855384; GN = SAMN05216436_105220 PE=4 SV=1
MINSNSHVILCGGVNLPRKYKKYASNHIHYLSADPSSREHNINLELPHFIQMVNCHFPDRIKDLLEIAGYVYAADRMIGRGTNNNVEFHSWARQLNFYIRVRDVSFWSNPAIISSLSEALTFVSGDHSYSFIFEGGGFDIGQRNLYDHEAIQLEKKDNSIIGLFSGGLDSLAGALEILTTTDKKLILVSHRSNTTGVSKIQKGIHKLLESDFPERIQYYSFYCNLHGERAVEETQRTRIFLYTAIAYSLSTLASEKEIYVFENGVTSLNFSKRADLINARASRTTHPKTLKLFENFYSLVGEQERPIVHPFLYNTKTDIFNKIKAAGKLNYINSTISCTKTFLSFENNSQATHCGGCSQCVDRRLAAFASGLQDYDAIYDTDISKDPITNPESRTHLHDYIRAVVRYSSFTEMNFQFEMLAELTDIVQYLEGQRPAEKAMKIFALLKTHTKQLLNAIKSIQLLQDPLKPKVPNTLHAYIDERVYLKPPVECLIETIKSKLSVSIPQAFEHEKPKHENALNDLIHALIQGESSDYGREYPAIKFSVSRVIPDHSFLEIYDLLIEAKYLRGNTSKAAITDQIGADITKYPAERHKLFIIYDPERKIANDLQFSRDIEKQPNCFVFIIR

SEQ ID NO: 36408 - protein, 236 aa, unidentified
  source 1..236: note = Unknown
  REGION 1..236: note = tr|A0A1H9P887|A0A1H9P887_9BACT 7-cyano-7-deazaguanine synthase OS=bacterium A52C2; OX = 1855383 GN=queC PE=3 SV=1
MKTIVICSGGLDSVSLAHRVAAERELIGLISFDYGQRHSKELGFAASCARRLGVPHQIVDIRDIGRSLSGSALTDDVAVPDGHYAEETMRVTVVPNRNAIMLAIAFGVAVSRGADAVATAVHGGDHFIYPDCRPGFIDAFQAMQNHALDGYASVRLSAPYVNVPKSAIVADGTKHGTPFEETWSCYKGGEHHCGRCGTCVERREAFHLAGITDPTVYEDPDFWRGAVERAGERAAG

SEQ ID NO: 36409 - protein, 273 aa, unidentified
  source 1..273: note = Unknown
  REGION 1..273: note = tr|A0A1V5UNT1|A0A1V5UNT1_9BACT 7-cyano-7-deazaguanine synthase OS=bacterium ADurb.Bin243; OX = 1866936 GN=queC PE=3 SV=1
MNKTGKTKGSSKPASLKKTGKSNKTNAAKKSSTVRKTDARKIKKDTAVVLLSGGMDSAAALGVLAQKYQPAALHLNYGQRTEAKELDCFVRLCDHYGIKQRLIVDVSYLEQIGGSSLTDHKMIVPKADLDSNEVPNTYVPFRNAHILCIATSWAEVIGAKRIFIGAVSEDSSGYPDTRPEFYEAFEKVIKTGTRAGGAIKIETPVIDLSKAEIVKLGLKLKVPFKYTWSCYVGNEKACGVCDSCALRLRGFARAGAKDPIEYEQTVFKTEIFV

SEQ ID NO: 36410 - protein, 234 aa, unidentified
  source 1..234: note = Unknown
  REGION 1..234: note = tr|A0A1V5T2A5|A0A1V5T2A5_9BACT 7-cyano-7-deazaguanine synthase OS=bacterium ADurb.Bin270; OX = 1866926 GN=queC PE=3 SV=1
MQHRSSGNDFVALLSGGLDSYVAVRMAASRMKFNLAITFDYGQRAAKKEIDTAARIASEFNAEHKVIEIGWMRDETRTALVDLHKKIPSTDARRVDAKAAENAAAVWVPNRNGVFISIAAAFSEARGIGSVIAGFNAEEAMTFPDNSEKFIKASNLSLSMSTMSGVKLLSPTSKMTKAEIANEFCNLKLDPEKIWCCYFGKKLLCGRCESCARTIRAFRKTPIWKVIKKRFAER

SEQ ID NO: 36411 - protein, 228 aa, unidentified
  source 1..228: note = Unknown
  REGION 1..228: note = tr|A0A1V5PM28|A0A1V5PM28_9BACT 7-cyano-7-deazaguanine synthase OS=bacterium ADurb.Bin363; OX = 1866927 GN=queC PE=3 SV=1
MKNLAIVLVSGGMDSCVTTAIAKQTFEVAFLHLNYGQRTESREFRAFHNIADYYDVGKRLIVNIDYLKQIGGSSLTDSSIKIPRRSLSNQTPAEIPSSYVPFRNTHIIAIAVSWAEVIGAEKIFIGAVEEDSSGYPDCRKSYYEAYNKLIEVGTKPETHIEIVTPVIDMKKSEIVRKGIELEAPLHLTWSCYGNSDLACGECDSCLLRLRGFREAGVEDPIGYVRPDG

SEQ ID NO: 36412 - protein, 227 aa, unidentified
  source 1..227: note = Unknown
  REGION 1..227: note = tr|A0A1V5NJ33|A0A1V5NJ33_9BACT 7-cyano-7-deazaguanine synthase OS=bacterium ADurb.Bin374; OX = 1866937 GN=queC PE=3 SV=1
MTNRPLAVVVASGGMDSCVSAAIALQTYDLAMFHLNYGQLTEARELRAFREQTAFYNAKHILEVDAGHFRQIGGSALTDRTLAVPDAKNLGKGVPVTYVPFRNANILAMAVSWAEVIGAVRVFIGAVEEDSSGYPDCRESFIDAFNVAIREGTRPDSGIRVEAPLLHLSKGQIVTRGLELGAPLHLSWSCYQGEAEACGTCESCALRLRGFAAAGATDPIPYAKPSA

SEQ ID NO: 36413 - protein, 156 aa, unidentified
  source 1..156: note = Unknown
  REGION 1..156: note = tr|A0A1V5MBK2|A0A1V5MBK2_9BACT 7-cyano-7-deazaguanine synthase OS=bacterium ADurb.Bin425; OX = 1866929 GN=queC PE=3 SV=1
MDHFEVEDSKEPALPSGVATTFVPGRNILFFTIAANRAYVHNVDSIVVGVAQQDYGGYPDCRQDFISKLEAALVSGLDRRLEIVTPLMNMTKKETVELAQSLPGCLDALAYSTTCYEGHFPPCGKCHSCVLRAKGFAEAGVNDPLLERAAVAISKV

SEQ ID NO: 36414 - protein, 226 aa, unidentified
  source 1..226: note = Unknown
  REGION 1..226: note = tr|A0A1V5M1X0|A0A1V5M1X0_9BACT 7-cyano-7-deazaguanine synthase OS=bacterium ADurb.Bin429; OX = 1866930 GN=queC PE=3 SV=1
MNAVALISGGLDSATAAAMAVADGYTLYALTICYGQRHLREVDAARAVAAALGAREHKVVDIALREIGGSALTADIPVPESRSADEMAAGIPVTYVPARNTIFLAVALGYAEVVGAETLVLGVNQVDYSGYPDCREEFLAAFETLANLATKAGVEGTAHFRVYAPLLHLTKAEIIREGLRLGVDYGLTWSCYAGGDVACGRCDSCLLRLAGFREAGVRDPQPYAEY

SEQ ID NO: 36415 - protein, 221 aa, unidentified
  source 1..221: note = Unknown
  REGION 1..221: note = tr|A0A244C5K2|A0A244C5K2_9BACT 7-cyano-7-deazaguanine synthase OS=bacterium AM6; OX = 1954209 GN=queC PE=3 SV=1
MKKAVVLLSGGMDSAAVIAMAQEQGFAVHALSVRYGQRHTSELDAAARVAKAQGVIVHKTVDVDLRSIGGSALTDDIDVPEAGGEGIPVTYVPARNTIMLSLALGWAEVLGANDIFCGVNAVDYSGYPDCRPEFIAAFQALANLATKSGVEGAGITVHAPLQFLSKGQIVSEGVRLGVDFGLTVSCYNADANGAACGQCDACRLRAQGFADAGVADPTLYA

SEQ ID NO: 36416 - protein, 339 aa, unidentified
  source 1..339: note = Unknown
  REGION 1..339: note = tr|A0A2N5ZKT6|A0A2N5ZKT6_9BACT Uncharacterized protein OS=bacterium BM706 OX=2053465 GN=C0601_02280 PE=4; SV = 1
MLCKRCVMPESKPDIYLNEQGLCNICSAFESQNNNRKDDTVFHETELVKILNKHRGKHKYDCLVMISGGKDSTSSLYYIVKKYKLNPLAMTFDHGFENEEAIYNIKNAVDSLKVDWIFFKTDFMKEMFAEIIRTKSKAVICHLCSIWYMQFTYETARRYDIPIIIAGWTKGQSNIPDIISKGKCDIDAPEYQSMAKATKKFLKEHVRKMPKYKDFPMSMEEVIKRAAKKHKATVLSPHWFLKTPVEEYTRLIQEELGWRFPKESYPEKSTNCLLNFLSVLLSLKHYGYTHYHVEMSKMINLNMMTRDEALDLLEKNWDDKMIDDVLTRLGLSRKDIEDG

SEQ ID NO: 36417 - protein, 226 aa, unidentified
  source 1..226: note = Unknown
  REGION 1..226: note = tr|A0A2N5ZI83|A0A2N5ZI83_9BACT 7-cyano-7-deazaguanine synthase OS=bacterium BM706; OX = 2053465 GN=queC PE=3 SV=1
MKKAISLLSGGLDSVVSTFKAMENFDLRLCLFFDYGQKALNKELEAATFYSDLMGVKLEIIKLDFLKKITVTALVNEQLPPHMTLEALEDPEFVRQSALAVWVPNRNGLFVNIAGCYCDSMDINNVITGFNFEEASTFSDNSIEFIDAINNSLKYSTSNSCKVVSPFCNNSKSVIVKEAIHLNIDLSKIFSCYNNDEKQCGICESCIRLKKALSDNDIDYSKWFLI

SEQ ID NO: 36418 - protein, 233 aa, unidentified
  source 1..233: note = Unknown
  REGION 1..233: note = tr|A0A2H6EGC2|A0A2H6EGC2_9BACT 7-cyano-7-deazaguanine synthase OS=bacterium BMS3Abin03; OX = 2005711 GN=queC PE=3 SV=1
MSEKRENIAVIAVSGGLDSCVTAAIAKQEYELAFAHFNYGQRTEKRELKAFNDIADFYNVEKRLIIDYTHLSKIGGSSLTDKNIEVTKADLTSKEIPTSYVPFRNANILSGCVSWAEVLGARAVFIGAVFEDSSGYPDCRPAFFEAFGKIIDIGTKPETSVKIVTPIIHLSKAEIVKKGTELNAPLYLTWSCYQNEDVACGVCDSCALRLRGFQQAGIEDPILYEVKPDYWIK

SEQ ID NO: 36419 - protein, 235 aa, unidentified
  source 1..235: note = Unknown
  REGION 1..235: note = tr|A0A2H6EMZ2|A0A2H6EMZ2_9BACT 7-cyano-7-deazaguanine synthase OS=bacterium BMS3Abin04; OX = 2005712 GN=queC PE=3 SV=1
MEKKKLAVIALSGGMDSCVTAAIANQDYNLALLHINYGQKTENRELTAFHDIAEFYNAEKKMVIEFTHFQKIGGSSLTDKNIEISKADLENKEIPTSYVPFRNANILSACVSWAEVIDAEAIFIGAVYEDSSGYPDCRPDFFSAFEQVINLGTKPQTQIKIETPIIYMKKSEIIQKGLELNAPFSLTWSCYQNEEEACGVCDSCALRLRAFQELGLEDPIPYKTRPNYAKKQQEQ

SEQ ID NO: 36420 - protein, 251 aa, unidentified
  source 1..251: note = Unknown
  REGION 1..251: note = tr|A0A2H6F340|A0A2H6F340_9BACT 7-cyano-7-deazaguanine synthase OS=bacterium BMS3Abin06; OX = 2005714 GN=queC PE=3 SV=1
MSFKDMKLAVVLLSGGVDSTTTLAIAKAEGREIYALSFAYGQRHKIELESARRIAEKFNVKKYRVVNFDLRDIGGSALTSDMEVPKSMKRGSGETERRRNEHVIPVSDSIPVTYVPARNTIFLSFALAWAETLEAEDIFIGANAVDYSGYPDCRPEFIKAFEDMANLATKASVEGKVKFKIQVPLIKLTKAEIIKKGTELGVDYSLTWSCYDPVTEQNKESGQYKPCMRCDSCRLRAKGFKEAGVKDPLIT

SEQ ID NO: 36421 - protein, 274 aa, unidentified
  source 1..274: note = Unknown
  REGION 1..274: note = tr|A0A2H6FDS9|A0A2H6FDS9_9BACT 7-cyano-7-deazaguanine synthase OS=bacterium BMS3Abin07; OX = 2005715 GN=queC_2 PE=3 SV=1
MRAARRQAEPQGRSTCKRGHIFRLMKHGKKTAVVLLSGGIDSSTALAIAMSEGFDCYALSFDYSQRHKVELESAKRVAEHLGAKKHLVISFNLREIGGSALTSEIDVPKHELKTGSQKSGTTHIRTNHSNPRTRIPVTYVPARNTIFLSFGLGWAEVLNAPDIFIGANVVDYSGYPDCRPEYLRAYEKMANLATKISVEGKIKFRINAPLLHMTKNEIIKKGTELGLDYSLTWSCYDPGVTDSGKAVPCGRCDSCVIRAGGFRDAGITDPLLNR

SEQ ID NO: 36422 - protein, 198 aa, unidentified
  source 1..198: note = Unknown
  REGION 1..198: note = tr|A0A2H6F8V4|A0A2H6F8V4_9BACT 7-cyano-7-deazaguanine synthase OS=bacterium BMS3Abin07; OX = 2005715 GN=queC_1 PE=3 SV=1
MGIVTLVSGGFDSTLMSMMAQEEGIALFPLFIDYGQLGATKEWEACQRLHERYKLPKVVRMDLSGFGNTIPSGITDPNLRINEDAFLPGRNLLFVVAGAAYALKVQADSVALGLLDPADHLFPDQTEKFVHESERMIEISMGKRISVLTPLIDFSKSDVLAMARVRRLQDTYSCHAGGDTPCGVCVACIEIANAKERN

SEQ ID NO: 36423 - protein, 232 aa, unidentified
  source 1..232: note = Unknown
  REGION 1..232: note = tr|A0A2H6FKU2|A0A2H6FKU2_9BACT 7-cyano-7-deazaguanine synthase OS=bacterium BMS3Abin08; OX = 2005716 GN=queC PE=3 SV=1
MTETGKKKAVILLSGGIDSSTTLAIALSEGFQCYALTFDYSQRHGRELESAGRVAESTGADKHLVISFDLREIGGSALTSPDISVPREKSPGAIPVTYVPARNTIFLSFALGWAEVLGASDIFIGANSVDYSGYPDCRPEYLRAFEEMANLATRASVEGELGFRIRAPLLYLTKGEIIRKGRELGLDYGLTWSCYDPTPEGRPCLVCDSCRYRNKGFQEAGLPDPLLSQQPG

SEQ ID NO: 36424 - protein, 283 aa, unidentified
  source 1..283: note = Unknown
  REGION 1..283: note = tr|A0A2H6FXQ0|A0A2H6FXQ0_9BACT 7-cyano-7-deazaguanine synthase OS=bacterium BMS3Abin10; OX = 2005718 GN=queC PE=3 SV=1
MKRAVVLLSGGIDSTTSLAIAKAEGFGIYAISFDYGQRHSIELSSAKQCAAYFDVKKHIVISFDLREIGGSALTSDIEVPKVSLGKTTHDEKEVEKIRSWEDKNSQPLNLSASQLPEAQPDIPVTYVPARNTIFLSFALAFAESIGSENIFIGANAVDYSGYPDCRPEFIKAFESMANLATKASVEGRARFLIHAPLITLTKAEIIKKGAELGVDHSLTWSCYDPQPATEDEKMRRCEDKQSQPPNFLASELLKYVPCMRCDSCILRARGFKEAGITDPLILK

SEQ ID NO: 36425 - protein, 235 aa, unidentified
  source 1..235: note = Unknown
  REGION 1..235: note = tr|A0A2H6G180|A0A2H6G180_9BACT 7-cyano-7-deazaguanine synthase OS=bacterium BMS3Abin11; OX = 2005719 GN=queC PE=3 SV=1
MVDKADKADKAVVLLSGGLDSATALAIARNEGYQCFALSFDYGQRNRVELEAARRVANAGGVAEHRILNLPIGELGGSALTDDAIDLPKVSEFEDSGIPVTYVPARNTVFLSMALAMAEIYGARDIFIGANAVDYSGYPDCRPGFILAFENLANLATREGVQGEGFRIRAPLIDMSKADIINTGVRLGVDYSLTISCYNPSPDGLACGVCDSCHLRADGFNQTDTADPTVYWPVR

SEQ ID NO: 36426 - protein, 241 aa, unidentified
  source 1..241: note = Unknown
  REGION 1..241: note = tr|A0A2H6IE78|A0A2H6IE78_9BACT 7-cyano-7-deazaguanine synthase OS=bacterium BMS3Bbin07; OX = 2005730 GN=queC PE=3 SV=1
MKKAVILLSGGIDSSTTLAIARSEGYECYTLTFDYSQRHRRELESAEKVAEALGVKRHLVTRFDLREIGGSALTGEGEVPKHKAEAAGRKLEFNKSSIVNRQSSIPVTYVPARNTIFLSFALGWAEVLEAGDIFIGANAVDYSGYPDCRPEYLHAFEAMANLATRASVEGKIKFRILAPLLYLTKGEIIRRGAELGFDYGLTWSCYDPAPDGRPCLRCDSCKFREKGFSEAGLKDPLLLQK

SEQ ID NO: 36427 - protein, 272 aa, unidentified
  source 1..272: note = Unknown
  REGION 1..272: note = tr|A0A2H6ISH9|A0A2H6ISH9_9BACT tRNA(Ile)-lysidine synthase OS=bacterium BMS3Bbin09 OX=2005732 GN=tilS_2 PE=4; SV = 1
MTPEKKYKNLLDSLKKMKRVVIAFSGGVDSTFLLKAATLSGLGEILAVTGQSESLPEQELSFTKEIAGSFNVKHKIIVTEELKDNNYAENPPDRCYYCKKELFTRLSDIASRENYLYVLDGTNADDIHDRRPGRQASVENNVKSPLLDAGLNKKEIRKISRDLGLPTWDKPATPCLSSRFPYGHKITAEGLLRVDRAEAFIREFGIKELRVRSHSNAARIEVHPEDFAKLTEDTAREKIVNFLRSLGYENITLDLRGFRSGSSNEFIEKNKE

SEQ ID NO: 36428 - protein, 244 aa, unidentified
  source 1..244: note = Unknown
  REGION 1..244: note = tr|A0A2H6IXJ2|A0A2H6IXJ2_9BACT 7-cyano-7-deazaguanine synthase OS=bacterium BMS3Bbin10; OX = 2005733 GN=queC PE=3 SV=1
MSADNRQNTAALLLFSGGQDSTACLAWALERYARVETVGFDYGQRHNIELSCRQRVREEISERFPQWRARLGADHMIEMPALGKISDTALTRDVAIEMQQNGLPNTFVPGRNLLFFTYAAALAYRRGLMALIGGMCETDFSGYPDCREETLQTLAKAIRLGTEKDLVIETPLMHLTKAQTWALVHELGGDALTALIVEHTHSCYLGERGKRHEWGYGCGDCPACALRARGYREWRCETAAAQTR

SEQ ID NO: 36429 - protein, 246 aa, unidentified
  source 1..246: note = Unknown
  REGION 1..246: note = tr|A0A2H6J8W1|A0A2H6J8W1_9BACT 7-cyano-7-deazaguanine synthase OS=bacterium BMS3Bbin12; OX = 2005735 GN=queC PE=3 SV=1
MSPVVEGLMNRTREPAPTSPDRPAVVLLSGGLDSATTLAVARARGYRCYALSLDYGQRQAAELDAARCVARGAAGHKVIRIDLGAIGGSALTDPAIPIPEHPSEGIPVTYVPARNTVFLSLALGWAEVLGARDLFIGVNAVDYSGYPDCRPEYIRAFEALAALATRAGVEGARFRVHAPLIRLSKADIIREGLHLGLDYAVTVSCYAADSEGRACGVCDACRIRAAGFHAAGVPDPTRYQPGRGAV

SEQ ID NO: 36430 - protein, 232 aa, unidentified
  source 1..232: note = Unknown
  REGION 1..232: note = tr|A0A2H6JRK7|A0A2H6JRK7_9BACT 7-cyano-7-deazaguanine synthase OS=bacterium BMS3Bbin14; OX = 2005737 GN=queC PE=3 SV=1
MSHDHREAVILLSGGLDSTTVLALALSQGYACSCLSFSYGQRQKIELQKARALSKKMGARRHLVLRLDLDTIGGSALTTAIDVPKDRDFSAMDQGIPVTYVPGRNIIFLSHAVAWAEVIGASDIFLGINAVDFSGYPDCRPDFLAAFEKMANLGTRSGSEDKPFTLHAPLMHLRKKEIIEMGMSLGVDYSMTHSCYDPRGGLACGRCDACRLRLRGFAEAGMVDPVSYDLNP

SEQ ID NO: 36431 - protein, 230 aa, unidentified
  source 1..230: note = Unknown
  REGION 1..230: note = tr|A0A101VUP0|A0A101VUP0_9BACT 7-cyano-7-deazaguanine synthase OS=bacterium BRH_c32; OX = 1734400 GN=queC PE=3 SV=1
MNKKLAVVALSGGMDSCVTAAYAKQEYDLALLHVNYGQRTQKRELKAFHDIAEFYNVKNKLVIDFSHFTQIGGSSLTDNKMDVTIADLNNHEVPTTYVPFRNANILSAATAWAEVLNANAIFIGAVYEDASGYPDCRPDFYKAFEEVIRIGTKPKTDIKVITPIINFSKEEIVKKGIELNAPLHLTWSCYQNDEEACGVCDSCAFRLRGFQKAGFDDPIPYNTKPNYNLL

SEQ ID NO: 36432 - protein, 225 aa, unidentified
  source 1..225: note = Unknown
  REGION 1..225: note = tr|A0A2M7YW41|A0A2M7YW41_9BACT 7-cyano-7-deazaguanine synthase OS=bacterium CG_4_9_14_3_um_filter_65_15 OX=1975567 GN=queC PE=3 SV=1
MSTRSKAIVLVSGGLDSAVCLGEAAREHDLALLHVNYGQRTEGRELRAFEDLAVHYGVTEKLVVDITHLKQIGGSSLVDESRAVETGLPEPGAGIPSTYVPFRNAHILSVAVSWAEVNGATRIFIGAVEEDGSGYPDCRQEFYDRFTAAVQAGTRLGHRLTVVTPLIHLDKAAIVLRGRELSVPLQLTWSCYTGQDVACGECESCRLRLRGFAQAGVSDPIPYRA

SEQ ID NO: 36433 - protein, 228 aa, unidentified
  source 1..228: note = Unknown
  REGION 1..228: note = tr|A0A1J5CV27|A0A1J5CV27_9BACT 7-cyano-7-deazaguanine synthase OS=bacterium CG2_30_54_10; OX = 1805403 GN=queC PE=3 SV=1
MTNKLKPLAVIVASGGMDSTVCISIAAQRYEPALFHLNYGQRTEKRELKAFLDLVRHFNVRHTLVVDASHFRQIGGSALTDENIAIPSFGRLEKGVPVTYVPFRNGNILAMAVSWAEVIGAGKVFIGAVEEDSSGYPDCRETFIKAFNHAVRAGTKAARALSIFAPLLHLTKKDIVIKGVNLGSPFHLTWSCYQGESEACGVCDSCVLRLKGFEQAGIQDSIPYRKQA

SEQ ID NO: 36434 - protein, 236 aa, unidentified
  source 1..236: note = Unknown
  REGION 1..236: note = tr|A0A3A9AVE6|A0A3A9AVE6_9BACT 7-cyano-7-deazaguanine synthase OS=bacterium D16-34; OX = 2320120 GN=queC PE=3 SV=1
MQKQQRALVLCSGGLDSTTLLARVIESYGSQNVVALAVQYGQKHVRELQSAQAVADYYGVPLKMIDVAAIFADSSCSLLSHSDSEIPHESYDEQLSCTQDAPVVSTYVPFRNGLFLSCAASMALSLECSTLYYGAHHDDWAGDAYPDCSREFVEAMDSAIRLGSADQLHVEAPFVTWSKADIVAEGMRLGVPYELTWSCYEGGDEPCGKCATCIDRARAFEVNGLVDPLYMRKDAK

SEQ ID NO: 36435 - protein, 248 aa, unidentified
  source 1..248: note = Unknown
  REGION 1..248: note = tr|A0A3A9C6T1|A0A3A9C6T1_9BACT ATP-dependent sacrificial sulfur transferase LarE OS=bacterium D16-54; OX = 2320104 GN=larE PE=4 SV=1
MKLQEFFACHPRAAVAFSGGVDSAYLLYAAKQYAKEVRAYYVKSEFQPRFELDDAKRLARELGAEMRILNQNILSVPGVRENPSDRCYYCKRALFRTITEAAESDGFSVLLDGTNASDEAGDRPGMRALAELSVFSPLRECGLTKSQVRRLSKEAGLFTWDKPAYACLATRIPTGEEITGDKLSATEDAESYLFSLGFTDFRVRSQNGHGRLQIPEPQFALLLKHRKAILTKLKKYYKTVSVDLEVRE

SEQ ID NO: 36436 - protein, 232 aa, unidentified
  source 1..232: note = Unknown
  REGION 1..232: note = tr|A0A3A8WTF8|A0A3A8WTF8_9BACT 7-cyano-7-deazaguanine synthase OS=bacterium D16-59; OX = 2320098 GN=queC PE=3 SV=1
MKAMILLSGGIDSTTCLGMAVERFGRENVIALSISYGQKHEKEVLASERVAEYYGIEQMKLDLAEIFKYSDCSLLQHSSQEVPEEAYAEQLEKMDGKPVTTYVPFRNGLFLSSAASIALSRGCSVVYYGAHADDAAGNAYPDCSDAFNCAISEAIYIGSGGQLRVEAPFVGMAKAEVVKTGLELNVPYELTWSCYEGKEKPCMVCGTCIDRAEAFRLNGIADPLLERLNNSL

SEQ ID NO: 36437 - protein, 231 aa, unidentified
  source 1..231: note = Unknown
  REGION 1..231: note = tr|A0A3A9AZI8|A0A3A9AZI8_9BACT 7-cyano-7-deazaguanine synthase OS=bacterium D16-63; OX = 2320119 GN=queC PE=3 SV=1
MTQQGKALVLCSGGLDSTVLLARYVERLGAASVYALSISYGQRHQREVEAARAVAARYGVEQRFLDLGAIFADSACSLLAGSAEPLPTGAYAEQQVAAGGGPVSTYVPFRNGLFLSAAASMALSLECSVVGYGAHHDDWAGAAYPDCSAEFVGAMARAVSEGTGGQLSLEAPFVAWSKADIVAEGLRLGVPFELTWSCYEGGEAPCGRCATCLDRAAAFAAHGVADPALAA

SEQ ID NO: 36438 - protein, 224 aa, unidentified
  source 1..224: note = Bathymodiolus sp.
  REGION 1..224: note = tr|A0A482YXS1|A0A482YXS1_9BACT 7-cyano-7-deazaguanine synthase OS=bacterium endosymbiont of Bathymodiolus sp. 5 South OX=1181670 GN=queC PE=3 SV=1
MSKAVILLSGGLDSTTTLAIAKSQAFDCYALSFDYGQKQKSELNAAKQLAELFSATEHRTMRISLSDIGGSALTDSAIEVPKFKPSDEIPVTYVPARNTIFLSYAMAWAEVLECQDIFIGVNALDYSGYPDCRKEYIKSFEVMANLATKQGVEGKKLTIHTPLINLHKAQIIQKGLSLGVDYSLTTTCYQADNNGDACGFCDACEYRKLGFKEAGVPDPTRYQK

SEQ ID NO: 36439 - protein, 226 aa, Escarpia laminata
  REGION 1..226: note = tr|A0A497TNP8|A0A497TNP8_9BACT 7-cyano-7-deazaguanine synthase OS=bacterium endosymbiont of Escarpia laminata OX=1221601 GN=queC PE=3 SV=1
MLKTKKAVILLSGGLDSATVLAIAQQQGYTCHALSMEYGQRHMAELGAARRVAQSLNAAEHKMVRIGLETIGGSALTDSAIPVPDHAEEGIPVTYVPARNTVFLSLALGWAEVLCAQDIFIGVNAVDYSGYPDCRPEFIHSFEQLANLATKAGVEGKQFKVHTPLIDMSKAEIISTGIRLGVDYNLTISCYQADPEGRACGVCDSCRLRAKGFQDAAIDDPTSYRC

SEQ ID NO: 36440 - protein, 217 aa, unidentified
  source 1..217: note = Unknown
  REGION 1..217: note = tr|A0A132HVK2|A0A132HVK2_9BACT 7-cyano-7-deazaguanine synthase OS=bacterium F083; OX = 1768114 GN=queC PE=3 SV=1
MKPDTLLIYSGGVDSTTMLYEYRDRIALALSFHYGSNHNDAELACARWHCARLGIRQVVIPLGFMAQHFRSALFEGADAVPGQKYDEQSMHSTVVPFRNGIMLSIAAGMAESEGLRQVMMANHSGDHSIYPDCRPAFVDAMGAAISAGTYDGVVLDAPYTRLTKADIVRRGTALGVDYGHTWSCYKGGEHACGVCGTCVERREAFAAAGQKDPAMEE

SEQ ID NO: 36441 - protein, 219 aa, unidentified
  source 1..219: note = Unknown
  REGION 1..219: note = tr|A0A202DQF9|A0A202DQF9_9BACT 7-cyano-7-deazaguanine synthase OS=bacterium F11; OX = 1932698 GN=queC PE=3 SV=1
MKKRKAVVLLSGGMDSAVALWWAKKKGWSCFALSFDYGQRHKKEINQARLLARTAQVPFRLVRFSLPWGGSSLTDSRKALPKNRPTRKMRDRIPSTYVPARNTIFLSFALSWADQMKSEAIVIGANAIDYSGYPDCRPRYMKAFERVSKEGTRQGVEMKSKISILTPLLNLTKVDIVKLGQSLNVPLHLTWSCYAGKSRPCDRCDSCRLREKGFQEAGI

SEQ ID NO: 36442 - protein, 233 aa, unidentified
  source 1..233: note = Unknown
  REGION 1..233: note = tr|A0A2H5VPF9|A0A2H5VPF9_9BACT 7-cyano-7-deazaguanine synthase OS=bacterium HR08; OX = 2035403 GN=queC_2 PE=3 SV=1
MTRRAVVLLSGGIDSTTTLAIARAEGYDVYALSVRYGQRHEIELERARAIADAFGVARHLMITIDLREIGGSALTDERIAVPKDRTPEEIGAEIPITYVPGRNTIFLAFALAWAEVLGAEDIFFGANVLDYSGYPDCRPEYLRAFEHMANLATRAGVSGQARFRLHAPLLLMTKAEIIRRGRELGVDYRLTWSCYDPVEREGEVLACGRCDSCQIRRRGFAEAGIEDPIPYAN

SEQ ID NO: 36443 - protein, 221 aa, unidentified
  source 1..221: note = Unknown
  REGION 1..221: note = tr|A0A2H5VKC6|A0A2H5VKC6_9BACT 7-cyano-7-deazaguanine synthase OS=bacterium HR08; OX = 2035403 GN=queC_1 PE=3 SV=1
MSESAAACVLTSGGLDSAVLVAELLPQYARVFPVYVRSGLRWEEVELHWLQRFLNHLRDARLEPLTIMTLPIEDIYGRHWSVTGDGVPEREAAWDSVYLPGRNLILLAKAAVFCALRGVSTIALGLLEGNPFPDATPSFLSLMAQTASQGLAHPIVILAPYRGLSKHEIIRRGRHLPLDLTFSCISPVGHHHCGRCSKCAERQQAFAQAGLLDPTAYAHAP

SEQ ID NO: 36444 - protein, 231 aa, unidentified
  source 1..231: note = Unknown
  REGION 1..231: note = tr|A0A2H5VRX8|A0A2H5VRX8_9BACT 7-cyano-7-deazaguanine synthase OS=bacterium HR09; OX = 2035404 GN=queC PE=3 SV=1
MGEGMSGDKAVVLLSGGMDSATAAAWARARWPWVGALSVDYGQRHAFELQAARRVAESLKLSEHRVIKVDLRAFGGSALTDELAVPKNRENIGEGIPVTYVPARNTVLLALLLAYAETRGARHLVMGANVLDYSGYPDCRPDFLRAFQRVANLGTKAGREGAGFEVHAPLLHLTKAGIVRLGFQLGLAFELTFSCYDPPEEGVHCGACDACRLRRQGFAEANFPDPTRYAT

SEQ ID NO: 36445 - protein, 221 aa, unidentified
  source 1..221: note = Unknown
  REGION 1..221: note = tr|A0A2H5VZX2|A0A2H5VZX2_9BACT 7-cyano-7-deazaguanine synthase OS=bacterium HR10; OX = 2035405 GN=queC_2 PE=3 SV=1
MSESAAVCVLTSGGLDSAVLVAELLPRYARVFPVYVRSGLQWEEVELHWLRQFLNRLRDARLEPLTIMTLPMEDIYGGHWSVTGDGVPEREAAWDSVYLPGRNIILLAKAAVFCALRGVSTIAIGLLEGNPFPDATPSFLSLMAQTVSQGLAHPIAILAPYRGLSKHEIIRRGRHLPLDLTFSCISPIGHHHCGRCSKCAERQQAFAQAGILDPTAYAHAP

SEQ ID NO: 36446 - protein, 233 aa, unidentified
  source 1..233: note = Unknown
  REGION 1..233: note = tr|A0A2H5VWS7|A0A2H5VWS7_9BACT 7-cyano-7-deazaguanine synthase OS=bacterium HR10; OX = 2035405 GN=queC_1 PE=3 SV=1
MAGKAVVLLSGGIDSTTTLAIARAEGYEVYALSFRYGQRHEIELERARAIAAAFGVARHLVIAIDLREIGGSALTDESLAVPKDRTPEEIGAEIPVTYVPGRNTIFLAFALAWAEVLGAEDIFFGANVLDYSGYPDCRPEYLRAFEQMANLATRAGVSGQARFRIHAPLLSMTKAEIIRRGRELGVDYRLTWSCYDPVARGGEILACGRCDSCQLRRRGFAEAGVEDPIPYAN

SEQ ID NO: 36447 - protein, 210 aa, unidentified
  source 1..210: note = Unknown
  REGION 1..210: note = tr|A0A2H5W5T9|A0A2H5W5T9_9BACT 7-cyano-7-deazaguanine synthase OS=bacterium HR11; OX = 2035406 GN=queC PE=3 SV=1
MRELVVVLFSGGLDSTVALWWALRQGWNAIPLSIDYKGRPGGEREAARQIAALARAELLEVPLPFYRDLQGWRQDGPLPADLAEANPVYLPAKNLLFYAIAAYYAEVLGATRIVGGHYRHDGTRFPDASAAYFARLGGLITEGLYSRRPHLELPFLDMTKAAIVRLGLDLGAPLDRTWSCYWDGPTPCGRCEGCREKEVALQAVESGLGR

SEQ ID NO: 36448 - protein, 203 aa, unidentified
  source 1..203: note = Unknown
  REGION 1..203: note = tr|A0A2H5WIR5|A0A2H5WIR5_9BACT 7-cyano-7-deazaguanine synthase OS=bacterium HR13; OX = 2035408 GN=queC_2 PE=3 SV=1
MSAHKIAVLFSGGVESTTLLYMYLQRKEIVYPVYIKMGESWESLELENALRLWQYTKSRYASLRPLRVINLQVSGAVRRSPYQVSEIFIPLRNMSLITACAIYALSKRVSRLAIGSLGLYPFPDNSNSYIKELERLISEGSGTAFSIEMPLFGLEKGKIVKEFYGKVPYHLTLSCAMPKKVGNKILHCGKCIKCKERQEALLG

SEQ ID NO: 36449 - protein, 203 aa, unidentified
  source 1..203: note = Unknown
  REGION 1..203: note = tr|A0A2H5WGL0|A0A2H5WGL0_9BACT 7-cyano-7-deazaguanine synthase OS=bacterium HR13; OX = 2035408 GN=queC_1 PE=3 SV=1
MDSATLLWLSKREFDKVYAISFDYGQRHKVEIKYAKDLAKMAQVEEHFIVEVPHYSVLKGSALLDKEISVPKGEYPQEEPPITTVPMRNLTFISIAASFADTLEIDHIGIGVHALDSPYPDCRPEFITSAEAAVNASSIFVAKTKKRIHIYAPFLGMSKRDIALIGRDLGVPFEKTYSCYVGTEPPCGECAACIQRKQALSFL

SEQ ID NO: 36450 - protein, 237 aa, unidentified
  source 1..237: note = Unknown
  REGION 1..237: note = tr|A0A2H5WMC6|A0A2H5WMC6_9BACT 7-cyano-7-deazaguanine synthase OS=bacterium HR14; OX = 2035409 GN=queC PE=3 SV=1
MELSVSQQRAPSAVVLLSGGQDSTTCLYWAKRHFEKVYALTFDYGQRHRIELDAARTVAQMAGVAHHLILRVCELEQLGGSALLSDIPIQETGGRGNLPNTFVPGRNLLFLVLAAAWAYQLECHHLVGGMCQTDYSGYPDCRRATIDALEQAIRLGMEWDITIHTPLMFLTKAESVKLAIEVGALEALAYSHTCYEGRFPPCGQCPACRLRARGFEEAGIEDPLIVRARSTISSPQA

SEQ ID NO: 36451 - protein, 229 aa, unidentified
  source 1..229: note = Unknown
  REGION 1..229: note = tr|A0A2H5WTD3|A0A2H5WTD3_9BACT 7-cyano-7-deazaguanine synthase OS=bacterium HR15; OX = 2035410 GN=queC PE=3 SV=1
MMEKIAPSAVVLLSGGQDSTTCLYWAKKRFDRLYALTFDYGQRHRIELDAAHTIARMAGVAEHRILRMSELEELGGSALLSDAPIQETSGRGNLPNTFVPGRNLLFLTLAAAWAYQLECHDLVGGMCQTDYSGYPDCRRATIDALEEAIRLGMEWEIRIHTPLMFLTKAQSVKLAAEVGAMDALAYSHTCYEGRFPPCGICPACRLRAKGFEEAGVEDPLLIRAREMAI

SEQ ID NO: 36452 - protein, 233 aa, unidentified
  source 1..233: note = Unknown
  REGION 1..233: note = tr|A0A2H5WZF3|A0A2H5WZF3_9BACT 7-cyano-7-deazaguanine synthase OS=bacterium HR16; OX = 2035411 GN=queC PE=3 SV=1
MGTLVLLSGGMDSAVAAAWAKRTLPPPYHALSVDYGSIHNERELSCARKIADLLGMEWHQASVVLPHGMASGLLKGHEWSQRLAEGEHARERGLPVSFVPARNAILLSLAAGLAYSLSLRHIVGGMHPGDNFGYPDCRQQFLQSMERALQLALDEYPLQFHFPYHTLLQGEGDAVEAKATVIRLAQHMDVLPLLKYTHTCYQGQYPPCGQCAACQLRAKAFERAGIADPLLTG

SEQ ID NO: 36453 - protein, 238 aa, unidentified
  source 1..238: note = Unknown
  REGION 1..238: note = tr|A0A2H5XGL3|A0A2H5XGL3_9BACT 7-cyano-7-deazaguanine synthase OS=bacterium HR18; OX = 2035413 GN=queC PE=3 SV=1
MSAPNLLPTLKPAEHGETALVLLSGGQDSTTCLYWALHYFPKVEAIGFHYGQKHAVELEQARKIAEQAGLPFTVLDLRGLLHGSALTEHDQDVSAAHPLAPHLPASFVPGRNALFLTLAASYGFTRGIHDLVGGMCQTDYSGYPDCRRAFIDAMERALSLALDTTIRIHTPLMHLTKAETWRLARELGILDVIIEQTHTDYNGDRSERHAWGYGRLDNPASILRARGYEEAKARGWLD

SEQ ID NO: 36454 - protein, 228 aa, unidentified
  source 1..228: note = Unknown
  REGION 1..228: note = tr|A0A2H5XVS7|A0A2H5XVS7_9BACT 7-cyano-7-deazaguanine synthase OS=bacterium HR20; OX = 2035415 GN=queC PE=3 SV=1
MSKIAVVALSGGMDSLVTLAEIRAEGYDIAALHFNYGQRTERRELEAFHAICDHYAIETRLVVDVAYLAAIGASSLTDPNIEVERANLERTGIPSSYVPFRNANILAIATSWAEALGASAIGIGAVEEDSSGYPDCRREFFSAFERVIELGTKPETHITILTPVIGYRKAEIVRRGIELGVPFELSWSCYARSDIACGECDSCALRLRGFQQAGVEDPIPYAVRPHYA

SEQ ID NO: 36455 - protein, 231 aa, unidentified
  source 1..231: note = Unknown
  REGION 1..231: note = tr|A0A2H5Y150|A0A2H5Y150_9BACT 7-cyano-7-deazaguanine synthase OS=bacterium HR21; OX = 2035416 GN=queC PE=3 SV=1
MAAQARLAVALMSGGMDSAVAAALVRQAGYELAGLHISYGHRTAARERRAFEALCDAWGIVRRLVVSLEHLRLIGGSALTDPAIPVPEGELSRQGIPPTYVPFRNANLLAIAVSWAEVLGASAVVIGAVEEDSSGYPDCRKVFYEAFQRVIELGTRPETRIKLLTPVIQLRKRDIVRRGVELGVPFQLTWSCYQREDLACGECDSCLLRLRGFREAGVEDPLPYARIPSGV

SEQ ID NO: 36456 - protein, 230 aa, unidentified
  source 1..230: note = Unknown
  REGION 1..230: note = tr|A0A2H5YRL4|A0A2H5YRL4_9BACT 7-cyano-7-deazaguanine synthase OS=bacterium HR26; OX = 2035421 GN=queC PE=3 SV=1
MTGARTTIGRAVVLLSGGLDSTTAAYLARAEGYELYALSFDYGQRHRRELESAAAVARAVGAVEHRIVTIDLAQWGGSSLTGAGPIPTEPTAGIPSTWVPARNLIFLAVASGYAEVIGASAIFIGVSQVDYSGYPDCRGEFLEAYQRAADLASKQFVEEGKRIPVLAPFLHLPKAGIIRLGLALGVDYSLTWSCYQGGTEPCGACDSCRLRTKAFAEAGVPDPLLSSARP

SEQ ID NO: 36457 - protein, 226 aa, unidentified
  source 1..226: note = Unknown
  REGION 1..226: note = tr|A0A2H5YY54|A0A2H5YY54_9BACT 7-cyano-7-deazaguanine synthase OS=bacterium HR27; OX = 2035422 GN=queC PE=3 SV=1
MATERRPRRAVVLLSGGLDSTTLAYLLDAYGFELYGLSFRYGQRHERELAAARAVAERLRFAEHRIVTVDLAQWGGSSLVGAGEIPSEPTPGIPSTYVPVRNLVFLAIAHAYAEAIDADAVAIAVSQVDYSGYPDCRGEFLAAYQQAADLASRRFVETGRRIPVLAPFLDVPKASIVRLGLRLGVDYGLTWSCYRGGEHPCQQCDSCRLRAQAFAEVGVPDPLLGG

SEQ ID NO: 36458 - protein, 239 aa, unidentified
  source 1..239: note = Unknown
  REGION 1..239: note = tr|A0A2H5Z257|A0A2H5Z257_9BACT 7-cyano-7-deazaguanine synthase OS=bacterium HR28; OX = 2035423 GN=queC PE=3 SV=1
MDSNTLPRRAVILLSGGLDSTTLAYLLHTYGFQLYGLSFRYGQRHERELLAAQAVAQRLSFAEHRIVTLDLAQWGGSSLVGAGEIPSQPTSGIPSTYVPVRNLIFLAVAHAYAEAIDADAVAIAVSQVDYSGYPDCRGEFLAAYQQAADLASRRFVETGRRIPVLAPFLDVPKSAIIRLGLRLGVDYSLTWSCYRGGEWPCQECDSCRLRARAFAEVGVPDPLLAPPAAPRGTTGAVDR

SEQ ID NO: 36459 - protein, 239 aa, unidentified
  source 1..239: note = Unknown
  REGION 1..239: note = tr|A0A2H6A464|A0A2H6A464_9BACT 7-cyano-7-deazaguanine synthase OS=bacterium HR33; OX = 2035428 GN=queC PE=3 SV=1
MARRRAVVLLSGGVDSTTTLAIARAEGFETYALTFRYGQRHEIEVEAARRVARSLGAKEHAVVGIDLTLFGGSALTADIPVPKDRAADEIASGIPVTYVPARNTIFLSFALAWAEVLGAGDIFIGVNALDYSGYPDCRPEYIEAYQRMADLATKAGVEGRQRLKIHTPLIGLKKHEIIRRGLELGVDYSLTHSCYDPLPGGEACGRCDSCILRIKGFAEAGVQDPIKYAAKYAGYRVGP

SEQ ID NO: 36460 - protein, 280 aa, unidentified
  source 1..280: note = Unknown
  REGION 1..280: note = tr|A0A2H6AI20|A0A2H6AI20_9BACT 7-cyano-7-deazaguanine synthase OS=bacterium HR36; OX = 2035431 GN=queC_2 PE=3 SV=1
MQSRSLCVLVISSLRCRHKIMIAVSPMRWLAVEAKAVVLLSGGLDSATTLAVARSEGYAVYALTVDYGQRHRRELQAAQRVAESLGVVEHRIVRLDLRAIGGSALTDNIQVPKDRAMEEIEHGIPVTYVPARNTVLLGLALGYAEVVGAFDIFIGCNAIDYSGYPDCRPEFLRQFEALANVATKAGVEGLGVFRVHAPLLYLSKANIIREGKRLGVNFRLTHSCYEPTEEGLACGRCDSCRLRLKGFLEAQERDSIGYAYVPPEYSAAVAVAEKPRKAGR

SEQ ID NO: 36461 - protein, 243 aa, unidentified
  source 1..243: note = Unknown
  REGION 1..243: note = tr|A0A2H6AGA6|A0A2H6AGA6_9BACT 7-cyano-7-deazaguanine synthase OS=bacterium HR36; OX = 2035431 GN=queC_1 PE=3 SV=1
MQEMMAVDWADLPKEVPLAVLVSGGLDSAVLLGLAAQRQRLVQPIYIRCGLCWETVELSYLRHFLQALDQPSLRPVVILDLPVADLYDRHWSLDGRNVPGAASADDAVYLPGRNVLLLSKALLWCHLHQVCVLALGTLRGNPFADATPTFMQRMADLVNQACQAQLRVLQPLRLLDKSQVLALGRHLPLRWTFSCIAPQNHRHCGRCNKCAERQRAFAQCALPDPTEYATEPSNYPDKQATEH

SEQ ID NO: 36462 - protein, 224 aa, unidentified
  source 1..224: note = Unknown
  REGION 1..224: note = tr|A0A2H6ALN3|A0A2H6ALN3_9BACT 7-cyano-7-deazaguanine synthase OS=bacterium HR37; OX = 2035432 GN=queC PE=3 SV=1
MSKKAVTVVSGGIDSSTLLYKTLREGYIPYAITFIYGQKHSKEIDSARRICATLGVSHRVLDLGGLREILSGSALTDPGVDIPEVPETAEYYETLKTTIVPNRNSIFLSIAVGYAVSLGANYVFFGAHHSDRGVYPDCRKEFVQAFEFAERLATDNHNLVVSAPFVDMTKAQIVKLGAELGVPFKDTWSCYKGGRVHCGVCSSCRERKRAFREAGVLDPTEYER

SEQ ID NO: 36463 - protein, 110 aa, unidentified
  source 1..110: note = Unknown
  REGION 1..110: note = tr|A0A2H6AQU0|A0A2H6AQU0_9BACT 7-cyano-7-deazaguanine synthase OS=bacterium HR38; OX = 2035433 GN=queC PE=3 SV=1
MTPITGSLAAKMGVEEVYLGVIKDDFASHPRLEAYLALVKKFLEFNQVQLKMPLSGLTKQEVVALGHELGVPLEETWSCVASGEAPCGACNPCIAREEAFALADAKALAR

SEQ ID NO: 36464 - protein, 220 aa, unidentified
  source 1..220: note = Unknown
  REGION 1..220: note = tr|A0A3L7ZZM5|A0A3L7ZZM5_9BACT 7-cyano-7-deazaguanine synthase OS=bacterium J10(2018); OX = 2320122 GN=queC PE=3 SV=1
MTKEKDALMVLSGGMDSTTMLYDHADSIALAVTFHYGSNHNEREAVCARYHCERLGIELIEIDLAFMGRHFSSALLNGADAIPEGHYADSNMKATVVPFRNGIMLAVAAGLAESRGLQAVMLANHAGDHSIYPDCRPGFVTTMGAAIAAGTYEHIELRAPYTGMTKGEIASRGKALGIDYSKTYSCYKGAEKHCGRCATCVERREALAEAGITDNTPYED

SEQ ID NO: 36465 - protein, 230 aa, unidentified
  source 1..230: note = Unknown
  REGION 1..230: note = tr|A0A202E0X9|A0A202E0X9_9BACT 7-cyano-7-deazaguanine synthase OS=bacterium K02(2017); OX = 1932696 GN=BVY03_02540 PE=3 SV=1
MANLSLILLSGGLDSSLSLLIARQESQLQCAITINYGQKSFIQEMNAAAKICGHYHIQHQTIQIPFLADQKNHPFFNNDLKCPQPELNELDNLSTTQNTAKAVWVPNRNGVFINIAAAIAEQQNINSIYVGFNAEEATTFPDNSQDFITAINNSLSYSTLNQVKVKCPTIEMHKTEILNNLITQDFPLPYLWSCYNNQDNMCGLCESCKRLKRALINNQQQPLTQSLFNN

SEQ ID NO: 36466 - protein, 232 aa, unidentified
  source 1..232: note = Unknown
  REGION 1..232: note = tr|A0A4S1HWV0|A0A4S1HWV0_9BACT 7-cyano-7-deazaguanine synthase OS=bacterium M00.F.Ca.ET.141.01.1.1 OX=2563898 GN=queC PE=3 SV=1
MKTLAVCSGGLDSVSLAHMVAAEHELTGLLSFDYGQRHRKELGFAALCAQRLKVPHQIIDIGEIGRGLSGSALTSSIDVPDGHYAEDTMKITVVPNRNAIMLAIAFGLAAAHSAEAVAAAVHGGDHFIYPDCRPAFIEAFQTMQDRALDGYAQIRLYAPYVNLGKADIVADGARYGTPFAETWSCYKGGVRHCGRCGTCVERREAFHLAGHADPTDYEDADFWLEALRRRRA

SEQ ID NO: 36467 - protein, 221 aa, unidentified
  source 1..221: note = Unknown
  REGION 1..221: note = tr|A0A4S1I0N4|A0A4S1I0N4_9BACT 7-cyano-7-deazaguanine synthase OS=bacterium M00.F.Ca.ET.141.01.1.1 OX=2563898 GN=queC PE=3 SV=1
MKKAVVLLSGGMDSAAVIALAQEQGFAVHALSVRYGQRHTSELDAAARVAKAQGVVAHKTVDVDLRSIGGSALTDDIDVPEAGGAGIPVTYVPARNTIMLSLALGWAEVLGANDIFCGVNAVDYSGYPDCRPEFVAAFEALANLATKSGVEGAGIKVHAPLQFLSKGQIVSEGVRLGVDFGLTVSCYNADANGAACGHCDACRLRAQGFAEAGVPDPTLYA

SEQ ID NO: 36468 - protein, 232 aa, unidentified
  source 1..232: note = Unknown
  REGION 1..232: note = tr|A0A4S1APA0|A0A4S1APA0_9BACT 7-cyano-7-deazaguanine synthase OS=bacterium M00.F.Ca.ET.146.01.1.1 OX=2563899 GN=queC PE=3 SV=1
MNALVICSGGLDSVSLAHKVATEQKLIGLLSFDYGQRHKKELGFASICAKRLGVPHQIVDIRDVGRNLSGSALTDSVDVPDGHYAEDPMRITVVPNRNAIMLAIAFGVAAAQQADAVATAVHGGDHFIYLDCRPAFIDAFQTMQNHALAGYADIRLYAPYVNMSKADIVSEGAKYATPFEATWSCYKGGARHCGRCGTCIERREAFDLAGIADPTDYEDADFWLHAVQTRSA

SEQ ID NO: 36469 - protein, 232 aa, unidentified
  source 1..232: note = Unknown
  REGION 1..232: note = tr|A0A4S1APC3|A0A4S1APC3_9BACT 7-cyano-7-deazaguanine synthase OS=bacterium M00.F.Ca.ET.146.01.1.1 OX=2563899 GN=queC PE=3 SV=1
MKTLAVCSGGLDSVSLAHMVAAEHELTGLLSFDYGQRHRKELGFAALCAQRLKVPHQIIDIGEIGRGLSGSALTGSIDVPDGHYAEDTMKITVVPNRNAIMLAIAFGLAAAHSAEAVAAAVHGGDHFIYPDCRPAFIEAFQTMQDRALDGYAQIRLYAPYVNLGKADIVADGARYGTPFAETWSCYKGGVRHCGRCGTCVERREAFHLAGHADPTDYEDADFWLEALRRRRA

SEQ ID NO: 36470 - protein, 232 aa, unidentified; identical to SEQ ID NO: 36466
  source 1..232: note = Unknown
  REGION 1..232: note = tr|A0A4S1B0G3|A0A4S1B0G3_9BACT 7-cyano-7-deazaguanine synthase OS=bacterium M00.F.Ca.ET.152.01.1.1 OX=2563900 GN=queC PE=3 SV=1

SEQ ID NO: 36471 - protein, 243 aa, unidentified
  source 1..243: note = Unknown
  REGION 1..243: note = tr|A0A4S0YJ48|A0A4S0YJ48_9BACT 7-cyano-7-deazaguanine synthase OS=bacterium M00.F.Ca.ET.155.01.1.1 OX=2563901 GN=queC PE=3 SV=1
MIRKDAKRSALVLFSGGQDSATCLAWALERYETVETLGFDYGQRHRVELECREGFRSAVARTFPAWGERLGDDHMIDLSVLGAISDTAMTREIEIEATANGLPNTFVPGRNLMFMTIAAAIAYRRGLQVLVGGMCETDFSGYPDCRDDTMKALQVALNLGMDSRFLLETPLMWLDKADTWRLAHELGGDELVELVRVETHTCYVGERAELHAWGFGCGECPACRLRKRGYEAYLAGEKVTEPA

SEQ ID NO: 36472 - protein, 232 aa, unidentified; identical to SEQ ID NO: 36468
  source 1..232: note = Unknown
  REGION 1..232: note = tr|A0A4S0ZAW6|A0A4S0ZAW6_9BACT 7-cyano-7-deazaguanine synthase OS=bacterium M00.F.Ca.ET.156.01.1.1 OX=2563902 GN=queC PE=3 SV=1

SEQ ID NO: 36473 - protein, 232 aa, unidentified
  source 1..232: note = Unknown
  REGION 1..232: note = tr|A0A4S0Z951|A0A4S0Z951_9BACT 7-cyano-7-deazaguanine synthase OS=bacterium M00.F.Ca.ET.156.01.1.1 OX=2563902 GN=queC PE=3 SV=1
MKTLAVCSGGLDSVSLAHMVAAEHELTGLLSFDYGQRHRKELGFAALCAQRLKVPHQIIDIGEIGRGLSGSALTSSIDVPDGHYAEDTMKITVVPNRNAIMLAIAFGLAAAHSAEAVAAAVHGGDHFIYPDCRPAFIEAFQTMQDRALDGYAQIRLYAPYVNLRKADIVADGARYGTPFAETWSCYKGGVRHCGRCGTCVERREAFHLAGHADPTDYEDADFWLEALRRRRA

SEQ ID NO: 36474 - protein, 232 aa, unidentified; identical to SEQ ID NO: 36466
  source 1..232: note = Unknown
  REGION 1..232: note = tr|A0A4S0WMV6|A0A4S0WMV6_9BACT 7-cyano-7-deazaguanine synthase OS=bacterium M00.F.Ca.ET.157.01.1.1 OX=2563903 GN=queC PE=3 SV=1

SEQ ID NO: 36475 - protein, 232 aa, unidentified; identical to SEQ ID NO: 36468
  source 1..232: note = Unknown
  REGION 1..232: note = tr|A0A4S0WLB2|A0A4S0WLB2_9BACT 7-cyano-7-deazaguanine synthase OS=bacterium M00.F.Ca.ET.157.01.1.1 OX=2563903 GN=queC PE=3 SV=1

SEQ ID NO: 36476 - protein, 232 aa, unidentified; identical to SEQ ID NO: 36468
  source 1..232: note = Unknown
  REGION 1..232: note = tr|A0A4S0VIY6|A0A4S0VIY6_9BACT 7-cyano-7-deazaguanine synthase OS=bacterium M00.F.Ca.ET.159.01.1.1 OX=2563904 GN=queC PE=3 SV=1

SEQ ID NO: 36477 - protein, 232 aa, unidentified; identical to SEQ ID NO: 36466
  source 1..232: note = Unknown
  REGION 1..232: note = tr|A0A4S0VK84|A0A4S0VK84_9BACT 7-cyano-7-deazaguanine synthase OS=bacterium M00.F.Ca.ET.159.01.1.1 OX=2563904 GN=queC PE=3 SV=1

SEQ ID NO: 36478 - protein, 232 aa, unidentified; identical to SEQ ID NO: 36466
  source 1..232: note = Unknown
  REGION 1..232: note = tr|A0A4S2JVZ4|A0A4S2JVZ4_9BACT 7-cyano-7-deazaguanine synthase OS=bacterium M00.F.Ca.ET.162.01.1.1 OX=2563905 GN=queC PE=3 SV=1

SEQ ID NO: 36479 - protein, 232 aa, unidentified; identical to SEQ ID NO: 36469
  source 1..232: note = Unknown
  REGION 1..232: note = tr|A0A4S0YHH7|A0A4S0YHH7_9BACT 7-cyano-7-deazaguanine synthase OS=bacterium M00.F.Ca.ET.163.01.1.1 OX=2563906 GN=queC PE=3 SV=1

SEQ ID NO: 36480 - protein, 232 aa, unidentified; identical to SEQ ID NO: 36468
  source 1..232: note = Unknown
  REGION 1..232: note = tr|A0A4S0YAB4|A0A4S0YAB4_9BACT 7-cyano-7-deazaguanine synthase OS=bacterium M00.F.Ca.ET.163.01.1.1 OX=2563906 GN=queC PE=3 SV=1

SEQ ID NO: 36481 - protein, 458 aa, unidentified
  source 1..458: note = Unknown
  REGION 1..458: note = tr|A0A4V3PFJ6|A0A4V3PFJ6_9BACT Uncharacterized protein OS=bacterium M00.F.Ca.ET.168.01.1.1 OX=2563907; GN = EN811_23180 PE=4 SV=1
MKVLDGEYPALKIAVIERGSRAKGDFQPVEISKSIVFKMKDLDDYRTKNWDNRIYDVLTLIAAVEFCDKTCRRPAWGWMRRFEVSLPVFEPIQWEDPHNVSALVSALKLLTGDEWVFSFTPRTGGPDDDVGRQSRLEFGDGNRIVMPFSDGLDSRAVSALLSAGGRSDRLIRVRVGSKKDDRPRRGDRKLPFLNIPFKVKPGPDGFNESSARTRGFKFTLMSAIAAYLLGTHDVVMPESGQGALGPSLVHTGHGYEDYRNHPRFLAKMERFFAALFGYQVTYRLPRLWRTKGETLRDFAALGGDETEWLDTRSCWQQNRNSSVNGKWRHCGICAACMLRRLSFHAAEVAEPADNYIWESLAASDFRSGAAKGFNKVTGAMEQYAIAGALHLDHLADLRSSPTHRKRMSRHAWQLSEELDISHQDAEGELFGLLERHEHEWKAFMKDLGPNSFVAQWLT

SEQ ID NO: 36482 - protein, 236 aa, unidentified; identical to SEQ ID NO: 35763
  source 1..236: note = Unknown
  REGION 1..236: note = tr|A0A4S1H4K8|A0A4S1H4K8_9BACT 7-cyano-7-deazaguanine synthase OS=bacterium M00.F.Ca.ET.168.01.1.1 OX=2563907 GN=queC PE=3 SV=1

SEQ ID NO: 36483 - protein, 232 aa, unidentified; identical to SEQ ID NO: 36466
  source 1..232: note = Unknown
  REGION 1..232: note = tr|A0A4S0Q707|A0A4S0Q707_9BACT 7-cyano-7-deazaguanine synthase OS=bacterium M00.F.Ca.ET.177.01.1.1 OX=2563908 GN=queC PE=3 SV=1

SEQ ID NO: 36484 - protein, 235 aa, unidentified
  source 1..235: note = Unknown
  REGION 1..235: note = tr|A0A4S0QHD5|A0A4S0QHD5_9BACT 7-cyano-7-deazaguanine synthase OS=bacterium M00.F.Ca.ET.177.01.1.1 OX=2563908 GN=queC PE=3 SV=1
MRTIVICSGGLDSVTLAHKVAAERTLIRLLSFDYGQRHKKELDYARRCAMRLGVPHDDVDITAVGRLLSGSALTGGGPVPEGHYAEDTMRVTVVPNRNAIMLAIAFGVAAAEQADAVAAAVHGGDHFIYPDCRPAFVEAFETMQRHALEGLAKIAFYTPFLQLSKADIVREGVRLDVPFAETWSCYQGGSLHCGRCGTCVERREAFHLAGQDDPTPYEDPDYWIEACRQHQARQR

SEQ ID NO: 36485 - protein, 233 aa, unidentified
  source 1..233: note = Unknown
  REGION 1..233: note = tr|A0A4S0N2C1|A0A4S0N2C1_9BACT 7-cyano-7-deazaguanine synthase OS=bacterium M00.F.Ca.ET.179.01.1.1 OX=2563909 GN=queC PE=3 SV=1
MTSTALVLFSGGQDSSTCLAWALDRFERIETVGFDYGQRHRIELDCRDTIRRELSAMNPVWAQRLGEDHTISLASLGEISKTALTSEIAIEMEDTGLPNTFVPGRNIIFLTFAAALAYRRGLKHIVGGMCETDYSGYPDCRDDTIKALQVALNLGMEKRFVLDTPLMWLDKADTWLLAKDLGGSRLVDTIVRDSHTCYLGERGDLHDWGYGCGTCPACELRAKGYQKFVAEQV

SEQ ID NO: 36486 - protein, 458 aa, unidentified; identical to SEQ ID NO: 36481
  source 1..458: note = Unknown
  REGION 1..458: note = tr|A0A4S0MQX2|A0A4S0MQX2_9BACT Uncharacterized protein OS=bacterium M00.F.Ca.ET.179.01.1.1 OX=2563909; GN = EN822_23180 PE=4 SV=1

SEQ ID NO: 36487 - protein, 223 aa, unidentified
  source 1..223: note = Unknown
  REGION 1..223: note = tr|A0A4S0LPH6|A0A4S0LPH6_9BACT 7-cyano-7-deazaguanine synthase OS=bacterium M00.F.Ca.ET.180.01.1.1 OX=2563910 GN=queC PE=3 SV=1
MTQQPLNNNKAIVVFSGGQDSTTCLFWAKKHFDEVVLVTFEYGQRHDTEIQVAKQIAKEQAVEHHVLDMSLLSQLTPNALTQHDIDINEDEDGMPNTFVPARNLLFLSFAGALAYQTNTKHIITGVCETDFSGYPDCRDNFIKSMNVTLSLSMDKDFVIHTPLMWLDKKQTWALSDELGVLDYVRNRTLTCYNGIIGEGCGECPACKLRARGLNAYLKEKGAN

SEQ ID NO: 36488 - protein, 243 aa, unidentified; identical to SEQ ID NO: 36471
  source 1..243: note = Unknown
  REGION 1..243: note = tr|A0A4S0JEW0|A0A4S0JEW0_9BACT 7-cyano-7-deazaguanine synthase OS=bacterium M00.F.Ca.ET.191.01.1.1 OX=2563911 GN=queC PE=3 SV=1

SEQ ID NO: 36489 - protein, 236 aa, unidentified; identical to SEQ ID NO: 35763
  source 1..236: note = Unknown
  REGION 1..236: note = tr|A0A4S0GKB0|A0A4S0GKB0_9BACT 7-cyano-7-deazaguanine synthase OS=bacterium M00.F.Ca.ET.194.01.1.1 OX=2563912 GN=queC PE=3 SV=1

SEQ ID NO: 36490 - protein, 458 aa, unidentified; identical to SEQ ID NO: 36481
  source 1..458: note = Unknown
  REGION 1..458: note = tr|A0A4S0GCY2|A0A4S0GCY2_9BACT Uncharacterized protein OS=bacterium M00.F.Ca.ET.194.01.1.1 OX=2563912; GN = EN837_21980 PE=4 SV=1

SEQ ID NO: 36491 - protein, 221 aa, unidentified; identical to SEQ ID NO: 36467
  source 1..221: note = Unknown
  REGION 1..221: note = tr|A0A4S0FGZ7|A0A4S0FGZ7_9BACT 7-cyano-7-deazaguanine synthase OS=bacterium M00.F.Ca.ET.199.01.1.1 OX=2563913 GN=queC PE=3 SV=1

SEQ ID NO: 36492 - protein, 232 aa, unidentified; identical to SEQ ID NO: 36473
  source 1..232: note = Unknown
  REGION 1..232: note = tr|A0A4S0E8L2|A0A4S0E8L2_9BACT 7-cyano-7-deazaguanine synthase OS=bacterium M00.F.Ca.ET.199.01.1.1 OX=2563913 GN=queC PE=3 SV=1

SEQ ID NO: 36493 - protein, 232 aa, unidentified; identical to SEQ ID NO: 36466
  source 1..232: note = Unknown
  REGION 1..232: note = tr|A0A4R9YUG2|A0A4R9YUG2_9BACT 7-cyano-7-deazaguanine synthase OS=bacterium M00.F.Ca.ET.205.01.1.1 OX=2563914 GN=queC PE=3 SV=1

SEQ ID NO: 36494 - protein, 232 aa, unidentified; identical to SEQ ID NO: 36466
  source 1..232: note = Unknown
  REGION 1..232: note = tr|A0A4R9TY84|A0A4R9TY84_9BACT 7-cyano-7-deazaguanine synthase OS=bacterium M00.F.Ca.ET.221.01.1.1 OX=2563915 GN=queC PE=3 SV=1

SEQ ID NO: 36495 - protein, 232 aa, unidentified; identical to SEQ ID NO: 36468
  source 1..232: note = Unknown
  REGION 1..232: note = tr|A0A4V3KMD9|A0A4V3KMD9_9BACT 7-cyano-7-deazaguanine synthase OS=bacterium M00.F.Ca.ET.221.01.1.1 OX=2563915 GN=queC PE=3 SV=1

SEQ ID NO: 36496 - protein, 232 aa, unidentified; identical to SEQ ID NO: 36466
  source 1..232: note = Unknown
  REGION 1..232: note = tr|A0A4R9U2Y7|A0A4R9U2Y7_9BACT 7-cyano-7-deazaguanine synthase OS=bacterium M00.F.Ca.ET.222.01.1.1 OX=2563916 GN=queC PE=3 SV=1

SEQ ID NO: 36497 - protein, 232 aa, unidentified; identical to SEQ ID NO: 36468
  source 1..232: note = Unknown
  REGION 1..232: note = tr|A0A4V3KMU8|A0A4V3KMU8_9BACT 7-cyano-7-deazaguanine synthase OS=bacterium M00.F.Ca.ET.222.01.1.1 OX=2563916 GN=queC PE=3 SV=1

SEQ ID NO: 36498 - protein, 232 aa, unidentified; identical to SEQ ID NO: 36469
  source 1..232: note = Unknown
  REGION 1..232: note = tr|A0A4R9T3X4|A0A4R9T3X4_9BACT 7-cyano-7-deazaguanine synthase OS=bacterium M00.F.Ca.ET.227.01.1.1 OX=2563917 GN=queC PE=3 SV=1

SEQ ID NO: 36499 - protein, 232 aa, unidentified; identical to SEQ ID NO: 36468
  source 1..232: note = Unknown
  REGION 1..232: note = tr|A0A4R9T2J8|A0A4R9T2J8_9BACT 7-cyano-7-deazaguanine synthase OS=bacterium M00.F.Ca.ET.227.01.1.1 OX=2563917 GN=queC PE=3 SV=1

SEQ ID NO: 36500 - protein, 243 aa, unidentified; identical to SEQ ID NO: 36471
  source 1..243: note = Unknown
  REGION 1..243: note = tr|A0A4R9RHZ3|A0A4R9RHZ3_9BACT 7-cyano-7-deazaguanine synthase OS=bacterium M00.F.Ca.ET.228.01.1.1 OX=2563918 GN=queC PE=3 SV=1

SEQ ID NO: 36501 - protein, 223 aa, unidentified; identical to SEQ ID NO: 36487
  source 1..223: note = Unknown
  REGION 1..223: note = tr|A0A4R9SET0|A0A4R9SET0_9BACT 7-cyano-7-deazaguanine synthase OS=bacterium M00.F.Ca.ET.229.01.1.1 OX=2563919 GN=queC PE=3 SV=1

SEQ ID NO: 36502 - protein, 232 aa, unidentified; identical to SEQ ID NO: 36466
  source 1..232: note = Unknown
  REGION 1..232: note = tr|A0A4R9RQ32|A0A4R9RQ32_9BACT 7-cyano-7-deazaguanine synthase OS=bacterium M00.F.Ca.ET.230.01.1.1 OX=2563920 GN=queC PE=3 SV=1

SEQ ID NO: 36503 - protein, 232 aa, unidentified; identical to SEQ ID NO: 36468
  source 1..232: note = Unknown
  REGION 1..232: note = tr|A0A4R9RH33|A0A4R9RH33_9BACT 7-cyano-7-deazaguanine synthase OS=bacterium M00.F.Ca.ET.230.01.1.1 OX=2563920 GN=queC PE=3 SV=1

SEQ ID NO: 36504 - protein, 263 aa, unidentified
  source 1..263: note = Unknown
  REGION 1..263: note = tr|A0A5J4E2I9|A0A5J4E2I9_9BACT 7-cyano-7-deazaguanine synthase OS=bacterium MnTg02; OX = 2080452 GN=queC PE=4 SV=1
MTQKRKDPSPYSNLLVMTVRPLDDNAALVLFSGGQDSTVCLAWALTRYGRVETVGFDYGQRHKVELECRQNVLDVIGKDFPEWAAKLGEDHVLQLPALGQLSNTALTRDVEIEMTGSGLPNTFVPGRNLLFFTYAAALGYRRGLGRLVGGMCETDYSGYPDCRDATLQTLAKAIQLGTEADFKIETPLMQRDKTETWSLAAKLGGPSLVDMIIEHTHSCYKGDRSQRYEWGYGCGSCPACELRARGFHAWRENESAQLADETS

SEQ ID NO: 36505 - protein, 227 aa, unidentified
  source 1..227: note = Unknown
  REGION 1..227: note = tr|A0A5J4EC25|A0A5J4EC25_9BACT 7-cyano-7-deazaguanine synthase OS=bacterium MnTg04; OX = 2080454 GN=queC PE=4 SV=1
MNSQDTKKAVVLVSGGLDSATTLAIAKDQGFDCFALSFDYQQRHRSELVAAGKIAKFFEVSEHRLMKIDTGGPSGSALTDMDIAIPDTLQQGIPVTYVPARNTVFLALALGYAEVIGASAIFIGVNAVDYSGYPDCRPEFIDAFEVLSNVATKAAVQGRRMRIQTPLIAMDKARIIRTGIELGIDYSITVSCYQADSEGRACGVCDSCRLRSAGFEAAGIADPTVYA

SEQ ID NO: 36506 - protein, 217 aa, unidentified
  source 1..217: note = Unknown
  REGION 1..217: note = tr|A0A132GTZ6|A0A132GTZ6_9BACT 7-cyano-7-deazaguanine synthase OS=bacterium P201; OX = 1768112 GN=queC PE=3 SV=1
MKDAVIIISGGMDSTTMLYEFKDEIALAITFDYGSTQNGRERVCAVTHCQRLGIKHIIVPLEFMHRYFKSALLMTADDIPEGNYDDENMKSTVVPFRNGIMLAIAAGIAESNGLKRVMIANHAGDHSIYPDCRPGFVNAMSEAMSEGTYENIKVYAPYTHLSKKEIAEHGKALGLDYTETYSCYKGGEKHCGKCGTCRERRQALLDAGIEDHTEYES

SEQ ID NO: 36507 - protein, 237 aa, unidentified
  source 1..237: note = Unknown
  REGION 1..237: note = tr|A0A4Q2RM17|A0A4Q2RM17_9BACT 7-cyano-7-deazaguanine synthase OS=bacterium RmlP001; OX = 2316527 GN=queC PE=3 SV=1
MADAAADRAIVLFSGGQDSTTCLAWALDRFASVETVGFDYGQRHRVELDVRAPLLARLAADCPGLAGRLGPDHLLDLSVLGQLSDTALTRDVAISMGENGLPTSFVPGRNLLFLTFAAALAYRRGIKHIVTGVCETDYSGYPDCRDDTIKAMQLALNLGMEARFVLHTPLMWIDKAETWRMAERLGGPALVDLVRDGTHTCYAGDRTHRHAWGYGCGTCPACELRARGYREFTAGAA

SEQ ID NO: 36508 - protein, 238 aa, unidentified
  source 1..238: note = Unknown
  REGION 1..238: note = tr|A0A4Q2U387|A0A4Q2U387_9BACT 7-cyano-7-deazaguanine synthase OS=bacterium RmlP026; OX = 2316528 GN=queC PE=3 SV=1
MAGQDEARAIVLFSGGQDSATCLAWALDRFAHVETVGFDYRQRHRVELDVRAPFLDGLRAGFPAWAGRLGPDHMLDLAVLGQLSDTALTRDVAISMGDNGLPTSFVPGRNLLFLTFAAALAYRRGIKHIVTGVCETDFSGYPDCRDDTIKAMQLALNLGMEARFVLHTPLMWIDKAATWRLAEGLGGAPLVDLVRDDTHTCYTGDRAHRHDWGYGCGVCPACELRAKGYREFRSQSVP

SEQ ID NO: 36509 - protein, 244 aa, unidentified
  source 1..244: note = Unknown
  REGION 1..244: note = tr|A0A177Q1D3|A0A177Q1D3_9BACT 7-cyano-7-deazaguanine synthase OS=bacterium SCGC AG-212-C10 OX=1799370 GN=queC PE=3 SV=1
MHGIVLLSGGLDSTTVAAHALEAGYELRGLAINYGQLHARELSSAQAVADRLGFPLLVADAPFYARMASHSALTDAAGFALPEHRAPEAMAADIPITYVPLRNTFFVTIAAAALESWMLALIENDRSDPATLDPAIFVGANAIDYSGYPDCRPEFYDAIAETVRLGSKLGTQYGVRMRIEAPIIAMGKADIVRHATRLGAPLELTWSCYAGQEWPCGVCDSCVLRAAGFAEAGLPDPALARIRR

SEQ ID NO: 36510 - protein, 225 aa, unidentified
  source 1..225: note = Unknown
  REGION 1..225: note = tr|A0A1E4L964|A0A1E4L964_9BACT 7-cyano-7-deazaguanine synthase OS=bacterium SCN 57-13; OX = 1660157 GN=queC PE=3 SV=1
MPKCVLLLSGGLDSATVLAVARDLGFDVYALSVLYGQRHQVEVDAAVRVAAALGATEHRFVSVNLDTLGGSALTDSGLDVPKDRDESAMQDIPITYVPARNTVMLSLALGYAEVVGATDIFVGVNAVDYSGYPDCRPEYIAAFEHLAQLATKAGVEGKRMRIHAPLIALTKVQIIERGLSLGVDYGMTHSCYDPLPNGRACGRCDSCILRKNAFAELGMDDPVLV

SEQ ID NO: 36511 - protein, 228 aa, unidentified
  source 1..228: note = Unknown
  REGION 1..228: note = tr|A0A3R8AKE0|A0A3R8AKE0_9BACT 7-cyano-7-deazaguanine synthase OS=bacterium TMED144; OX = 1986778 GN=queC PE=3 SV=1
MKKAIILLSGGLDSATCLSIALDLGYKCFGLSFDYGQRHKFELDCAKKLAKHYKIADHKIMKIDLRSFGGSALTADIEVPKHRDVDLQKNQIPITYVPARNTIFLSFALGYAEVINCNDIFIGVNALDYSGYPDCRPEFIESFEKMANLGTKSGIDSGSIKIHTPLIDLKKFEIILKANLLDLNFKMTHSCYDPDETNGRSCGHCDSCILRLAGFKKAKIDDPISYDE

SEQ ID NO: 36512 - protein, 229 aa, unidentified
  source 1..229: note = Unknown
  REGION 1..229: note = tr|A0A1Z8MNE2|A0A1Z8MNE2_9BACT 7-cyano-7-deazaguanine synthase OS=bacterium TMED15; OX = 1986651 GN=queC PE=3 SV=1
  VARIANT 50: note = Xaa can be any naturally occurring amino acid
MKSQKAIVLLSGGLDSATTLAIAQRENYRVFALSFRYGQRHTLELQYAQXLAKLKSVEKHVLVDIDLRIFGGSALTDDIPVPKKQSVAEIREEIPVTYVPARNTIFLAFALAWAETLSVRNIFIGVNALDYSGYPDCRPEYIQAYTEMANLATKAGVEGHRLQIHTPLIGLTKAEIIKTGTSLDVDYALTHSCYSPDNHGRHCGQCDACLLRRRGFEQAQVTDPTLYAI

SEQ ID NO: 36513 - protein, 259 aa, unidentified
  source 1..259: note = Unknown
  REGION 1..259: note = tr|A0A1Z9IQ87|A0A1Z9IQ87_9BACT 7-cyano-7-deazaguanine synthase OS=bacterium TMED161; OX = 1986652 GN=CBD21_03305 PE=3 SV=1
MSYVLSFSGGLDSTSLLLHLICKKKPVYAISFDYGQKHKIEIEFAKKNIKLLEAHGLNVNHKIVNISSIVSLLESSLTDPNINIPNGHYMDSNMKSTFVPNRNAIFSSVIYAYAISIYKRTLKNTSICLGVHSGDHLIYPDCRPEFYNSIIESFHLGNWDSEFIDTYLPYINFSKSEIIKDGINSCKDLELDFNLIYSNTLTTYSPDEDGYSNGMTGSDVERILSFNELDLKDPGLYNKEWSELLEFALNCEKEIISKD

SEQ ID NO: 36514 - protein, 223 aa, unidentified
  source 1..223: note = Unknown
  REGION 1..223: note = tr|A0A1Z9VPE7|A0A1Z9VPE7_9BACT 7-cyano-7-deazaguanine synthase OS=bacterium TMED178; OX = 1986653 GN=queC PE=3 SV=1
MKAIVLLSGGLDSATCLGYAQTRGFDLYALSFEYGQRHQSEIEAAKRLASRFQVIQHEIIELSYLAKIKGSSLTNHDQPIQRSSGKSIPDTYVPARNTIFLTHAMAWAEIIQCQHIFIGASSIDYSGYPDCRPEYIEAFENLANLATKSGVNGNKINIHAPLLHLSKAQTIQLGTELGVDYSQTVSCYQADPLGRACGACDSCYLRQKGFIESKIPDPTLYQN

SEQ ID NO: 36515 - protein, 240 aa, unidentified
  source 1..240: note = Unknown
  REGION 1..240: note = tr|A0A1Z9KV83|A0A1Z9KV83_9BACT 7-cyano-7-deazaguanine synthase OS=bacterium TMED181; OX = 1986654 GN=queC PE=3 SV=1
MKRDPQHSDCDSVALASGGLDSSTVLAIAVDQGYRPLPLAFRYGQKHEIELDCLKKVAASLNLPAPLILDLPYSSVGGSALLGDGEIPSEPGEGAQNRGEIPTTYVPARNLVFLSLATAVAEARGVQDIWIGVNSLDYSGYPDCRPEFLEAFLRTVHLGTRDGSCADDSGEPYWRLQAPLAQMSKSEIVLKATELSLDLSLTHSCYNPNPEGAACGICDSCGLRKRGFEEAGVADPTRYT

SEQ ID NO: 36516 - protein, 263 aa, unidentified
  source 1..263: note = Unknown
  REGION 1..263: note = tr|A0A1Z9M7M4|A0A1Z9M7M4_9BACT 7-cyano-7-deazaguanine synthase OS=bacterium TMED198; OX = 1986779 GN=CBD58_00305 PE=3 SV=1
MKESVISFSGGMDSSALLLDLLSSGYRVHCITFKYSQKHIIEVERAKSNIGYLGQNGFSDKLIHKVISIEDVFSKFNSSLIDEGQSIPEGYYEEESMISTFVPNRNAIFSSIIYGYSLSLSSKKKEKIILGLGVHAGDHSIYPDCRPDFYELLESAFKKGNWGSELLSFYLPFINDEKHSILKKTIVKLNSLGLDFKEFYRNTITSYNPDIHGKSDGKSGADVERILSFNKLGLVDPIEYTEAWPTVLERALSVESSFKEKSL

SEQ ID NO: 36517 - protein, 228 aa, unidentified
  source 1..228: note = Unknown
  REGION 1..228: note = tr|A0A1Z9RVD9|A0A1Z9RVD9_9BACT 7-cyano-7-deazaguanine synthase OS=bacterium TMED250; OX = 1986657 GN=queC PE=3 SV=1
MKKAVILLSGGLDSTTCLAVAKSKSFSIYALSFRYGQRHEFEISAAKKIARSSQVNDHVVLDIDLRAFGGSALTDNIDVPKSRDGKIGGSEIPITYVPARNTIFLSFALAYAETIESQNIFIGVNALDYSGYPDCRPEYIKSFEKMSNLATKVGVEGKSKIKIHTPLIDLSKKEIIQEGIKLGVDYTKTHSCYDPGKNGIACGLCDACILRREGFEKANIKDPIEYAN

SEQ ID NO: 36518 - protein, 226 aa, unidentified
  source 1..226: note = Unknown
  REGION 1..226: note = tr|A0A424SHR2|A0A424SHR2_9BACT 7-cyano-7-deazaguanine synthase OS=bacterium TMED46; OX = 1986782 GN=queC PE=3 SV=1
  VARIANT 5: note = Xaa can be any naturally occurring amino acid
  VARIANT 58: note = Xaa can be any naturally occurring amino acid
  VARIANT 130: note = Xaa can be any naturally occurring amino acid
  VARIANT 137: note = Xaa can be any naturally occurring amino acid
  VARIANT 163: note = Xaa can be any naturally occurring amino acid
  VARIANT 167: note = Xaa can be any naturally occurring amino acid
  VARIANT 189: note = Xaa can be any naturally occurring amino acid
  VARIANT 214: note = Xaa can be any naturally occurring amino acid
  VARIANT 218: note = Xaa can be any naturally occurring amino acid
MKAVXLVSGGLDSTTCLAMAREKGFDLYALTFNYGQRHDHELNSAKMVVDFFNIQNHXIIDIDLAQFGGSALTDQIDVPKKRDLSDMAEIPVTYVPARNTVFLSLALAWAEVLGSFDIFIGVNALDYSGXPDCRPEXISSFEKTANLATKAGVSGSSFRIHTXLIDXTKSEIVKVGMDLGVDYSLTSSXYDPDQEGNPCGLCDACYLRLKGFKXAGIXDPLNYSNQ

SEQ ID NO: 36519 - protein, 264 aa, unidentified
  source 1..264: note = Unknown
  REGION 1..264: note = tr|A0A1Z8KQA1|A0A1Z8KQA1_9BACT 7-cyano-7-deazaguanine synthase OS=bacterium TMED6; OX = 1986783 GN=CBB66_04230 PE=3 SV=1
MLENKCSVISFSGGMDSTSLLLNLLSKKHDIYAISFKYGQKHGVEVELAKKNIAYLQNNGFKDQITHKIFDISNILSSFNSSLVDQNQNVPEGHYESDTMKSTFVPNRNAIFFSLIYGYAISLAKNYKEKISVSIGAHTGDHAIYPDCRLDFFEKLFESFQIGNWDSDRIELYIPYINMDKKEILMDAEKSLNNLKLDFDTIFKNTITSYAPDNNGVSSGKTGSDIERILAFNSLNRKDPITYQDSWERVLDNALKTEKDFISE

SEQ ID NO: 36520 - protein, 228 aa, unidentified
  source 1..228: note = Unknown
  REGION 1..228: note = tr|A0A1Z8YZJ7|A0A1Z8YZJ7_9BACT 7-cyano-7-deazaguanine synthase OS=bacterium TMED80; OX = 1986784 GN=queC PE=3 SV=1
MNKVAVILLSGGLDSTTCAAIADKAQYELHGITINYGQKHNYELEASREVAKHLKFKSHAIIDIDLASFGGSSLVSDDIEIPKNRDIENVHDIPSTYVPARNTVFLSIALAKAETIKAFDIFIGVNAIDYSGYPDCRPEFISKFEDMMNVATKDAVQHIGKYTIHTPLIELTKAEIIKKGLDLGVDYNLTSSCYSPREKGKPCSQCDACKLRLKGFSDIGVEDPLNYN

SEQ ID NO: 36521 - protein, 241 aa, unidentified
  source 1..241: note = Unknown
  REGION 1..241: note = tr|A0A0A1PLQ2|A0A0A1PLQ2_9BACT 7-cyano-7-deazaguanine synthase OS=bacterium YEK0313; OX = 1522316 GN=queC PE=3 SV=1
MAESGAADGSAGALVLFSGGQDSSTCLAWALDRFGSVETLGFDYGQRHHVELECRSAIRDGLARLDPAWAGRLGPDHTIGLKALGEISDTALTDDVAIAMTEGGLPNTFVPGRNLIFLTFAAALAYRRGLKHIVTGVCETDYSGYPDCRDDTIKALQVALNLGMDKRFVLHTPLMWIDKAETWALTERLGGEPLVTLIREQSHSCYLGDRSHRHDWGFGCGTCPACQLRADGYRRFVAAAA

SEQ ID NO: 36522 - protein, 218 aa, unidentified
  source 1..218: note = Bacteroidaceae bacterium
  REGION 1..218: note = tr|A0A5C6HK69|A0A5C6HK69_9BACT 7-cyano-7-deazaguanine synthase OS=Bacteroidaceae bacterium HV4-6-C5C OX=2600309 GN=queC PE=3 SV=1
MNKETALVVFSGGQDSTTCLFWAKQKFKKVLALSFLYGQKHQKEVELARNIALKAGVPFEVMDVSFIGRLGHNSLTDVTMTMDQEKPADSYPNTFVPGRNLFFLSIAAVYAREHGIQHIVTGVSQTDFSGYPDCRDGFIKSLNVTLNLSMDEQFVIHTPLMWIDKAETWALADRLGVLDLVRNETLTCYNGIPGDGCGHCPACKLRREGLEKYLSTKR

SEQ ID NO: 36523 - protein, 213 aa, unidentified
  source 1..213: note = Bacteroidales bacterium
  REGION 1..213: note = tr|A0A1T5IME2|A0A1T5IME2_9BACT 7-cyano-7-deazaguanine synthase OS=Bacteroidales bacterium WCE2008 OX=1945891 GN=queC PE=3 SV=1
MKAVLIYSGGMDSTVLLYKYRKEIKLAVTFTYGARQDEEQTACAKENCELLGIDHLIIPLEFMGKYFRSSILKGGDDVPHGSYNDENMKSTVVPFRNGIMLSIAAGLAESRDLDTVLIANHAGDHTIYPDCRPEFIEAMGSAVNAGTFAGIKIVSPFCDITKRDIALIGKEEGVPFEKTYSCYEGRHKHCGVCGTCVERKEALEGFDPTEYEK

SEQ ID NO: 36524 - protein, 218 aa, unidentified
  source 1..218: note = Bacteroidales bacterium
  REGION 1..218: note = tr|A0A4U1GIW3|A0A4U1GIW3_9BACT 7-cyano-7-deazaguanine synthase OS=Bacteroidales bacterium; OX = 2030927 GN=queC PE=3 SV=1
MAKDSLIILSGGMDSVTLLHYRKDRIALAVSFDYGSNHNAREIECARQQCEMLGIEHLVIPLEFMGKYFRSSLLEGADSIPEGHYADDNMKSTVVPFRNGIMLSIACGLAESRDLRHVMMANHGGDHAIYPDCRPGFVAAMSEAMREGTYEGIDIEAAFTDITKSDIARLGKELGVDYSKTYSCYKGREKHCGKCGTCVERREAMAEAGIDDPTIYED

SEQ ID NO: 36525 - protein, 219 aa, Bacteroides acidifaciens
  REGION 1..219: note = tr|A0A4Y9GT83|A0A4Y9GT83_9BACE 7-cyano-7-deazaguanine synthase OS=Bacteroides acidifaciens OX=85831 GN=queC PE=3 SV=1
MNREAALVVFSGGQDSTTCLYWAKRNFKKVYALSFLYGQKHQKEVELAREIARKAEVEFDVMDVSFIGKLGRNSLTDDTMVMDQEKPADSAPNTFVPGRNLFFLSIAAVYAREHGINHLVTGVSQTDFSGYPDCRDAFIKSLNVTLNLAMDEQFVIHTPLMWIDKAETWALADELGVLELVRTETLTCYNGVQGDGCGHCPACTLRREGLEKYLKSKNQ

SEQ ID NO: 36526 - protein, 219 aa, Bacteroides acidifaciens
  REGION 1..219: note = tr|A0A3L7Z300|A0A3L7Z300_9BACE 7-cyano-7-deazaguanine synthase OS=Bacteroides acidifaciens OX=85831 GN=queC PE=3 SV=1
MNREAALVVFSGGQDSTTCLYWAKRNFKKVYALSFLYGQKHQKEVELAREIARKAEVEFDVMDVSFIGKLGRNSLTDDTMVMDQEKPADSAPNTFVPGRNLFFLSIAAVYARERGINHLVTGVSQTDFSGYPDCRDAFIKSLNVTLNLAMDEQFVIHTPLMWIDKAETWALADELGVLELVRTETLTCYNGVQGDGCGHCPACTLRREGLEKYLKSKNQ

SEQ ID NO: 36527 - protein, 233 aa, Bacteroides caccae
  REGION 1..233: note = tr|A0A413J5G5|A0A413J5G5_9BACE 7-cyano-7-deazaguanine synthase OS=Bacteroides caccae; OX = 47678 GN=DXA49_09040 PE=3 SV=1
MQKSSYEKKVLLYSGGMDSWLIDKIWKPDVKLYVDMGTKYSQEEIKRLPADVVVEKLDLSKWEREDKIIPLRNMYLIGIATNYGNEICLGATAGDRVLDKSPVFADIYEQLLNYLYQKQHWTEERKIKINLDFKRYTKAELVRAFIAQGGDMDEAFSSSFSCYTPEHGKECWSCKPCFRKFIAFALNGYPFTEDIIDRNVSYIRKEILPLIASGTYGRKQEEDEIMQVLSFYK

SEQ ID NO: 36528 - protein, 219 aa, Bacteroides caccae
  REGION 1..219: note = tr|A0A174RWG0|A0A174RWG0_9BACE 7-cyano-7-deazaguanine synthase OS=Bacteroides caccae; OX = 47678 GN=queC PE=3 SV=1
MNKESALVVFSGGQDSTTCLFWAKRNFKKVYALSFLYGQKHEKEVELAREIARKAEVEFDVMDVSFIGSLGHNSLTDTSMVMDQEKPADSFPNTFVPGRNLFFLSIAAVYARERGINHLITGVSQTDFSGYPDCRDAFIKSLNVTLNLAMDEQFVIHTPLMWIDKAETWALADELGVLDVIRHETLTCYNGIPGDGCGHCPACTLRREGLEKYLKSKNQ

SEQ ID NO: 36529 - protein, 219 aa, unidentified
  source 1..219: note = Bacteroides caecimuri
  REGION 1..219: note = tr|A0A4S2DEF2|A0A4S2DEF2_9BACE 7-cyano-7-deazaguanine synthase OS=Bacteroides caecimuri; OX = 2516958 GN=queC PE=3 SV=1
MNRETALVVFSGGQDSTTCLFWAKRNFKKVYALSFLYGQKHQKEVELAREIARKAEVEFDVMDVSFIGQLGHNSLTDTTMVMDQEKPADSVPNTFVPGRNLFFLSIAAVYARERGINHLVTGVSQTDFSGYPDCRDAFIKSLNVTLNLAMDEQFVIHTPLMWIDKAETWALADKLGVMELIRTETLTCYNGVQGDGCGHCPACTLRREGLEKYLKSKNQ

SEQ ID NO: 36530 - protein, 236 aa, unidentified; identical to SEQ ID NO: 36434
  source 1..236: note = Bacteroides caecimuris
  REGION 1..236: note = tr|A0A3A9BKT2|A0A3A9BKT2_9BACE 7-cyano-7-deazaguanine synthase OS=Bacteroides caecimuris; OX = 1796613 GN=queC PE=3 SV=1

SEQ ID NO: 36531 - protein, 219 aa, unidentified
  source 1..219: note = Bacteroides caecimuris
  REGION 1..219: note = tr|A0A1C7H2G8|A0A1C7H2G8_9BACE 7-cyano-7-deazaguanine synthase OS=Bacteroides caecimuris; OX = 1796613 GN=queC PE=3 SV=1
MNRETALVVFSGGQDSTTCLFWAKRNFKKVYALSFLYGQKHQKEVELAREIARKAEVEFDVMDVSFIGQLGHNSLTDTTMMMDQEKPADSVPNTFVPGRNLFFLSIAAVYARERGINHLVTGVSQTDFSGYPDCRDAFIKSLNVTLNLAMDEQFVIHTPLMWIDKAETWALADKLGVMELIRTETLTCYNGVQGDGCGHCPACTLRREGLEKYLKSKNQ

SEQ ID NO: 36532 - protein, 219 aa, Bacteroides cellulosilyticus
  REGION 1..219: note = tr|R6KNH0|R6KNH0_9BACE 7-cyano-7-deazaguanine synthase OS=Bacteroides cellulosilyticus CAG:158; OX = 1263038 GN=queC PE=3 SV=1
MDKEVALVVFSGGQDSTTCLFWAKREFKRVVALSFLYGQKHEKEVELAREIARKADVEFEAMDVSFIGKLGHNSLTDTTMLMDQEKPAGSYPNTFVPGRNLFFLSIAAVYAREHGINHIVTGVSQTDFSGYPDCRDAFIKSLNVTLNLAMDEQFVIHTPLMWIDKAETWGLADELGVLDLIRNETLTCYNGIQGDGCGHCPACKLRREGLEKYLKQLSI

SEQ ID NO: 36533 - protein, 219 aa, Bacteroides cellulosilyticus
  REGION 1..219: note = tr|A0A108TFF7|A0A108TFF7_9BACE 7-cyano-7-deazaguanine synthase OS=Bacteroides cellulosilyticus OX=246787 GN=queC PE=3 SV=1
MDKEVALVVFSGGQDSTTCLFWAKREFKRVVALSFLYGQKHEKEVELAREIARKADVEFEAMDVSFIGKLGHNSLTDTTMLMDQEKPAGSYPNTFVPGRNFFFLSIAAVYAREHGINHIVTGVSQTDFSGYPDCRDAFIKSLNVTLNLAMDEQFVIHTPLMWIDKAETWGLADELGVLDLIRNETLTCYNGIQGDGCGHCPACKLRREGLEKYLKQLSI

SEQ ID NO: 36534 - protein, 218 aa, Bacteroides clarus
  REGION 1..218: note = tr|R6LKV7|R6LKV7_9BACE 7-cyano-7-deazaguanine synthase OS=Bacteroides clarus CAG:160 OX=1263039 GN=queC; PE = 3 SV=1
MNKEAALVVFSGGQDSTTCLFWAKREFKKVYALSFLYGQKHRKEVELAREIARKAEVEFEVMDVSFIGRLGHNSLTDPGMVMDKEKPADGVPNTFVPGRNLFFLSIAAVYAREKGIDHIVTGVSQTDFSGYPDCRDAFIKSLNVTLNLAMDGQFVLHTPLMWIDKAETWALADELGVLDLIRHETLTCYNGIPGDGCGHCPACKLRREGLEKYLAGKR

SEQ ID NO: 36535 - protein, 218 aa, Bacteroides clarus
  REGION 1..218: note = tr|A0A1Y4JXW2|A0A1Y4JXW2_9BACE 7-cyano-7-deazaguanine synthase OS=Bacteroides clarus; OX = 626929 GN=queC PE=3 SV=1
MNKEAALVVFSGGQDSTTCLFWAKREFKKVYALSFLYGQKHRKEVELAREIARKAEVEFEVMDVSFIGRLGHNSLTDPGMVMDKEKPADGVPNTFVPGRNLFFLSIAAVYAREKGINHIVTGVSQTDFSGYPDCRDAFIKSLNVTLNLAMDGQFVLHTPLMWIDKAETWALADELGVLDLIRHETLTCYNGIPGDGCGHCPACKLRREGLEKYLAGKR

SEQ ID NO: 36536 - protein, 219 aa, Bacteroides coprocola
  REGION 1..219: note = tr|A0A412GV36|A0A412GV36_9BACE 7-cyano-7-deazaguanine synthase OS=Bacteroides coprocola; OX = 310298 GN=queC PE=3 SV=1
MNKDAALVVFSGGQDSTTCLFWAKKHFKKVYALSFLYGQKHVKEVELAREIARKAEVDFHVMDVSFIGHLGKNSLTDTSIHMDEEKPEGTFPNTFVPGRNLFFLSIAAVYARERGINHIVTGVSQTDFSGYPDCRDAFIKSLNVTLNLAMEEQFVIHTPLMWIDKAQTWALADKLGVLDLVRNETLTCYNGIPGGGCGHCPACKLRREGLEKYLAIKNK

SEQ ID NO: 36537 - protein, 219 aa, Bacteroides coprocola
  REGION 1..219: note = tr|B3JMY1|B3JMY1_9BACE 7-cyano-7-deazaguanine synthase OS=Bacteroides coprocola DSM 17136 OX=470145; GN = queC PE=3 SV=1
MNKDAALVVFSGGQDSTTCLFWAKKHFKKVYALSFLYGQKHVKEVELAREIARKAEVDFHVMDVSFIGHLGKNSLTDTSIHMDEEKPEGTFPNTFVPGRNLFFLSIAAVYARERGINHIVTGVSQTDFSGYPDCRDAFIKSLNVTLNLAMEEQFVIHTPLMWIDKAQTWALADELGVLDLVRNETLTCYNGIPGDGCGHCPACKLRREGLEKYLAIKNK

SEQ ID NO: 36538 - protein, 222 aa, Bacteroides coprophilus
  REGION 1..222: note = tr|R6SFC7|R6SFC7_9BACE 7-cyano-7-deazaguanine synthase OS=Bacteroides coprophilus CAG:333 OX=1263041; GN = queC PE=3 SV=1
MNNETALVVFSGGQDSTTCLFWAKKHFKKVYALSFIYGQKHVKEVELAREIARKADVEFAVMDVSFIGHLGKNSLTDTSIHMDEEKPADSFPNTFVPGRNLFFLSIAAVHAREKGISHLVTGVSQTDFSGYPDCRDSFIKSLNVTLNLAMDEQFVIHTPLMWIDKAQTWALADELGVLDLIRHETLTCYNGIPGDGCGHCPACKLRREGLEKYLQSKNQTNE

SEQ ID NO: 36539 - protein, 222 aa, Bacteroides coprophilus
  REGION 1..222: note = tr|S0FBP4|S0FBP4_9BACE 7-cyano-7-deazaguanine synthase OS=Bacteroides coprophilus DSM 18228 = JCM 13818; OX = 547042 GN=queC PE=3 SV=1
MNNETALVVFSGGQDSTTCLFWAKKHFKKVYALSFIYGQKHVKEVELAREIARKADVEFAVMDVSFIGHLGKNSLTDTSIHMDEEKPADSFPNTFVPGRNLFFLSIAAVHAREKGISHLVTGVSQTDFSGYPDCRDSFIKSLNVTLNLAMDEQFVIHTPLMWIDKAQTWALADELGVLDLIRHETLTCYNGIPGDGCGHCPACKLRREGLEKYLQSKNQMNE

SEQ ID NO: 36540 - protein, 217 aa, Bacteroides coprosuis
  REGION 1..217: note = tr|F3ZRN9|F3ZRN9_9BACE 7-cyano-7-deazaguanine synthase OS=Bacteroides coprosuis DSM 18011 OX=679937; GN = queC PE=3 SV=1
MRNSKAIVLFSGGQDSTTCLYWAKKRFDKVYAISFDYGQKHSNEVDVARSIAQQANVEFIVLDAHYISQLSINALTDTSLEMDENNNCPNTFVPGRNLFFLSMAAVFAFEHDVQHIVTGVSQTDFSGYPDCRHNFIQSANLTLNLAMDKEFILHAPLMWLDKAGVWELSDKLGVFDLVKDHTLTCYNGVIAEGCGHCPACKLRNQGLQEYLLKREKR

SEQ ID NO: 36541 - protein, 223 aa, Bacteroides dorei
  REGION 1..223: note = tr|A0A412Z1W2|A0A412Z1W2_9BACE 7-cyano-7-deazaguanine synthase OS=Bacteroides dorei; OX = 357276 GN=queC PE=3 SV=1
MNKSDALVVFSGGQDSTTCLFWAKKHFRKVYALSFIYGQKHVKEVELARAIAGKAGVEFKAMDVSFIGNLGKNSLTDTTITMDEVKPADSFPNTFVPGRNLFFLSIAAVYARELGINHIVTGVSQTDFSGYPDCRDAFIKSLNVTLNLAIDEQFVLHTPLMWIDKAETWALADELGVLDLIRHETLTCYNGVQGDGCGHCPACKLRREGLEKYLEIKAEREKR

SEQ ID NO: 36542 - protein, 223 aa, Bacteroides dorei
  REGION 1..223: note = tr|A0A076J2D5|A0A076J2D5_9BACE 7-cyano-7-deazaguanine synthase OS=Bacteroides dorei; OX = 357276 GN=queC PE=3 SV=1
MNKSDALVVFSGGQDSTTCLFWAKKHFRKVYALSFIYGQKHVKEVELARAIAGKAGVEFKAMDVSFIGNLGKNSLTDTTITMDEVKPADSFPNTFVPGRNLFFLSIAAVYARELGINHIVTGVSQTDFSGYPDCRDAFIKSLNVTLNLAMDEQFVLHTPLMWIDKAETWALADELGVLDLIRHETLTCYNGVQGDGCGHCPACKLRREGLEKYLEIKAEREKR

SEQ ID NO: 36543 - protein, 218 aa, Bacteroides eggerthii
  REGION 1..218: note = tr|R5K4M1|R5K4M1_9BACE 7-cyano-7-deazaguanine synthase OS=Bacteroides eggerthii CAG:109 OX=1263043; GN = queC PE=3 SV=1
MNKEAALVVFSGGQDSTTCLFWAKREFKKVYALSFLYGQKHRKEVDLAREIARKAGVEFEVMDVSLIGKLGRNSLTDTGMAMDEEKPADSFPNTFVPGRNLFFLSIAAVYAREKGINHIVTGVSQTDFSGYPDCRDTFIKSLNVTLNLAMDGQFVFHTPLMWIDKAETWALADELGVLDLIRHETLTCYNGIPGDGCGHCPACKLRREGLEKYLAGKG

SEQ ID NO: 36544 - protein, 231 aa, Bacteroides eggerthii
  REGION 1..231: note = tr|A0A415RZI2|A0A415RZI2_9BACE 7-cyano-7-deazaguanine synthase OS=Bacteroides eggerthii; OX = 28111 GN=queC PE=3 SV=1
MVSQSSNNKLISRVNKEAALVVFSGGQDSTTCLFWAKREFKKVYALSFLYGQKHRKEVDLAREIARKAGVEFEVMDVSLIGKLGRNSLTDTGMAMDEEKPADSFPNTFVPGRNLFFLSIAAVYAREKGINHIVTGVSQTDFSGYPDCRDTFIKSLNVTLNLAMDGQFVFHTPLMWIDKAETWALADELGVLDLIRHETLTCYNGIPGDGCGHCPACKLRREGLEKYLAGKG

SEQ ID NO: 36545 - protein, 219 aa, Bacteroides faecichinchillae
  REGION 1..219: note = tr|A0A1M5FIW8|A0A1M5FIW8_9BACE 7-cyano-7-deazaguanine synthase OS=Bacteroides faecichinchillae OX=871325 GN=queC PE=3 SV=1
MNRDRVLVVFSGGQDSTTCLFWAKRNFKKVYALSFLYGQKHEKEVELAREIARKAEVEFDVMDVSFIGKLGHNSLTDTTMVMDQEKPADSVPNTFVPGRNLFFLSIAAVYARERGINHLVTGVSQTDFSGYPDCRDAFIKSLNVTLNLAMDEQFVIHTPLMWIDKAETWALADQLGVLDVIRKETLTCYNGIPGDGCGHCPACKLRQEGLEKFLKSKNQ

SEQ ID NO: 36546 - protein, 220 aa, Bacteroides faecichinchillae
  REGION 1..220: note = tr|A0A4S4HZG1|A0A4S4HZG1_9BACE 7-cyano-7-deazaguanine synthase OS=Bacteroides faecichinchillae OX=871325 GN=queC PE=3 SV=1
MMNRDRVLVVFSGGQDSTTCLFWAKRNFKKVYALSFLYGQKHEKEVELAREIARKAEVEFDVMDVSFIGKLGHNSLTDTTMVMDQEKPADSVPNTFVPGRNLFFLSIAAVYARERGINHLVTGVSQTDFSGYPDCRDAFIKSLNVTLNLAMDEQFVIHTPLMWIDKAETWALADQLGVLDVIRKETLTCYNGIPGDGCGHCPACKLRQEGLEKFLKSKNQ

SEQ ID NO: 36547 - protein, 220 aa, Bacteroides faecis
  REGION 1..220: note = tr|A0A3E5GM05|A0A3E5GM05_9BACE 7-cyano-7-deazaguanine synthase OS=Bacteroides faecis; OX = 674529 GN=queC PE=3 SV=1
MMNREAALVVFSGGQDSTTCLFWAKRNFKKVYALSFLYGQKHQKEVELAREIARKAEVEFEVMDVSFIGTLGHNSLTDTAMVMDQEKPAGSVPNTFVPGRNLFFLSIAAVYARERGISHLVTGVSQTDFSGYPDCRDAFIKSLNVTLNLAMDEQFVIHTPLMWIDKAETWALADELGVLDLIRNETLTCYNGIQGDGCGHCPACTLRREGLEKYLKNKNQ

SEQ ID NO: 36548 - protein, 219 aa, Bacteroides faecis
  REGION 1..219: note = tr|R6VB45|R6VB45_9BACE 7-cyano-7-deazaguanine synthase OS=Bacteroides faecis CAG:32 OX=1263044 GN=queC; PE = 3 SV=1
MNREAALVVFSGGQDSTTCLFWAKRNFKKVYALSFLYGQKHQKEVELAREIARKAEVEFEVMDVSFIGTLGHNSLTDTAMVMDQEKPAGSVPNTFVPGRNLFFLSIAAVYARERGISHLVTGVSQTDFSGYPDCRDAFIKSLNVTLNLAMDEQFVIHTPLMWIDKAETWALADELGVLDLIRNETLTCYNGIQGDGCGHCPACTLRREGLEKYLKNKNQ

SEQ ID NO: 36549 - protein, 219 aa, Bacteroides finegoldii
  REGION 1..219: note = tr|C9L3A9|C9L3A9_9BACE 7-cyano-7-deazaguanine synthase OS=Bacteroides finegoldii DSM 17565 OX=483215; GN = queC PE=3 SV=1
MNREAALVVFSGGQDSTTCLFWAKRNFKKVYALSFLYGQKHQKEVEFAREIARKAEVEFDVMDVSFVGQLGHNSLTDTTMVMDQEKPADTVPNTFVPGRNLFFLSIAAVYARERGINHLVTGVSQTDFSGYPDCRDSFIKSLNVTLNLAMDEQFVIHTPLMWIDKAETWALADELGVLELIRNETLTCYNGVQGDGCGHCPACKLRREGLEKYLKSKNQ

SEQ ID NO: 36550 - protein, 219 aa, Bacteroides finegoldii; identical to SEQ ID NO: 36549
  REGION 1..219: note = tr|R6S643|R6S643_9BACE 7-cyano-7-deazaguanine synthase OS=Bacteroides finegoldii CAG:203 OX=1263045; GN = queC PE=3 SV=1

SEQ ID NO: 36551 - protein, 219 aa, Bacteroides fluxus
  REGION 1..219: note = tr|F3PSQ4|F3PSQ4_9BACE 7-cyano-7-deazaguanine synthase OS=Bacteroides fluxus YIT 12057 OX=763034 GN=queC; PE = 3 SV=1
MNRDTALVVFSGGQDSTTCLFWAKREFKKVYALSFLYGQKHRQEVELAREIARKAGVEFEVMDVSFIGRLGHNSLTDAGMEMDREKPADSFPNTFVPGRNLFFLSIAAVYARERGINHIVTGVSQTDFSGYPDCRDAFIKSLNVTLNLAMDEQFVLHTPLMWIDKAETWALADELGVLELIRHETLTCYNGIPGDGCGHCPACTLRREGLEKYLASVKG

SEQ ID NO: 36552 - protein, 219 aa, Bacteroides fragilis
  REGION 1..219: note = sp|Q64WB0|QUEC_BACFR 7-cyano-7-deazaguanine synthase; OS = Bacteroides fragilis (strain YCH46) OX=295405 GN=queC; PE = 3 SV=2
MKNDSAVVLFSGGQDSTTCLFWAKKHFKKVYALSFLYGQKHAHEVELARGIAERAGVEFHVMDTSFIGSLGSNSLTDTSISMDEDKPKDSFPNTFVPGRNLFFLSIAAVFAREQGAFHLVTGVSQTDYSGYPDCRDSFIKSLNVTLNLAMDEQFVIHTPLMWIDKAETWALADELGVFDLVRNETLTCYNGIPADGCGHCPACKLRKQGLEEYLSKRNR

SEQ ID NO: 36553 - protein, 219 aa, Bacteroides fragilis; identical to SEQ ID NO: 36552
  REGION 1..219: note = sp|Q5LFI6|QUEC_BACFN 7-cyano-7-deazaguanine synthase; OS = Bacteroides fragilis (strain ATCC 25285 / DSM 2151 / JCM 11019 / NCTC 9343) OX=272559 GN=queC PE=3 SV=1

SEQ ID NO: 36554 - protein, 220 aa, Bacteroides graminisolvens
  REGION 1..220: note = tr|A0A069D032|A0A069D032_9BACE 7-cyano-7-deazaguanine synthase OS=Bacteroides graminisolvens DSM 19988 = JCM 15093 OX=1121097 GN=queC; PE = 3 SV=1
MTDVEDAAVVLFSGGQDSTTCLFWAKKQFETVYALSFVYGQKHVHEVELAKGIAARAGVEFHVMDVSFISQLGRNSLTDTSLLMDEEKPADSFPNTFVPGRNLFFLSIAAVFARERGVRDIVTGVSQTDYSGYPDCRDSFIKSLNVTLNLAMDEQFILHTPLMWINKAQTWALADELGVLDVVRNETLTCYNGVPADGCGHCPACKLRGQGLDEYLKTKK

SEQ ID NO: 36555 - protein, 219 aa, Bacteroides graminisolvens
  REGION 1..219: note = tr|A0A3D2SCP7|A0A3D2SCP7_9BACE 7-cyano-7-deazaguanine synthase OS=Bacteroides graminisolvens OX=477666 GN=queC PE=3 SV=1
MTDVKDAAVVLFSGGQDSTTCLFWAKKQFKTVYALSFVYGQKHVHEVELARGIAERAGVEFHVMDVSFISQLGRNSLTDTSLMMDEEKPADSFPNTFVPGRNLFFLSIAAVFARERGVRDIVTGVSQTDYSGYPDCRDSFIKSLNVTLNLAMDEQFILHTPLMWINKAQTWALADELGVLDVVRNETLTCYNGVPADGCGHCPACKLRGQGLDEYLKTK

SEQ ID NO: 36556 - protein, 221 aa, Bacteroides helcogenes
  REGION 1..221: note = tr|E6SP46|E6SP46_BACT6 7-cyano-7-deazaguanine synthase OS=Bacteroides helcogenes (strain ATCC 35417 / DSM 20613 / JCM 6297 / P 36-108) OX=693979 GN=queC PE=3; SV = 1
MNKVNKDAALVVFSGGQDSTTCLFWAKREFKKVYALSFLYGQKHQKEVELAREIAHRAKVEFEVMDVSFIGKLGHNSLTDMNMAMDQEKPKDGFPNTFVPGRNLFFLSVAAVYARERGISHIVTGVSQTDFSGYPDCRDVFVKSLNVTLNLAMDEQFVLHTPLMWIDKAETWALADELGVLDLVRHETLTCYNGVQGDGCGHCPACKLRKEGLDKYLAGKS

SEQ ID NO: 36557 - protein, 218 aa, Bacteroides intestinalis
  REGION 1..218: note = tr|R7E3V9|R7E3V9_9BACE 7-cyano-7-deazaguanine synthase OS=Bacteroides intestinalis CAG:315 OX=1263048; GN = queC PE=3 SV=1
MNKEVALVVFSGGQDSTTCLFWAKRKFRKVVALSFLYGQKHEKEVELAREIARDADVEFEVMDVSFIGKLGHNSLTDTTMVMDQEKPTDSFPNTFVPGRNLFFLSIAAVYAREHDINHIVTGVSQTDFSGYPDCRDAFIKSLNVTLNLAMDEQFVIHTPLMWIDKAETWALADKLGVLDLIRNKTLTCYNGIPGDGCGHCPACKLRREGLEKYLSHKC

SEQ ID NO: 36558 - protein, 218 aa, Bacteroides intestinalis
  REGION 1..218: note = tr|A0A415AIV7|A0A415AIV7_9BACE 7-cyano-7-deazaguanine synthase OS=Bacteroides intestinalis OX=329854 GN=queC PE=3 SV=1
MNREVALVVFSGGQDSTTCLFWAKRKFREVVALSFLYGQKHEKEVELAREIARDADVKFEVMDVSFIGKLGHNSLTDNTMVMDQEKPTDSFPNTFVPGRNLFFLSIAAVYAREHGINHIVTGVSQTDFSGYPDCRDAFIKSLNVTLNLAMDEQFVIHTPLMWIDKAETWALADELGVLDLIRNKTLTCYNGIPGDGCGHCPACKLRREGLEKYLSRKC

SEQ ID NO: 36559 - protein, 220 aa, unidentified
  source 1..220: note = Bacteroides luti
  REGION 1..220: note = tr|A0A1M5CQZ4|A0A1M5CQZ4_9BACE 7-cyano-7-deazaguanine synthase OS=Bacteroides luti; OX = 1297750 GN=queC PE=3 SV=1
MRMSNESAVVLFSGGQDSTTCLFWAKRHFKKVYALSFLYGQKHQKEVDIARNIAEKADVEFHLMDASFISKLGSNSLTDSSIEMDQEKPADSFPNTFVPGRNLFFLSIAAVFAREKGVRHLVTGVSQTDFSGYPDCRDSFVKSLNVTLNLAMDEQFVIHTPLMWIDKTETWALADELGVFELVRNETLTCYNGIPADGCGHCPACKLRNHGLQEYLKRKN

SEQ ID NO: 36560 - protein, 218 aa, Bacteroides massiliensis
  REGION 1..218: note = tr|U6RNH5|U6RNH5_9BACE 7-cyano-7-deazaguanine synthase OS=Bacteroides massiliensis B84634 = Timone 84634 = DSM 17679 = JCM 13223 OX=1121098 GN=queC PE=3 SV=1
MNRSDALVVFSGGQDSTTCLFWAKKHFSKVYALSFVYGQKHVKEVELARSIAAGAGVEFEAMDVSFIGHLGKNSLTDTTIAMDQDKPADSFPNTFVPGRNLFFLSIAAVYAREHGINHIVTGVSQTDFSGYPDCRDAFIKSLNVTLNLAMDEQFVLHTPLMWIDKAETWALADELGVLDLIRRETLTCYNGIQGDGCGHCPACKLRREGLEKYLASKK

SEQ ID NO: 36561 - protein, 218 aa, Bacteroides nordii
  REGION 1..218: note = tr|A0A413VY66|A0A413VY66_9BACE 7-cyano-7-deazaguanine synthase OS=Bacteroides nordii; OX = 291645 GN=queC PE=3 SV=1
MINKNTALVVFSGGQDSTTCLFWAKREFKKVVALSFLYGQKHKKEVELAREIARNAGVEFEAMDVSFIGQLGHNSLTDTTMEMDQDKPADSFPNTFVPGRNLFFLSIAAVYARERGINHIVTGVSQTDFSGYPDCRDAFIKSLNVTLNLAMDEQFVLHTPLMWIDKAQTWALADELGVLDIIRNDTLTCYNGIQGDGCGHCPACKLRRQGLEEYLTRE

SEQ ID NO: 36562 - protein, 218 aa, Bacteroides nordii; identical to SEQ ID NO: 36561
  REGION 1..218: note = tr|I9RTW8|I9RTW8_9BACE 7-cyano-7-deazaguanine synthase OS=Bacteroides nordii CL02T12C05 OX=997884; GN = queC PE=3 SV=1

SEQ ID NO: 36563 - protein, 217 aa, Bacteroides oleiciplenus
  REGION 1..217: note = tr|A0A3E5BLW8|A0A3E5BLW8_9BACE 7-cyano-7-deazaguanine synthase OS=Bacteroides oleiciplenus OX=626931 GN=queC PE=3 SV=1
MNKEVALVVFSGGQDSTTCLFWAKRKFKKVVALSFLYGQKHEKEVELAREIARKADVDFEVMDVSFIGKLGHNSLTDITMVMDQEKPVDSFPNTFVPGRNLFFLSIAAVYARERGISHMVTGVSQTDFSGYPDCRDAFIKSLNVTLNLAMDEQFVIHTPLMWIDKAETWRLADELGVLELIRSETLTCYNGIPGDGCGHCPACKLRREGLEKYLNSK

SEQ ID NO: 36564 - protein, 217 aa, Bacteroides oleiciplenus
  REGION 1..217: note = tr|A0A1Q6GRW7|A0A1Q6GRW7_9BACE 7-cyano-7-deazaguanine synthase OS=Bacteroides oleiciplenus OX=626931 GN=queC PE=3 SV=1
MNKEVALVVFSGGQDSTTCLFWAKREFKKVIALSFLYGQKHEKEVELAREIARKADVEFEAMDVSFIGGLGHNSLTDATMIMDQEKPEGSFPNTFVPGRNLFFLSIAAVYARERGISHIVTGVSQTDFSGYPDCRDAFIKSLNVTLNLAMDEQFVIHTPLMWIDKAETWGLADELGVLELIRNETLTCYNGIPGDGCGHCPACKLRREGLEKYLNSK

SEQ ID NO: 36565 - protein, 219 aa, Bacteroides ovatus
  REGION 1..219: note = tr|A7M2H5|A7M2H5_BACO1 7-cyano-7-deazaguanine synthase OS=Bacteroides ovatus (strain ATCC 8483 / DSM 1896 / JCM 5824 / NCTC 11153) OX=411476 GN=queC PE=3 SV=1
MNREAALVVFSGGQDSTTCLFWAKRNFKKVYALSFLYGQKHQKEVELAREIARKAEVEFDVMDVSFIGQLGHNSLTDTTMVMDQEKPADSVPNTFVPGRNLFFLSIAAVYARERGINHLVTGVSQTDFSGYPDCRDAFIKSLNVTLNLAMDEQFVIHTPLMWIDKAETWALADELGVLELIRTETLTCYNGVQGDGCGHCPACTLRREGLEKYLKSKNQ

SEQ ID NO: 36566 - protein, 219 aa, Bacteroides ovatus; identical to SEQ ID NO: 36565
  REGION 1..219: note = tr|A0A139LGN7|A0A139LGN7_BACOV 7-cyano-7-deazaguanine synthase OS=Bacteroides ovatus; OX = 28116 GN=queC PE=3 SV=1

SEQ ID NO: 36567 - protein, 221 aa, Bacteroides plebeius
  REGION 1..221: note = tr|A0A415JBU6|A0A415JBU6_9BACE 7-cyano-7-deazaguanine synthase OS=Bacteroides plebeius; OX = 310297 GN=queC PE=3 SV=1
MVNNKEALVVFSGGQDSTTCLFWAKKHFEKVYALSFLYGQKHEKEVELAREIARKAGVEFEVMDVSFIGHLGKNSLTDTSIHMDEEKPKDSFPNTFVPGRNLFFLSIAAVYARERGIHHMVTGVSQTDFSGYPDCRDSFIKSLNVTLNLAMEEQFVIHTPLMWIDKAQTWALADELGVLDLVRNETLTCYNGIPGDGCGHCPACKLRREGLEKYLASKQNK

SEQ ID NO: 36568 - protein, 221 aa, Bacteroides plebeius
  REGION 1..221: note = tr|A0A1Q6GH34|A0A1Q6GH34_9BACE 7-cyano-7-deazaguanine synthase OS=Bacteroides plebeius; OX = 310297 GN=queC PE=3 SV=1
MVNNKEALVVFSGGQDSTTCLFWAKKHFEKVYALSFLYGQKHEKEVELAREIARKAGVEFEVMDVSFIGHLGKNSLTDTSIHMDEEKPKDSFPNTFVPGRNLFFLSIAAVYAREKGIHHMVTGVSQTDFSGYPDCRDSFIKSLNVTLNLAMEEQFVIHTPLMWIDKAQTWALADELGVLDLVRNETLTCYNGIPGDGCGHCPACKLRREGLEKYLASKQNK

SEQ ID NO: 36569 - protein, 218 aa, Bacteroides pyogenes
  REGION 1..218: note = tr|W4P609|W4P609_9BACE 7-cyano-7-deazaguanine synthase OS=Bacteroides pyogenes JCM 6292 OX=1235809; GN = queC PE=3 SV=1
MNKEAALVVFSGGQDSTTCLFWAKKHFKEVRALSFLYGQKHQKEVELAQGIAARANVPFDVMDVSFIGTLGRNSLTDAAMEMDKEKPEGSVPNTFVPGRNLFFLSIAAVYACERGIRQLVTGVSQTDFSGYPDCRDAFIKSLNVTLDLAMDEHFVIHTPLMWIDKTETWALADELGVMDLIRRETLTCYNGIQGDGCGECPACKLRREGLEKYLKQSL

SEQ ID NO: 36570 - protein, 216 aa, Bacteroides pyogenes
  REGION 1..216: note = tr|A0A5D3EB87|A0A5D3EB87_9BACE 7-cyano-7-deazaguanine synthase OS=Bacteroides pyogenes; OX = 310300 GN=FNG97_04965 PE=3 SV=1
MQTEFTKGVILVSGGLDSTTLMYQFVERNVEFVPLFVNYGQHCATKEYDTLLKVIPEQYKDKIETIDISSIFKYSKSRFIRPADLWKDDIKADDLYIPYRNVLLMTVAASFAQTIGLNKVYAAFINSNHAKEIDCSSAFFDKLEGLLSEYGSVKIEMPFRNLSKYEVAELGIELKAPIGVTFSCQASPDIPCGACPNCVDRLKALKELSLESIKHE

SEQ ID NO: 36571 - protein, 138 aa, unidentified
  source 1..138: note = Bacteroides reticulotermitis
  REGION 1..138: note = tr|W4UR31|W4UR31_9BACE 7-cyano-7-deazaguanine synthase OS=Bacteroides reticulotermitis JCM 10512; OX = 1445607 GN=JCM10512_1946 PE=3 SV=1
MNKDAALVVFSGGQDSTTCLFWAKENFKKVYALSFLYGQKHQKEVDLAREIARKSAVDFEVMDVSFIGKLGRNSLTDASLVMDQEKPADSFPNTFVPGRNLFFLSIAAVYARERGINHIVTGVSQTDFSGYPDCGMLL

SEQ ID NO: 36572 - protein, 71 aa, unidentified
  source 1..71: note = Bacteroides reticulotermitis
  REGION 1..71: note = tr|W4URR6|W4URR6_9BACE 7-cyano-7-deazaguanine synthase OS=Bacteroides reticulotermitis JCM 10512; OX = 1445607 GN=JCM10512_1947 PE=3 SV=1
MEEQFVLHTPLMWIDKTETWALADKLGVLDLVRNETLTCYNGIPGDGCGHCPACVLRREGLEKYLQTKQEE

SEQ ID NO: 36573 - protein, 222 aa, Bacteroides salanitronis
  REGION 1..222: note = tr|F0R8Q9|F0R8Q9_BACSH 7-cyano-7-deazaguanine synthase OS=Bacteroides salanitronis (strain DSM 18170 / JCM 13567 / BL78) OX=667015 GN=queC PE=3 SV=1
MDKNKALVVFSGGQDSTTCLFWAKKHFKEVYALTFLYGQKHVKEVDLAREIARKAEVHFDVMDVSFIGHLGKNSLTDLSIPMDEEKPEGNYPNTFVPGRNLFFLSIAAVYARERGISHLVTGVSQTDFSGYPDCRDSFIKSLNVTLNLAMDEQFVIHTPLMWIDKAETWALADELGAFDIVRNDTLTCYNGIPGDGCGHCPACKLRREGLEKYLENKQCDNK

SEQ ID NO: 36574 - protein, 225 aa, Bacteroides salyersiae
  REGION 1..225: note = tr|I8Y9Q9|I8Y9Q9_9BACE 7-cyano-7-deazaguanine synthase OS=Bacteroides salyersiae CL02T12C01 OX=997887; GN = queC PE=3 SV=1
MMNKDTALVIFSGGQDSTTCLFWAKREFKKVCALSFLYGQKHQKEVELAREIARNAGVEFEVMDVSFIGKLGHNSLTDTTMVMDQEKPADSFPNTFVPGRNLFFLSIAAVYSRERGINHIVTGVSQTDFSGYPDCRDAFIKSLNVTLNLAMDEQFVLHTPLMWIDKAQTWALADELGVLEIIRNDTLTCYNGIQGDGCGHCPACKLRRQGLDEYLLSKNKFLRYG

SEQ ID NO: 36575 - protein, 225 aa, Bacteroides salyersiae; identical to SEQ ID NO: 36574
  REGION 1..225: note = tr|A0A4Q5FL69|A0A4Q5FL69_9BACE 7-cyano-7-deazaguanine synthase OS=Bacteroides salyersiae; OX = 291644 GN=queC PE=3 SV=1

SEQ ID NO: 36576 - protein, 223 aa, Bacteroides sartorii
  REGION 1..223: note = tr|A0A4S2FRJ1|A0A4S2FRJ1_9BACE 7-cyano-7-deazaguanine synthase OS=Bacteroides sartorii; OX = 671267 GN=queC PE=3 SV=1
MNKSDALVVFSGGQDSTTCLFWAKKHFRRVYALSFIYGQKHVKEVELARAIAGKAGVEFKTMDVSFIGNLGKNSLTDTTIAMDEEKPAGSFPNTFVPGRNLFFLSIAAVYARELGINHIVTGVSQTDFSGYPDCRDAFIKSLNVTLNLAMDEQFVLHTPLMWIDKAETWALADELGVLDLIRHETLTCYNGIQGDGCGHCPACKLRREGLEKYLEIKAEKEKQ

SEQ ID NO: 36577 - protein, 223 aa, Bacteroides sartorii
  REGION 1..223: note = tr|R9I6V6|R9I6V6_9BACE 7-cyano-7-deazaguanine synthase OS=Bacteroides sartorii OX=671267 GN=queC PE=3; SV = 1
MNKSDALVVFSGGQDSTTCLFWAKKHFRRVYALSFIYGQKHVKEVELARAIAGKAGVEFKAMDVSFIGNLGKNSLTDTTIAMDEEKPAGSFPNTFVPGRNLFFLSIAAVYARELGINHIVTGVSQTDFSGYPDCRDAFIKSLNVTLNLAMDEQFVLHTPLMWIDKAETWALADELGVLDLIRHETLTCYNGIQGDGCGHCPACKLRREGLEKYLEIKAEKEKQ

SEQ ID NO: 36578 - protein, 221 aa, Bacteroides sp.
  REGION 1..221: note = tr|A0A285TMG0|A0A285TMG0_9BACE 7-cyano-7-deazaguanine synthase OS=Bacteroides sp. AR29; OX = 93975 GN=queC PE=3 SV=1
MSETKKSDALVVFSGGQDSTTCLFWAKREFKKVYALSFLYGQKHQKEVDLARAIARKAGVEFEVMDVSFIGRLGRNSLTDAGMEMDQEKPADSFPNTFVPGRNLFFLSIAAVYARERGINHIVTGVSQTDFSGYPDCRDAFIKSLNVTLNLAMDEQFVLHTPLMWIDKAETWALADELGVLELIRHETLTCYNGIPGDGCGHCPACTLRREGLEKFLASTK

SEQ ID NO: 36579 - protein, 218 aa, Bacteroides sp.
  REGION 1..218: note = tr|A0A4P6RDZ6|A0A4P6RDZ6_9BACE 7-cyano-7-deazaguanine synthase OS=Bacteroides sp. A1C1; OX = 2528203 GN=queC PE=3 SV=1
MNRDTALVVFSGGQDSTTCLFWAKREFKKVYALSFLYGQKHQKEVDLARAIARKAGVEFEVMDVSFIGRLGHNSLTDAGMEMDQEKPADSFPNTFVPGRNLFFLSIAAVYARERGINHIVTGVSQTDFSGYPDCRDAFIKSLNVTLNLAMDEQFVLHTPLMWIDKAETWALADELGVLELIRHETLTCYNGIPGDGCGHCPACTLRREGLEKFLASTK

SEQ ID NO: 36580 - protein, 217 aa, Bacteroides stercorirosoris
  REGION 1..217: note = tr|A0A1M6K455|A0A1M6K455_9BACE 7-cyano-7-deazaguanine synthase OS=Bacteroides stercorirosoris OX=871324 GN=queC PE=3 SV=1
MNKEVALVVFSGGQDSTTCLFWAKREFKKVIALSFLYGQKHEKEVELAREIARKADVEFEAMDVSFIGGLGHNSLTDATMIMDQEKPEGSFPNTFVPGRNLFFLSIAAVYARERGISHMVTGVSQTDFSGYPDCRDAFIKSLNVTLNLAMDEQFVIHTPLMWIDKAETWGLADELGVLELIRNETLTCYNGIPGDGCGHCPACKLRREGLEKYLNSK

SEQ ID NO: 36581 - protein, 217 aa, Bacteroides stercoris
  REGION 1..217: note = tr|A0A108T4L0|A0A108T4L0_BACSE 7-cyano-7-deazaguanine synthase OS=Bacteroides stercoris; OX = 46506 GN=queC PE=3 SV=1
MNKEAALVVFSGGQDSTTCLFWAKREFRKVYALSFLYGQKHQKEVELAREIARKAEVEFEVMDVSFIGKLGHNSLTDPDMVMDREKPADGVPNTFVPGRNLFFLSIAAVYAREKGINHIVTGVSQTDFSGYPDCRDAFIKSLNVTLNLAMDEQFVLHTPLMWIDKAETWALADELGVLDLIRHETLTCYNGIPGDGCGHCPACKLRREGLEKYLAGK

SEQ ID NO: 36582 - protein, 217 aa, Bacteroides stercoris
  REGION 1..217: note = tr|B0NLJ9|B0NLJ9_BACSE 7-cyano-7-deazaguanine synthase OS=Bacteroides stercoris ATCC 43183 OX=449673; GN = queC PE=3 SV=1
MNKEAALVVFSGGQDSTTCLFWAKREFRKVYALSFLYGQKHQKEVELAREIARKAEVEFEVMDVSFIGKLGHNSLTDPDMVMDREKPADSVPNTFVPGRNLFFLSIAAVYAREKGINHIVTGVSQTDFSGYPDCRDAFIKSLNVTLNLAMDEQFVLHTPLMWIDKAETWALADELGVLDLIRHETLTCYNGIPGDGCGHCPACKLRREGLEKYLAGK

SEQ ID NO: 36583 - protein, 219 aa, Bacteroides thetaiotaomicron
  REGION 1..219: note = sp|Q8A7F8|QUEC_BACTN 7-cyano-7-deazaguanine synthase; OS = Bacteroides thetaiotaomicron (strain ATCC 29148 / DSM 2079 / NCTC 10582 / E50 / VPI-5482) OX=226186 GN=queC P; E = 3 SV=2
MNRETALVVFSGGQDSTTCLFWAKRNFKKVYALSFLYGQKHQKEVELAREIARKAEVEFDVMDVSFIGTLGHNSLTDTTMVMDQEKPAGSVPNTFVPGRNLFFLSIAAVYARERGINHLVTGVSQTDFSGYPDCRDAFIKSLNVTLNLAMDEQFVIHTPLMWIDKAETWALADELGVLDLIRNETLTCYNGIQGDGCGHCPACTLRREGLEKYLKKKNQ

SEQ ID NO: 36584 - protein, 220 aa, Bacteroides thetaiotaomicron
  REGION 1..220: note = tr|A0A412GJY4|A0A412GJY4_BACT4 7-cyano-7-deazaguanine synthase OS=Bacteroides thetaiotaomicron OX=818 GN=queC PE=3 SV=1
MMNRETALVVFSGGQDSTTCLFWAKRNFKKVYALSFLYGQKHQKEVELAREIARKAEVEFDVMDVSFIGTLGHNSLTDTTMAMDQEKPAGSVPNTFVPGRNLFFLSIAAVYARERGINHLVTGVSQTDFSGYPDCRDAFIKSLNVTLNLAMDEQFVIHTPLMWIDKAETWALADELGVLDLIRNETLTCYNGIQGDGCGHCPACTLRREGLEKYLKKKNQ

SEQ ID NO: 36585 - protein, 218 aa, Bacteroides uniformis; identical to SEQ ID NO: 36579
  REGION 1..218: note = tr|A7VA14|A7VA14_BACUC 7-cyano-7-deazaguanine synthase OS=Bacteroides uniformis (strain ATCC 8492 / DSM 6597 / CIP 103695 / JCM 5828 / NCTC 13054 / VPI 0061); OX = 4114 79 GN=queC PE=3 SV=1

SEQ ID NO: 36586 - protein, 237 aa, Bacteroides uniformis
  REGION 1..237: note = tr|A0A174UK45|A0A174UK45_BACUN 7-cyano-7-deazaguanine synthase OS=Bacteroides uniformis; OX = 820 GN=queC PE=3 SV=1
MPSLFPSLRGRARGEAFNKMNRDTALVVFSGGQDSTTCLFWAKREFKKVYALSFLYGQKHQKEVDLARAIARKAGVEFEVMDVSFIGRLGRNSLTDAGMEMDQEKPADSFPNTFVPGRNLFFLSIAAVYARERGINHIVTGVSQTDFSGYPDCRDAFIKSLNVTLNLAMDEQFVLHTPLMWIDKAETWALADELGVLELIRHETLTCYNGIPGDGCGHCPACTLRREGLEKFLASTK

SEQ ID NO: 36587 - protein, 223 aa, Bacteroides vulgatus
  REGION 1..223: note = sp|A6L2J2|QUEC_BACV8 7-cyano-7-deazaguanine synthase; OS = Bacteroides vulgatus (strain ATCC 8482 / DSM 1447 / JCM 5826 / NBRC 14291 / NCTC 11154) OX=435590 GN=queC PE= 3; SV = 1
MNKSDALVVFSGGQDSTTCLFWAKKHFRKVYALSFIYGQKHVKEVELARVIAGKAGVEFKAMDVSFIGNLGKNSLTDTTITMDEVKPADSFPNTFVPGRNLFFLSIAAVYARELGINHIVTGVSQTDFSGYPDCRDAFIKSLNVTLNLAMDEQFVLHTPLMWIDKAETWALADELGVLDLIRHETLTCYNGVQGDGCGHCPACKLRREGLEKYLEIKAEREKR

SEQ ID NO: 36588 - protein, 223 aa, Bacteroides vulgatus; identical to SEQ ID NO: 36587
  REGION 1..223: note = tr|A0A174F937|A0A174F937_BACVU 7-cyano-7-deazaguanine synthase OS=Bacteroides vulgatus; OX = 821 GN=queC PE=3 SV=1

SEQ ID NO: 36589 - protein, 219 aa, Bacteroides xylanisolvens
  REGION 1..219: note = tr|A0A415KE43|A0A415KE43_9BACE 7-cyano-7-deazaguanine synthase OS=Bacteroides xylanisolvens OX=371601 GN=queC PE=3 SV=1
MNREVALVVFSGGQDSTTCLFWAKRNFKKVYALSFLYGQKHQKEVELAREIARKAEVEFDVMDVSFIGQLGHNSLTDTTIVMDQEKPADSVPNTFVPGRNLFFLGIAAVYARERGINHLVTGVSQTDFSGYPDCRDAFIKSLNVTLNLAMDEQFVIHTPLMWIDKAETWALADELGVLELIRTETLTCYNGVQGDGCGHCPACTLRREGLEKYLKSKNQ

SEQ ID NO: 36590 - protein, 219 aa, Bacteroides xylanisolvens
  REGION 1..219: note = tr|D6D566|D6D566_9BACE 7-cyano-7-deazaguanine synthase OS=Bacteroides xylanisolvens XB1A OX=657309; GN = queC PE=3 SV=1
MNREAALVVFSGGQDSTTCLFWAKRNFKKVYALSFLYGQKHQKEVELAREIARKAEVEFDVMDVSFIGQLGHNSLTDTTMVMDQEKPADSVPNTFVPGRNLFFLSIAAVYARERGINHLVTGVSQTDFSGYPDCRDAFIKSLNVTLNLAMDEQFVIHTPLMWIDKAETWALADKLGVLELIRTETLTCYNGVQGDGCGHCPACTLRREGLEKYLKSKNQ

SEQ ID NO: 36591 - protein, 229 aa, Bacteroides xylanolyticus
  REGION 1..229: note = tr|A0A2S6HNA8|A0A2S6HNA8_9BACE 7-cyano-7-deazaguanine synthase OS=Bacteroides xylanolyticus OX=384636 GN=queC PE=3 SV=1
MKALVLLSGGVDSATCLGMAIEEYGRKNVCGLSISYGQKHAKELEAAKKIADYYEIEFISLDLSRIFAYSDCSLLTQSQQEIPRESYAKQLENSEGKPVSTYVPFRNGLFLSSAASIALSKGCSVIYYGAHSDDAAGNAYPDCSSSFQEAMSRAVYIGSGNQLTIKAPFVLWTKAEVVERGLMLHVPYELTWSCYEGGEEPCGKCGTCIDRAEAFAKNGIKDPALKRGE

SEQ ID NO: 36592 - protein, 223 aa, unidentified
  source 1..223: note = Bacteroidetes bacterium
  REGION 1..223: note = tr|S8FL62|S8FL62_9BACT 7-cyano-7-deazaguanine synthase OS=Bacteroidetes bacterium oral taxon 272 str. F0290 OX=888054 GN=queC PE=3 SV=1
MNNEDALVVFSGGQDSTTCLFWAKKYFRRVFAITFIYGQKHVNEVEIAKAVAAKADVDIYVVDVSLIGKLGANSLTDASIVMDREKPADTFPNTFVPGRNLFFLSIAAIYAREKGIRHLVTGVSQTDYSGYPDCRDAFVKSLNVTLDLAMDAQFAIHTPLMWIDKSQTWELADKLGVLDLVRHETLTCYNGIPGDGCGHCPACKLRREGLEKYLKIKTERETK

SEQ ID NO: 36593 - protein, 263 aa, unidentified
  source 1..263: note = Bacteroidetes bacterium
  REGION 1..263: note = tr|A0A256WL44|A0A256WL44_9BACT 7-cyano-7-deazaguanine synthase OS=Bacteroidetes bacterium 4572_77 OX=1972459 GN=B7C24_07275 PE=3 SV=1
MAKHVVVSLSGGMDSSTLLLRAINEYDTVTGISFDYGQKHRVELERAQSLINYLADNGHKVNYRQIKLDGLVDLLDSALVQGGDDVPEGHYEQDNMKETVVPNRNKMFASITQAVALSIANKTEETCDIALGIHAGDHAVYPDCRQEFRDADDAAFRIGNWEADRVGYFTPYLDTDKFGILQNGEILCAKLKIDFDEVYSRTNTSYKPFPSGNSDYKSASSVERIEAFIALGRKDPVQYEDETGEVDYEVAKKHVEKVLAEYV

SEQ ID NO: 36594 - protein, 231 aa, unidentified
  source 1..231: note = Bacteroidetes sp.
  REGION 1..231: note = tr|A0A3N0ZT11|A0A3N0ZT11_9BACT 7-cyano-7-deazaguanine synthase OS=Bacteroidetes/Chlorobi group bacterium ChocPot_Mid OX=2382230 GN=queC PE=3 SV=1
MKNKKAVVLMSGGMDSAVTTAIAIHKGFQVFALHLNYGQRTQYREKKAFSDLVKYFGISELLEVDVSYFSQIGNSSLTDKKIEITTSLQISSSDTQCSNEIPSSYVPFRNGNILAIATSWAETINANAIFIGAMQLDYSGYPDCRREFFDAFEQAINLGTKPETKLKIITPIINFTKKDVVLKGKQLGVPFELTWSCYKDEDKACGVCDSCLLRLRGFEQARIIDPIKYKK

SEQ ID NO: 36595 - protein, 227 aa, unidentified
  source 1..227: note = Bacteroidetes sp.
  REGION 1..227: note = tr|A0A3N0ZCE7|A0A3N0ZCE7_9BACT 7-cyano-7-deazaguanine synthase OS=Bacteroidetes/Chlorobi group bacterium Naka2016 OX=2382229 GN=queC PE=3 SV=1
MKLAVVLMSGGMDSATTVAVAKSVGYQVAGLHVTYGQRTQQRELKAFNDLCDYFQIEKRLVVPIDYLKAIGGSSLTDSRLQVEKAQLERKEIPSTYVPFRNGNLLAIATSWAEVIGATAVFIGATQQDSSGYPDCRIDFFLAFEKAIELGTKPETKISIQTPLINSTKKDIVRLGHNFGVPFELTWSCYRESEIACGECDSCALRLRGFQQAGLVDPIPYKTLPNYV

SEQ ID NO: 36596 - protein, 221 aa, unidentified
  source 1..221: note = Bacteroidia bacterium
  REGION 1..221: note = tr|A0A1Q3QJE2|A0A1Q3QJE2_9BACT 7-cyano-7-deazaguanine synthase OS=Bacteroidia bacterium 43-41 OX=1895720 GN=queC PE=3 SV=1
MTDYTNEDALVLFSGGQDSTTCLFWAKQTFRNVEALCFSYGQRHSVEIEAARNIAGIAGVPFQLLDASVISHLSPNSLTDSSITMDEEQPAGSYPNTFVPGRNMLFITFAVAIAYAKKIRHLITGVSEADYSGYPDCRDTFIHSLNATINLAMDKHFVIHTPLMHRNKAKVWELADELGVFDIVKNETLTCYNGIKAEGCGHCPACKLRNRGLREYLAERK

SEQ ID NO: 36597 - protein, 225 aa, unidentified
  source 1..225: note = Bacteroidia bacterium
  REGION 1..225: note = tr|A0A1M3ETS5|A0A1M3ETS5_9BACT 7-cyano-7-deazaguanine synthase OS=Bacteroidia bacterium 44-10 OX=1895721 GN=queC PE=3 SV=1
MMKDYKEQDALVLFSGGQDSTTCLYWAKQQFRSVYALCFTYGQRHSQEVENARRIAEMAGTPFQILDASIISRLAPNSLTNFSIEMDEEQPAGSYPNTFVPGRNLLFLTFAATIAYAKGIKHLVTGVSEADYSGYPDCRDTFIHSANATLNLAMDKQFVIHTPLMWRNKKEVWRLADELGVFNIVKNETLTCYNGILAEGCGHCPACKLRNKGLQDYLAERENNR

SEQ ID NO: 36598 - protein, 231 aa, unidentified
  source 1..231: note = Baia soyae
  REGION 1..231: note = tr|A0A4R2RUC8|A0A4R2RUC8_9BACL 7-cyano-7-deazaguanine synthase OS=Baia soyae OX=1544746; GN = queC PE=3 SV=1
MKKAVVVLSGGLDSATCVGIAKKEGWDIYPITFLYGQRHQHEVEKARLIAQHYGISDHKIVDVQFLGDIGGSSLTNHSIDVPTSGLTDDIPNTYVPGRNLIFLSLATAYAEVIGAEAIFTGVNALDYSGYPDCRPEFIQSMNETILLATKTGVTDNKLSIQTPIIHKTKAEIVEMGMKLGVPYHLTTSCYQGMEKACGECDSCLLRIEGFKKNQASDPIEYQIPIDWRGSL

SEQ ID NO: 36599 - protein, 231 aa, unidentified
  source 1..231: note = Baia soyae
  REGION 1..231: note = tr|A0A4R2RYX0|A0A4R2RYX0_9BACL 7-cyano-7-deazaguanine synthase OS=Baia soyae OX=1544746; GN = queC PE=3 SV=1
MKKKAVVVLSGGLDSTTCMGIAEHRGYELYPITFFYNQLHQREVEQAKCVAAHYGVSQSHKIVDLSYLGQLGGSALTDSTIQVPTTGVNEDEIPATYVPARNLIFLSMATAYAEVISAKKIFVGVSAVDYSGYPDCRPEFIQSMSETINLATKMGVTSGSEDRLSIEAPLIHLNKGETVKWGLELEVPYHLTTSCYQGSEEACGVCDSCLLRLKGFTENDATDPIPYAQKS

SEQ ID NO: 36600 - protein, 235 aa, Balnearium lithotrophicum
  REGION 1..235: note = tr|A0A521B7M4|A0A521B7M4_9BACT 7-cyano-7-deazaguanine synthase OS=Balnearium lithotrophicum OX=223788 GN=queC PE=3 SV=1
MDSAVVIFSGGLDSTTALYWAKRKFRRVYAITFYYGQRHSIEVEMAKKTAERAKVDEHLLFEVDLSKFGGSALTDKNLEVPETKSVEEIEERGIPITYVPFRNGVFISIAASYAESRGTTNIVGGWNIVDYSGYPDCRPEFLSAMEEALNRGTKLGSEGKDWKIHAPLIKLTKGEIIKLGLSLGADYSYSISCYRGEEVPCMRCDSCILRAKGWAEVGEEDHLIKRLKEEGKILE

SEQ ID NO: 36601 - protein, 200 aa, Balneola sp.
  REGION 1..200: note = tr|A0A3M8G2K3|A0A3M8G2K3_9BACT 7-cyano-7-deazaguanine synthase OS=Balneola sp. OX=2024824; GN = ED557_06255 PE=3 SV=1
MKDKSILLLSSGLESTVLAYTLKPKYALTIDYGQICAESEIKASSKICEQFDIQHFIYTCNLKSLGFGELFGEKKSSLSGLLEWTPYRNQFLLTIASMYAIKVGVEKIIIGTVKDDESYSDGRSLFFEQFNALLKCQEGGIQVMTPGINLSSFEMIKSSGISINILRWGFSCTKHKYACGICRSCLKKQHILEKLETEQY

SEQ ID NO: 36602 - protein, 377 aa, Balneola sp.
  REGION 1..377: note = tr|A0A3F3HZ84|A0A3F3HZ84_9BACT ExsB family protein; OS = Balneola sp. OX=2024824 GN=CL671_02260 PE=4 SV=1
MKNTREYQICSRCIMDTTDPDIRFDSDGICNHCYRYDELLPQRVFEGKIAKQKLKDLVANIKSNGSKNDYDCLIGVSGGVDSTYVAYLTKKLGLKPLAVHFDNGWNSELAVNNIRKMLDRLDIDLYTHVIDWDSFKNLQLSFLKASTPDGEVPTDHAINALLFQIADKQNIKFIINGMNFATESMSVPSWAYGHSDWKYIKSVHKQFLNTPLPDYPKFNLFDLFRYSVLKGIKVVSILNYVEYNKDEVMGLISNELDWVYYGGKHYESVYTRFYQGYILPEKFNIDKRRGHLSDLIRSGQLKRESALIEIQKEGYEADLLAQDKQFVFKKLGISEVEFEEIMDLDVKSFKDYPNNFKKIGNIKKLVNKLRSKGLYSK

SEQ ID NO: 36603 - protein, 217 aa, Barnesiella intestinihominis
  REGION 1..217: note = tr|K0XIW2|K0XIW2_9BACT 7-cyano-7-deazaguanine synthase OS=Barnesiella intestinihominis YIT 11860; OX = 742726 GN=queC PE=3 SV=1
MKDSLIVVSGGMDSITLLYEYADRIALAVSFDYGANHNHKEIPFARIHCERLKIKHIVIPLAFMKEYFRSSLLDGSDSVPEGHYADENMKSTVVPFRNGIMLSIACGIAESNGLKQVLIANHGGDHAIYPDCRSEFIQAMDKAMRSGTYENIGIFAPYTDISKTEIASRGKKLNLNYAETWSCYKGGEKHCGKCGTCVERKEALRDAGIEDQTEYED

SEQ ID NO: 36604 - protein, 217 aa, Barnesiella sp.
  REGION 1..217: note = tr|A0A1Y3WNZ5|A0A1Y3WNZ5_9BACT 7-cyano-7-deazaguanine synthase OS=Barnesiella sp. An55; OX = 1965646 GN=queC PE=3 SV=1
MKDSLIVVSGGMDSVTLLHEYAARIALAVSFDYGANHNVKEIPFARLHCERLGIKHIVIPLAFMKEYFKSSLLSGGEAIPEGHYADENMKSTVVPFRNGIMLSIACGIAESNGLKQVLIANHGGDHAIYPDCRSSFIQAMNEAMREGTYEHIGILAPYTHITKSDIARRGKQLQVNYAETWSCYKGGTKHCGKCGTCVERKEALRDAGIDDPTEYED

SEQ ID NO: 36605 - protein, 217 aa, Barnesiella sp.
  REGION 1..217: note = tr|A0A1Y4H2C2|A0A1Y4H2C2_9BACT 7-cyano-7-deazaguanine synthase OS=Barnesiella sp. An22; OX = 1965590 GN=queC PE=3 SV=1
MKDSLIVVSGGMDSITLLHEYADRIALGVSFDYGANHNAREIPFARLHCERLGIKHIVIPLAFMKEYFKSSLLSGGEAIPEGHYADENMKSTVVPFRNGIMLSIACGIAESNGLKRVLIANHGGDHAIYPDCRSSFIRVMNEAMREGTYEHIEILAPYTEITKTDIARRGKQLHVDYAATWSCYKGGEKHCGKCGTCVERKEALRDAGIDDPTEYEE

SEQ ID NO: 36606 - protein, 217 aa, Barnesiella viscericola
  REGION 1..217: note = tr|W0EL68|W0EL68_9BACT 7-cyano-7-deazaguanine synthase OS=Barnesiella viscericola DSM 18177 OX=880074; GN = queC PE=3 SV=1
MKDSLIVVSGGMDSITLLYEYADRIALGVSFDYGANHNAREIPFAHLHCERLGIRHIVIPLAFMKEYFKSSLLSGGEAIPEGHYADENMKSTVVPFRNGIMLSIACGIAESNGLKRVLIANHGGDHAIYPDCRSSFIEAMNQAMREGTYEHIEILAPYTHITKSDIARRGKRLQVNYAETWSCYKGGEKHCGKCGTCVERKEALHDAQIDDPTEYED

SEQ ID NO: 36607 - protein, 235 aa, unidentified
  source 1..235: note = Bartonella apis
  REGION 1..235: note = tr|A0A1U9MHV2|A0A1U9MHV2_9RHIZ 7-cyano-7-deazaguanine synthase OS=Bartonella apis; OX = 1686310 GN=queC PE=3 SV=1
MKTYLICSGGLDSVTLAYRLAHEKSLQGIISFDYGQRHKKELFFAKECARALGADYYPIDISAIGKNLSGSSLTDNIDVPDGYYAEDNMKSTVVPNRNAVFLSIAFAIASAKHGDSVAIAVHGGDHFIYADCRENFINAFNAMEQLSLEGQCQLFAPYVSCDKSDIVKDGVKYNVPFTKTWSCYKGGEHHCGRCGTCVERREAFALAGVDDPTIYEDNEFWIEAVKRNKNSKLLK

SEQ ID NO: 36608 - protein, 234 aa, unidentified
  source 1..234: note = Bartonella apis
  REGION 1..234: note = tr|A0A1U9MB26|A0A1U9MB26_9RHIZ 7-cyano-7-deazaguanine synthase OS=Bartonella apis; OX = 1686310 GN=queC PE=3 SV=1
MKTYLICSGGLDSVTLAYRLAHEQSLKGVISFDYGQRHKKELVFAQKCASRLGADYYPIDISAIGKNLSGSSLTDDIAVPDGYYAEENMKSTVVPNRNAVFLSIAFAIAAAKHGDSVAIAVHGGDHFIYADCRADFIDAFNKMEQLSLEGQCQLLTPYVDQDKSEIVKDGVKYNVPFADTWSCYKGGEHHCGRCGTCVERREAFALAGVDDPTIYEDNSFWIEAVNRNKAKKLR

SEQ ID NO: 36609 - protein, 229 aa, unidentified
  source 1..229: note = Basilea psittacipulmonis
  REGION 1..229: note = tr|A0A077DEQ1|A0A077DEQ1_9BURK 7-cyano-7-deazaguanine synthase OS=Basilea psittacipulmonis DSM 24701 OX=1072685 GN=queC PE=3 SV=1
MKAIVIFSGGQDSTTCLIQALSQYGKENVQAITFYYGQRHAIELEKARWIAQDLGVKQVEMDLSLIKGITHNALMDENTRIEAPKDSLPNTFVDGRNALFLLYAAIYAKSQGIQHIIAGVCETDFSGYPDCRDVFIKSMNVTLNLAMDYSFVIDTPLMWLTKAQTWALADELGYLEYVQKHTHTCYEGVEGGCGKCPSCVLRDRGLQEYLNNKRSSLCLMTERTDNVTH

SEQ ID NO: 36610 - protein, 224 aa, unidentified
  source 1..224: note = Bathymodiolus azoricus
  REGION 1..224: note = tr|A0A1H6LMP5|A0A1H6LMP5_9GAMM 7-cyano-7-deazaguanine synthase OS=Bathymodiolus azoricus thioautotrophic gill symbiont OX=235205 GN=queC PE=3 SV=1
MSKAVILLSGGLDSTTTLAIAKSQGLDCYALSFDYGQKQKSELNSAKQVAELFSAIEHRTMSISLNDIGGSALTDSAIEVPKFKPSDGIPVTYVPARNTIFLSYAMAWAEVLDCQDIFIGVNALDYSGYPDCRKEYIKSFEIMANLATKQGVEGKKLTIHTPLIDLHKAQIIQKGLSLGVDYSLTTTCYQADNNGDACGFCDACEYRKLGFKKVGIPDPTRYQR

SEQ ID NO: 36611 - protein, 224 aa, unidentified
  source 1..224: note = Bathymodiolus brooksi
  REGION 1..224: note = tr|A0A482YJP3|A0A482YJP3_9BACT 7-cyano-7-deazaguanine synthase OS=Bathymodiolus brooksi thiotrophic gill symbiont OX=1052209 GN=queC PE=3 SV=1
MSKAVILLSGGLDSTTTLAIAKSQGFDCYALSFDYGQKQKSELNSAKQISELFSTIEHRIMTISLNDIGGSALTDSAIDVPKFKKSNGIPITYVPARNTIFLSYAMAWAEVLECQDVFIGVNALDYSGYPDCRAEYISAFETMANLATKQGVEGQKLTIHTPLIDLHKAQIIQKGLALGVDYAMTTTCYQADENGDACGFCDACEYRKLGFKAAGIIDPTHYQK

SEQ ID NO: 36612 - protein, 228 aa, unidentified
  source 1..228: note = Bathymodiolus heckerae
  REGION 1..228: note = tr|A0A482YQF7|A0A482YQF7_9BACT 7-cyano-7-deazaguanine synthase OS=Bathymodiolus heckerae thiotrophic gill symbiont OX=1052212 GN=queC PE=3 SV=1
MSSANKKAVILLSGGLDSTTTLAIAQSQGFECFALSFDYGQKQKSELISATLAAKIFNTTKHRVMKISLSDIGGSALTDNNIDVPDFVESDEIPITYVPARNTIFLSYALAWAEVLDCQDIFIGVNALDYSGYPDCRQEYIDAFETMANLATKQSFEGQKISIHTPLIKLNKAQIIQLGLDLGVDYKNTTSCYQANDQGEACGVCDACEYRKIGFIKAGIDDPTRYQN

SEQ ID NO: 36613 - protein, 224 aa, unidentified
  source 1..224: note = Bathymodiolus heckerae
  REGION 1..224: note = tr|A0A482ZVW3|A0A482ZVW3_9BACT 7-cyano-7-deazaguanine synthase OS=Bathymodiolus heckerae thiotrophic gill symbiont OX=1052212 GN=queC PE=3 SV=1
MSRAVILLSGGLDSTTTLAIAKSQGFDCYALSFDYGQKQKSELKAATQIAKLFSVVKHKTINICLNDIGGSALTDDAIKVPKFKPSNEIPVTYVPARNTIFLSYAMAWAEVLDCQAIFIGVNALDYSGYPDCRASYINAFEVMANLATKQGVEGKKLTIHTPLIDLHKAQIIQKGLSLGVDYALTTTCYQADENGAACGFCDACEYRKLGFKEAEITDPTYYQK

SEQ ID NO: 36614 - protein, 223 aa, unidentified
  source 1..223: note = Bathymodiolus platifrons
  REGION 1..223: note = tr|A0A1Z5HA47|A0A1Z5HA47_9GAMM 7-cyano-7-deazaguanine synthase OS=Bathymodiolus platifrons methanotrophic gill symbiont OX=113268 GN=queC; PE = 3 SV=1
MTKKAIILLSGGLDSVTVLAMAKQQGYKVYALSFDYGQKHNAELVSARKIALDYQVAEHKIINLGLGSIGGSALTDEALDVPVTPQEGIPITYVPARNTVFLSFALGWAEVLDAHDIFIGVNAVDYSGYPDCRPQFIEAFQTLANIATKAGVEGHEIKIHAPLINMSKGKIIQRGIKLQVNYAQTVSCYAASPKGFACGVCDACRLRKIGFDEAGVPDPTHYL

SEQ ID NO: 36615 - protein, 224 aa, unidentified
  source 1..224: note = Bathymodiolus thermophilus
  REGION 1..224: note = tr|A0A1J5UM98|A0A1J5UM98_9GAMM 7-cyano-7-deazaguanine synthase OS=Bathymodiolus thermophilus thioautotrophic gill symbiont OX=2360 GN=queC; PE = 3 SV=1
MSKAVVLLSGGLDSTTTLAIAKSQGFDCYALSFDYGQKQKSELNAAKQVSELFSATEHRIMTISLSDIGGSALTDSAIDVPKFKKSNDIPITYVPARNTIFLSYAMAWAEVLECQDIFIGVNALDYSGYPDCRAEYISAFETMANLATKQGVEGQKLTIHTPLINLHKAQIIQKGLSLGVDYAMTTTCYQADENGDACGFCDACEYRKLGFKEANIVDPTRYQK

SEQ ID NO: 36616 - protein, 238 aa, unidentified
  source 1..238: note = Baumannia cicadellinicola
  REGION 1..238: note = sp|Q1LTK2|QUEC_BAUCH 7-cyano-7-deazaguanine synthase; OS = Baumannia cicadellinicola subsp. Homalodisca coagulata; OX = 374463 GN=queC PE=3 SV=1
MPHNQQIKKTVVVFSGGQDSTTCLIQALTQYDQVYCITFDYGQRHRAEICIARRLTITLGAYDHQIIDTSALNVLAASSLTRENIIVPLAEKNHMNSSLSTFVPGRNIVFLTLAAIYAYQVKAEVIITGVCETDFSGYPDCREKFIQALNKAVNLGMAYNIHFISPLMWLNKAETWALADYYQKLDLVCNETLTCYNGIQGKGCGFCTSCSLRARGLETYKQQPKLTMSSLKAKTGLP

SEQ ID NO: 36617 - protein, 231 aa, Bdellovibrio bacteriovorus
  REGION 1..231: note = sp|Q6MKZ5|QUEC_BDEBA 7-cyano-7-deazaguanine synthase; OS = Bdellovibrio bacteriovorus (strain ATCC 15356 / DSM 50701 / NCIB 9529 / HD100) OX=264462 GN=queC PE=3 SV=1
MKKNKKVVVLLSAGLDSTVNAYEAIKHHHEIVLALTFNYGQRAAKKELEASANIAKHLGIPHKVVELPWFKDFNKSSLLVEDQAVPTGSAVEIDNQQKSEETAKSVWVPNRNGIFLNIAAAYAEALGADAVIPGFNAEEAATFPDNSREFLEQATKSLWYSTSNHVTVGCYTAHLKKPDIVRLGQGLKVPWELIWPCYFSGDKWCGQCESCLRSKRAFASANIDVKHLFKE

SEQ ID NO: 36618 - protein, 233 aa, Bdellovibrio bacteriovorus
  REGION 1..233: note = tr|A0A150WJG3|A0A150WJG3_BDEBC 7-cyano-7-deazaguanine synthase OS=Bdellovibrio bacteriovorus OX=959 GN=queC PE=3 SV=1
MSSRSKKVVVLLSAGLDSTVNIYEAIKHRHEVVLALTFNYGQRAAVKEIECSAKIAKHLNVPHKVIDLPWFKDFNRSSLIVESEKVPTGKDVEIDNLEKSQDTKKSVWVPNRNGIFLNIAAAFAESLNATSVIPGFNAEEAVTFPDNTKEFMDKATQSLHYSTSNHVTVGCYTIHMKKPDMVRLGQGLKIPWEMSWPCYFTGDKWCGECESCQRAKRAFASANVDVKHLFKEA

SEQ ID NO: 36619 - protein, 197 aa, unidentified
  source 1..197: note = Bdellovibrio exovorus
  REGION 1..197: note = tr|M4V8I6|M4V8I6_9PROT 7-cyano-7-deazaguanine synthase OS=Bdellovibrio exovorus JSS OX=1184267; GN = A11Q_101 PE=3 SV=1
MRTAVVLSGGIDSSAIAWWKKPDVAIFINYGQTPADAEESCARNVADRIGAEFSKISIDCKSIGSGSLASRDALSIAPAKEWWPFRNQLLITMAAARAVELGVKKLYFGSVSTDKFHADGRPLFFQQISSLLQSQEGELIVDTPAIELRTEELVKISEIPKDLLLITHSCHISNFPCGVCEGCIKHLAVLRILGIEY

SEQ ID NO: 36620 - protein, 228 aa, unidentified
  source 1..228: note = Bdellovibrio exovorus
  REGION 1..228: note = tr|M4VR36|M4VR36_9PROT 7-cyano-7-deazaguanine synthase OS=Bdellovibrio exovorus JSS OX=1184267 GN=queC; PE = 3 SV=1
MRKSSVVLLSAGLDSTVNFYAAMNETDVKLALTFDYGQKAAPKEIERSKMIANLLGVPHKIVELPWLKDLGASALTQDRMAIPAGKSALENPSMSVQTAKAVWVPNRNGVFLNIAASFAESLHAQLIVPGFNREEATTFPDNSLDFIRSARKAFSYSTANHVDVQCYTIAMAKNEIVDLGKKMRVPFESIWPCYQARDRWCGECESCERSKRAFKMAGLDFNYLYERY

SEQ ID NO: 36621 - protein, 231 aa, Bdellovibrio sp.
  REGION 1..231: note = tr|A0A514XHL9|A0A514XHL9_9PROT 7-cyano-7-deazaguanine synthase OS=Bdellovibrio sp. ZAP7; OX = 2231053 GN=queC PE=3 SV=1
MKNKKKVVVLLSSGLDSTVNIFEAIKHHHEVVLALTFNYGQKAAKKEIEQSAKIAKFLGVPHKVLDVTWFKEFNKSSLLVDDQKVPTGNDVEIDNMEKSAESAKSVWVPNRNGIFLNIAAAYAEALGADSVIPGFNAEEAATFPDNSIDYLKAATHAFSFSTSNKVTVGCYTAHLNKPAIVLLGQGLDVPWELTWPCYFAGDEWCGQCESCKRAKRAFASANVDVKNLFKE

SEQ ID NO: 36622 - protein, 227 aa, Bdellovibrio sp.
  REGION 1..227: note = tr|A0A2H0WF31|A0A2H0WF31_9PROT 7-cyano-7-deazaguanine synthase OS=Bdellovibrio sp. CG10_big_fil_rev_8_21_14_0_10_47_8 OX=1975526 GN=queC PE=3; SV = 1
MKKSVVLLSGGMDSTVNLYQALKDSDVVLALTFNYGQQSAPKEIQVTRKITEKLKVPHRVLDLPFFNNWGQSSLLDRTKEVPRGKQVSIDDMDVSLKTAKSVWVPNRNGVFLNIAAGFAESLGAQVVIPGFNKEEAVTFPDNSQSFMKVTTEALRYSTANAVQVHCYTVEMMKSEIVALGQSLRVDWSLIWPCYLDGEHWCGQCESCQRSKRAFAAQNVAVGGYFIN

SEQ ID NO: 36623 - protein, 217 aa, unidentified
  source 1..217: note = Bdellovibrionaceae bacterium
  REGION 1..217: note = tr|A0A2D5ZYC5|A0A2D5ZYC5_9PROT 7-cyano-7-deazaguanine synthase OS=Bdellovibrionaceae bacterium OX=2026715 GN=queC PE=3 SV=1
MKSVVLLSSGLDSSVCFAEEVHAGRAVLALTFDYGQRAAERELLMAKAQADKAGVPHRVVKLDFFSQFSANALTSTSIDVPTSQVDIDSMEASVESAKSVWVPNRNGIFLSIAAGFAESCGAGLVVTGFNVEEAATFPDNTKDYMEKFTSSLSFSTSNKVRISSPTVDMDKTQIYKRGIELGVDFSVVWPCYFSGDQACGQCESCQRFERAKKKATV

SEQ ID NO: 36624 - protein, 215 aa, unidentified
  source 1..215: note = Bdellovibrionaceae bacterium
  REGION 1..215: note = tr|A0A2D6JMV5|A0A2D6JMV5_9PROT 7-cyano-7-deazaguanine synthase OS=Bdellovibrionaceae bacterium OX=2026715 GN=queC PE=3 SV=1
MSKAVVLLSSGLDSTVNLYEAHQDVGVALALFINYGQRAALREEQMAKASCEHLGIEFRSLDLKFIADFGGSSLTDSQKKLATNVEIDDLEASKISAKNVWVPNRNGILLNVAAGFAEALGADFVIPGFNKEEAATFPDNSQDFLDAMSESLGFSTANQVKAKCYTTGLLKPQIYRRALDLNVKTQFIWPCYESGEEHCKQCESCQRFYRAKAEA

SEQ ID NO: 36625 - protein, 232 aa, unidentified
  source 1..232: note = Bdellovibrionales bacterium
  REGION 1..232: note = tr|A0A1F3SMH3|A0A1F3SMH3_9PROT 7-cyano-7-deazaguanine synthase OS=Bdellovibrionales bacterium GWA2_49_15 OX=1797384 GN=queC PE=3 SV=1
MKKSSDLAVALVSGGMDSLVTAAVACDSHTHVAFLHLNYGQNTERKELEAFHNIADFYHIPHNFRKVIDVTFLKQIGGSSLTDTTIKVKDFKGESSEIPDSYVPFRNTHLCAMAVSWSEVISAKKIYIGAVYEDSSGYPDCRPSYYAALNKLIKEGTKKGDIEVLTPVINLKKKEIVLKAIELKAPLHLSWSCYSNNDMACGICDSCALRLRGFQQAGIPDPLPYKVRPSYP

SEQ ID NO: 36626 - protein, 219 aa, unidentified
  source 1..219: note = Bdellovibrionales bacterium
  REGION 1..219: note = tr|A0A1F3SWH3|A0A1F3SWH3_9PROT 7-cyano-7-deazaguanine synthase OS=Bdellovibrionales bacterium RBG_16_40_8 OX=1797388 GN=queC PE=3 SV=1
MEEVRSAVVLLSSGLDSTVNLYCARRELNISKAITFNYGQRAARREIEHSQKICKVLNIEHNIIEILWLGEWTSTSLVNTKVNVPQGEEIKIDDYQKSLKTAKAVWVPNRNGIFLNIAAALAESLEADYVIPGFNKEEAVTFPDNTQEYLDALENCFSFSTASKVKTLCFTADKNKSEIVQLGRKLQVPFDLMWPCYLGEEKICQKCESCKRFLGALEA

SEQ ID NO: 36627 - protein, 233 aa, Beggiatoa alba
  REGION 1..233: note = tr|I3CGT0|I3CGT0_9GAMM 7-cyano-7-deazaguanine synthase OS=Beggiatoa alba B18LD OX=395493 GN=queC PE=3; SV = 1
MGQMAEEKAVVLVSGGLDSATTLAIAKSQGFECFALSFDYGQRHRVELNAAQTIADRLGASLHKTICLNMDSIGGSALTDAQIAVPTTGVGDAIPVTYVPARNTVFLAIALGWAEVLQAHHIFIGVNAVDYSGYPDCRPEFITAFEQLANLATKAGVEGQRMTIHTPLIDLSKAQIIQTGLALGVDYGVTISCYQPSPTGEACGVCDACRLRAEGFRQLGVVDPTQYQANAPI

SEQ ID NO: 36628 - protein, 228 aa, unidentified
  source 1..228: note = Beggiatoa leptomitoformis
  REGION 1..228: note = tr|A0A2N9YJ49|A0A2N9YJ49_9GAMM 7-cyano-7-deazaguanine synthase OS=Beggiatoa leptomitoformis OX=288004 GN=queC PE=3 SV=1
MGYATEKAVVLVSGGLDSATTLAIAKSQGFQCYALSFDYGQRHRVELTAAQEIAQCLGASAHKTICLNMDSIGGSALTDVHIAVPITGVTEQIPVTYVPARNTVFLSLALGWAEVLQAHHIFIGVNAVDYSGYPDCRPEFIAAFENLANLATKAGVEGQRMTIHTPLIDLTKAQIIQTGLALGVDYGRTISCYQPAAAGEACGVCDACRLRAEGFKQAGVSDPTLYQT

SEQ ID NO: 36629 - protein, 225 aa, Beggiatoa sp.
  REGION 1..225: note = tr|A7C4Q4|A7C4Q4_9GAMM 7-cyano-7-deazaguanine synthase OS=Beggiatoa sp. PS OX=422289 GN=queC PE=3 SV=1
MKKAVILVSGGLDSTTTLAIAKSQGYACYALSFDYGQRHRIELQAARQVAEHLGVVEHKFIHINLDSIGGSALTDTQINVPTQGLSDQIPITYVPARNTVFLALALGWAEVLSAYHIFIGVNAVDYSGYPDCRPKFVEAFEQLANFATKAGVEGHSFKIHTPLIHLTKAQIIQEGLRLGVDYNLTISCYQPNPNGYACGMCDACRLRADGFSRLDVPDPTQYHSI

SEQ ID NO: 36630 - protein, 398 aa, Beggiatoa sp.
  REGION 1..398: note = tr|A0A1W9XA47|A0A1W9XA47_9GAMM Uncharacterized protein OS=Beggiatoa sp. 4572_84 OX=1972449 GN=B6247_00640; PE = 4 SV=1
MKMNYYLYRYLWPIYRVLVKHKLSNRCTICGLNEKCVTISDSVCEICRKEHTSKLATQAAELSKNPAAEKELDDLLTEAQGKGRGLYDAMFLFSGGKDSTYILTRLKTRYKQLRLVALTVDNGFRSPIGKQNAERICEHLDVDHLEIRPYQIFKKLYKYGFENFSHHGFVCTDFLEGELFQDIGRNLAAQLEIPLLVLGYTPEQVEETFLPKEFDEYHLYGSEDFKFKENQKFTRAKFLGVNLTDIFTPEEMNYWWDASKWSVERIPTLILPFQAWGYHKTEVVNEVVSLLHHILDEKSLNPMLTNDLYGGLGLFLDYKIFGYSPMFEQEFARYVRTGKEDVKQNRNLWESAEYLFLKPEKSVLDSPDMQFCLTKLGLTKPALDNIIKKSKAILEGKH

SEQ ID NO: 36631 - protein, 241 aa, Beijerinckia indica
  REGION 1..241: note = tr|B2ICM5|B2ICM5_BEII9 7-cyano-7-deazaguanine synthase OS=Beijerinckia indica subsp. indica (strain ATCC 9039 / DSM 1715 / NCIB 8712) OX=395963 GN=queC PE=3 SV=1
MPEHSSDTGNNKALVLFSGGQDSTTCLAWALDRFAFVETIGFSYGQRHVIELTQRQVVRASIARQFPAWAERLGDDHLVTIEALAEISQTALTRDMAIEMDAQGLPNTFVPGRNLLFLTFAGALGYRRGLKHIVGGMCETDFSGYPDCRDDTVKAMQVALNLGMDRRFVLETPLMWLDKAETWRLAEALGGQALVDLIIEETHTCYLGERGALHAWGHGCGQCPACVLRAKGYAAYRDGVA

SEQ ID NO: 36632 - protein, 231 aa, Beijerinckia sp.
  REGION 1..231: note = tr|A0A1H4MI53|A0A1H4MI53_9RHIZ 7-cyano-7-deazaguanine synthase OS=Beijerinckia sp. 28-YEA-48 OX=1882748 GN=queC PE=3 SV=1
MNTAALVLFSGGQDSATCLAWALERFDRVETVGFDYGQRHRIELDCRGRIRDGLTAMNPRWATRLGNDHTIDLNVLGQISDTALTRDVTIEMTDAGLPNTFVPGRNLVFLTFAATLAYRRGLKHIVGGMCETDYSGYPDCRDDTIKALQVALNLGMDKRFVLETPLMWIDKAETWRLAGRLGGQPLIDLIVEDSHTCYLGERGMRHPWGFGCGTCPACELRADGYRRFQAI

SEQ ID NO: 36633 - protein, 235 aa, unidentified
  source 1..235: note = Beijerinckiaceae bacterium
  REGION 1..235: note = tr|A0A4P7F503|A0A4P7F503_9RHIZ 7-cyano-7-deazaguanine synthase OS=Beijerinckiaceae bacterium OX=1978229 GN=queC PE=3 SV=1
MTETATALVLFSGGQDSTTCLALALDRYARIETVGFDYNQRHRVELDQRNLIRESLKKSFPAWGERLGEDHLISIGALAEISSTAMTEDIEIIVDESGLPNTFVPGRNLMFLTLAGAIAYRRGLKHIIGGMCETDFSGYPDCRDDTVKAMQLALNLGMDSRFVVETPLMWLDKAATWHLAETLGGARLVDLIIEQTHSCYLGERGLRHEWGYGCGTCPACRLRAEGWRKYAASRS

SEQ ID NO: 36634 - protein, 231 aa, unidentified
  source 1..231: note = Beijerinckiaceae bacterium
  REGION 1..231: note = tr|A0A522GPJ9|A0A522GPJ9_9RHIZ 7-cyano-7-deazaguanine synthase OS=Beijerinckiaceae bacterium OX=1978229 GN=queC PE=3 SV=1
MTALVLFSGGQDSTTCLAWALARFERVETIGFDYRQRHRVELDQRSIIRSEIVKLDPQWAARLGDDHLLDLGILGEISATAMTRDIAIIADEKGLPNTFVPGRNLMFFTLAAAVAFRRGLRHLIGGMCETDYSGYPDCRDDTLKAMQVALNLGMEKNFVVETPLMWLDKGDTWRLAETLGGKALVELVIEATHSCYLGERSRKWDWGYGCGACPACQLRAGGWKKYRAEKV

SEQ ID NO: 36635 - protein, 236 aa, Belnapia rosea
  REGION 1..236: note = tr|A0A1G6KIR6|A0A1G6KIR6_9PROT 7-cyano-7-deazaguanine synthase OS=Belnapia rosea; OX = 938405 GN=queC PE=3 SV=1
MRDDAALVLFSGGQDSATCLAWALARFAHVETVGFDYGQRHRVELEMRDVFRTRLMRENAGWAPKLGEDHMLALDALRSVSDTALTRETEIAMQADGLPNTFVPGRNLLFLTFAAALAYRRGLKHLVAGMCETDYSGYPDCRDDTLKALQVAINLGMERRFVLHTPLMWRDKAATWALAERLGGAPLVEAVREDTHSCYLGDRSRRHDWGYGCGTCPACDLRRGGWERWRASLTAD

SEQ ID NO: 36636 - protein, 220 aa, Bergeriella denitrificans
  REGION 1..220: note = tr|A0A378UHD3|A0A378UHD3_BERDE 7-cyano-7-deazaguanine synthase OS=Bergeriella denitrificans OX=494 GN=queC PE=3 SV=1
MSSEQALVIFSGGQDSTTCLLQAIENYGRSNVQAITFQYGQRHTLELECARRIAQDLGITQTVLDLSLMQHITRNALMSKDAEIQTAANGVPNTFVDGRNALFLLYAAIYAKGQGIKHIIAGVCETDFSGYPDCRDVFVKSMNVTLNLAMDYDFQIHTPLMYLTKAQTWKLADDLGRLNYVREHTHTCYNGVAGGCGECPSCLLRERGLAEYLQQKAQTS

SEQ ID NO: 36637 - protein, 220 aa, Bermanella marisrubri
  REGION 1..220: note = tr|Q1N1N4|Q1N1N4_9GAMM 7-cyano-7-deazaguanine synthase OS=Bermanella marisrubri OX=207949 GN=queC PE=3; SV = 1
MTQEKAVVIYSGGMDSFTLLNKVVKEGYDVYALTFNYGQKHVKEVEVAKTVCQQLNVPHKILDISPINELMQSSSLVGSEEVPEGHYEAENMKSTVVPNRNMILLSLAIGYAVDIKASKVYYGAHSGDHAIYPDCRPEFVHAMNAVAGIANYEHVSIETPYLNSSKGEILKDGLSMGLSYEHTWTCYNGREKACGKCGACVERLEAFEENQATDPLAYEI

SEQ ID NO: 36638 - protein, 219 aa, Bermanella sp.
  REGION 1..219: note = tr|A0A1Y5D2S0|A0A1Y5D2S0_9GAMM 7-cyano-7-deazaguanine synthase OS=Bermanella sp. 47_1433_sub80_T6 OX=1856278 GN=queC PE=3 SV=1
MAKQKAVVIFSGGMDSFTLLNKVIKEGFEVYALTFDYGQKQVKEVHIAKTVCEGLSVPHKILDISAINQLMQSSSLIGSEDVPEGHYESEQMKSTVVPNRNMILLSLAIAYAVDIKAGKVYYGAHSGDHAIYPDCRPEFVHKMNEVAGIANYEHVSIETPYLNATKGEILEDGIKMGLSYENTWTCYNGREKACGKCGACVERLEAFAHNNATDPVEYE

SEQ ID NO: 36639 - protein, 219 aa, Bermanella sp.
  REGION 1..219: note = tr|A0A2D4S152|A0A2D4S152_9GAMM 7-cyano-7-deazaguanine synthase OS=Bermanella sp.; OX = 2024825 GN=queC PE=3 SV=1
MSKPKAVVIYSGGMDSFTLLNRVIKDGYDVYALTFNYGQKHVKEVEVASTVCQQLNVPHKILDISPINQLMQSSSLVGSIDVPEGHYEADNMKSTMVPNRNMILLSLAIGYAVDIEASKVYYGAHAGDHAIYPDCRPEFVHAMNDVAQIANYEPITIETPYLNSSKGEILKDGLGMNLTYEHTWTCYNGREKACGKCGACVERLEAFADNNATDPVEYE

SEQ ID NO: 36640 - protein, 227 aa, unidentified
  source 1..227: note = Unknown
  REGION 1..227: note = tr|B6BW82|B6BW82_9PROT 7-cyano-7-deazaguanine synthase OS=beta proteobacterium KB13 OX=314607 GN=queC; PE = 3 SV=1
MSKKAIVLLSGGLDSLTTLAIAQNDGFDCYALHVIYGQRHSSETKAARNIAKKYNLAEFREINVDMSWLKSSALTNHDMTIPEERSEGIPVTYVPARNTIMMSFAAAWAESLAISHLFLGVNAVDYSGYPDCRPEFIDAFKKMVNLGTKAAIEGTPFNIHTPLIGLTKDEIITKGCNLGVDYSMSISCYQADQNGNACGRCDSCYLRRQGFEKAGIKDPTPYQNVDN

SEQ ID NO: 36641 - protein, 246 aa, unidentified
  source 1..246: note = Unknown
  REGION 1..246: note = tr|A0A0N1LCG9|A0A0N1LCG9_9PROT 7-cyano-7-deazaguanine synthase OS=beta proteobacterium AAP99 OX=1523428 GN=queC PE=3 SV=1
MTTALVLFSGGQDSATCLAWALERFERVETVGFDYGQRHRVELEVRLRFLDALRARFPGWGRKLGEDHLIDMGVLGRISETSLTQDVAFRMNESGLPNTFVPGRNLLFFTFAAAVAYRRDLKVLVGGMCETDFSGYPDCRDDTLKALQVALNLGMDSRFAVETPLMWIDKAATWQMARDLGGAALVDLMIEHTHTCYRGDREHRHPWGYGCGECPACELRARGWAQHQTQLQAQLGSSGTLQAAAA

SEQ ID NO: 36642 - protein, 197 aa, unidentified
  source 1..197: note = Betaproteobacteria bacterium
  REGION 1..197: note = tr|A0A1F4E0Y5|A0A1F4E0Y5_9PROT 7-cyano-7-deazaguanine synthase OS=Betaproteobacteria bacterium RIFCSPLOWO2_12_FULL_67_28 OX=1797503; GN = A3F77_18655 PE=3 SV=1
MSLVNLVSGGLDSTLVGVLAKEEDIAAFPLFIDYGQRAATNEWGACRVVHKKLGLAAPTRMDLSGFGQVIRSGLTCDEKDLKDEAFTPGRNLMFLVMGAAYAHQVGADAVATGLLSERFSLFPDQRAEFVASAERAIVQALGRPFRVLTPLFEFSKADVVKLAAEKGISGTYSCHAGTELPCGRCVSCLEFIGATSV

SEQ ID NO: 36643 - protein, 236 aa, unidentified
  source 1..236: note = Betaproteobacteria bacterium
  REGION 1..236: note = tr|A0A3N5P696|A0A3N5P696_9PROT 7-cyano-7-deazaguanine synthase OS=Betaproteobacteria bacterium OX=1891241 GN=queC PE=3 SV=1
MASEALQQTRDLPAVVLLSGGLDSATVLAIAIREGYACHAISFRYGQRHAIELDRARVIARRLGAAEHIVVDIDLRQFGGSALTADIAVPKLRSAEEMSHGIPPTYVPARNTIFLSFALAWSETLGAADIFIGVNALDYSGYPDCRPEYIAAFERMANLGTKAGVEGRQRLRIHAPLIAMSKADIIRRGLALGVDYALTTSCYDPDASGAPCGACDSCLLRARGFAEAGVPDPLLA

SEQ ID NO: 36644 - protein, 233 aa, unidentified
  source 1..233: note = Bhargavaea beijingensis
  REGION 1..233: note = tr|A0A1G6Y7V2|A0A1G6Y7V2_9BACL 7-cyano-7-deazaguanine synthase OS=Bhargavaea beijingensis; OX = 426756 GN=queC PE=3 SV=1
MKQEKAVVVFSGGQDSTTCLFWALKNFAEVETVTFDYGQRHALEVECATDIAAELGVKHHVLDLSLIGQLAPSALTDKGIEVADGEDGGLPSTFVPGRNLLFFSFAGILANQIGAKHIVTGVSETDFSGYPDCRDAFVKSLNVTLNLAMDGPFVIHTPLMWLDKSQVWELSDRLGKLNYIRTKTLTCYNGIKADGCGECPACRLRRKGLETYVGKQSGNARPAGRPAEEVLQP

SEQ ID NO: 36645 - protein, 233 aa, Bhargavaea cecembensis
  REGION 1..233: note = tr|A0A163ETJ2|A0A163ETJ2_9BACL 7-cyano-7-deazaguanine synthase OS=Bhargavaea cecembensis; OX = 394098 GN=queC PE=3 SV=1
MKQEKAVVVFSGGQDSTTCLFWALEQFAEVEAVTFDYGQRHALEVECAKDIAEELGVKHHVLDMALIGQLAPSALTDTGIEVADGEDGSLPSTFVPGRNLLFFSFAGILARQIGAKHIVTGVSETDFSGYPDCRDAFIKSLNVTLNLAMDGQFVIHTPLMWLDKSQVWELSDTLGKLDYVRTKTLTCYNGIQADGCGECPACRLRRKGLETFLEKKDGTILSLSGSAEGVAQP

SEQ ID NO: 36646 - protein, 233 aa, Bhargavaea cecembensis
  REGION 1..233: note = tr|M7NF48|M7NF48_9BACL 7-cyano-7-deazaguanine synthase OS=Bhargavaea cecembensis DSE10 OX=1235279; GN = queC PE=3 SV=1
MKQEKAVVVFSGGQDSTTCLFWAMENFSEVEAVTFDYGQRHALEVECAKDIAEELGVKHHILDMSLIGQLAPNALTDTGIEVADGEDGGLPSTFVPGRNLLFFSFAGILARQIGAKHIVTGVSETDFSGYPDCRDAFVKSLNVTLNLAMDGQFVIHTPLMWLDKSQVWELSDQLGKLDYVRTKTLTCYNGIQADGCGECPACRLRRKGLETYVGKKGGTVLPDGGSAEEVALP

SEQ ID NO: 36647 - protein, 233 aa, unidentified
  source 1..233: note = Bhargavaea ginsengi
  REGION 1..233: note = tr|A0A1H6YR34|A0A1H6YR34_9BACL 7-cyano-7-deazaguanine synthase OS=Bhargavaea ginsengi; OX = 426757 GN=queC PE=3 SV=1
MKQEKAVVVFSGGQDSTTCLFWALEQFAEVEAVTFDYGQRHALEVECAKAIAEELGIKHHVLDMSLIGQLAPSALTDTGIEVADGEYGGLPSTFVPGRNLLFFSFAGILARQIGAKHIVTGVSETDFSGYPDCRDSFVKSLNVTLNLAVDGQFVIHTPLMWLDKSQVWGLSDRLGKLDYVRTKTLTCYNGIQADGCGECPACRLRRKGLETFLGKKGGSTLPDGGSAEEVALP

SEQ ID NO: 36648 - protein, 220 aa, Bibersteinia trehalosi
  REGION 1..220: note = tr|A0A3R8LED6|A0A3R8LED6_BIBTR 7-cyano-7-deazaguanine synthase OS=Bibersteinia trehalosi; OX = 47735 GN=queC PE=3 SV=1
MNKPKKAVVIFSGGQDSTTCLFQAIKEFGKENVEVITFQYGQRHVIELEKAKWIAQDLGVKQTLIDTSVIKAITSNALMSESEIKQEGNTPNTFVDGRNALFLLYTAIYAKGQGIQTIFTGVCETDFSGYPDCRDVFIKSMNVTLNLAMDYNFNIRTPLMYLTKKETWALADELGAFDYIREHTHTCYLGVEGGCHTCPSCILREKGLNEYLAEKEQNNA

SEQ ID NO: 36649 - protein, 220 aa, Bibersteinia trehalosi; identical to SEQ ID NO: 36648
  REGION 1..220: note = tr|A0A4V7IAM8|A0A4V7IAM8_BIBTR 7-cyano-7-deazaguanine synthase OS=Bibersteinia trehalosi USDA-ARS-USMARC-188 OX=1263829 GN=queC PE=3 SV=1

SEQ ID NO: 36650 - protein, 251 aa, Bifidobacterium longum
  REGION 1..251: note = tr|B7GTM4|B7GTM4_BIFLS 7-cyano-7-deazaguanine synthase OS=Bifidobacterium longum subsp. infantis (strain ATCC 15697 / DSM 20088 / JCM 1222 / NCTC 11817 / S12); OX = 391 904 GN=Blon_1859 PE=3 SV=1
MIQNHNRVALLLSGGPDSTTLLYDLLNQGKEIYAVTFNFGETEGCNESQHAQRIVTNLHSERLHHYQYDFSEQFKRFYELPQPQFLRKAFGPFVVAPNKEEHVQPFGSAIALMLMASWALKHDIVDVYYAVHSNDAVFHDNHASYFEALHTVTVECEGDEYGVTFHTPYLSINKCAVIQKGMGLGVPFGDTWSCALGGTVHCGVCDPCRDRRTSFEILGIKDPVLYEHDIFAESREEVNILESPKHISVVA

SEQ ID NO: 36651 - protein, 251 aa, Bifidobacterium longum; identical to SEQ ID NO: 36650
  REGION 1..251: note = tr|A0A4S5BHK1|A0A4S5BHK1_BIFLI 7-cyano-7-deazaguanine synthase OS=Bifidobacterium longum subsp. infantis OX=1682 GN=queC PE=3 SV=1

SEQ ID NO: 36652 - protein, 252 aa, Bifidobacterium magnum
  REGION 1..252: note = tr|A0A087BBB6|A0A087BBB6_9BIFI Uncharacterized protein OS=Bifidobacterium magnum OX=1692 GN=BMAGN_0272; PE = 4 SV=1
MNNKVNNFPVVEILWTGGFDSTFRVTELSLLPVVIQPYYLSDNRQSEPNELNAIKQITKNLCTRSATKAVFRPLIIISKAERVQDNLISAAYKRTRATDFFGSQYDWLGRFATEHKGIELSIHHDDKAIELINKYGAIKKIEIPTIGTNYILDQDKSPEDLNTLFRNYHLPLAMITKIQMREWYRTHHYEDVMNLTWFCYSPINGEPCGKCNPCTYTIEEGLTERFTRGGLRRYHIKKGIRGIKNLVKAIIR

SEQ ID NO: 36653 - protein, 700 aa, Bilophila sp.
  REGION 1..700: note = tr|G1UZL5|G1UZL5_9DELT Uncharacterized protein; OS = Bilophila sp. 4_1_30 OX=693988 GN=HMPREF0178_00731 PE=4; SV = 1
MQDKRYIICGNAPTDGIEENPDRDLRLRLWGKDGPDKITLRIEDIHKKMSKDVPDSFQDLLEIATYVYSADQAIPRGADDVDSFGHGWRRDLHFIIPVRKPDFWNGDDIHQALRSTLGFLSDDNYHFEFVKLKEAQAFQGYLKFDDDGRLFGYPEQVVMFSGGLDSLAGAIDEVLNEKHKVVLVTHKSTPKLNTRHRRLEKMIADKAGENAPLHIGVRVNKNKGLNCEYTQRSRSFLYVSIGATIAKMLNLKSVRFYENGVISLNLPVCAQVVGGRATRTTHPRVIQGFQEIISLVAGEPFTIENPYIWKTKAGVIEVITKAGCQDMIAASTTCTHTWEMTNHHTHCGTCSQCIDRRFAMIAAKADQYDPVEAYKADIFTQSRSKDEDKIMTAAYLERANQVREQDDITQFIARFSEVSRVFRYLNGNSGKVAQKVYDLYKRHAKEVCDAMDTMVGRNITAIRQHTLPGDCLLRTVYESGSVISVPAIPVEQKQPDNYFRKRGGVWAARFNGNAEVLVTGVDKGAEYINFLLARPNKETSVYEIVCGFAIDSCNAVLNSNETDEGFQVTQGVPLGDTGFVADRKAVEQYRETAHELLREIEEARAENNDAEIQRLENEMTQITAAINEAVGLGGKLRNSNDKRKNIRDAFRSAVNRAITYLEKYDKPLAAHLKEFIKCGNEPVYRTEEEIVWEVRPIVNE

SEQ ID NO: 36654 - protein, 239 aa, Bilophila sp.
  REGION 1..239: note = tr|G1V347|G1V347_9DELT 7-cyano-7-deazaguanine synthase OS=Bilophila sp. 4_1_30 OX=693988 GN=queC PE=3; SV = 1
MTSNTDSSALVIFSGGQDSATCLGWALNRFDRVFTVGFDYGQRHHVEMECRRNVLNAVRSDASLPASWAARLGEDTLLSLGLFNQIGETAMTSDMEIAFNEQGIPNTFVPGRNLVFLTAAAALAWRKGIRHLVMGVCETDFSGYPDCRDDTVKAMQVALNLGMDARFVVHTPLMWLDKARTWTLAEQEGGAPFVECVRTVTHTCYIGDRGELHPWGYGCGQCPACKLREHGWKEYSEGK

SEQ ID NO: 36655 - protein, 239 aa, Bilophila wadsworthia; identical to SEQ ID NO: 36654
  REGION 1..239: note = tr|E5Y8H5|E5Y8H5_BILWA 7-cyano-7-deazaguanine synthase OS=Bilophila wadsworthia 3_1_6 OX=563192 GN=queC; PE = 3 SV=1

SEQ ID NO: 36656 - protein, 232 aa, Biostraticola sp.
  REGION 1..232: note = tr|A0A4U2UKI7|A0A4U2UKI7_9ENTR 7-cyano-7-deazaguanine synthase OS=Biostraticola sp. BGMRC 2031 OX=2575567 GN=queC PE=3 SV=1
MKRAVVVFSGGQDSTTCLIQALTQYDEVDCVTFDYGQRHRAEIDIARGLAHELGARIHKVIDVGLLNELAASSLTRDNIPLPNFDEQAGDLPSTFVPGRNILFLTLASIYAYQVGAQTVITGVCETDFSGYPDCRDEFIKTLNQAVSLGMARDIRFVTPLMWLNKAETWALADYYHQLDKVRHETLTCYNGIQGDGCGQCAACHLRARGLQTYLSDPDRVAAEMRRKTALPA

SEQ ID NO: 36657 - protein, 201 aa, Biostraticola sp.
  REGION 1..201: note = tr|A0A4U2UEQ1|A0A4U2UEQ1_9ENTR 7-cyano-7-deazaguanine synthase OS=Biostraticola sp. BGMRC 2031 OX=2575567 GN=FCN80_17985 PE=3 SV=1
MKTALLLSGGMDSIAIAWWKRPDIALTLDYGQQAANAEIKAATATCEALGIEHHIIRIDCRSLGSGDMAGTAMDPNAPSSDWWPYRNQMLISLAAMKAITLGVTHLWIGTVKSDETHLDGTIGFISRISELMSFQEGGMVVEAPAITLSTSELIRISDVTPGGLAWAHSCHKANIPCGNCRGCNKYFQVLDDVGYDLDRSR

SEQ ID NO: 36658 - protein, 231 aa, Biostraticola tofi
  REGION 1..231: note = tr|A0A4R3YPV7|A0A4R3YPV7_9ENTR 7-cyano-7-deazaguanine synthase OS=Biostraticola tofi; OX = 466109 GN=queC PE=3 SV=1
MKRAVVVFSGGQDSTTCLIQALSQYDEVHCVTFDYGQRHRAEIDIARELSVSLGAVAHKFIDAGLLNALAVSSLTRDSIPVPRFDDQTDALPSTFVPGRNILFLTLAAIYAYQVGAESVITGVCETDFSGYPDCRDEFVRALNTAVTLGLARHIRFITPLMWLNKAETWALAAHYGKLDVIRHHTLTCYNGIKGDGCGECAACHLRAKGLADYQQDPTAVMASLRRKSPQL

SEQ ID NO: 36659 - protein, 221 aa, Bisgaardia hudsonensis
  REGION 1..221: note = tr|A0A4R2N099|A0A4R2N099_9PAST 7-cyano-7-deazaguanine synthase OS=Bisgaardia hudsonensis; OX = 109472 GN=queC PE=3 SV=1
MQNSNKAVVIFSGGQDSTTCLFLAIQEFGVENVEVVTFQYGQRHAIELEKAQWIAQDLGVKQTLIDTSVIKAITNNALMDKNATIENKDNMPNTFVDGRNALFLLYTAIYAKGQNINTIFTGVCETDFSGYPDCRDVFIKSMNVTLNLAMDYNFNIRTPLMYLTKKQTWALADKLGAFDYIREHTHTCYLGVEGGCGSCPSCVLREKGLKEYLKERQSCSK

SEQ ID NO: 36660 - protein, 226 aa, unidentified
  source 1..226: note = Blastocatellia bacterium
  REGION 1..226: note = tr|A0A357F0U3|A0A357F0U3_9BACT 7-cyano-7-deazaguanine synthase OS=Blastocatellia bacterium OX=2052146 GN=queC PE=3 SV=1
MGERDQIAVVLVSGGMDSLVTAAIAGAECNELAFLHLSYGQRTEARERRAFNEIADFYKIKHRMDISLGYLTRIGGSSLTDHSLPVSVANLESDEIPTSYVPFRNANMLSIAVSWAEVIGANAIYIGAVAEDSSGYPDCRPEFYAAFQKAVDIGTRPETRIEIRTPIIALSKAEIVKKGTEFGAPFQLTWSCYRNEELACGRCDSCALRLRGFRQAGITDPIEYET

SEQ ID NO: 36661 - protein, 248 aa, unidentified
  source 1..248: note = Blastocatellia bacterium
  REGION 1..248: note = tr|A0A3B9LQJ2|A0A3B9LQJ2_9BACT 7-cyano-7-deazaguanine synthase OS=Blastocatellia bacterium OX=2052146 GN=queC PE=3 SV=1
MGGHDDRVSADSEVAGSTADSVAVCLVSGGMDSCVTAAVANDEAADLAFLHVSYGQRTEARELRAFEEIADHYAVKHRLVVSLEHLGKIGGSSLTDKGIEVTSPNLASHGIPTSYVPFRNAHLLSVATSWAEVIRAGSVYIGAVAEDSSGYPDCRPEFYEAFQRVVMLGTKPETSIEIKTPVIRLKKSQIVELGQRLNAPLQLTWSCYARSDQACGDCDSCALRLRAFREAGVKDPIPYLLDSKRFAY

SEQ ID NO: 36662 - protein, 237 aa, Blastochloris sp.
  REGION 1..237: note = tr|A0A348G0D6|A0A348G0D6_9RHIZ 7-cyano-7-deazaguanine synthase OS=Blastochloris sp. GI; OX = 2233851 GN=queC PE=3 SV=1
MTSPDLSALVLLSGGQDSTTCLGWALDRFDRVETVGFDYGQRHRVELEVRERIRGRIEGLKPAWSGRLGSDHLIELSVLGQISDTALTRDAAIALADSGLPTTFVPGRNLIFLGFAAALAYRRGIRHIVAGMCETDYSGYPDCRDDTIKAMQVALSLGLDRRVTIHTPLMWIDKAATFALALAIAGPQFLDLVVEETHTCYVGDRTQRHPWGFGCGVCPACRLRAEGWARFRKEDGC

SEQ ID NO: 36663 - protein, 235 aa, Blastochloris viridis
  REGION 1..235: note = tr|A0A0H5BK42|A0A0H5BK42_BLAVI 7-cyano-7-deazaguanine synthase OS=Blastochloris viridis; OX = 1079 GN=queC PE=3 SV=1
MPTPDHAALVLFSGGQDSTVCLGWALDRFDTVETVGFAYGQRHHVELAVRPRIRARLEALKPNWVGRLGDDHIIDLGVLGRLSETALTRDVEIRLADSGLPTTFVPGRNLIFLSFAAALAYRRGIRHLVAGMCETDYSGYPDCRDDTVKAMQVALSLGLDRPVTVHTPLMWVDKAATFALAEAIGGPTFLDVVVEDTHSCYLGDRATRHPWGYGCGGCPACRLRAEGWARFQKVR

SEQ ID NO: 36664 - protein, 231 aa, unidentified
  source 1..231: note = Blastomonas fulva
  REGION 1..231: note = tr|A0A222X505|A0A222X505_9SPHN 7-cyano-7-deazaguanine synthase OS=Blastomonas fulva; OX = 1550728 GN=queC PE=3 SV=1
MRKAMTQPQKTAVVLLSGGLDSMVSAARAIEQGFAVAALTIDYNQRHRVEIEAARKIAAHIGAVRHIVLPLDLRQFGGSALTDDIDVPKTGVGEDIPVTYVPARNLIFLSLTLGWAEALGARDIFIGVNALDYSGYPDCRPEFIQGFERLADLATKAGDQGEPFTIHAPLQFLGKAEIAAEAARLGLDPGMSWSCYDPTPEGKACGLCDSCRLRKQGFADAGLVDPTVYAA

SEQ ID NO: 36665 - protein, 227 aa, Blastomonas natatoria
  REGION 1..227: note = tr|A0A2V3V2S9|A0A2V3V2S9_9SPHN 7-cyano-7-deazaguanine synthase OS=Blastomonas natatoria; OX = 34015 GN=queC PE=3 SV=1
MSEPQKTAVVLLSGGLDSMVSAARAREAGFAVAALTIDYNQRHRVEIDAARSIAAHIGAVRHIVLPLDLRQFGGSALTDDIDVPKTAVGQDIPVTYVPARNLIFLSLTLGWAEALGARDIFIGVNALDYSGYPDCRPEFIQGFERLADLATKAGDQGEPFTIHAPLQYLGKAEIAAEAVRLGLDPAMSWSCYDPLPDGRACGLCDSCRLRKQGFADAGLVDGTIYAA

SEQ ID NO: 36666 - protein, 231 aa, Blastomonas sp.
  REGION 1..231: note = tr|W9BWI1|W9BWI1_9SPHN 7-cyano-7-deazaguanine synthase OS=Blastomonas sp. CACIA14H2 OX=1419876 GN=queC; PE = 3 SV=1
MRYRMSEPQKTAVVLLSGGLDSMVSAARAQEAGFAVAALTIDYNQRHRVEIEAAKAIAARIGAVRHILLPLDLRQFGGSALTDDIDVPKTGVGPDIPVTYVPARNLIFLSLTLGWAEALGARDIFIGVNALDYSGYPDCRPEFIAGFERLADLATKAGDQGEPFTIHAPLQYLGKAEIAAEAIRLGLDPAMSWSCYDPTPDGRACGLCDSCRLRKQGFADAGLTDGTVYAA

SEQ ID NO: 36667 - protein, 227 aa, Blastomonas sp.
  REGION 1..227: note = tr|A0A2D6H3W0|A0A2D6H3W0_9SPHN 7-cyano-7-deazaguanine synthase OS=Blastomonas sp.; OX = 1909299 GN=queC PE=3 SV=1
MTDLRKTAVVLLSGGLDSMVSAARAKEQGFDVAALTIDYNQRHRVEIEAARTIAAHIGAVRHIVLPLDLRQFGGSALTDDIDVPKTGVGQDIPVTYVPARNLIFLSLTLGWAEALGARDIFIGVNALDYSGYPDCRPEFIQGFERLADLATKAGDQGEPFTIHAPLQYLGKAEIAAEAVRLGLDPAMSWSCYDPLPDGRACGLCDSCRLRKQGFADAGLTDGTVYAA

SEQ ID NO: 36668 - protein, 218 aa, unidentified
  source 1..218: note = Blastopirellula cremea
  REGION 1..218: note = tr|A0A368KJG9|A0A368KJG9_9PLAN 7-cyano-7-deazaguanine synthase OS=Blastopirellula cremea; OX = 1031537 GN=queC PE=3 SV=1
MAKVVVVVSGGMDSATLLYHILDQGHEARAISVDYGQRHVKELDYARQLCEGVGVAHQVADLSAINPIFGNNSLSGREMEIPEGHYAEESMKQTVVPNRNMLLLSVAIAAAAANKFQAVAYGAHSGDHAIYPDCRPEFAEAMDQAARLCDWNPIELWRPFVHLDKGQIAKRGVDLGVPFEKTWTCYKGLELHCGKCGACVERREAFASQGLLDPTEYA

SEQ ID NO: 36669 - protein, 219 aa, Blastopirellula marina
  REGION 1..219: note = tr|A3ZMY4|A3ZMY4_9PLAN 7-cyano-7-deazaguanine synthase OS=Blastopirellula marina DSM 3645 OX=314230; GN = queC PE=3 SV=1
MSKVVAVVSGGMDSATLLYHLIDAGHDVRAISINYGQRHVKELDYARQLCDKVGVPQIVADLSAINPLFGANSLSGREIEIPEGHYAEENMKLTVVPNRNMILLSVSIAWAISQECVAVAYGAHSGDHAIYPDCRPEFAAAMDQAAKLCDWSAVELWRPFVDIDKGDIAQRGSELGVPYELTWTCYKGLAEHCGKCGACVERKEAFAKHGLVDPTAYMA

SEQ ID NO: 36670 - protein, 219 aa, Blastopirellula marina
  REGION 1..219: note = tr|A0A2S8FL60|A0A2S8FL60_9PLAN 7-cyano-7-deazaguanine synthase OS=Blastopirellula marina; OX = 124 GN=queC PE=3 SV=1
MAKVVVVVSGGMDSATLLYYILAEGHETRAISVDYGQRHVKELDYARQLCEGVNVPHQVADLSAINPIFGNNSLSGRDMEVPEGHYAEESMKQTVVPNRNMLLLSVAIASAAANKFNAVAYGAHSGDHAIYPDCRPEFAEAMDQAARLCDWNPIELWRPFVHLDKGQIAKRGVDLGVPFEKTWTCYKGLDLHCGKCGACVERKEAFSGNGLLDPTQYAD

SEQ ID NO: 36671 - protein, 225 aa, Blastopirellula sp.
  REGION 1..225: note = tr|A0A2G2J996|A0A2G2J996_9PLAN 7-cyano-7-deazaguanine synthase OS=Blastopirellula sp.; OX = 2024826 GN=queC PE=3 SV=1
MTKAYILLSGGIDSSALLARANLIHEGSVKAISVDYGQKHNIELVHAANVAKHMGISHEIVDMSFAMGKGGLSDPSLEVPKVSYEDLPHGVSPTYVPNRNMLMLSMLVSKAAADPDAEFAYYGAHAEDSENDAYPDCSPEFVNAMVKAVSIATYGKITLDAPFVDNTKAEVVANGEQIGVPWELTWSCYEGGLIHCGTCSTCRARRDAFIGARVTDPTVYREVPT

SEQ ID NO: 36672 - protein, 218 aa, Blastopirellula sp.
  REGION 1..218: note = tr|A0A2G2KLR8|A0A2G2KLR8_9PLAN 7-cyano-7-deazaguanine synthase OS=Blastopirellula sp.; OX = 2024826 GN=queC PE=3 SV=1
MEKVVVVSSGGMDSATLLYHMVDAGHQVKSLSINYGQRHVKEIDFAKRLADHLQIEHAVADISAINHLLGNNSLSGREIDIPEGHYEEESMKLTVVPNRNMILLSVAIAWAVSNKFDAVAYGAHSGDHAIYPDCRPEFAEAMDQAAQLCDWNPVKLLRPFVHLDKGDIAQRGHELGVPFAETWTCYKGQEKHCGKCGACTERKEAFAKHGLKDVTDYA

SEQ ID NO: 36673 - protein, 231 aa, Blautia hydrogenotrophica
  REGION 1..231: note = tr|C0CIL2|C0CIL2_BLAHS 7-cyano-7-deazaguanine synthase OS=Blautia hydrogenotrophica (strain DSM 10507 / JCM 14656 / S5a33) OX=476272 GN=queC PE=3 SV=1
MSEKAMVLFSGGVDSTTCLGLAIEKYGVQNVIPLSVQYGQKHEKEVEAARRILEYYGIEGMELDLTPIFAYSDCSLLSHSEKEIPEASYAEQLRENEGVPVSTYVPFRNGLFLACAASIALSRECSCIYYGAHRDDAAGSAYPDCSESFFESMNRAVYEGSGQQIRIEAPFIKMNKAQIVAEGLRLKVPYEFTWSCYEGKEKPCGVCGTCIDRSEAFKVNGVEDPAYRGES

SEQ ID NO: 36674 - protein, 231 aa, Blautia hydrogenotrophica; identical to SEQ ID NO: 36673
  REGION 1..231: note = tr|A0A173T5S2|A0A173T5S2_9FIRM 7-cyano-7-deazaguanine synthase OS=Blautia hydrogenotrophica OX=53443 GN=queC PE=3 SV=1

SEQ ID NO: 36675 - protein, 227 aa, Blautia luti
  REGION 1..227: note = tr|A0A564VV22|A0A564VV22_9FIRM 7-cyano-7-deazaguanine synthase OS=Blautia luti OX=89014; GN = queC PE=3 SV=1
MKALVLASGGVDSTTCLGLAVNKYGKENVIALTVAYGQKHTKEIEAARKTAEYYGVEHLYLDLEPIFRYSDCSLLKHSDREIPHESYAEQLKETDGSPVSTYVPFRNGLFLSSAASIALSKNCSVIYYGAHADDAAGNAYPDCSSAFHNAINEAIYQGSGGQLKVEAPFVSCTKAEVVKTGLELKVPYELTWSCYEGGEKPCGVCGTCIDRAEAFRLNGVKDPALDR

SEQ ID NO: 36676 - protein, 227 aa, unidentified
  source 1..227: note = Blautia obeum
  REGION 1..227: note = tr|A0A367FWR9|A0A367FWR9_9FIRM 7-cyano-7-deazaguanine synthase OS=Blautia obeum OX=40520; GN = queC PE=3 SV=1
MKALVLASGGVDSTTCLGLAVNKYGKENVIALTVAYGQKHTKEIEAARKTAEYYGVEHLYLDLEPIFRYSDCSLLKHSDREIPHESYAEQLKETDGSPVSTYVPFRNGLFLSSAASIALSKNCSVIYYGAHADDAAGNAYPDCSSAFHNAINEAIYQGSGGQLKVEAPFVSCTKAEVVKTGLELNVPYELTWSCYEGGEKPCGVCGTCIDRAEAFRLNGVKDPALDR

SEQ ID NO: 36677 - protein, 226 aa, unidentified
  source 1..226: note = Blautia obeum
  REGION 1..226: note = tr|A0A411ZLI6|A0A411ZLI6_9FIRM 7-cyano-7-deazaguanine synthase OS=Blautia obeum OX=40520; GN = queC PE=3 SV=1
MKAMVLFSGGIDSTTCLGMAVEKYGPENVIALSIAYGQKHTKEIEASDKIVKYYNVEHIYLDLAKIFQYSDCSLLSHSDKEIPKESYNDQIKSTNGSPVSTYVPFRNGLFLSSAASIALSKGCSEIYYGAHADDAAGSAYPDCSSDFNNAINEAIYLGSGKQIKVVAPFINATKDQVVKKGLEINVPYKYTWSCYEGGEKPCGKCGTCIDRAKAFELNGIKDPAME

SEQ ID NO: 36678 - protein, 227 aa, Blautia sp.
  REGION 1..227: note = tr|A0A416RK65|A0A416RK65_9FIRM 7-cyano-7-deazaguanine synthase OS=Blautia sp. AF19-34; OX = 2292963 GN=queC PE=3 SV=1
MKALVLFSGGIDSTTALGLAIQKYGKDQVIALSVSYGQKHDKEIKAAIAVAQYYGVEHLFLDLSKIFQYSNCSLLQQSTEDIPEESYAEQISKTNGDKPVSTYVPFRNGLFLSSAASIALSKDCEVIYYGAHADDSAGFAYPDCSPVFNQAMNEAIWEGSGHQLKIEAPFVNVSKAEVVRTGLELGVPYELTWSCYEGGEKPCGKCGTCIDRAAAFQANHMEDPALR

SEQ ID NO: 36679 - protein, 229 aa, Blautia sp.
  REGION 1..229: note = tr|A0A1Y3YFH7|A0A1Y3YFH7_9FIRM 7-cyano-7-deazaguanine synthase OS=Blautia sp. An46; OX = 1965636 GN=queC PE=3 SV=1
MGDKAMVLFSGGIDSTTCLGLAIEKYGKENVIPLSVFYGQKHEKEVEAARKILEYYEIKGMEMDLSSIFAYSSCSLLAHSQEEIPESSYGEQLAQTGGAPVSTYVPFRNGLFLSCAASLALSLDCSVVYYGAHRDDAAGNAYPDCSRAFYDSMNQAVYEGSGKALYIEAPFIDKNKAEIVAEGLRLKVPYEFTWSCYEGKEFPCGVCGTCIDRQKAFEANGIKDPALGE

SEQ ID NO: 36680 - protein, 224 aa, unidentified
  source 1..224: note = Unknown
  REGION 1..224: note = tr|A0A1U9VPE3|A0A1U9VPE3_9RALS 7-cyano-7-deazaguanine synthase OS=blood disease bacterium A2-HR MARDI OX=1944648 GN=queC PE=3 SV=1
MKKRAIVLLSGGLDSATVLAMANAQGFETYALSMRYGQRHSSELEAAKKVAAALGAVRHEIVDLDLRRFGGSALTDDALEVPTTGVKEGIPITYVPARNTIMLSLALGWAEAVGARDLFFGANAVDYSGYPDCRPEFVAAYETLANLATKAGVEGDRIRVNAPIIAMTKAEIIQAGARLGVDYSLTVSCYQADDEGRACGVCDSCRIRRAGFETAGVADPTRYR

SEQ ID NO: 36681 - protein, 224 aa, unidentified; identical to SEQ ID NO: 36680
  source 1..224: note = Unknown
  REGION 1..224: note = tr|G2ZWZ2|G2ZWZ2_9RALS 7-cyano-7-deazaguanine synthase OS=blood disease bacterium R229 OX=741978 GN=queC; PE = 3 SV=1

SEQ ID NO: 36682 - protein, 246 aa, unidentified
  source 1..246: note = Bombella intestini
  REGION 1..246: note = tr|A0A1S8GNL2|A0A1S8GNL2_9PROT 7-cyano-7-deazaguanine synthase OS=Bombella intestini; OX = 1539051 GN=queC PE=3 SV=1
MTTSSSPSASHQAAQNRRALVLFSGGQDSATCLAWALHHFDHVETVGFAYGQRHAVELDCRTTLRQSISAQNPHWAKKLGEDHTIDLASLGALSDTALTRDAEISMGENGLPNTFVPGRNLIFLTFAAALAFRRSIRHIITGVCETDYSGYPDCRDDTIKALQVALNLGMEQRFVLHTPLMWINKAQTWQLCHDLGGSALTETIRHESHSCYKGDRTHEHAWGFGCGDCPACTLRAEGWRQYQEGA

SEQ ID NO: 36683 - protein, 242 aa, unidentified
  source 1..242: note = Bordetella ansorpii
  REGION 1..242: note = tr|A0A157QVB0|A0A157QVB0_9BORD 7-cyano-7-deazaguanine synthase OS=Bordetella ansorpii; OX = 288768 GN=queC PE=3 SV=1
MLAPTPDTRRALVLFSGGQDSTTCLAWALDRYAHVETVAFDYGQRHRIELDARLNVLRELRAGYPQWTAKLGEDHLLDLSVLGQVGDTALTSDRQIEMQENGLPNTFVPGRNLLFLTLAAALGYRRQLDVLVGGMCETDFSGYPDCRDDTIKAQQVALSLGLGSRVTIETPLMWRDKAQTWELARALGGLALVDLIVEHSHTCYLGERGGRHDWGYGCGTCPACELRAAGWLRWKAGQQAAV

SEQ ID NO: 36684 - protein, 242 aa, unidentified
  source 1..242: note = Bordetella ansorpii
  REGION 1..242: note = tr|A0A157SBP2|A0A157SBP2_9BORD 7-cyano-7-deazaguanine synthase OS=Bordetella ansorpii; OX = 288768 GN=queC PE=3 SV=1
MLAPTPDTRRALVLFSGGQDSTTCLAWALDRYAHVETVAFDYGQRHRIELDARLNVLRELRAGYPQWTARLGEDHLLDLSVLGQVGDTALTSDRQIEMQENGLPNTFVPGRNLLFLTLAAALGYRRQLDVLVGGMCETDFSGYPDCRDDTIKAQQVALSLGLGSRVTIETPLMWRDKAQTWDLARALGGLALVDLIVEHSHTCYLGERGARHDWGYGCGTCPACELRAAGWLRWKAGQYAAV

SEQ ID NO: 36685 - protein, 244 aa, Bordetella avium
  REGION 1..244: note = sp|Q2KZT1|QUEC_BORA1 7-cyano-7-deazaguanine synthase; OS = Bordetella avium (strain 197N) OX=360910 GN=queC PE=3; SV = 1
MHFPVFIMQNHQRRALVLFSGGQDSTTCLAWALDRYAHVETVAFDYGQRHRIELDARLNVLREIRGRFPAWAARLGQDHLLDLKVLGQVGDTAMTSDRAIEMQANGLPNTFVPGRNLLFLTLAAALGYRRQLDVLVGGMCETDFSGYPDCRDDTMKAQQVALSLGLGSRVTIETPLMWLDKADTWALADSLGGESLVQTIVEESHTCYVGERGQRHDWGYGCGECPACVLRKAGWSRWAERAPR

SEQ ID NO: 36686 - protein, 242 aa, unidentified
  source 1..242: note = Bordetella bronchialis
  REGION 1..242: note = tr|A0A193FST3|A0A193FST3_9BORD 7-cyano-7-deazaguanine synthase OS=Bordetella bronchialis; OX = 463025 GN=queC PE=3 SV=1
MQNHERRALVLFSGGQDSTTCLAWALERYAHVETVAFDYGQRHRIELDARRDVLRELRARRPDWSSRLGEDHLLDLSVLGQVGDTALTSERRIEMQANGLPNTFVPGRNLLFLTLAAALGYRRQLDVLVGGMCETDFSGYPDCRDDTMKAQQIALALGLGTRVTIETPLMWLDKAQTWALAHRLGGDELVGIIVEDSHTCYLGERGARHDWGYGCGTCPACALRKAGWERWAAGQAAPLPPV

SEQ ID NO: 36687 - protein, 244 aa, Bordetella bronchiseptica
  REGION 1..244: note = tr|A0A0C6P8E6|A0A0C6P8E6_BORBO 7-cyano-7-deazaguanine synthase OS=Bordetella bronchiseptica 253 OX=568707 GN=queC PE=3 SV=1
MFRCLMQNHQRRALVLFSGGQDSTTCLAWALERYAHVETLGFDYGQRHRVELDARQVVLRELRANFPDWAQRLGDDHLLDLGILAQLGDTAMTSDREIEMQANGLPNTFVPGRNLLFLTLAAALGYRRQLDVLVGGMCETDFSGYPDCRDDTIKSQQVTLGLGLGTRVTIETPLMWLDKAQTWELADRLGGQALVDMVIEHSHTCYLGERGQRHDWGYGCGHCPACALRKNGWERWVAGAAHAD

SEQ ID NO: 36688 - protein, 244 aa, Bordetella bronchiseptica
  REGION 1..244: note = sp|Q7WQB2|QUEC_BORBR 7-cyano-7-deazaguanine synthase; OS = Bordetella bronchiseptica (strain ATCC BAA-588 / NCTC 13252 / RB50) OX=257310 GN=queC PE=3 SV=1
MFRCLMQNHQRRALVLFSGGQDSTTCLAWALERYAHVETLGFDYGQRHRVELDARQVVLRELRANFPDWAQRLGDDHLLDLGILAQVGDTAMTSDREIEMQANGLPNTFVPGRNLLFLTLAAALGYRRQLDVLVGGMCETDFSGYPDCRDDTIKSQQVTLGLGLGTRVTIETPLMWLDKAQTWELADRLGGQALVDMVIEHSHTCYLGERGQRHDWGYGCGHCPACALRKNGWERWVAGAAHAD

SEQ ID NO: 36689 - protein, 242 aa, unidentified
  source 1..242: note = Bordetella flabilis
  REGION 1..242: note = tr|A0A193G861|A0A193G861_9BORD 7-cyano-7-deazaguanine synthase OS=Bordetella flabilis; OX = 463014 GN=queC PE=3 SV=1
MQNHQRRALVLFSGGQDSTTCLAWALERYAHVETVAFDYGQRHRIELDARLNVRRELCARRPDWAARLGEDHLLDLSVLSQVGDTALTSDRQIEMQANGLPNTFVPGRNLMFLTVAAALAYRRQLDVLVGGMCETDFSGYPDCRDDTIKAQQVVLGLGLATRMTIETPLMWLDKAQTWALAQRLGGDALVETVVEHSHTCYLGERGARHDWGYGCGTCPACALRKAGWERWVAGAAADLPPG

SEQ ID NO: 36690 - protein, 237 aa, unidentified
  source 1..237: note = Bordetella genomosp.
  REGION 1..237: note = tr|A0A261QU96|A0A261QU96_9BORD 7-cyano-7-deazaguanine synthase OS=Bordetella genomosp. 7; OX = 1416805 GN=queC PE=3 SV=1
MPNHQRRALVLFSGGQDSTTCLAWALARYAHVETVAFDYGQRHRIELDARINVLNQLRAAFPHWSEKLGADHVLDLRVLGQVGDTAMTSERAIEMQANGLPNTFVPGRNLLFLTLAAALGYRRQLDVLVGGMCETDFSGYPDCRDDTIKAQQVALGLGLGTRVTIETPLMWIDKADTWDLARQLGGQALVDIVVEHSHTCYLGERGARHGWGYGCGTCPACALRKAGWERWRNRAKA

SEQ ID NO: 36691 - protein, 245 aa, unidentified
  source 1..245: note = Bordetella genomosp.
  REGION 1..245: note = tr|A0A261RV52|A0A261RV52_9BORD 7-cyano-7-deazaguanine synthase OS=Bordetella genomosp. 1; OX = 1395607 GN=queC PE=3 SV=1
MLNHQRRALVLFSGGQDSTTCLAWALDRYEHVETVAFDYGQRHRIELDARLNVLREIRAQFPQWAARLGEDHLLDLKVLGQVGDTAMTSDRAIEMQANGLPNTFVPGRNLLFLTLAAALGYRRELDVLVGGMCETDFSGYPDCRDDTIKAQQVALGLGLGTRLTIETPLMWIDKSETWALAEQLGGPALVDTIVEHSHTCYLGERGMRHAWGHGCGQCPACVLRKAGFERWVEDKAARQADGPGA

SEQ ID NO: 36692 - protein, 239 aa, Bordetella hinzii
  REGION 1..239: note = tr|A0A0H4VT75|A0A0H4VT75_9BORD 7-cyano-7-deazaguanine synthase OS=Bordetella hinzii; OX = 103855 GN=queC PE=3 SV=1
MQNHQRRALVLFSGGQDSTTCLAWALDRYAHVETVAFDYGQRHRIELDARLNVLRGIRGQFPDWAARLGEDHLLDLKVLGQVGDTAMTSERAIEMQANGLPNTFVPGRNLLFLTLAAALGYRRQLDVLVGGMCETDFSGYPDCRDDTIKAQQVALSLGLGARLTIETPLMWLDKADTWALADSLGGPELVQTIVEESHTCYLGERGQRHDWGYGCGECPACSLRKSGWLRWVARAETEG

SEQ ID NO: 36693 - protein, 237 aa, Bordetella holmesii
  REGION 1..237: note = tr|A0A158M0G8|A0A158M0G8_9BORD 7-cyano-7-deazaguanine synthase OS=Bordetella holmesii CDC-H585-BH OX=1331206 GN=queC PE=3 SV=1
MQNHQRRALVLFSGGQDSSTCLAWALQRYAHVETVAFDYGQRHRIELDARLNVLREFRARFPDWAARLGEDHLLDLKVLGQVGDTAMTSDRAIEMQANGLPNTFVPGRNLLFLTLAAALGYRRQLDVLVGGMCETDFSGYPDCRDDTIKAQQVALGLGLGARVTIETPLMWLDKADTWALADTLGGPDLVQIIVQESHTCYLGERGQRHDWGYGCGECPACSLRKAGWLRWVARAED

SEQ ID NO: 36694 - protein, 244 aa, Bordetella parapertussis; identical to SEQ ID NO: 36688
  REGION 1..244: note = tr|K0MAU9|K0MAU9_BORPB 7-cyano-7-deazaguanine synthase OS=Bordetella parapertussis (strain Bpp5); OX = 1208660 GN=queC PE=3 SV=1

SEQ ID NO: 36695 - protein, 244 aa, Bordetella parapertussis
  REGION 1..244: note = sp|Q7WCA8|QUEC_BORPA 7-cyano-7-deazaguanine synthase; OS = Bordetella parapertussis (strain 12822 / ATCC BAA-587 / NCTC 13253) OX=257311 GN=queC PE=3 SV=1
MFRCLMQNHQRRALVLFSGGQDSTTCLAWALERYAHVETLGFDYGQRHRVELDARQVVLRELRANFPDWAQRLGDDHLLDLGILAQVGDTAMTSDREIEMQANGLPNTFVPGRNLLFLTLAAALGYRRQLDVLVGGMCETDFSGYPDCRDDTIKSQQVTLGLGLGTRVTIETPLMWLDKAQTWELADRLGGQALVDMVIEHSHTCYLGERGQRHDWGYGCGHCPACALRKNGWERWVAGAAYAD

SEQ ID NO: 36696 - protein, 244 aa, Bordetella pertussis; identical to SEQ ID NO: 36688
  REGION 1..244: note = sp|Q7W0D1|QUEC_BORPE 7-cyano-7-deazaguanine synthase; OS = Bordetella pertussis (strain Tohama I / ATCC BAA-589 / NCTC 13251) OX=257313 GN=queC PE=3 SV=2

SEQ ID NO: 36697 - protein, 239 aa, Bordetella pertussis
  REGION 1..239: note = tr|A0A0E8BXR4|A0A0E8BXR4_BORPT 7-cyano-7-deazaguanine synthase OS=Bordetella pertussis; OX = 520 GN=queC PE=3 SV=1
MQNHQRRALVLFSGGQDSTTCLAWALERYAHVETLGFDYGQRHRVELDARQVVLRELRANFPDWAQRLGDDHLLDLGILAQVGDTAMTSDREIEMQANGLPNTFVPGRNLLFLTLAAALGYRRQLDVLVGGMCETDFSGYPDCRDDTIKSQQVTLGLGLGTRVTIETPLMWLDKAQTWELADRLGGQALVDMVIEHSHTCYLGERGQRHDWGYGCGHCPACALRKNGWERWVAGAAHAD

SEQ ID NO: 36698 - protein, 238 aa, Bordetella petrii
  REGION 1..238: note = tr|A9IDM6|A9IDM6_BORPD 7-cyano-7-deazaguanine synthase OS=Bordetella petrii (strain ATCC BAA-461 / DSM 12804 / CCUG 43448) OX=340100 GN=queC PE=3 SV=1
MQNHSRRALVLFSGGQDSTTCLAWALDRYAHVETVAFDYGQRHRIELDARLNVLRELRAQFPQWAGRLGEDHLLDLRVLGQVGDTAMTSERAIEMQANGLPNTFVPGRNLLFLALAAALGYRRQLDVLVGGMCETDFSGYPDCRDDTIKAQQVALGLGLGTRVTIETPLMWIDKADTWALARQLGGQALVALIVEHSHTCYLGERGARHDWGYGCGTCPACALRKAGWQRWRDQAGDA

SEQ ID NO: 36699 - protein, 239 aa, unidentified
  source 1..239: note = Bordetella pseudohinzii
  REGION 1..239: note = tr|A0A0J6CAX2|A0A0J6CAX2_9BORD 7-cyano-7-deazaguanine synthase OS=Bordetella pseudohinzii; OX = 1331258 GN=queC PE=3 SV=1
MQNHQRRALVLFSGGQDSTTCLAWALDRYAHVETVAFDYGQRHRIELDARLNVLRAIRGQFPDWAARLGEDHLLDLKVLGQVGDTAMTSERAIEMQANGLPNTFVPGRNLLFLTLAAALGYRRQLDVLVGGMCETDFSGYPDCRDDTIKAQQVALSLGLGARLTIETPLMWLDKADTWALADSLGGPELVQTIVEESHTCYLGERGQRHDWGYGCGECPACSLRKAGWLRWVARAEAEG

SEQ ID NO: 36700 - protein, 236 aa, Bordetella sp.
  REGION 1..236: note = tr|A0A1E3ZGW5|A0A1E3ZGW5_9BORD 7-cyano-7-deazaguanine synthase OS=Bordetella sp. SCN 67-23 OX=1660091 GN=queC PE=3 SV=1
MDARKALVLFSGGQDSTTCLAWALDRYARVETVGFDYGQRHRVELDARGNVLREIRARFPAWSTRLGEDHAIDLSVLGALSDTALTRDTEIRMTDAGLPNTFVPGRNLVFLTMAAALAYRRGLEVVVGGMCETDFSGYPDCRDDTVKALQVAVSLGMGQRFTFETPLMWLDKAQTWQLAEDLGGDALVEVVAEHSHTCYLGDRSKRFDWGYGCGTCPACELRAAGYGRWRQVPGGE

SEQ ID NO: 36701 - protein, 239 aa, Bordetella sp.
  REGION 1..239: note = tr|A0A3T0NJ19|A0A3T0NJ19_9BORD 7-cyano-7-deazaguanine synthase OS=Bordetella sp. J329; OX = 1977852 GN=queC PE=3 SV=1
MIPLREKRALVLFSGGQDSATCLAWALSRYQHVETLGFDYGQRHRVELDCRTRLRKLVADMNPDWAPRLAEDHLLPVDFFRHLGQTAMTDDVAITMQADGLPNTFVPGRNLLFLTLAAALAYRRNLNVLIGGMTEADYSGYPDCRDNTMKALQVALSLGIDRQLTIETPLMWLDKTEIWDLAWRLGGDVLVETIRQESHTCYLGTRDTLHSWGYGCGSCPACTLRARGYVRWAANRLVA

SEQ ID NO: 36702 - protein, 237 aa, Bordetella trematum
  REGION 1..237: note = tr|A0A157RBK4|A0A157RBK4_9BORD 7-cyano-7-deazaguanine synthase OS=Bordetella trematum; OX = 123899 GN=queC PE=3 SV=1
MQNHQRRALVLFSGGQDSTTCLAWALQRYAHVETVAFDYGQRHHIELQARQHVLRELHAAFPEWAARLGEDHVLDLKVLGQVGDTAMTSERAIEMQDNGLPNTFVPGRNLLFLNLAAALGYRRQLDVLVGGMCETDFSGYPDCRDDTIKAQQVALSLGLGARVTIETPLMWLDKAEAWALARELGGQALVDLIVEHSHTCYLGERGRRHDWGYGCGECPACALRAAGWQRWTQTPAA

SEQ ID NO: 36703 - protein, 240 aa, unidentified
  source 1..240: note = Bosea lathyri
  REGION 1..240: note = tr|A0A1H6BBA5|A0A1H6BBA5_9BRAD 7-cyano-7-deazaguanine synthase OS=Bosea lathyri; OX = 1036778 GN=queC PE=3 SV=1
MNTSRALVLFSGGQDSTVALAWALERFEVVETVGFDYGQRHRVELECRQIIRDKLPGLSRRYADRLGPDHVVDLKALGAISDTALTRETEIAFTDAGLPTTFVPGRNLIFLTFAAALAYRRDARHIVLGVCETDYSGYPDCRDDTIKAMQVALGLGLDRRLVLHTPLMWRDKAQTFALAKAVGGQPLLDLVIEDSHSCYLGDRTRRHDWGFGCGHCPACDLRAKGYGAYLISPEDSGPSQ

SEQ ID NO: 36704 - protein, 240 aa, unidentified
  source 1..240: note = Bosea lupini
  REGION 1..240: note = tr|A0A1H7VW27|A0A1H7VW27_9BRAD 7-cyano-7-deazaguanine synthase OS=Bosea lupini OX=1036779; GN = queC PE=3 SV=1
MTSRALVLFSGGQDSTVALAWALERFAAVETVGFDYGQRHRVELECRETIRARLPGLAPAYADRLGPDHLLDLKTLGAISDTALTSESEIAFAETGLPTTFVPGRNLIFLSFAAALAYRRDCKHIVLGVCETDYSGYPDCRDDTIKAMQVALALGLDRRLVLHTPLMWRDKAQTFALAKELGGEPLLELVVEDTHSCYLGDRSKRHPWGYGCGHCPACDLRARGFAAYEAAPDDSGPRGC

SEQ ID NO: 36705 - protein, 242 aa, Bosea sp.
  REGION 1..242: note = tr|A0A0N1BBX5|A0A0N1BBX5_9BRAD 7-cyano-7-deazaguanine synthase OS=Bosea sp. AAP35; OX = 1523417 GN=queC PE=3 SV=1
MTASRALVLFSGGQDSTVALAWALERFDEVETVGFDYGQRHRVELNCRTVIRDRLPTLSPIYARRLGPDHLVDLAALGAISETALTRDTEIAFAETGLPTTFVPGRNLIFLTFAAALAYRRNARHIVLGVCETDYSGYPDCRDDTIKAMQVALGLGLDRRLVLHTPLMWRDKAQTFALARALGGEPLLDLVIADSHSCYLGDRSTRHDWGYGCGHCPACDLRAKGYTAYLISPDDSGPSHDT

SEQ ID NO: 36706 - protein, 245 aa, Bosea sp.
  REGION 1..245: note = tr|A0A1Q3NU25|A0A1Q3NU25_9BRAD 7-cyano-7-deazaguanine synthase OS=Bosea sp. 67-29; OX = 1895723 GN=queC PE=3 SV=1
MASAGTSRALVLFSGGQDSTTALAWALDRFDAVETVGFDYGQRHRVEMQCRLTIRGKLPALSSTYAGRLGPDHVVDLAALGALSETALTRETEIVFAETGLPTTFVPGRNLIFLTFAAALAYRRNLKHIVLGVCETDYSGYPDCRDDTIKAMQVALGLGLDRRLALHTPLMWRDKAETFALARQIGGQALLDLVLEETHSCYLGNRSTRHGWGYGCGHCPACDLRAKGYAAYLAAPGNSGPSYDS

SEQ ID NO: 36707 - protein, 242 aa, Bosea thiooxidans
  REGION 1..242: note = tr|A0A0Q3M0V0|A0A0Q3M0V0_9BRAD 7-cyano-7-deazaguanine synthase OS=Bosea thiooxidans; OX = 53254 GN=queC PE=3 SV=1
MSASRALVLFSGGQDSTTALAWALDRFDAVETVGFDYGQRHRVEMDCRLAIRDKLPALSARYAERLGPDHVVDLAALGAISETALTRETEIVFAETGLPTSFVPGRNLIFLTFAAALAYRRDLRHIVLGVCETDYSGYPDCRDDTIKAMQVALGLGLDRRLVLHTPLMWRDKAQTFALARRLGGQALLDLVLEESHSCYLGDRTTRHGWGFGCGRCPACDLRAKGYAAYLATPDDSGPSYDT

SEQ ID NO: 36708 - protein, 248 aa, unidentified
  source 1..248: note = Bosea vaviloviae
  REGION 1..248: note = tr|A0A1D7U872|A0A1D7U872_9BRAD 7-cyano-7-deazaguanine synthase OS=Bosea vaviloviae; OX = 1526658 GN=queC PE=3 SV=1
MAAAASASESRALVLFSGGQDSTVALAWALERFASVETVGFDYGQRHRIELECRQIIRDKLPALSTLHSDRLGPDHLIDLKALGAISDTALTRETEIAFAETGLPTTFVPGRNLIFLSFAAALAYRRDCRHIVLGVCETDYSGYPDCRDDTIKAMQVALGLGLDRRLVLHTPLMWRDKAQTFALAKALGGQPLLDLVVEDSHSCYLGDRATRHAWGHGCGHCPACELRANGYAAYLISPDDTGPSHDT

SEQ ID NO: 36709 - protein, 240 aa, unidentified
  source 1..240: note = Bosea vaviloviae
  REGION 1..240: note = tr|A0A0N1F4C9|A0A0N1F4C9_9BRAD 7-cyano-7-deazaguanine synthase OS=Bosea vaviloviae; OX = 1526658 GN=queC PE=3 SV=1
MTSRALVLFSGGQDSTVALAWALARFEQVETIGFDYGQRHRVELECRKVIRDRLPALSPLYAQRLGPDHLIDLAALGAISETALTRDSEIAFAETGLPTTFVPGRNLIFLTFAAALAYRRDARHIVLGVCETDYSGYPDCRDDTIKAMQVALGLGLDRRLVLHTPLMWRDKAQTFALATALGGQALLDLVVEDSHSCYLGDRSTRHAWGYGCGHCPACDLRGRGYAAYLTSPDDSGPSHD

SEQ ID NO: 36710 - protein, 242 aa, Bosea vestrisii
  REGION 1..242: note = tr|A0A543NQA9|A0A543NQA9_9BRAD 7-cyano-7-deazaguanine synthase OS=Bosea vestrisii; OX = 151416 GN=queC PE=3 SV=1
MGESRALVLFSGGQDSTTALAWALDRFDAVETIGFDYGQRHRVEMECRQAIRAKLPALAATYAERLGPDHVVDLAALGAISETALTRETEIVFAETGLPTTFVPGRNLIFLTFAAALAYRRNLRHIVLGVCETDYSGYPDCRDDTIKAMQVALGLGLDRRLVLHTPLMWRDKAQTFALAREIGGQALLDLVLEETHSCYLGDRATRHGWGYGCGHCPACDLRAKGFAAYLAAPGNSGPSYDT

SEQ ID NO: 36711 - protein, 218 aa, Bowmanella sp.
  REGION 1..218: note = tr|A0A4Q9XJ19|A0A4Q9XJ19_9ALTE 7-cyano-7-deazaguanine synthase OS=Bowmanella sp. JS7-9; OX = 1605368 GN=queC PE=3 SV=1
MAQKAVVIYSGGMDSFTLLNKVHCSGTKVYALSFNYGQKHKKELDYAARVCQTLGINHKVVDISSINSLLAGSALTSEMDMPEGHYEDDNMKQTVVPNRNMILLSLAVGYAVSLGAEQVYYGAHGGDHAIYPDCRPLFVEKMNDVCAIANYEAVSIDVPYLHNDKTEILRDGLAMGLDYSQTWTCYNGREKACGKCGACQERLEAFRENGQQDPLTYE

SEQ ID NO: 36712 - protein, 398 aa, Brachybacterium sp.
  REGION 1..398: note = tr|A0A2N6TYD7|A0A2N6TYD7_9MICO Queuosine biosynthesis protein queC OS=Brachybacterium sp. UMB0905; OX = 2069310 GN=CJ197_14095 PE=4 SV=1
MAGGTDTVRSAVGWWLPSLGPVPTQAIDLVRIAGGAYLVDRLSGRPSAFTRRLHLTVEVADPEPWEGEAIDQLAQLLFWLTGDTWELQLVQDPTTPNDPIAGPSGGADSVALLSGGLDSYLGALHLLATLDEEPLFVGHYDTATAVRRAQNTVHSWLEEAHTPPPSYTQIEFTQVDDKKESSSRSRSLLFLALGTAVATSRGASKLFVPENGFTSLNLPLHPNRAGALSTRSTHPETFYRVNLLLQSLNLSLAVTNPFATFTKGEEMRLVADSHPPGGWDRIAGLTVSCSKLDGARIKGGNSTLNCGLCYACVTRRGAFIAAGVNDSTSYLSDGLTGNARLELLERRYSDRAAISYATTRGIDDDVIDAGTWPPDADLDEISDLARRGLAELGKVTLI

SEQ ID NO: 36713 - protein, 247 aa, Brachymonas denitrificans
  REGION 1..247: note = tr|A0A1H8EPN3|A0A1H8EPN3_9BURK 7-cyano-7-deazaguanine synthase OS=Brachymonas denitrificans DSM 15123 OX=1121117 GN=queC PE=3 SV=1
MSLFPPLLPRHALVLFSGGQDSTTCLAHALSRYERVETIAFDYGQRHRVELDARLNVLQALRQQFPAWGERLGEDHLLDVNVLGHISETSLTRDTAFAMEASGLPNTFVPGRNLLFLTLAAALAYRRGMDVLVTGVCETDFSGYPDCRDDTMKAMQIALSLGMDKRLLIDTPLMWIDKAQTWQLAHELGDASGVADGGKALVDLIVEHSHTCYLGDREHRHAWGYGCGSCPACELRARGYARYSAAA

SEQ ID NO: 36714 - protein, 221 aa, Brachyspira sp.
  REGION 1..221: note = tr|R5HFC4|R5HFC4_9SPIR 7-cyano-7-deazaguanine synthase OS=Brachyspira sp. CAG:484 OX=1262759 GN=queC; PE = 3 SV=1
MNKSVILLSGGLDSLVSLGLAQKEYNVKLALTFDYGQKSAQDEIEASARISKYYGLKHEVITLEWLKNITTTSLVSDKDVPAGELLDNPEQSAKLVWVPNRNGLFLNIAGSYADAEGFTHILIGANKEEGETFPDNTQEFIERVNSEFEYSTQTHPKVLAPLINSDKNDIVRLALEHGIPLEYVKSCYKGGEKHCGECESCTRLKKALIHNGDTRFIKLLF

SEQ ID NO: 36715 - protein, 239 aa, unidentified
  source 1..239: note = Bradyrhizobiaceae bacterium
  REGION 1..239: note = tr|A0A3S0EES7|A0A3S0EES7_9BRAD 7-cyano-7-deazaguanine synthase OS=Bradyrhizobiaceae bacterium OX=2072420 GN=queC PE=3 SV=1
MSDTHDMTALVLFSGGQDSTTCLAWALDRFARIETIGFDYGQRHAIELDCRARLLDGLAQLRPEWAGKLGDGHTLEIPTLSAISETALTRDVAIEMGADGLPNTFVPGRNLVFLTFAAALAYRRGISHIVGGMCETDYSGYPDCRDETIKALQGALSLGMARPFELHTPLMWLSKAATWQLAYDLGGRDLVDLIRDQSHTCYLGERGARHDWGYGCGACPACDLRARGWHEYIAGSAQS

SEQ ID NO: 36716 - protein, 199 aa, unidentified
  source 1..199: note = Bradyrhizobiaceae bacterium
  REGION 1..199: note = tr|A0A431RTZ5|A0A431RTZ5_9BRAD 7-cyano-7-deazaguanine synthase OS=Bradyrhizobiaceae bacterium OX=2072420 GN=EKK33_06090 PE=3 SV=1
MTRSALLLSGGMDSTAIAFWKKPNIGITIDYGQRPAAAELRASAAVCAALGIEHIMARVDLSSFGSGDMAARPALGLAPRSEWWPYRNQALVTIAAMALISRDVDHLMIGTLRTDGHHADGTGEFVCHLAGLLAMQEGSMRLDAPAITFDAVELIKISGVPLDVLCWSHSCHSSDYACGECGGCRKHYRTMGAIGVDPY

SEQ ID NO: 36717 - protein, 237 aa, unidentified
  source 1..237: note = Bradyrhizobium arachidis
  REGION 1..237: note = tr|A0A1I7LPH2|A0A1I7LPH2_9BRAD 7-cyano-7-deazaguanine synthase OS=Bradyrhizobium arachidis OX=858423 GN=queC PE=3 SV=1
MSDAFSSQTALVLFSGGQDSTTCLAWALSRFARVETLGFEYGQRHAIELACRDRLLDGIKGLREDWALRLGESHTLSIPTLAAVSETALTRDVAIAMGADGLPNTFVPGRNLVFLTFAAALAYRRGITDIVGGMCETDYSGYPDCRDDTIRAMQAALSLGMARKFELHTPLMWIDKAATWKLAHDLGGDGLVDLIREQSHTCYLGERGAQHDWGYGCGECPACSLRAKGWREFVAGR

SEQ ID NO: 36718 - protein, 237 aa, Bradyrhizobium betae
  REGION 1..237: note = tr|A0A4Q1ULY8|A0A4Q1ULY8_9BRAD 7-cyano-7-deazaguanine synthase OS=Bradyrhizobium betae; OX = 244734 GN=queC PE=3 SV=1
MSDAFSSQTALVLFSGGQDSTTCLAWALSRFARVETLGFDYGQRHAVELDCRDRLVDGIKGLHADWATKLGESHTLSIPTLAAVSETALTRDVAIAMGADGLPNTFVPGRNLVFLTFAAALAYRRGITHIVGGMCETDYSGYPDCRDDTIRAMQAALSLGMARQFELHTPLMWIDKAATWKLAHDLGGDGLVDLIREHSHTCYLGERGAQHDWGYGCGECPACSLRAKGWREYVAAR

SEQ ID NO: 36719 - protein, 236 aa, Bradyrhizobium betae
  REGION 1..236: note = tr|A0A4Q1UNQ0|A0A4Q1UNQ0_9BRAD 7-cyano-7-deazaguanine synthase OS=Bradyrhizobium betae; OX = 244734 GN=queC PE=3 SV=1
MGAALSNSAALVLFSGGQDSATVLAWALKNYERVETIGFDYGQKHAVEMKQRAIFRSRLADEFPEMATRLGPDHVVALDLAGQIAGNIATYDVSRSEMLLRKKYIPGRNLIMMSLSASVAFRRGIETLACGVSETEYSGYPDCRRKAMSAIEAALNEATGFSWSVQCPLMELDKAGVWRLSRDLGGSALLELIREETHSCYEGAREKRHSWGYGCTQCDACRLREKGWREFSATSV

SEQ ID NO: 36720 - protein, 242 aa, Bradyrhizobium canariense
  REGION 1..242: note = tr|A0A1H1QJ88|A0A1H1QJ88_9BRAD 7-cyano-7-deazaguanine synthase OS=Bradyrhizobium canariense OX=255045 GN=queC PE=3 SV=1
MSTQSNDQFPTETALVLFSGGQDSATCLAWALQRFARVETLGFNYGQRHAIELECRGDLLDGMKSLRADWAAKLGDSHTLEIPTLAEISDTALTRDVAIEMGKDGLPNTFVPGRNLVFLTFAGALAYRRGITHIIGGMCETDYSGYPDCRDETIKALQAALSLGMDKQFQLHTPLMWLDKAGTWKLAHELGGAGLVDLIREHSHTCYLGERGARHDWGYGCGECPACALRAKGWREYAATTP

SEQ ID NO: 36721 - protein, 237 aa, Bradyrhizobium canariense
  REGION 1..237: note = tr|A0A1X3EAW2|A0A1X3EAW2_9BRAD 7-cyano-7-deazaguanine synthase OS=Bradyrhizobium canariense OX=255045 GN=queC PE=3 SV=1
MTDASSSETALVLFSGGQDSTTCLAWALNRFAHVETLGFDYGQRHAIELACRDRLFDGIKGLRTDWASRLGESHTLAIPTLAAVSETALTRDVAIAMGADGLPNTFVPGRNLVFLTFAAALAYRRGISYIVGGMCETDYSGYPDCRDDAIRAMQAALSLGMARKFELHTPLMWIDKAATWKLAHDLGGDGLVDLIREQSHTCYLGERGAQHDWGYGCGECPACSLRAKGWREYVAGR

SEQ ID NO: 36722 - protein, 237 aa, unidentified
  source 1..237: note = Bradyrhizobium centrolobii
  REGION 1..237: note = tr|A0A176YGJ4|A0A176YGJ4_9BRAD 7-cyano-7-deazaguanine synthase OS=Bradyrhizobium centrolobii OX=1505087 GN=queC PE=3 SV=1
MSEPFSSETALVLFSGGQDSTTCLAWALSRFARVETLGFEYGQRHAIELACRDRLLDGLKAVRTEWAEKLGESHTLSIPTLAAVSETALTRDVAIAMGADGLPNTFVPGRNLVFLTFAAALAYRRGVTHIVGGMCETDYSGYPDCRDETIRAMQAALSLGMAKKFELHTPLMWIDKAATWRLAHDLGGQGLVDLIREQSHTCYLGERGARHDWGYGCGECPACSLRAKGWKEYAAAS

SEQ ID NO: 36723 - protein, 238 aa, unidentified
  source 1..238: note = Bradyrhizobium daqingense
  REGION 1..238: note = tr|A0A562LCE3|A0A562LCE3_9BRAD 7-cyano-7-deazaguanine synthase OS=Bradyrhizobium daqingense OX=993502 GN=queC PE=3 SV=1
MNDAFSSETALVLFSGGQDSTTCLAWALSRFARVETLGFEYGQRHAIELACRDRLVDGIKSLREDWAEKLGESHTLSIPTLAAVSETALTRDVAIAMGADGLPNTFVPGRNLVFLTFAAALAYRRGITHIVGGMCETDYSGYPDCRDDTIRAMQAALSLGMARTFALHTPLMWIDKAATWKLAQDLGGEGLVDLIREQSHTCYLGERGAQHDWGYGCGECPACSLRAKGWREFVAERK

SEQ ID NO: 36724 - protein, 237 aa, unidentified
  source 1..237: note = Bradyrhizobium diazoefficiens
  REGION 1..237: note = sp|Q89LP8|QUEC_BRADU 7-cyano-7-deazaguanine synthase; OS = Bradyrhizobium diazoefficiens (strain JCM 10833 / IAM 13628 / NBRC 14792 / USDA 110) OX=224911 GN=queC PE=3 S V=2
MSDAFSSETALVLFSGGQDSTTCLAWALSRFARVETLGFDYGQRHAVELACRDRLFDGLKGLRADWADKLGESHTLSIPTLAAISDTALTRDVAIAMGADGLPNTFVPGRNLVFLTFAAALAYRRGITHIVGGMCETDYSGYPDCRDETVRAMQAALSLGMARKFELHTPLMWIDKAATWKLAHDLGGEGLVDLIREQSHTCYLGERGAQHEWGYGCGECPACSLRAKGWNEYVAHR

SEQ ID NO: 36725 - protein, 243 aa, unidentified
  source 1..243: note = Bradyrhizobium diazoefficiens
  REGION 1..243: note = tr|A0A2A6MVK7|A0A2A6MVK7_9BRAD 7-cyano-7-deazaguanine synthase OS=Bradyrhizobium diazoefficiens OX=1355477 GN=queC PE=3 SV=1
MLKRGAMSDAFSSETALVLFSGGQDSTTCLAWALSRFARVETLGFDYGQRHAVELACRDRLFDGLKGLRADWADKLGESHTLSIPTLAAISDTALTRDVAIAMGADGLPNTFVPGRNLVFLTFAAALAYRRGITHIVGGMCETDYSGYPDCRDETVRAMQAALSLGMARKFELHTPLMWIDKAATWKLAHDLGGEGLVDLIREQSHTCYLGERGAQHEWGYGCGECPACSLRAKGWNEYVAHR

SEQ ID NO: 36726 - protein, 242 aa, Bradyrhizobium elkanii
  REGION 1..242: note = tr|A0A0D1P7I4|A0A0D1P7I4_BRAEL 7-cyano-7-deazaguanine synthase OS=Bradyrhizobium elkanii; OX = 29448 GN=queC PE=3 SV=1
MTHQNNSETALVLFSGGQDSTTCLAWALDRFARVEMLGFTYGQRHAIELDCRDRLLDGIRSVRPDWAAKLGDNHTLAIPTLSEISDTALTRDVAIEMGADGLPNTFVPGRNLVFLTFAAALAYRRGIRHIIGGMCETDYSGYPDCRDETIKALRSALNLGMARDFELHTPLMWLDKAATWRLAHELGGAGLVDLIREHSHTCYLGERGAQHDWGYGCGECPACSLRAKGWREYVAQGGGADR

SEQ ID NO: 36727 - protein, 239 aa, Bradyrhizobium elkanii
  REGION 1..239: note = tr|A0A4Q4K2G7|A0A4Q4K2G7_BRAEL 7-cyano-7-deazaguanine synthase OS=Bradyrhizobium elkanii; OX = 29448 GN=queC PE=3 SV=1
MTDQNASDTALVLFSGGQDSTTCLAWALSRFARVEMLGFTYGQRHAIELDCRDQLLAGIKRVRPEWSAKLGDSHTLDIPTLSEISDTALTRDVAIEMGADGLPNTFVPGRNLVFLTFAGALAYRRGIRHIIGGMCETDYSGYPDCRDETIKALQSALNLGMARDFELHTPLMWLDKAATWRLAHELGGAGLVDLIREHSHTCYLGERGAQHDWGYGCGECPACSLRAKGWREYVARGGP

SEQ ID NO: 36728 - protein, 236 aa, unidentified
  source 1..236: note = Bradyrhizobium erythrophlei
  REGION 1..236: note = tr|A0A1N6KE10|A0A1N6KE10_9BRAD 7-cyano-7-deazaguanine synthase OS=Bradyrhizobium erythrophlei OX=1437360 GN=queC PE=3 SV=1
MNNQSPSDTALVLFSGGQDSTTCLAWALQRFAHVEMIGFSYGQRHAIELACRDRLLTGMKALRPDWAAKLGESHTLEVPTLAEISDTALTRDVAIEMGADGLPNTFVPGRNLVFLTFAAALAYRRGIRHIIGGMCETDYSGYPDCRDETIKALNAALSLGMAKSFELHTPLMWLDKAATWKLAHDLGGAGLVDLIREHSHTCYLGERGAPHEWGYGCGECPACALRARGWREYSGR

SEQ ID NO: 36729 - protein, 245 aa, unidentified
  source 1..245: note = Bradyrhizobium erythrophlei
  REGION 1..245: note = tr|A0A1M5RDJ2|A0A1M5RDJ2_9BRAD 7-cyano-7-deazaguanine synthase OS=Bradyrhizobium erythrophlei OX=1437360 GN=queC PE=3 SV=1
MNANGQAMNERPSSETALVLFSGGQDSATCLAWALERFARVEMLGFDYGQRHAIELECRERLLDGFKSQRTDWAAKLGESHTLKIPTLAEISDTALTRDVAIAIGADGLPNTFVPGRNLVFLTFAAALAYRRGIDHIIGGMCETDYSGYPDCRDETIRALQTALNLGMNKEFQLHTPLMWLDKASTWKLANELGGAGLVDLIREHSHTCYLGERGARHDWGYGCGECPACALRAKGWREYAAAAA

SEQ ID NO: 36730 - protein, 238 aa, unidentified
  source 1..238: note = Bradyrhizobium genosp.
  REGION 1..238: note = tr|A0A4Q7FH20|A0A4Q7FH20_9BRAD 7-cyano-7-deazaguanine synthase OS=Bradyrhizobium genosp. SA-3 OX=508868 GN=queC PE=3 SV=1
MSDAFSSQTALVLFSGGQDSTTCLAWALSRFARVETLGFDYGQRHAIELACRDRLFEGIKGLRADWAAKLGDSHTLSIPTLAAVSETALTRDVAIAMGADGLPNTFVPGRNLVFLTFAAALAYRRGITHIVGGMCETDYSGYPDCRNETIRAMQAALSLGMARSFELHTPLMWIDKAATWKLAHDLGGDGLVDLIREQSHTCYLGERGAQHEWGYGCGECPACGLRAKGWREFVAGRK

SEQ ID NO: 36731 - protein, 237 aa, unidentified
  source 1..237: note = Bradyrhizobium guangdongense
  REGION 1..237: note = tr|A0A410V7A9|A0A410V7A9_9BRAD 7-cyano-7-deazaguanine synthase OS=Bradyrhizobium guangdongense OX=1325090 GN=queC PE=3 SV=1
MSEAFSSQTALVLFSGGQDSTTCLTWALSRFARVETLGFEYGQRHAVELDCRQRLFDGIKTLRSDWAAKLGESHTLSIPTLAAVSETALTRDVAIAMGADGLPNTFVPGRNLVFLTFAAALAYRRGITHIVGGMCETDYSGYPDCRDETIRAMQSALSLGMAREFELHTPLMWIDKAATWKLAHDLGGEGLVDLIRDQSHTCYLGERGARHDWGYGCGECPACSLRAKGWREYVAGR

SEQ ID NO: 36732 - protein, 237 aa, unidentified
  source 1..237: note = Bradyrhizobium guangzhouense
  REGION 1..237: note = tr|A0A4Q0RG80|A0A4Q0RG80_9BRAD 7-cyano-7-deazaguanine synthase OS=Bradyrhizobium guangzhouense OX=1325095 GN=queC PE=3 SV=1
MSDKFSSETALVLFSGGQDSTTCLAWALSRFARVETLGFEYGQRHAVELDCRDRLFEGIKALRADWAAKLGDSHTLSIPTLAAVSETALTRDVAIAMGADGLPNTFVPGRNLVFLTFAAALAYRRGISHIVGGMCETDYSGYPDCRDETIRAMQSALSLGMARRFELHTPLMWIDKAATWKLAHDLGGDALVDLIREQSHTCYLGERGARHDWGYGCGECPACSLRAKGWREFVAGR

SEQ ID NO: 36733 - protein, 237 aa, unidentified
  source 1..237: note = Bradyrhizobium huanghuaihaiense
  REGION 1..237: note = tr|A0A562RI91|A0A562RI91_9BRAD 7-cyano-7-deazaguanine synthase OS=Bradyrhizobium huanghuaihaiense OX=990078 GN=queC PE=3 SV=1
MIDAFSSQTALVLFSGGQDSTTCLAWALNRFARVETLGFEYGQRHAIELACRDRLFDGIKGLRADWAAKLGESHTLSIPTLAAVSETALTRDVAIAMGADGLPNTFVPGRNLVFLTFAAALAYRRGITHIVGGMCETDYSGYPDCRDETIRAMQAALSLGMARPFELHTPLMWIDKAATWNLAHDLGGDGLVDLIREQSHTCYLGERGAQHDWGYGCGECPACSLRAKGWREYVAGR

SEQ ID NO: 36734 - protein, 237 aa, unidentified
  source 1..237: note = Bradyrhizobium icense
  REGION 1..237: note = tr|A0A1B1UHF0|A0A1B1UHF0_9BRAD 7-cyano-7-deazaguanine synthase OS=Bradyrhizobium icense; OX = 1274631 GN=queC PE=3 SV=1
MSDRSSSETALVLFSGGQDSTTCLAWALRRFARVEMLGFSYGQRHAIELECRDRLLAGIKSLRPDWAAKLGESHTLEIPTLAEISDTALTRDVAIAMGADGLPNTFVPGRNLVFLTFAAALAYRRGIGHIVGGMCETDYSGYPDCRDHTIKALQSALNLGMAKNFELHTPLMWLDKAATWKLAHELGGAGLVDLIREQSHTCYLGERGAQHDWGYGCGECPACTLRAKGWREYAALS

SEQ ID NO: 36735 - protein, 235 aa, unidentified
  source 1..235: note = Bradyrhizobium icense
  REGION 1..235: note = tr|A0A533J7Z9|A0A533J7Z9_9BRAD 7-cyano-7-deazaguanine synthase OS=Bradyrhizobium icense; OX = 1274631 GN=queC PE=3 SV=1
MYNKETAMVLFSGGQDSTTCLAWALDRFARVEMLGFAYGQRHAIELDCRDRLLAGIRSAYPDWTAKLGESHTLEIPTLAEISDTALTRDVEIKMGADGLPNTFVPGRNLVFLTFAAALAYRRGIRHIVGGMCETDYSGYPDCRDETIKALQNALNLGMAKNFELHTPLMWLDKANTWKLAHDLGGAGLVDLIREHSHTCYLGERGAQHDWGYGCGECPACSLRAKGWREYAASNA

SEQ ID NO: 36736 - protein, 237 aa, Bradyrhizobium japonicum
  REGION 1..237: note = tr|A0A023XEL1|A0A023XEL1_BRAJP 7-cyano-7-deazaguanine synthase OS=Bradyrhizobium japonicum SEMIA 5079 OX=476282 GN=queC PE=3 SV=1
MSDAFSSQTALVLFSGGQDSTTCLAWALSRFARVETLGFDYGQRHAIELACRDRLFDGIKGLRADWAARLGESHTLSIPTLAAVSETALTRDVAIAMGADGLPNTFVPGRNLVFLTFAAALAYRRGITHVVGGMCETDYSGYPDCRDDTIRAMQAALSLGMARQFELHTPLMWIDKAATWQLAHDLGGAGLVDLIREQSHTCYLGERGAQHDWGYGCGECPACSLRAKGWREFAAGR

SEQ ID NO: 36737 - protein, 237 aa, Bradyrhizobium japonicum
  REGION 1..237: note = tr|A0A4Y3YIL3|A0A4Y3YIL3_BRAJP 7-cyano-7-deazaguanine synthase OS=Bradyrhizobium japonicum OX=375 GN=queC PE=3 SV=1
MSDAFSSQTALVLFSGGQDSTTCLAWALSRFARVETLGFDYGQRHAIELACRDRLFDGIKGLRTDWAARLGESHTLSIPTLAAVSETALTRDVAIAMGADGLPNTFVPGRNLVFLTFAAALAYRRGITHIVGGMCETDYSGYPDCRDDTIRAMQAALSLGMARQFELHTPLMWIDKAATWQLAHDLGGAGLVDLIREQSHTCYLGERGAQHDWGYGCGECPACSLRAKGWREFAAGR

SEQ ID NO: 36738 - protein, 236 aa, Bradyrhizobium jicamae
  REGION 1..236: note = tr|A0A0R3M4R3|A0A0R3M4R3_9BRAD 7-cyano-7-deazaguanine synthase OS=Bradyrhizobium jicamae; OX = 280332 GN=queC PE=3 SV=1
MSDQSSSETALVLFSGGQDSTTCLAWALRRFARVEMLGFSYGQRHAIELACRDRLLSGMKSLQPDWAAKLGDSHTLEIPTLAEISDTALTRDVAIAMGADGLPNTFVPGRNLVFLTFAAALAYRRGIRHIVGGMCETDYSGYPDCRDETIKALQGALNLGMAKNFELHTPLMWLDKANTWKLAHELGGAGLVDLIREHSHTCYLGERGAQHDWGYGCGECPACALRAKGWREYAGA

SEQ ID NO: 36739 - protein, 196 aa, Bradyrhizobium lablabi
  REGION 1..196: note = tr|A0A1H4XVQ8|A0A1H4XVQ8_9BRAD 7-cyano-7-deazaguanine synthase OS=Bradyrhizobium lablabi; OX = 722472 GN=SAMN05444171_3118 PE=3 SV=1
MKRATVLLSGGIDSAATALFLKSSGFAVRGLFVDYGQASLVLEQKAVDRLRHLIGITVDEICASSLSSQGVGELTGRNAFLVFSAALLGNCRSGAIAIGIHSGTPYYDCSPDFLEKVDALVQECSAGKLFVLAPFVRWSKDDVYSYFLSQSIPLDETYSCEAGTAPSCGQCASCLDRKRLECSLRGAPSDSETPQN

SEQ ID NO: 36740 - protein, 236 aa, Bradyrhizobium lablabi
  REGION 1..236: note = tr|A0A2H9VCV4|A0A2H9VCV4_9BRAD 7-cyano-7-deazaguanine synthase OS=Bradyrhizobium lablabi; OX = 722472 GN=queC PE=3 SV=1
MSETNSETALVLFSGGQDSTTCLAWALNRFARVEMLGFAYGQRHAIELDCRERLLSGIQSVRPDWTAKLGESHTLEIPTLAEISDTALTRDVAIAMGEDGLPNTFVPGRNLVFLTFAAALAYRRGIRHIIGGMCETDYSGYPDCRDETIKALQSALNLGMAKNFELHTPLMWLDKASTWKLAHDLGGAGLVDLIREHSHTCYLGERGAQHDWGFGCGECPACSLRAKGWREYAARR

SEQ ID NO: 36741 - protein, 237 aa, Bradyrhizobium liaoningense
  REGION 1..237: note = tr|A0A151FIV4|A0A151FIV4_9BRAD 7-cyano-7-deazaguanine synthase OS=Bradyrhizobium liaoningense OX=43992 GN=queC PE=3 SV=1
MSDAFSSETALVLFSGGQDSTTCLAWALSRFARVETLGFDYGQRHAIELACRDRLFEGIKALRAEWAAKLGESHTLSIPTLAAVSETALTRDVAIAMGADGLPNTFVPGRNLVFLTFAAALAYRRGISHIVGGMCETDYSGYPDCRDETIRAMQAALSLGMARKFELHTPLMWIDKAATWKLAHDLGGEGLVDLIREQSHTCYLGERGAQHDWGYGCGECPACSLRAKGWRQFVAGK

SEQ ID NO: 36742 - protein, 425 aa, Bradyrhizobium liaoningense
  REGION 1..425: note = tr|A0A151FIT7|A0A151FIT7_9BRAD 7-cyano-7-deazaguanine synthase OS=Bradyrhizobium liaoningense OX=43992 GN=A1D31_35900 PE=3 SV=1
MKIICALPDYDFASNPGSLGVVLYGQASNATLGSAGGAIKDVIRRKKYHPAARAWDFLSIALSVVTADLAGHRDRSPDGWTREFELEVAVADPEFWTSQVDSLESLLRYLTTDRWQLRFIGGGFQPAPERDVVRPKEDCIVLLSGGLDSFIGAIDIVANGHRPFAVSQSVRGDDEKQDDFASLIGGGLSHLRLNHNAHVPDPEDMPSQRARSIAFMAYGVLSATSLDRYHSGERITLNVCENGFISINPPLTDMRLGSLSTRTCHPVVLTILQRVLDAADLRVQITNPYQSKTKGEMLAEGLDQPLLLANAHRTTSCGRFKRYGYKHCGRCVPCLIRRAAFTHWGVADRTTYKYKSLYKDDKEHARSDDVRAAAMAVADVKERGVEAWLGASLSSSLIYDKDVLRQVARRGLDEVARFLQTQKIR

SEQ ID NO: 36743 - protein, 236 aa, unidentified; identical to SEQ ID NO: 35763
  source 1..236: note = Bradyrhizobium lupini
  REGION 1..236: note = tr|K5D0V0|K5D0V0_RHILU 7-cyano-7-deazaguanine synthase OS=Bradyrhizobium lupini HPC(L) OX=1229491; GN = queC PE=3 SV=1

SEQ ID NO: 36744 - protein, 240 aa, unidentified
  source 1..240: note = Bradyrhizobium macuxiense
  REGION 1..240: note = tr|A0A109JSL7|A0A109JSL7_9BRAD 7-cyano-7-deazaguanine synthase OS=Bradyrhizobium macuxiense OX=1755647 GN=queC PE=3 SV=1
MNDQINPDTALVLFSGGQDSTTCLAWALSRFARVEMLGFTYGQRHAIELECRDRLLDGIKALRPDWAARLGDSHTLAIPTLSEISDTALTRDVAIEMGADGLPNTFVPGRNLVFLTFAAALAYRRGIRHVIGGMCETDYSGYPDCRNDTIKALQSALNLGMAKNFELHTPLMWLDKAATWRLADELGGAGLVDLIREHSHTCYLGERGALHDWGYGCGECPACTLRAKGWREYAAQHVNH

SEQ ID NO: 36745 - protein, 242 aa, unidentified
  source 1..242: note = Bradyrhizobium macuxiense
  REGION 1..242: note = tr|A0A560MD91|A0A560MD91_9BRAD 7-cyano-7-deazaguanine synthase OS=Bradyrhizobium macuxiense OX=1755647 GN=queC PE=3 SV=1
MTDQNTSDTALVLFSGGQDSTTCLAWALSRFARVEMLGFSYGQRHAVELDCRDRLLAGIKQMRPDWAAKLGDSHTLAIPTLSEISDTALTRDVAIEMGADGLPNTFVPGRNLVFLTFAAALAYRRGIRHIIGGMCETDYSGYPDCRDETIKALQSALNLGMAKDFELHTPLMWLDKAATWRLAHELGGAGLVDLIREHSHTCYLGERGAQHDWGYGCGECPACSLRAKGWREYVAQGGDDNH

SEQ ID NO: 36746 - protein, 234 aa, unidentified
  source 1..234: note = Bradyrhizobium manausense
  REGION 1..234: note = tr|A0A0R3D8F1|A0A0R3D8F1_9BRAD 7-cyano-7-deazaguanine synthase OS=Bradyrhizobium manausense OX=989370 GN=queC PE=3 SV=1
MTDFTSEAALVLFSGGQDSATCLAWALSRFARVETVGFAYGQRHAIELTCCDQLLNGLKKLRVDWASKLGDKHTLEIPTLSAISKTALTREMTIEIGADGMPNTFVPGRNLIFLTFAAALAYPRRISHIVGGMCEKDHSCAPDCRDVTIRALNNALNHGMLRDFHLHTPLMWLDKAAIWRLGSELGGAELVDLIREHSHTCYLGERGARHDWGFGCGECPACAVRAKGWREFSC

SEQ ID NO: 36747 - protein, 254 aa, unidentified
  source 1..254: note = Bradyrhizobium manausense
  REGION 1..254: note = tr|A0A0R3D618|A0A0R3D618_9BRAD 7-cyano-7-deazaguanine synthase OS=Bradyrhizobium manausense OX=989370 GN=queC PE=3 SV=1
  VARIANT 237: note = Xaa can be any naturally occurring amino acid
MSDTFSSQTALVLFSGGQDSTTCLAWALSRFARVETLGFEYGQRHAVELDCRDRLFEGIKDLRADWAAKLGESHTLSIPTLAAVSETALTRDVAIAMGADGLPNTFVPGRNLVFLTFAAALAYRRGITHIVGGMCETDYSGYPDCRDETIRAMQSALSLGMARAFELHTPLMWIDKAATWKLAHDLGGDALVDLIREQSHTCYLGERGARHEWGYGCGECPACSLRAKGWREFVAGXSSAVIASEAKQSIIFPR

SEQ ID NO: 36748 - protein, 249 aa, unidentified
  source 1..249: note = Bradyrhizobium nanningense
  REGION 1..249: note = tr|A0A4Q0RVX3|A0A4Q0RVX3_9BRAD 7-cyano-7-deazaguanine synthase OS=Bradyrhizobium nanningense OX=1325118 GN=queC PE=3 SV=1
MSDTFSSETALVLFSGGQDSTTCLAWALSRFARVETLGFDYGQRHAIELACRERLFDGVKGLRADWAAKLGDSHTLSIPTLAAVSETALTRDVEIAMGADGLPNTFVPGRNLVFLTFAAALAYRRGITHIVGGMCETDYSGYPDCRDETIRAMQTALSLGMARKFELHTPLMWIDKAATWKLAQDLGGEGLVDLIREHSHTCYLGERGAQHDWGYGCGECPACSLRAKGWREFVAGRGHTFGVITREGG

SEQ ID NO: 36749 - protein, 237 aa, unidentified
  source 1..237: note = Bradyrhizobium neotropicale
  REGION 1..237: note = tr|A0A176YZ01|A0A176YZ01_9BRAD 7-cyano-7-deazaguanine synthase OS=Bradyrhizobium neotropicale OX=1497615 GN=queC PE=3 SV=1
MSDTFSTETALVLFSGGQDSTTCLAWALSRFARVETLGFEYGQRHAIELACRDQLLGGLKGLRAEWASGLGESHTLSIPTLAAVSETALTRDVAIAMGADGLPNTFVPGRNLVFLTFAAALAYRRGITHIVGGMCETDYSGYPDCRDETIRAMQAALSLGMARKFELHTPLMWIDKAATWKLAHDLGGQGLVDLIREQSHTCYLGERGAQHDWGYGCGECPACSLRAKGWKEYVAAS

SEQ ID NO: 36750 - protein, 238 aa, unidentified
  source 1..238: note = Bradyrhizobium oligotrophicum
  REGION 1..238: note = tr|M4Z8X6|M4Z8X6_9BRAD 7-cyano-7-deazaguanine synthase OS=Bradyrhizobium oligotrophicum S58 OX=1245469; GN = queC PE=3 SV=1
MSEQDKTALVLFSGGQDSTTCLAWALDRFARVETIGFAYGQRHAVELDCRGRLTDGIARVRPDWADKLGDSHTLDIPTLASISETALTRDVAIEMGADGLPNTFVPGRNLVFLTFAAALAYRRGIRHIVGGMCETDYSGYPDCRDETIKALQGALSLGMARSFELHTPLMWLSKAATWQLAHDLGGAGLVDLIRDQSHTCYLGERGARHEWGYGCGQCPACELRAKGWREYIAGGAPF

SEQ ID NO: 36751 - protein, 237 aa, unidentified
  source 1..237: note = Bradyrhizobium ottawaense
  REGION 1..237: note = tr|A0A2U8PEX0|A0A2U8PEX0_9BRAD 7-cyano-7-deazaguanine synthase OS=Bradyrhizobium ottawaense OX=931866 GN=queC PE=3 SV=1
MSDAISSQTALVLFSGGQDSTTCLAWALSRFSRVETLGFDYGQRHAIELDCRDRLFDGIKDLRADWAAKLGESHTLSIPTLAAVSETALTRDVAIAMGADGLPNTFVPGRNLVFLTFAAALAYRRGITHIVGGMCETDYSGYPDCRDDTIRAMQAALSLGMARPFELHTPLMWIDKAATWQLAQDLGGEGLVDLIREHSHTCYLGERGAQHEWGYGCGECPACSLRAKGWREFVAGR

SEQ ID NO: 36752 - protein, 237 aa, unidentified
  source 1..237: note = Bradyrhizobium retamae
  REGION 1..237: note = tr|A0A0R3MWI3|A0A0R3MWI3_9BRAD 7-cyano-7-deazaguanine synthase OS=Bradyrhizobium retamae; OX = 1300035 GN=queC PE=3 SV=1
MSDQSPSETALVLFSGGQDSTTCLAWALRQFARVEMLGFSYGQRHAIELDCRDRLLSGLRSLRPDWAAKLGESHTLEIPTLAEISDTALTRDVAIEMGADGLPNTFVPGRNLVFLTFAAALAYRRGIRHIVGGMCETDYSGYPDCRDETIKAMQSALNLGMAKNFELHTPLMWLDKAATWRLAHELGGAGLVDLIREHSHTCYLGERGAQHDWGYGCGECPACALRAKGWREYAALA

SEQ ID NO: 36753 - protein, 237 aa, unidentified
  source 1..237: note = Bradyrhizobium rifense
  REGION 1..237: note = tr|A0A5D3KPX4|A0A5D3KPX4_9BRAD 7-cyano-7-deazaguanine synthase OS=Bradyrhizobium rifense; OX = 515499 GN=queC PE=3 SV=1
MSDGFSSQTALVLFSGGQDSTTCLAWALSRFAHVETLGFEYGQRHAVELDCRDRLFDGIRGLRADWAAKLGESHTLSIPTLAAVSETALTRDVAIAMGADGLPNTFVPGRNLVFLTFAAALAYRRGITHIVGGMCETDYSGYPDCRDDTIRAMQAALSLGMARAFELHTPLMWIDKAATWKLAQDLGGDGLVDLIREQSHTCYLGERGAQHDWGYGCGECPACSLRAKGWREFVAGR

SEQ ID NO: 36754 - protein, 237 aa, unidentified
  source 1..237: note = Bradyrhizobium sacchari
  REGION 1..237: note = tr|A0A560KKC2|A0A560KKC2_9BRAD 7-cyano-7-deazaguanine synthase OS=Bradyrhizobium sacchari; OX = 1399419 GN=queC PE=3 SV=1
MSDAFSSDTALVLFSGGQDSTTCLAWALSRFARVETLGFEYGQRHAIELVCRDRLFDGLKGLRADWAARLGESHTLSIPTLAAVSETALTRDVAIAMGADGLPNTFVPGRNLVFLTFAAALAYRRGITHIVGGMCETDYSGYPDCRDETIRAMQAALSLGMARKFELHTPLMWIDKAATWKLAHDLGGDGLVDLIREQSHTCYLGERGAQHDWGYGCGACPACSLRAKGWREFVAGK

SEQ ID NO: 36755 - protein, 208 aa, unidentified
  source 1..208: note = Bradyrhizobium sacchari
  REGION 1..208: note = tr|A0A560HW20|A0A560HW20_9BRAD 7-cyano-7-deazaguanine synthase OS=Bradyrhizobium sacchari; OX = 1399419 GN=FBZ95_110109 PE=3 SV=1
MTPVLLLASGGLDSTTVAYWLHEKGETILPIFFDYGQHCVETEWATLHHVLPKTRVIAPRRIDISGIFCGSKSRLIAEPNLWLDNVDDSDLYIPYRTLLFFSCAAAVAQTVKLTQVYSGFINSNHAKELDCSATFLNSLDALAENVGPVRFNMPFRDKTKTEIVELARGLEVPIGSTFSCQVYSDIPCGACPNCVERIKAIEGAGLAT

SEQ ID NO: 36756 - protein, 238 aa, unidentified
  source 1..238: note = Bradyrhizobium shewense
  REGION 1..238: note = tr|A0A1C3VYN1|A0A1C3VYN1_9BRAD 7-cyano-7-deazaguanine synthase OS=Bradyrhizobium shewense; OX = 1761772 GN=queC PE=3 SV=1
MSDPLSSQTALVLFSGGQDSTTCLAWALSRFSRVETLGFDYGQRHAVELDCRDRLFDGIKDLRADWAAKLGESHTLSIPTLAAVSETALTRDVAIAMGADGLPNTFVPGRNLVFLTFAAALAYRRGITHIVGGMCETDYSGYPDCRDDTIRAMQAALSLGMARQFELHTPLMWIDKAATWQLAQDLGGEGLVDLIREHSHTCYLGERGAQHEWGFGCGECPACSLRAKGWREFVAGRK

SEQ ID NO: 36757 - protein, 236 aa, Bradyrhizobium sp.
  REGION 1..236: note = sp|A4YUN8|QUEC_BRASO 7-cyano-7-deazaguanine synthase; OS = Bradyrhizobium sp. (strain ORS 278) OX=114615 GN=queC; PE = 3 SV=2
MSEQDATALVLFSGGQDSTTCLAWALDRFARVETIGFSYGQRHGIELDCRARLRDGIAQLRADWADKLGCEHTLDIPTLAAISETALTRDVAIEMGADGLPNTFVPGRNLVFLTFAAALAYRRGIRHIVGGMCETDYSGYPDCRDETIKALQVALSLGMARPFELHTPLMWLTKAATWQLAHDLGGRGLVDLIRDESHTCYLGERGARHDWGHGCGRCPACELRAHGWRAYVGGGA

SEQ ID NO: 36758 - protein, 242 aa, Bradyrhizobium sp.
  REGION 1..242: note = tr|A0A1B9Z0V1|A0A1B9Z0V1_9BRAD 7-cyano-7-deazaguanine synthase OS=Bradyrhizobium sp. LMTR 3 OX=189873 GN=queC PE=3 SV=1
MSDQSPSETALVLFSGGQDSTTCLAWALRRFARVEMLGFSYGQRHAIELECRDRLLSGLRSLRPDWAAKLGESHTLEIPTLAEISDTALTRDVAIEMGADGLPNTFVPGRNLVFLTFAAALAYRRGIRHIVGGMCETDYSGYPDCRDETIKALQSALNLGMAKNFELHTPLMWLDKAATWKLAHELGGAGLVDLIREHSHTCYLGERGAQHDWGYGCGECPACALRAKGWREYSVVVTREGG

SEQ ID NO: 36759 - protein, 237 aa, unidentified
  source 1..237: note = Bradyrhizobium stylosanthis
  REGION 1..237: note = tr|A0A560E5S6|A0A560E5S6_9BRAD 7-cyano-7-deazaguanine synthase OS=Bradyrhizobium stylosanthis OX=1803665 GN=queC PE=3 SV=1
MSDAFSSQTALVLFSGGQDSTTCLAWALSRFARVETLGFEYGQRHAIELACRDSLFDGVKALRPDWAAKLGESHTLSIPTLAAVSETALTRDVAIAMGADGLPNTFVPGRNLVFLTFAAALAYRRGITHIVGGMCETDYSGYPDCRNDTIQAMQAALSLGMARQFELHTPLMWIDKAATWKLAHDLGGEGLVDLIREKSHTCYLGERGARHDWGYGCGECPACSLRAKGWREFAAAR

SEQ ID NO: 36760 - protein, 237 aa, unidentified
  source 1..237: note = Bradyrhizobium valentinum
  REGION 1..237: note = tr|A0A0R3LK60|A0A0R3LK60_9BRAD 7-cyano-7-deazaguanine synthase OS=Bradyrhizobium valentinum OX=1518501 GN=queC PE=3 SV=1
MSDQSSSETALVLFSGGQDSTTCLAWALRRFARVEMLGFSYGQRHAIELECRDRLLSGIKSLRPDWAAKLGESHTLEIPTLSEISDTALTRDVAIAMGEDGLPNTFVPGRNLVFLTFAAALAYRRGIRHIIGGMCETDYSGYPDCRNETIKALQSALNLGMAKNFELHTPLMWLDKASTWKLAHELGGAGLVDLIREHSHTCYLGERGAQHDWGYGCGECPACALRAKGWREYAERA

SEQ ID NO: 36761 - protein, 238 aa, unidentified
  source 1..238: note = Bradyrhizobium vignae
  REGION 1..238: note = tr|A0A4Q0R379|A0A4Q0R379_9BRAD 7-cyano-7-deazaguanine synthase OS=Bradyrhizobium vignae; OX = 1549949 GN=queC PE=3 SV=1
MSDASSSETALVLFSGGQDSTTCLAWALSRFARVETLGFDYGQRHAIELACRDRLLDGIKELRADWAAKLGESHTLSIPTLAAVSETALTRDVAIAMGADGLPNTFVPGRNLVFLTFAAALAYRRGISHIVGGMCETDYSGYPDCRDETIRAMQAALSLGMAKQFELHTPLMWIDKAATWKLAHDLGGDGLVDLIREQSHTCYLGERGAQHDWGYGCGECPACSLRAKGWREYVAGRK

SEQ ID NO: 36762 - protein, 269 aa, Bradyrhizobium yuanmingense
  REGION 1..269: note = tr|A0A1C3W2F7|A0A1C3W2F7_9BRAD 7-cyano-7-deazaguanine synthase OS=Bradyrhizobium yuanmingense OX=108015 GN=queC PE=3 SV=1
MPKAGPRSQRKAAELADFHRLAGKSCDAKARAMSDAFSSQTALVLFSGGQDSTTCLAWALSRFARVETLGFDYGQRHAIELACRDRLLDGIKGLRADWAARLGESHTLSIPTLAAVSETALTRDVAIAMGADGLPNTFVPGRNLVFLTFAAALAYRRGISHIVGGMCETDYSGYPDCRDETVRAMQAALSLGMARQFELHTPLMWIDKAATWKLAHDLGGAGLVDLIREQSHTCYLGERGARHDWGYGCGECPACSLRAKGWNEYVAGR

SEQ ID NO: 36763 - protein, 457 aa, Bradyrhizobium yuanmingense
  REGION 1..457: note = tr|A0A4E0QEP2|A0A4E0QEP2_9BRAD Uncharacterized protein OS=Bradyrhizobium yuanmingense OX=108015; GN = EOW77_0034290 PE=4 SV=1
MNITSYKPKISERAVDVVEAGRRPRKGRIGLELNRDLEFSTDALRSYAFARWEPMIYDAMVVAAAVEFSDRAIKRPSRGWTRKTEVRIPVHDPMRWSDPSVSGALHEVLGFLTGDLWEIGFVKRAKIESSPVQECLQIPRPTKAVIAYSDGMDSRAVAGLLGKTLGEELVRVRVGAKAAGKPVVDGRLQPFTKVPYKFKSVLTNGETTARSRGFKFALISGLAAYLTNASDILVPESGQGAIGPALVTVSHGYPDYRNHPRFTRLMSRFLKALTGHAVEFKFPRLWNTKGETLRAFAALPEGDSWKDTKSCWRDSRWSTLNGTKLQCGVCAACMLRRMSVHAAGLSEAPGRYICEDLRAPTFAEAIHPEFQRKSAAFEQYAIAGTLHLDHMADMAEDDARPAVRRHAVLTGMALGLSAKDAEEKLVGMLERHAAEWNGFVNDLGARSFVRKWTRASK

SEQ ID NO: 36764 - protein, 237 aa, unidentified
  source 1..237: note = Bradyrhizobium zhanjiangense
  REGION 1..237: note = tr|A0A4Q0QNX7|A0A4Q0QNX7_9BRAD 7-cyano-7-deazaguanine synthase OS=Bradyrhizobium zhanjiangense OX=1325107 GN=queC PE=3 SV=1
MSDAFSSQTALVLFSGGQDSTTCLAWALSRFARVETLGFDYGQRHAIELACRDRLFAGIKALRADWAAKLGESHTLSIPTLAAVSETALTRDVAIAMGADGLPNTFVPGRNLVFLTFAAALAYRRGITHIVGGMCETDYSGYPDCRDETIRAMQAALSLGMARSFELHTPLMWIDKAATWKLAHELGGEGLVDLIREQSHTCYLGERGAQHDWGYGCGECPACSLRAKGWREFVAGR

SEQ ID NO: 36765 - protein, 237 aa, unidentified
  source 1..237: note = Bradyrhizobium zhanjiangense
  REGION 1..237: note = tr|A0A4V1L4F1|A0A4V1L4F1_9BRAD 7-cyano-7-deazaguanine synthase OS=Bradyrhizobium zhanjiangense OX=1325107 GN=queC PE=3 SV=1
MSDAFSSQTALVLFSGGQDSTTCLAWALSRFARVETLGFDYGQRHAIELACRDRLFEGIKGLRADWAAKLGESHTLSIPTLAAVSETALTRDVAIAMGADGLPNTFVPGRNLVFLTFAAALAYRRGITHIVGGMCETDYSGYPDCRDETIRAMQAALSLGMARSFELHTPLMWIDKAATWKLAHDLGGDGLVDLIREQSHTCYLGERGAQHDWGYGCGECPACSLRAKGWREFVAGR

SEQ ID NO: 36766 - protein, 424 aa, Branchiibius sp.
  REGION 1..424: note = tr|A0A151BVP0|A0A151BVP0_9MICO Queuosine biosynthesis protein queC OS=Branchiibius sp. NY16-3462-2; OX = 1807500 GN=AZH51_15870 PE=4 SV=1
MTACGAYVVRAQGDKKSRLQGYDTLKWPTAPGHTKSVVSDLAWNLAPLQDVAPAVADLVHIAAGAYMADRSTRRGARFSRDIALHVTVVAPELWTEELLDTTSELLGWLTGDTWNLTVAGGAEVDFEETLKVGENGSVALLSGGLDSFLGAIQLLMSGAETIFVGHKDSATSIRGAQSTVGTWLGQSFAPAPSYTRVQLAQAIRRREPSSRSRAFMFLSLGVAVASSLGSRSLIIPENGYTGINLPLRPNRGGALSTRSTHPETFRRVAEILTALNIDVTVTNPFEWMTKGEMMQSIRGLRPPSGWQETAAATLSCSKLGGNWFGGSPNLNCGLCVPCMVRRATFIKAEVPDKTQYLCHAISGTHLAELIDARRGDIEAVRYAIEAGADADAIDSGTWPPDYDLDRVEGLVQRGLDELAMLELP

SEQ ID NO: 36767 - protein, 207 aa, Brenneria alni
  REGION 1..207: note = tr|A0A421DJA5|A0A421DJA5_9GAMM 7-cyano-7-deazaguanine synthase OS=Brenneria alni OX=71656; GN = BIY29_18760 PE=3 SV=1
MKKVIVLSSGGLDSTTVIYDLISNKYKVKPIFFDYGQHCVKTEWERLNDVLPKQSDEPEYINISDLFRGSKSRLITEANLWKDDIKDDDLYVPYRTLLFLSAASARAQTLNITEVFAGFINSNHAKEIDCSCEFLNSIDNLTENIGPVRIKLPFRHMSKSDVARKAIELEVPIGKTFSCQAMSKFPCGACPNCVERLAALRETGLLT

SEQ ID NO: 36768 - protein, 231 aa, Brenneria alni
  REGION 1..231: note = tr|A0A421DTB0|A0A421DTB0_9GAMM 7-cyano-7-deazaguanine synthase OS=Brenneria alni OX=71656; GN = queC PE=3 SV=1
MKRAVVVFSGGQDSTTCLIQALKHYDEVHCITFDYGQRHRAEIDIARELARQLGTTAHKILDVGLLNELAASSLTRENIPVPDYDADAQGLPSTFVPGRNILFLTLASIYAYQVGAQVVITGVCETDFSGYPDCRDEFVKALNQAVVLGIARDIRYVTPLMWLNKAETWALADYYQQLATVRHHTLTCYNGIKGDGCGHCAACHLRAKGLEQYQNDPVGVMSALKQKTGLK

SEQ ID NO: 36769 - protein, 434 aa, unidentified
  source 1..434: note = Brenneria goodwinii
  REGION 1..434: note = tr|A0A0G4JXI5|A0A0G4JXI5_9GAMM Uncharacterized protein OS=Brenneria goodwinii OX=1109412 GN=BN1221_03089; PE = 4 SV=1
MTQLVFHHDHRQLPLAGDNLLPVQLYGLSGQGRGDISVIGNPAIDRIRRLGVQIPAQVMDFLSIALAVTAADTFVQRESSEDGWTRQLSLRLPLHEPSRWIGLKKELESALHFLSGDIWDFEFCDGGYAPPEPYSQHSRFHLIKLKELDCVSLFSGGLDSAIGAIDLLTLGRAPLLVSHAYKGDKSRQDQIAERLNGRYSRFEINADPHLYQGATDITMRTRSLNFLAFAAVGACAVQEVSQQKKIDLFVPENGFISLNAPLTPRRIGTLSTRTTHPHFIASIQQLFDAVGIPCQIINPYQFKTKGQMVYQCLDKQLLSEVVESTVSCSHWKRTDQQCGVCVPCIIRRASLHAGGINRDADYTFQSLAKVMNEIDRRDDLIALRIAIAQKSTLKIGTWVAKSGPLPVAAFNNFKQVFMDGLNEVENYLLSEGIV

SEQ ID NO: 36770 - protein, 232 aa, unidentified
  source 1..232: note = Brenneria goodwinii
  REGION 1..232: note = tr|A0A0G4JQ54|A0A0G4JQ54_9GAMM 7-cyano-7-deazaguanine synthase OS=Brenneria goodwinii; OX = 1109412 GN=queC PE=3 SV=1
MKRAVVVFSGGQDSTTCLIQALKHYDEVHCITFDYGQRHRAEIDIARELALQLGATAHKVLDVGLLNELAISSLTRENIPVPDYDDGETQGLPSTFVPGRNILFLTLASIYAYQVGAETVITGVCETDFSGYPDCRDEFVKALNQAIVLGMARDIRFVTPLMWLNKAETWALADYYQQLDTVRYHTLTCYNGIKGDGCGHCAACHLRANGLQEYQRDPAAVMATLKQKTGLQ

SEQ ID NO: 36771 - protein, 231 aa, Brenneria nigrifluens
  REGION 1..231: note = tr|A0A2U1UW74|A0A2U1UW74_9GAMM 7-cyano-7-deazaguanine synthase OS=Brenneria nigrifluens DSM 30175 = ATCC 13028 OX=1121120 GN=queC PE=3 SV=1
MKRAVVVFSGGQDSTTCLIQALKQYDDVHCITFDYGQRHRAEIDIARALARRLGATAHKVLDAGLLNELAASSLTRENIPVPDYDSESQGLPSTFVPGRNILFLTLAAIYAYQVGAQAVITGVCETDFSGYPDCRDEFIKALNHAVVLGTARDIRFVTPLMWLNKAETWALADYYQQLETVRDHTLTCYNGIKGEGCGQCAACRLRANGLEQYRRDPAGVMAALKQKSGLQ

SEQ ID NO: 36772 - protein, 231 aa, unidentified
  source 1..231: note = Brenneria roseae
  REGION 1..231: note = tr|A0A2U1U072|A0A2U1U072_9GAMM 7-cyano-7-deazaguanine synthase OS=Brenneria roseae subsp. americana OX=1508507 GN=queC PE=3 SV=1
MKRAVVVFSGGQDSTTCLIQALQQYDEVHCITFDYGQRHRAEIDIAKELALTLGVAAHKVLDVGLLNELAASSLTRENIPVPDYDANVQGVPSTFVPGRNILFLTLASIYAYQVGAEAVITGVCETDFSGYPDCRDEFVKALNQAIVLGIARDIRFETPLMWLNKAETWALADYYQQLDTIRHHTLTCYNGIKGDGCGHCAACHLRANGLEQYQSDPANIMSALKNKTGLR

SEQ ID NO: 36773 - protein, 231 aa, Brenneria rubrifaciens
  REGION 1..231: note = tr|A0A4P8QWX7|A0A4P8QWX7_9GAMM 7-cyano-7-deazaguanine synthase OS=Brenneria rubrifaciens; OX = 55213 GN=queC PE=3 SV=1
MKRAVVVFSGGQDSTTCLIQALQQYDEVHCITFDYGQRHRAEIDIARELALALGAAAHKMLDVGLLNELAASSLTRENIPVPDYDVNAQGVPSTFVPGRNILFLTLASIYAYQVGAEAVITGVCETDFSGYPDCRDEFVNALNHAIVLGIARDIRFETPLMWLNKAETWALADYYQQLDTIRHHTLTCYNGIKGDGCGHCAACHLRANGLEQYQRDPINIMLTLKHKTGLK

SEQ ID NO: 36774 - protein, 231 aa, Brenneria salicis
  REGION 1..231: note = tr|A0A366IBJ1|A0A366IBJ1_9GAMM 7-cyano-7-deazaguanine synthase OS=Brenneria salicis ATCC 15712 = DSM 30166 OX=714314 GN=queC PE=3 SV=1
MKRAVVVFSGGQDSTTCLIQALQNYDEVHCITFNYGQRHRAEIDIARELALTLGVAAHKVLDVGLLNELAASSLTRENIPVPDYDANAQGVPSTFVPGRNILFLTLASIYAYQVDAQAVITGVCETDFSGYPDCRDEFIKALNQAIVLGIARDIRFETPLMWLNKAETWALADYYQQLDTVRYHTLTCYNGIKGDGCGQCAACHLRANGLKQYQDEPAKIMLALKHKSGLK

SEQ ID NO: 36775 - protein, 231 aa, Brenneria sp.; identical to SEQ ID NO: 36771
  REGION 1..231: note = tr|G7LNS0|G7LNS0_9GAMM 7-cyano-7-deazaguanine synthase OS=Brenneria sp. EniD312 OX=598467 GN=queC PE=3; SV = 1

SEQ ID NO: 36776 - protein, 231 aa, Brenneria sp.
  REGION 1..231: note = tr|A0A5J5G0G9|A0A5J5G0G9_9GAMM 7-cyano-7-deazaguanine synthase QueC OS=Brenneria sp. L3-3HA OX=2590031 GN=queC PE=4 SV=1
MKRAVVVFSGGQDSTTCLIQALTQYDEVHCITFDYGQRHRVEIEVASDLARRLGAAAHKVLDVGILNELAVSSLTRDNIPVPKYSEDVQGLPATFVPGRNILFLTLAAIYAYQVEAGVVITGVCETDFSGYPDCRDEFVKSLNHAVTLGIARDIRFVTPLMWLNKAETWALADYYHQLDTVRHHTLTCYNGIKGEGCGECAACHLRANGLSEYQADPAGLMATLKQKTGLS

SEQ ID NO: 36777 - protein, 237 aa, Breoghania sp.
  REGION 1..237: note = tr|A0A346R011|A0A346R011_9RHIZ 7-cyano-7-deazaguanine synthase OS=Breoghania sp. L-A4; OX = 2304600 GN=queC PE=3 SV=1
MSATQADLDKALVLFSGGQDSATCLAWALERYAHVETLGFDYGQRHVVELACRATLRDRFAALKPEWAQRLGEDHTIDLSALGAVSDTALTRDVEIAMAEGGLPNTFVPGRNLMFLTFAAALAYRRGIKHIVTGVCETDYSGYPDCRDDTIKALQVALNLGMESRFVLHTPLMWIDKARTWRLAEDLGGTPLVETIVEHSHSCYMGTRDTLHPWGYGCGACPACELRAKGFAAHAAG

SEQ ID NO: 36778 - protein, 222 aa, Brevibacillus agri
  REGION 1..222: note = tr|A0A3M8AHD2|A0A3M8AHD2_9BACL 7-cyano-7-deazaguanine synthase OS=Brevibacillus agri; OX = 51101 GN=queC PE=3 SV=1
MKKEKAVVVFSGGQDSTTCLFWAKQQFGEVETITFDYGQRHKLEIECAQQIARELGVANTVLDMSLLNQLAPNALTRTDIDITQEEGQLPSTFVDGRNLLFLSFAGVFAKQKGARHLVTGVCETDFSGYPDCRDAFIKSLNVTLNLSMDYPFVIHTPLMWLDKAQTWKLADELGAFTYIREKTLTCYNGIKGDGCGECPACRLRKAGLDAYLSEKNEQGAHA

SEQ ID NO: 36779 - protein, 223 aa, Brevibacillus brevis
  REGION 1..223: note = tr|C0ZJI5|C0ZJI5_BREBN 7-cyano-7-deazaguanine synthase OS=Brevibacillus brevis (strain 47 / JCM 6285 / NBRC 100599) OX=358681 GN=queC PE=3 SV=1
MMKKEKAVVVFSGGQDSTTCLFWAKEQFGEVETLTFDYGQRHKLEIECAQQIAAELGVKNSVLDMSLLNQLAPNALTRTDIDITQEEGQLPSTFVDGRNLLFLSFAGVFAKQRGARHLITGVCETDFSGYPDCRDAFIKSLNVTLNLSMDYPFVIHTPLMWLNKAQTWKLADDLGAFTYIRENTLTCYNGIKGDGCGECPACHLRKAGLDTYLSEKNQPGEKA

SEQ ID NO: 36780 - protein, 222 aa, Brevibacillus brevis
  REGION 1..222: note = tr|A0A291BQ86|A0A291BQ86_BREBE 7-cyano-7-deazaguanine synthase OS=Brevibacillus brevis X23 OX=1200792 GN=queC PE=3 SV=1
MKKEKAVVVFSGGQDSTTCLFWAKEQFGEVETLTFDYGQRHKLEIECAQQIAAELGVKNSVLDMSLLNQLAPNALTRTDIDITQEEGQLPSTFVDGRNLLFLSFAGVFAKQRGARHLVTGVCETDFSGYPDCRDAFIKSLNVTLNLSMDYPFVIHTPLMWLNKAQTWKLADDLGAFTYIRENTLTCYNGIKGDGCGECPACHLRKAGLDTYLSEKNQPGEQA

SEQ ID NO: 36781 - protein, 222 aa, Brevibacillus choshinensis
  REGION 1..222: note = tr|A0A0Q3SW38|A0A0Q3SW38_BRECH 7-cyano-7-deazaguanine synthase OS=Brevibacillus choshinensis OX=54911 GN=queC PE=3 SV=1
MKKEKAVVVFSGGQDSTTCLFWAKQQFGEVETITFDYGQRHKLEIECAQEIAQELGVANTVLDMSLLNQLAPNALTRTDIDITQEEGQLPSTFVDGRNLLFLSFAGVFAKQRGARHLITGVCETDFSGYPDCRDSFVKSLNVTLNLSMDYPFVIHTPLMWLNKAETWKLADDLGAFTYIREKTLTCYNGIKGDGCGECPACHLRKAGLDTYLSEKNLQGEHA

SEQ ID NO: 36782 - protein, 223 aa, Brevibacillus fluminis
  REGION 1..223: note = tr|A0A3M8DFX3|A0A3M8DFX3_9BACL 7-cyano-7-deazaguanine synthase OS=Brevibacillus fluminis; OX = 511487 GN=queC PE=3 SV=1
MERMKQEKAVVVFSGGQDSTTCLFWAKKQFGEVEVLTFNYGQRHKQEIECARAIAAEQGVNHTILDMSLLNQLAPNALTRDDVAIEQKEGELPSTFVDGRNLLFLSFAAVYAKQAGARHLVTGVCETDFSGYPDCRDIFVKSLNVTLNLSMDYSFVIHTPLMWLNKAETWKLADELGAFDYVREKTLTCYNGIIGDGCGECPACKLRKAGLVSYLAERQEANA

SEQ ID NO: 36783 - protein, 215 aa, Brevibacillus fluminis
  REGION 1..215: note = tr|A0A3M8DWU2|A0A3M8DWU2_9BACL 7-cyano-7-deazaguanine synthase OS=Brevibacillus fluminis; OX = 511487 GN=queC PE=3 SV=1
MKTGKAIVVFSGGQDSTTCLFWALNRFKEVETVTFNYGQRHRFELDCASDIAKELSIKHHILDMSLLNQLAPNALTRKDIEIKSEEGKLPTTFVDGRNLLFLSFAAILAKQVGARNIVTGVCETDFSGYPDCRDVFIKSLNVTLNLAMDYQFIIDTPLMWLNKAQTWALADQLGVLDFVRYKTLTCYNGIIADGCGECPSCKLRKKGLDEYLSST

SEQ ID NO: 36784 - protein, 222 aa, Brevibacillus formosus
  REGION 1..222: note = tr|A0A220MKT0|A0A220MKT0_9BACL 7-cyano-7-deazaguanine synthase OS=Brevibacillus formosus; OX = 54913 GN=queC PE=3 SV=1
MKKEKAVVVFSGGQDSTTCLFWAKEQFGEVETLTFDYGQRHKLEIECAQQIAAELGVKNSVLDMSLLNQLAPNALTRTDIDITQEEGQLPSTFVDGRNLLFLSFAGVFAKQRGARHLVTGVCETDFSGYPDCRDAFIKSLNVTLNLSMDYPFVIHTPLMWLNKAQTWKLADDLGAFTYIRENTLTCYNGIKGDGCGECPACHLRKAGLDTYLSEKNHPGEQA

SEQ ID NO: 36785 - protein, 223 aa, Brevibacillus formosus
  REGION 1..223: note = tr|A0A4Y4I1S5|A0A4Y4I1S5_9BACL 7-cyano-7-deazaguanine synthase OS=Brevibacillus formosus; OX = 54913 GN=queC PE=3 SV=1
MMKKEKAVVVFSGGQDSTTCLFWAKEQFGEVETLTFDYGQRHKLEIECAQQIAAELGVKNSVLDMSLLNQLAPNALTRTDIDITQEEGQLPSTFVDGRNLLFLSFAGVFAKQRGARHLITGVCETDFSGYPDCRDAFIKSLNVTLNLSMDYPFVIHTPLMWLNKAQTWKLADDLGAFTYIRENTLTCYNGIKGDGCGDCPACHLRKAGLDTYLSEKNQPGEQA

SEQ ID NO: 36786 - protein, 222 aa, unidentified
  source 1..222: note = Brevibacillus gelatini
  REGION 1..222: note = tr|A0A3M8BCE3|A0A3M8BCE3_9BACL 7-cyano-7-deazaguanine synthase OS=Brevibacillus gelatini; OX = 1655277 GN=queC PE=3 SV=1
MKKEKAVVVFSGGQDSTTCLFWAKQQFGEVETITFDYGQRHKLEIECAQQIARELGVANTVLDMSLLNQLAPNALTRTDIDITQEEGQLPSTFVDGRNLLFLSFAGVFAKQKGARHLVTGVCETDFSGYPDCRDAFIKSLNVTLNLSMDYPFVIHTPLMWLNKAQTWKLADELGAFTYIREKTLTCYNGIKGDGCGECPACHLRKAGLDAYLSEKKEQGAHA

SEQ ID NO: 36787 - protein, 225 aa, Brevibacillus invocatus
  REGION 1..225: note = tr|A0A3M8C2S4|A0A3M8C2S4_9BACL 7-cyano-7-deazaguanine synthase OS=Brevibacillus invocatus; OX = 173959 GN=queC PE=3 SV=1
MESMKQEKAVVVFSGGQDSTTCLFWAKQQFGEVETITFDYGQRHKLEIECAQQIARELGVNNTVLDMSLLNQLAPNALTRTDIDITQEEGQLPSTFVDGRNLLFLSFAGVFAKQKGARHLVTGVCETDFSGYPDCRDSFIKSLNVTLNLAMDYPFVIHTPLMWLNKAQTWKLADDLGAFTYIREKTLTCYNGIKGDGCGECPACHLRKAGLDTYLSEKNEQGTTV

SEQ ID NO: 36788 - protein, 222 aa, Brevibacillus laterosporus
  REGION 1..222: note = tr|A0A502J1D9|A0A502J1D9_BRELA 7-cyano-7-deazaguanine synthase OS=Brevibacillus laterosporus OX=1465 GN=queC PE=3 SV=1
MKKDKAVVVFSGGQDSTTCLFWAQKQFGEVEVVTFDYGQRHKQEIDCAQKIAKEQGVKQTIMDMSLLNQLAPNALTRNDVQIEQVEGEIPNTCVDGRNLLFLSFAAVYAKQISARHIITGVCETDFSGYPDCRDSFIKSLNVTLQLAMDYPFVIHTPLMWLNKAQTWKLSDELGAFEYVREKTLTCYNGVIGDGCGECPACQLRAAGLKAYEEERAHNGKLL

SEQ ID NO: 36789 - protein, 222 aa, Brevibacillus laterosporus
  REGION 1..222: note = tr|H0UFU5|H0UFU5_BRELA 7-cyano-7-deazaguanine synthase OS=Brevibacillus laterosporus GI-9 OX=1118154; GN = queC PE=3 SV=1
MKKDKAVVVFSGGQDSTTCLFWALKQFGEVEVVTFDYGQRHKQEIECAQRIAKEQGVGQTIMDMSLLNQLAPNALTRDDVAIEQVEGEIPNTFVDGRNLLFLSFAAVYAKQIGARHIITGVCETDFSGYPDCRDSFIKSLNVTLQLAMDYPFVIHTPLMWLNKAQTWKLSDELGAFEYIREKTLTCYNGVIGDGCGECPACQLRAAGLEAYEEERANNGKLL

SEQ ID NO: 36790 - protein, 222 aa, unidentified
  source 1..222: note = Brevibacillus nitrificans
  REGION 1..222: note = tr|A0A3M8CWF5|A0A3M8CWF5_9BACL 7-cyano-7-deazaguanine synthase OS=Brevibacillus nitrificans OX=651560 GN=queC PE=3 SV=1
MKMEKAVVVFSGGQDSTTCLFWAKQQFGEVETITFDYGQRHKLEIECAQQIARELGVNNTVLDMSLLNQLAPNALTRTDIDITQEEGQLPSTFVDGRNLLFLSFAGVFAKQRGARHLVTGVCETDFSGYPDCRDSFVKSLNVTLNLAMDYPFVIHTPLMWLNKAETWMLADDLGAFTYIREKTLTCYNGIKGDGCGECPACHLRKAGLDTYLSEKNQQGEQV

SEQ ID NO: 36791 - protein, 222 aa, Brevibacillus panacihumi
  REGION 1..222: note = tr|V6M421|V6M421_9BACL 7-cyano-7-deazaguanine synthase OS=Brevibacillus panacihumi W25 OX=1408254; GN = queC PE=3 SV=1
MKKEKAVVVFSGGQDSTTCLFWAKQQFGEVETITFDYGQRHKLEIECAQQIAQELGVNNTVLDMSLLNQLAPNALTRTDIAITQEEGQLPSTFVDGRNLLFLSFAAVFAKQKGARHIVTGVCETDFSGYPDCRDAFIKSLDVTLNLAMDYPFVIHTPLMWLNKAQTWKLADDLGAFTYIREKTLTCYNGIKGDGCGECPACHLRKAGLDTYLSEKTAQGADA

SEQ ID NO: 36792 - protein, 222 aa, Brevibacillus panacihumi
  REGION 1..222: note = tr|A0A3M8CSM5|A0A3M8CSM5_9BACL 7-cyano-7-deazaguanine synthase OS=Brevibacillus panacihumi OX=497735 GN=queC PE=3 SV=1
MKKEKAVVVFSGGQDSTTCLFWAKQQFGEVETITFDYGQRHKLEIECAQQIARELGVSNTVLDMSLLNQLAPNALTRTDIAITQEEGQLPSTFVDGRNLLFLSFAAVFAKQKGARHIVTGVCETDFSGYPDCRDAFIKSLDVTLNLAMDYPFVIHTPLMWLNKAQTWKLADDLGAFTYIREKTLTCYNGIKGDGCGECPACRLRKAGLGAYLSEKTAQGADA

SEQ ID NO: 36793 - protein, 222 aa, Brevibacillus parabrevis
  REGION 1..222: note = tr|A0A4Y3PL72|A0A4Y3PL72_BREPA 7-cyano-7-deazaguanine synthase OS=Brevibacillus parabrevis OX=54914 GN=queC PE=3 SV=1
MKKEKAVVVFSGGQDSTTCLFWAKQQFGEVETITFDYGQRHKLEIECAKEIARELGVANTVLDMSLLNQLAPNALTRTDINITQEEGQLPSTFVDGRNLLFLSFAGVFAKQKGARHLVTGVCETDFSGYPDCRDAFVKSLNVTLNLSMDYPFVIHTPLMWLDKAQTWKLADELGAFTYIREKTLTCYNGIKGDGCGECPACHLRKAGLDKYLSEKTQSGANV

SEQ ID NO: 36794 - protein, 223 aa, Brevibacillus reuszeri
  REGION 1..223: note = tr|A0A0K9YLS5|A0A0K9YLS5_9BACL 7-cyano-7-deazaguanine synthase OS=Brevibacillus reuszeri; OX = 54915 GN=queC PE=3 SV=1
MKKEKAIVVFSGGQDSTTCLFWAKQQFGEVETLTFDYGQRHKLEIECAQQIARELGVPNTVLDMSLLNQLAPNALTRTDIDITQEKGQLPSTFVDGRNLLFLSFAGVFAKQRGARHLVTGVCETDFSGYPDCRDSFIKSLNVTLNLSMDYPFVIHTPLMWLTKAQTWKLADELGAFPYIRENTLTCYNGIKGDGCGECPACQLRKAGLDTYLSEREQSGERAI

SEQ ID NO: 36795 - protein, 220 aa, Brevibacillus sp.
  REGION 1..220: note = tr|A0A553KQF8|A0A553KQF8_9BACL 7-cyano-7-deazaguanine synthase OS=Brevibacillus sp. LEMMJ03 OX=2595056 GN=queC PE=3 SV=1
MKQEKAVVVFSGGQDSTTCLFWARKQFGDVAAITFDYQQRHKLEIECARQIAGELGVEHTVLDMSLLNQLAPNALTRTDIPIAQEDGQLPSTFVDGRNLLFLSFAAVFAKQRGARHLVTGVCETDFSGYPDCRDAFIKSLNVTLNLAMDYPFVIHTPLMWLNKAETWKLADELGAFDFIREKTLTCYNGIKGDGCGECPACTLRKAGLEAYLRERGEVKA

SEQ ID NO: 36796 - protein, 222 aa, Brevibacillus sp.
  REGION 1..222: note = tr|J2ZM73|J2ZM73_9BACL 7-cyano-7-deazaguanine synthase OS=Brevibacillus sp. BC25 OX=1144308 GN=queC PE=3; SV = 1
MKKEKAVVVFSGGQDSTTCLFWAKEQFGEVETLTFDYGQRHKLEIECAQQIAAELGVKNSVLDMSLLNQLAPNALTRTDIDITQEEGQLPSTFVDGRNLLFLSFAGVFAKQRGACHLVTGVCETDFSGYPDCRDAFIKSLNVTLNLSMDYPFVIHTPLMWLNKAQTWKLADDLGAFTYIRENTLTCYNGVKGDGCGECPACHLRKAGLDTYLSEKNQPGEKA

SEQ ID NO: 36797 - protein, 221 aa, unidentified
  source 1..221: note = [Brevibacterium] frigoritolerans
  REGION 1..221: note = tr|A0A4Y8U8L7|A0A4Y8U8L7_9BACI 7-cyano-7-deazaguanine synthase OS=[Brevibacterium] frigoritolerans OX=450367 GN=queC PE=3 SV=1
MKKKEKAVVVFSGGQDSTTCLFWALERFEEVEAVTFDYNQRHSLEIECAQNIAKELGVNHHILDMSLLNQLAPNALTRSDIAVADGEEGELPSTFVPGRNLLFLSFAGVLASQIGAKHIVTGVCETDFSGYPDCRDVFIKSLNVTLNLSMDQSFVIDTPLMWLNKEETWELADQLGAFDFVREKTLTCYNGIISDGCGDCPACNLRKKGLDDYVIRRKVLS

SEQ ID NO: 36798 - protein, 221 aa, unidentified; identical to SEQ ID NO: 36342
  source 1..221: note = [Brevibacterium] frigoritolerans
  REGION 1..221: note = tr|A0A3T0ME15|A0A3T0ME15_9BACI 7-cyano-7-deazaguanine synthase OS=[Brevibacterium] frigoritolerans OX=450367 GN=queC PE=3 SV=1

SEQ ID NO: 36799 - protein, 218 aa, Brevibacterium ravenspurgense
  REGION 1..218: note = tr|A0A150H5W2|A0A150H5W2_9MICO 7-cyano-7-deazaguanine synthase OS=Brevibacterium ravenspurgense OX=479117 GN=queC PE=3 SV=1
MYSGGPDSTTLLFDLIEQGIEVDALFLNFDEKGGDFARSVAAKFAGQIAFHEYDIAPFMRNFYGLPQPMLMRKAQGFGMCLEEDPYVQPFGSAIALTLAASWAVKHGSRDVYYAVHDGDSHFQDNNRSYFELLSDLTRSCEGEQYEINFQTPYLGMTKAEVISRGEMLGVDFEQTWSCAHTEDIHCGECPPCIDRRMAFRLAEVVDPVQYASDLTGVK

SEQ ID NO: 36800 - protein, 218 aa, unidentified
  source 1..218: note = Brevifollis gellanilyticus
  REGION 1..218: note = tr|A0A512MD55|A0A512MD55_9BACT 7-cyano-7-deazaguanine synthase OS=Brevifollis gellanilyticus OX=748831 GN=queC PE=3 SV=1
MKTLVLLSGGMDSTTALYWAQKEHEVVGAVSFDYGSKHNAKELEQAAWHCQQFGLRHDVVALPFVNELFTSDLLQSGGEIPDGHYAHENMKRTVVPFRNGIMLAIACGIAESREAQALVIAAHAGDHTIYPDCREPFMQAMADSMREGTYARIELLRPFIAMDKAAIAKLGDELGIDFAHTWSCYKGGAVHCGTCGTCVERREAFELAGLRDVTRYLH

SEQ ID NO: 36801 - protein, 232 aa, unidentified
  source 1..232: note = Brevirhabdus pacifica
  REGION 1..232: note = tr|A0A1U7DHR3|A0A1U7DHR3_9RHOB 7-cyano-7-deazaguanine synthase OS=Brevirhabdus pacifica; OX = 1267768 GN=queC PE=3 SV=1
MKTIVICSGGLDSVSLAHSVAAQGNLMGLVAFDYGQRHAKELDSARACAKRLGVWFQLVDLRAAGALLSGSALTDNVEVPDGHYAEESMRITVVPNRNAIMLTVAFGIAQARGAEAVATAVHGGDHFIYPDCRPGFVEAFDTMQAHAMEGYGRVRLLAPFVHQPKSAIVTEGARHNTPFAETWSCYKGGEIHCGRCGTCVERREAFHLAGVEDPTPYADPDFWRAAIAAKEA

SEQ ID NO: 36802 - protein, 201 aa, unidentified
  source 1..201: note = Brevundimonas abyssalis
  REGION 1..201: note = tr|U2ZFS1|U2ZFS1_9CAUL 7-cyano-7-deazaguanine synthase OS=Brevundimonas abyssalis TAR-001 OX=1391729; GN = queC PE=3 SV=1
MGFDYGQRHAVEMQARLRVRDGMARVLPGVADRLGPDHVVDITGFGRIADSALTSDRAIEMDARGLPTTFVPGRNLVFLTYAAALADRRGLQVLVGGMCETDFSGYPDCRRETMDAMQQALSLGLDKPVSIETPLMQLTKAETWALAHDLGGDALVQLIIEDSHTCYLGDRDHRHPWGYGCGTCPACELRAAGYDQWAAGA

SEQ ID NO: 36803 - protein, 425 aa, Brevundimonas diminuta
  REGION 1..425: note = tr|A0A3D4DCI2|A0A3D4DCI2_BREDI ATPase; OS = Brevundimonas diminuta OX=293 GN=DIV82_04690 PE=4 SV=1
  VARIANT 391: note = Xaa can be any naturally occurring amino acid
MTGFASYRANEAPLLIDAVEADAPLRDGATPALLGQSLCLDTRGLTSFFFARFDRRLYDLLVVAAAVEFCDRFKRRPGWGWSRAFDVRVAVHEPEVWSAPEAKALLEETVSFLTGDVWRFCFEARLRDEPAPVTLPLPLPPYCALIMPYSEGLDSLAVHALTAHATNSELVRVRLGSGGVDKAVLDKDRKPFARVPYKVSVPNNAESSARSRGFKFAVVTAIAAAMSGVQRIIVTESGQGVLGPVLVRSGHAYPDYRVHPAFSRKMESLFLALTGHEIRYEYPRLWYTKGETMAAAKALPTPPDFVTRTRSCWQSSQQASVDGSRRQCGICAACMLRRVSMFAAEIDEPADRYVWENLTVTEFDTGAAAAFQGHTRALREYGIAGVLHMEXSYASLQTRLVKMKALCWPRPELCWIATLRNGVAS

SEQ ID NO: 36804 - protein, 238 aa, Brevundimonas diminuta
  REGION 1..238: note = tr|L1QFP2|L1QFP2_BREDI 7-cyano-7-deazaguanine synthase OS=Brevundimonas diminuta 470-4 OX=1035191; GN = queC PE=3 SV=1
MSEIDSHPTTSALVLFSGGQDSATCLAWALERFDRVETVGFDYGQRHAVEMQARQAVRREVIKALPQWADRLGDDHVVDLTGFGAIGETAMTTQRAIEADARGLPNTFVPGRNLIFLVAAAALADRRGLEALIGGMCETDYSGYPDCRNDTIQATARALSLGLDKSVPVETPLMFLTKAQTWKLAERIGGRALVEAIIEHSHTCYLGDRTQRHAWGYGCGTCPACELRAAGYAEWAAA

SEQ ID NO: 36805 - protein, 243 aa, Brevundimonas intermedia
  REGION 1..243: note = tr|A0A4Y9RWX5|A0A4Y9RWX5_9CAUL 7-cyano-7-deazaguanine synthase OS=Brevundimonas intermedia OX=74315 GN=queC PE=3 SV=1
MSVILEKTSPTAIKTALVLFSGGQDSATCLAWALERFERVETVGFDYGQRHLVEMEARQAVRAGMKTALPQWADRLGDDHVVDLTGYGRIAESALTADRKIEMDARGLPTTFVPGRNLIFLVAAAALADRRGLEVLVGGMCETDFSGYPDCRHETMEAMARALSLGLDKAVVIDTPLMWLTKGQTWELAETLGGAKLVELIVEDSHTCYRGDRTHRHAWGYGCGECPACELRAAGYEDWVASR

SEQ ID NO: 36806 - protein, 238 aa, Brevundimonas naejangsanensis
  REGION 1..238: note = tr|A0A4P7BPJ2|A0A4P7BPJ2_9CAUL 7-cyano-7-deazaguanine synthase OS=Brevundimonas naejangsanensis OX=588932 GN=queC PE=3 SV=1
MSEIDLHPAASALILFSGGQDSATCLAWALERFERVETVGFDYGQRHAVEMEARQAVRREVVKALPQWADRLSDDHVVDLTGFGAIGETAMTTERAIEADARGLPNTFVPGRNLIFLVAAAALADRRGLEALIGGMCETDYSGYPDCRNDTIQATARALSLGLDKPVPVETPLMFLTKAQTWELAERIGGAALVEAIIEFSHTCYLGDRTQRHAWGYGCGACPACELRAAGYAEWAAA

SEQ ID NO: 36807 - protein, 238 aa, Brevundimonas naejangsanensis
  REGION 1..238: note = tr|A0A494RR86|A0A494RR86_9CAUL 7-cyano-7-deazaguanine synthase OS=Brevundimonas naejangsanensis OX=588932 GN=queC PE=3 SV=1
MSVIAQHSEKSALVLFSGGQDSATCLAWALERFDRVETVGFDYGQRHAVEMQARQSVRAELVKALPQWVDRLGDDHVVDLTGFGAIGETAMTTERAIEADARGLPNTFVPGRNLIFLVAAAALADRRGLEVLIGGMCETDYSGYPDCRNETIQATARALSLGLDKSVPVETPLMFLTKAQTWALADQIGGRALVETIIEFSHTCYLGDRTHRHAWGYGCGTCPACELRAAGYAEWAAA

SEQ ID NO: 36808 - protein, 239 aa, Brevundimonas nasdae
  REGION 1..239: note = tr|A0A0B4C827|A0A0B4C827_9CAUL 7-cyano-7-deazaguanine synthase OS=Brevundimonas nasdae; OX = 172043 GN=queC PE=3 SV=1
MSAILEKKPTSALVLFSGGQDSATCLAWALERFERVETVGFDYGQRHLVEMQARQSVRDGMKTALPQWADRLGDDHVVDLTGYGRIAESALTADRKIEMDARGLPTTFVPGRNLIFLVAAAALADRRGLEVLVGGMCETDYSGYPDCRHETMEAMARALSLGLDKPVVIDTPLMWLTKAQTWDLAHSIGGDRLIELIIEDSHTCYQGDRTHRHAWGYGCGSCPACELRAAGYDEWASGR

SEQ ID NO: 36809 - protein, 224 aa, Brevundimonas sp.
  REGION 1..224: note = tr|A0A0Q7TGQ5|A0A0Q7TGQ5_9CAUL 7-cyano-7-deazaguanine synthase OS=Brevundimonas sp. Root1423 OX=1736462 GN=queC PE=3 SV=1
MFSGGQDSATCLAWALERFSRVETVGFDYGQRHAVEMEARLKVREGMQAVLPQWAGRLGPDHVVDLTGYGRIAESALTADRAIELDARGLPTTFVPGRNLVFLTCAAALADRRGLDVLVGGMCETDFSGYPDCRRDTIDAMATALSLGLDKPVVIETPLMALTKAETWALADRIGGAPLVELIIEASHTCYRGDRDHRHAWGYGCGDCPACELRAAGHSEWAGA

SEQ ID NO: 36810 - protein, 236 aa, Brevundimonas sp.
  REGION 1..236: note = tr|A0A0Q7T6Q7|A0A0Q7T6Q7_9CAUL 7-cyano-7-deazaguanine synthase OS=Brevundimonas sp. Root1423 OX=1736462 GN=queC PE=3 SV=1
  VARIANT 12: note = Xaa can be any naturally occurring amino acid
MGFDYGQRHAVXLFSGGQDSATCLAWALERFSRVETVGFDYGQRHAVEMEARLKVREGMLAVLPRWAARLGPDHVVDLTGYGRISESALTTDRAIEMDARGLPSTFVPGRNLVFLTCAAALADRRNLEVLVGGMCETDFSGYPDCRRDTIDAMAAALSLGLDRPVVIDTPLMTLTKAETWALADRIGGPALVELIVEASHTCYRGDRAHRHPWGYGCGDCPACELRAAGHAEWAAA

SEQ ID NO: 36811 - protein, 238 aa, Brevundimonas subvibrioides
  REGION 1..238: note = tr|D9QK65|D9QK65_BRESC 7-cyano-7-deazaguanine synthase OS=Brevundimonas subvibrioides (strain ATCC 15264 / DSM 4735 / LMG 14903 / NBRC 16000 / CB 81) OX=633149; GN = qu eC PE=3 SV=1
MTETQPAPSSALVLFSGGQDSATCLAWALERFDRVETVGFDYGQRHAVEMDARLRVRAGMPRVLPRLADRLGPDHVVDLTGFGAIGETAMTTDRAIEVGARGLPTTFVPGRNLIFLTAAAALADRRGLEVLVGGMCETDFSGYPDCRRETMDAMERALSLGLDRPVPIQTPLMWLTKARTWALADAIGGAALVDLIVEDSHTCYRGDRTHRHAWGYGCGACPACELRAAGWDGWVASR

SEQ ID NO: 36812 - protein, 238 aa, Brevundimonas subvibrioides
  REGION 1..238: note = tr|A0A258FHQ2|A0A258FHQ2_9CAUL 7-cyano-7-deazaguanine synthase OS=Brevundimonas subvibrioides OX=74313 GN=queC PE=3 SV=1
MTETPPNPTSALVLFSGGQDSATCLAWALERYERVETVGFDYGQRHAVEMRARLNVRDAMLRALPRLAGRLGSDQVVDLTGFGAIGETAMTTDRAIEIGARGLPTTFVPGRNLVFLSVAAALADRRGLDVLVGGMCETDFSGYPDCRRDTIEAMGRALSLGLDKPVPIETPLMALTKAQTWALADRVGGAALVDLIVEDSHTCYRGDRAHRHAWGYGCGECPACDLRAAGWAEWTASA

SEQ ID NO: 36813 - protein, 238 aa, Brevundimonas vancanneytii
  REGION 1..238: note = tr|A0A4P1K5L3|A0A4P1K5L3_9CAUL 7-cyano-7-deazaguanine synthase OS=Brevundimonas vancanneytii OX=1325724 GN=queC PE=3 SV=1
MSAIVQHSEKTALVLFSGGQDSATCLAWALERFDRVETVGFDYGQRHAVEMQARQSVREELVKALPQWADRLGDDHVVDLTGFGAIGETAMTTERAIEADARGLPNTFVPGRNLIFLVAAAALADRRGLEVLIGGMCETDYSGYPDCRNDTIQATARALSLGLDKSVPVETPLMFLTKAQTWELADQIGGRVLVEAIIEFSHTCYLGDRTHRHVWGYGCGACPACELRAAGYAQWAAA

SEQ ID NO: 36814 - protein, 239 aa, Brevundimonas vesicularis
  REGION 1..239: note = tr|A0A2X1B6G1|A0A2X1B6G1_BREVE 7-cyano-7-deazaguanine synthase OS=Brevundimonas vesicularis OX=41276 GN=queC PE=3 SV=1
MSVILEKTPTSALVLFSGGQDSATCLAWALERFERVETVGFDYGQRHLVEMQARQAVRDGMKTALPRWADRLGDDHVVDLTGYGRIAESALTADRKIEMDARGLPTTFVPGRNLIFLVAAAALADRRGLEVLVGGMCETDYSGYPDCRHETMEAMARALSLGLDKPVIIDTPLMWLTKAQTWELAHRIGGDRLIELIIEDSHTCYQGDRTHRHAWGYGCGSCPACELRAAGYDEWASGR

SEQ ID NO: 36815 - protein, 243 aa, Brevundimonas vesicularis
  REGION 1..243: note = tr|A0A1Z3UE36|A0A1Z3UE36_BREVE 7-cyano-7-deazaguanine synthase OS=Brevundimonas vesicularis OX=41276 GN=queC PE=3 SV=1
MSVILEKTSPTASKTALVLFSGGQDSATCLAWALERFVRVETVGFDYGQRHLVEMQARQAVREGMKTALPQWADRLGDDHVVDLTGYGRIAESALTADRKIEMDARGLPTTFVPGRNLIFLVAAAALADRRGLEVLVGGMCETDYSGYPDCRHETMEAMARALSLGLDKPVVIDTPLMWLTKAQTWELADRIGGDTLIELIIEDSHTCYQGDRTHRHVWGYGCGSCPACELRAAGYDEWASER

SEQ ID NO: 36816 - protein, 239 aa, unidentified
  source 1..239: note = Brevundimonas viscosa
  REGION 1..239: note = tr|A0A1I6S1N3|A0A1I6S1N3_9CAUL 7-cyano-7-deazaguanine synthase OS=Brevundimonas viscosa; OX = 871741 GN=queC PE=3 SV=1
MSEIGQNPEISALVLFSGGQDSATCLAWALDRFARVETVGFDYGQRHAVEMEARLEVRARMAALRKDWADRLGPDHVVDLTGYGRIAESALTAERAIELDARGLPTTFVPGRNLVFLTVAAALADRRGLDVLVGGMCETDYSGYPDCRRDTIEAMARALSLGLDKPLVIETPLMALTKSETWALAQRIGGPPLVDLIVEASHTCYRGDRDQRHAWGYGCGDCPACELRAVGYGEWAARP

SEQ ID NO: 36817 - protein, 232 aa, unidentified
  source 1..232: note = Brucella abortus
  REGION 1..232: note = tr|A0A0M1WC35|A0A0M1WC35_BRUAO 7-cyano-7-deazaguanine synthase OS=Brucella abortus NCTC 8038 OX=575591 GN=queC PE=3 SV=1
MKTLVICSGGLDSVSLAHKMAAEHELTGLLSFDYGQRHKKELDFAQACAKRLGVPHQIIDIRTIGASLTGSALTDDVDVPDGHYAEETMKVTVVPNRNAIMLAIAFGVAAAQKADAVALAVHGGDHFIYPDCRPGFIEAFQTMQKHALDGYADVKLLAPYVHATKADIVADGAKYRTPFEATWSCYKGADRHCGRCGTCVERREAFHLAGIDDPTSYEDADFWRATTQKRNA

SEQ ID NO: 36818 - protein, 232 aa, unidentified; identical to SEQ ID NO: 36817
  source 1..232: note = Brucella abortus
  REGION 1..232: note = sp|Q2YR96|QUEC_BRUA2 7-cyano-7-deazaguanine synthase; OS = Brucella abortus (strain 2308) OX=359391 GN=queC PE=3; SV = 1

SEQ ID NO: 36819 - protein, 232 aa, unidentified
  source 1..232: note = Brucella canis
  REGION 1..232: note = sp|A9M959|QUEC_BRUC2 7-cyano-7-deazaguanine synthase; OS = Brucella canis (strain ATCC 23365 / NCTC 10854); OX = 483179 GN=queC PE=3 SV=1
MKTLVICSGGLDSVSLAHKMAAEHELTGLLSFDYGQRHKKELDFAQACAKRLGVPHQIIDIRTIGASLTGSALTDDVDVPDGHYAEETMKVTVVPNRNAIMLVIAFGVAAAQKADAVALAVHGGDHFIYPDCRPGFIEAFQTMQKHALDGYADVKLLAPYVHATKADIVADGAKYRTPFEATWSCYKGADRHCGRCGTCVERREAFHLAGIDDPTSYEDADFWRATTQKRNA

SEQ ID NO: 36820 - protein, 232 aa, Brucella ceti; identical to SEQ ID NO: 36817
  REGION 1..232: note = tr|C0G802|C0G802_9RHIZ 7-cyano-7-deazaguanine synthase OS=Brucella ceti str. Cudo OX=595497 GN=queC PE=3; SV = 1

SEQ ID NO: 36821 - protein, 232 aa, Brucella melitensis; identical to SEQ ID NO: 36817
  REGION 1..232: note = sp|Q8YJI8|QUEC_BRUME 7-cyano-7-deazaguanine synthase; OS = Brucella melitensis biotype 1 (strain 16M / ATCC 23456 / NCTC 10094) OX=224914 GN=queC PE=3 SV=1

SEQ ID NO: 36822 - protein, 232 aa, Brucella melitensis; identical to SEQ ID NO: 36817
  REGION 1..232: note = sp|C0RFL5|QUEC_BRUMB 7-cyano-7-deazaguanine synthase; OS = Brucella melitensis biotype 2 (strain ATCC 23457); OX = 546272 GN=queC PE=3 SV=1

SEQ ID NO: 36823 - protein, 232 aa, Brucella microti; identical to SEQ ID NO: 36817
  REGION 1..232: note = tr|C7LEK1|C7LEK1_BRUMC 7-cyano-7-deazaguanine synthase OS=Brucella microti (strain CCM 4915) OX=568815; GN = queC PE=3 SV=1

SEQ ID NO: 36824 - protein, 232 aa, unidentified
  source 1..232: note = Brucella neotomae
  REGION 1..232: note = tr|A0A381B9T4|A0A381B9T4_BRUNE 7-cyano-7-deazaguanine synthase OS=Brucella neotomae; OX = 29460 GN=queC PE=3 SV=1
MKTLVICSGGLDSVSLTHKMAAEHELTGLLSFDYGQRHKKELDFAQACAKRLGVPHQIIDIRTIGASLTGSALTDDVDVPDGHYAEETMKVTVVPNRNAIMLAIAFGVAAAQKADAVALAVHGGDHFIYPDCRPGFIEAFQTMQKHALDGYADVKLLAPYVHATKADIVADGAKYRTPFEATWSCYKGADRHCGRCGTCVERREAFHLAGIDDPTSYEDADFWRATTQKRNA

SEQ ID NO: 36825 - protein, 232 aa, unidentified; identical to SEQ ID NO: 36817
  source 1..232: note = Brucella ovis
  REGION 1..232: note = tr|N8N3P7|N8N3P7_BRUOV 7-cyano-7-deazaguanine synthase OS=Brucella ovis IntaBari-2002-82-58 OX=1293916; GN = queC PE=3 SV=1

SEQ ID NO: 36826 - protein, 232 aa, unidentified; identical to SEQ ID NO: 36817
  source 1..232: note = Brucella ovis
  REGION 1..232: note = sp|A5VSU2|QUEC_BRUO2 7-cyano-7-deazaguanine synthase; OS = Brucella ovis (strain ATCC 25840 / 63/290 / NCTC 10512); OX = 444178 GN=queC PE=3 SV=1

SEQ ID NO: 36827 - protein, 232 aa, Brucella pinnipedialis; identical to SEQ ID NO: 36817
  REGION 1..232: note = tr|A0A0E1X9S9|A0A0E1X9S9_9RHIZ 7-cyano-7-deazaguanine synthase OS=Brucella pinnipedialis M292/94/1 OX=520462 GN=queC PE=3 SV=1

SEQ ID NO: 36828 - protein, 232 aa, Brucella sp.; identical to SEQ ID NO: 36817
  REGION 1..232: note = tr|D0RKE2|D0RKE2_9RHIZ 7-cyano-7-deazaguanine synthase OS=Brucella sp. F5/99 OX=437701 GN=queC PE=3 SV=1

SEQ ID NO: 36829 - protein, 232 aa, Brucella sp.
  REGION 1..232: note = tr|A0A1P8S3Q3|A0A1P8S3Q3_9RHIZ 7-cyano-7-deazaguanine synthase OS=Brucella sp. 09RB8910; OX = 1844051 GN=queC PE=3 SV=1
MKTLVICSGGLDSVSLAHKMAAEHELTGLLSFDYGQRHKKELDFAQACAKRLGVPHQIINIRTIGASLTGSALTDDVDVPDGHYAEETMKVTVVPNRNAIMLAIAFGVAAAQKADAVALAVHGGDHFIYPDCRPGFIDAFQTMQKHALDGYADVKLLAPYVHATKADIVADGAKYRTPFEATWSCYKGAERHCGRCGTCVERREAFHLAGIDDPTSYEDADFWRAATQKRNA

SEQ ID NO: 36830 - protein, 232 aa, unidentified; identical to SEQ ID NO: 36819
  source 1..232: note = Brucella suis
  REGION 1..232: note = tr|A0A4Z0F6N6|A0A4Z0F6N6_BRUSS 7-cyano-7-deazaguanine synthase OS=Brucella suis OX=29461; GN = queC PE=3 SV=1

SEQ ID NO: 36831 - protein, 232 aa, unidentified; identical to SEQ ID NO: 36819
  source 1..232: note = Brucella suis
  REGION 1..232: note = sp|Q8FYB3|QUEC_BRUSU 7-cyano-7-deazaguanine synthase; OS = Brucella suis biovar 1 (strain 1330) OX=204722 GN=queC; PE = 3 SV=1

SEQ ID NO: 36832 - protein, 232 aa, unidentified
  source 1..232: note = Brucellaceae bacterium
  REGION 1..232: note = tr|A0A3P1V1H5|A0A3P1V1H5_9RHIZ 7-cyano-7-deazaguanine synthase OS=Brucellaceae bacterium VT-16-1752 OX=2487907 GN=queC PE=3 SV=1
MKTLVVCSGGLDSVSLAHRIAAEHDLTALLSFNYGQRHKKELDSAKACAERLSVPHQIIDIRTIGASLTGSALTDNVDVPDGHYAEETMKITVVPNRNAIMLAIAFGVAAAQKAEAVALAVHGGDHFIYPDCRPNFINAFQTMQNHALEGYADIKLLAPYVNASKADIVTDGARHDTPFEATWSCYKGGENHCGRCGTCVERREAFHLAGVKDPTVYEDADFWREAVARRNT

SEQ ID NO: 36833 - protein, 195 aa, unidentified
  source 1..195: note = Bryobacterales bacterium
  REGION 1..195: note = tr|A0A350UIA9|A0A350UIA9_9BACT 7-cyano-7-deazaguanine synthase (Fragment); OS = Bryobacterales bacterium OX=2026791 GN=queC PE=3 SV=1
MKPAVCLLSGGLDSATTLACARRDGFAPFALSFDYGQRHRIELEAAARVARALGAHAHRTAVIDLRVFGGSALTADINVPKGRQTAEMAAEIPITYVPARNTIFLSFALAWAEVLGSSDIYLGVNAVDYSGYPDCRPDFIAAFEHLAALATKAGVEGHLPLRIHTPLITLAKSEIITLGLSLGVDFALTHSCYDP

SEQ ID NO: 36834 - protein, 233 aa, unidentified
  source 1..233: note = Bryobacterales bacterium
  REGION 1..233: note = tr|A0A3D1B0F5|A0A3D1B0F5_9BACT 7-cyano-7-deazaguanine synthase OS=Bryobacterales bacterium OX=2026791 GN=queC PE=3 SV=1
MPANAGNPKRAVCLLSGGLDSATTLAYALREGFETYALSFDYGQRHRIELEAAARVAVSLGAAEHRVVAVDLRGFGASALTDEIDVPKGRAAGEIAEGIPITYVPARNTVFLALATAWAEVLGAADIFIGVNALDYSGYPDCRPEFLHAFEAMANLATRAGVEGATKLRIQAPLLHLSKAKIVKLGRELGVNFALTHSCYDPDPNGRACGLCDSCLLRRKGFADAGMVDPAVC

SEQ ID NO: 36835 - protein, 235 aa, Bryocella elongata
  REGION 1..235: note = tr|A0A1H6CB63|A0A1H6CB63_9BACT 7-cyano-7-deazaguanine synthase OS=Bryocella elongata; OX = 863522 GN=queC PE=3 SV=1
MSEGTGKKAIVLLSGGLDSTTVVAMAHAQGYAVYALSFDYGQVHKAELHAAARVAKSQNVAQHAIIKLDLAALAHSALTGKGDVPKDRSLEEIGEGVPVTYVPARNTVFLSLALAWAESLGATDIFIGVNALDYSGYPDCRPEFIHAFETMANLATKIGTDGQRITIHTPLISMTKAQIVQAGIALGVDYSITTTCYDASDDGAACGSCDACLLRRRGFEEGGIADPTLYRGLTE

SEQ ID NO: 36836 - protein, 232 aa, Buchnera aphidicola
  REGION 1..232: note = tr|A0A4D6YH65|A0A4D6YH65_BUCRP 7-cyano-7-deazaguanine synthase OS=Buchnera aphidicola subsp. Rhopalosiphum padi OX=98793 GN=queC PE=3 SV=1
MKKVLIIFSGGQDSTTCLIHYTNIYKEVYCITFDYNQLHKSEIDSARFISNYFNVKKHIFVDIKCLKNLSISSLTDEKISILDNHPLNCLLPSTFVPGRNILFLTLSSIYAFNNQIDSVVLGVNEIDFSGYPDCRNEFLKKMNDVIQIGMNCKINFESPLINLSKAEIWALSDYWNSTQFILDNTVTCYKGVQGKGCSQCQSCILRNDGFNKWKSNPSYYMKRLKEKFNFYN

SEQ ID NO: 36837 - protein, 232 aa, Buchnera aphidicola
  REGION 1..232: note = sp|Q8K986|QUEC_BUCAP 7-cyano-7-deazaguanine synthase; OS = Buchnera aphidicola subsp. Schizaphis graminum (strain Sg) OX=198804 GN=queC PE=3 SV=1
MKKILIIFSGGQDSTTCLIHYTNIYKEIYCITFDYNQLHKSEIDSARFISNYFNVKKHIFVDLKCLKNLSISSLTDEKISILDNHPLNFSLPSTFVPGRNILFLTLSSIYAFNHQINSIVLGVNEIDFSGYPDCRNAFLKKMNDVVQIGMNCKINFQSPLINLSKAEIWALSDYWNSTQFILNNTVTCYQGIQGKGCGQCQSCILRNDGFNKWKSNPSYYMKKLKEKFNFDN

SEQ ID NO: 36838 - protein, 234 aa, Budvicia aquatica
  REGION 1..234: note = tr|A0A2C6DMN7|A0A2C6DMN7_9GAMM 7-cyano-7-deazaguanine synthase OS=Budvicia aquatica; OX = 82979 GN=queC PE=3 SV=1
MKRAVVVFSGGQDSTTCLIQALKQYDEVHCVTFDYGQRHQAEIDVARDLAITLGASAHKVMDVGLLNELAISSLTRDNIPVPKTSGDDIPSTFVPGRNILFLTLSAIYAYQIKAEAVITGVCETDFSGYPDCRDEFVKSLNHAVSLGMAYDIRFETPLMWLDKAETWALADYYSQLDLIRHQTLTCYNGIKGDGCGECPSCHLRANGLSRYLDNKQAIMGSLNTKLMLGSVKPD

SEQ ID NO: 36839 - protein, 244 aa, Burkholderia ambifaria
  REGION 1..244: note = tr|A0A2S9L2K7|A0A2S9L2K7_9BURK 7-cyano-7-deazaguanine synthase OS=Burkholderia ambifaria; OX = 152480 GN=queC PE=3 SV=1
MIRTDAKDGALVLFSGGQDSATCVAWALERYQTVETLGFDYGQRHRVELECREGVRDALKHRFPAWAGRLGDDHMIDLSVLGAISDTAMTRTIEIETTANGLPNTFVPGRNLLFMTIAAAIAYRRGLRVLVGGMCETDFSGYPDCRDDTMKALQVALNLGMDTRIVLETPLMWLDKAQTWQLAEQLGGDALVELIRVETHTCYVGERAELHDWGFGCGECPACKLRKRGYEAYLKGERVTEAPL

SEQ ID NO: 36840 - protein, 244 aa, Burkholderia ambifaria; identical to SEQ ID NO: 36839
  REGION 1..244: note = sp|Q0BAU3|QUEC_BURCM 7-cyano-7-deazaguanine synthase; OS = Burkholderia ambifaria (strain ATCC BAA-244 / AMMD); OX = 339670 GN=queC PE=3 SV=1

SEQ ID NO: 36841 - protein, 244 aa, Burkholderia anthina
  REGION 1..244: note = tr|A0A104KJJ9|A0A104KJJ9_9BURK 7-cyano-7-deazaguanine synthase OS=Burkholderia anthina; OX = 179879 GN=queC PE=3 SV=1
MIRTDAKDGALVLFSGGQDSATCVAWALERYQTVETLGFDYGQRHRVELECREGVREALKRKFPAWSDRLGDDHMIDLSVLGAISDTAMTRTIEIETAANGLPNTFVPGRNLMFMTIAAAIAYRRGLRVLVGGMCETDFSGYPDCRDDTMKALQVALNLGMDTRIVLETPLMWLDKAQTWQLAEQLGGDALVELIRVETHTCYVGERAELHDWGFGCGECPACKLRKRGYEAYLKGERVTEAPL

SEQ ID NO: 36842 - protein, 244 aa, unidentified
  source 1..244: note = Burkholderia catarinensis
  REGION 1..244: note = tr|A0A1J9NRM1|A0A1J9NRM1_9BURK 7-cyano-7-deazaguanine synthase OS=Burkholderia catarinensis OX=1108140 GN=queC PE=3 SV=1
MIRTDAKDGALVLFSGGQDSATCVAWALERYQTVETLGFDYGQRHRVELECREGVRETLKSRFPAWSDRLGDDHMVDLSVLGAISDTAMTRTIEIETAANGLPNTFVPGRNLLFMTIAAAIAYRRGLRVLVGGMCETDFSGYPDCRDDTMKALQVALNLGMDTRIVLETPLMWLDKAQTWQLAEQLGGEALVELIRVETHTCYVGERAELHDWGFGCGECPACKLRKRGYEAYLKGERVTEAPL

SEQ ID NO: 36843 - protein, 156 aa, Burkholderia cenocepacia
  REGION 1..156: note = tr|A2VUG7|A2VUG7_9BURK 7-cyano-7-deazaguanine synthase OS=Burkholderia cenocepacia PC184 OX=350702; GN = BCPG_01642 PE=3 SV=1
MTRMIEIETTANGLPNTFVPGRNLMFMTIAAAIAYRRGLRVLVGGMCETDFSGYPDCRDDTMKALQVALNLGMDTRMVLETPLMWLDKAQTWQLAEQLGGEALVELIRVETHTCYVGERAELHDWGFGCGECPACKLRKRGYEAYLKGERVTEAPL

SEQ ID NO: 36844 - protein, 244 aa, Burkholderia cenocepacia
  REGION 1..244: note = sp|A0KBJ0|QUEC_BURCH 7-cyano-7-deazaguanine synthase; OS = Burkholderia cenocepacia (strain HI2424) OX=331272; GN = queC PE=3 SV=1
MIRTDAKDGALVLFSGGQDSATCVAWALERYQTVETLGFDYGQRHRVELECREGVREALKHRFPAWSDRLGDDHMIDLSVLGAISDTAMTRTIEIETTANGLPNTFVPGRNLMFMTIAAAIAYRRGLRVLVGGMCETDFSGYPDCRDDTMKALQVALNLGMDTRMVLETPLMWLDKAQTWQLAEQLGGEALVELIRVETHTCYVGERAELHDWGFGCGECPACKLRKRGYEAYLKGERVTEAPL

SEQ ID NO: 36845 - protein, 244 aa, Burkholderia cepacia
  REGION 1..244: note = tr|A0A0U4BDQ9|A0A0U4BDQ9_BURCE 7-cyano-7-deazaguanine synthase OS=Burkholderia cepacia JBK9 OX=1395570 GN=queC PE=3 SV=1
MIRTDAKDGALVLFSGGQDSATCVAWALERYQTVETLGFDYGQRHRVELECREGVREALKRDFSAWSDRLGDDHMIDLSVLGAISDTAMTRTIEIETTANGLPNTFVPGRNLMFMTIAAAIAYRRGLRVLVGGMCETDFSGYPDCRDDTMKALQVALNLGMDTRIVLETPLMWLDKAQTWQLAEQLGGEALVELIRVETHTCYVGERAELHDWGFGCGECPACKLRKRGYEAYLKGERVTEAPL

SEQ ID NO: 36846 - protein, 244 aa, Burkholderia cepacia
  REGION 1..244: note = tr|A0A118KQG6|A0A118KQG6_BURCE 7-cyano-7-deazaguanine synthase OS=Burkholderia cepacia; OX = 292 GN=queC PE=3 SV=1
MIRTDAKDGALVLFSGGQDSATCVAWALERYQTVETLGFDYGQRHRVELECREGVREALKRDFPAWSDRLGDDHMIDLSVLGAISDTAMTRTIEIETAANGLPNTFVPGRNLMFMTIAAAIAYRRGLRVLVGGMCETDFSGYPDCRDDTMKALQVALNLGMDTRMVLETPLMWLDKAQTWQLAEQLGGEALVELIRVETHTCYVGERAELHEWGFGCGECPACKLRKRGYEAYLKGERVTEAPL

SEQ ID NO: 36847 - protein, 244 aa, Burkholderia contaminans
  REGION 1..244: note = tr|A0A2S5DWQ1|A0A2S5DWQ1_9BURK 7-cyano-7-deazaguanine synthase OS=Burkholderia contaminans OX=488447 GN=queC PE=3 SV=1
MIRTDAKDGALVLFSGGQDSATCVAWALERYQTVETLGFDYGQRHRVELECREGVREALKRDFPAWSGRLGDDHMIDLSVLGAISDTAMTRTIEIETAANGLPNTFVPGRNLMFMTIAAAIAYRRGLRVLVGGMCETDFSGYPDCRDDTMKALQVALNLGMDTRIVLETPLMWLDKAQTWQLAEQLGGEALVELIRVETHTCYVGERAELHEWGFGCGECPACKLRKRGYEAYLKGELVTEAPL

SEQ ID NO: 36848 - protein, 244 aa, Burkholderia contaminans
  REGION 1..244: note = tr|A0A1C8ZCU3|A0A1C8ZCU3_9BURK 7-cyano-7-deazaguanine synthase OS=Burkholderia contaminans OX=488447 GN=queC PE=3 SV=1
MIRTDAKDGALVLFSGGQDSATCVAWALERYQTVETLGFDYGQRHRVELECREGVREALKRDFPAWSDRLGDDHMIDLSVLGAISDTAMTRTIEIETAANGLPNTFVPGRNLMFMTIAAAIAYRRGLRVLVGGMCETDFSGYPDCRDDTMKALQVALNLGMDTRVVLETPLMWLDKAQTWQLAEQLGGEALVELIRVETHTCYVGERAELHDWGFGCGECPACKLRKRGYEAYLKGERVTEAPL

SEQ ID NO: 36849 - protein, 243 aa, unidentified
  source 1..243: note = Burkholderia dabaoshanensis
  REGION 1..243: note = tr|A0A2N7VSL6|A0A2N7VSL6_9BURK 7-cyano-7-deazaguanine synthase OS=Burkholderia dabaoshanensis OX=564714 GN=queC PE=3 SV=1
MIRTDAKHGALVLFSGGQDSTTCLAWALERYETVETLGFDYGQRHRVELECRDGVREAIVRSFPQWAERLGDDHMIDLSVLGAISETAMTREIQIESAANGLPNTFVPGRNLMFMTIAAAIAYRRGLSVLVGGMCETDFSGYPDCRDDTMKALQVALNLGMDSRFLVETPLMWLDKADTWRLARDLGGDALVELVRVQTHTCYVGERAELHAWGFGCGECPACRLRKRGYEAFLAGEKVTEPD

SEQ ID NO: 36850 - protein, 244 aa, Burkholderia diffusa
  REGION 1..244: note = tr|A0A1B4BVZ9|A0A1B4BVZ9_9BURK 7-cyano-7-deazaguanine synthase OS=Burkholderia diffusa; OX = 488732 GN=queC PE=3 SV=1
MIRTDAKDGALVLFSGGQDSATCVAWALERYQTVETLGFDYGQRHRVELECREGVRDALKRQFPAWAGRLGDDHMIDLSVLGAISDTAMTRTIEIETAANGLPNTFVPGRNLLFMTIAAAIAYRRGLRVLVGGMCETDFSGYPDCRDDTMKALQVALNLGMDTRIVLETPLMWLDKAQTWQLAEQLGGEALVELIRVETHTCYVGERAELHDWGFGCGECPACKLRKRGYEAYLKGERVTEAPL

SEQ ID NO: 36851 - protein, 244 aa, Burkholderia dolosa
  REGION 1..244: note = tr|A0A0D5IYP8|A0A0D5IYP8_9BURK 7-cyano-7-deazaguanine synthase OS=Burkholderia dolosa AU0158 OX=350701 GN=queC PE=3 SV=1
MIRKDAKDGALVLFSGGQDSATCVAWALERYQTVETLGFDYGQRHRVELECREGVRDALKRQFPAWAGRLGDDHMIDLSVLGAISDTAMTRAIEIETAANGLPNTFVPGRNLLFMTIAAAIAYRRGLRVLVGGMCETDFSGYPDCRDDTMKALQVALNLGMDTRIVLETPLMWLDKAQTWQLAEQLGGQALVELIRVETHTCYVGERAELHDWGFGCGECPACKLRKRGYDAYLKGERVTEAPL

SEQ ID NO: 36852 - protein, 244 aa, Burkholderia gladioli
  REGION 1..244: note = tr|F2LGW7|F2LGW7_BURGS 7-cyano-7-deazaguanine synthase OS=Burkholderia gladioli (strain BSR3) OX=999541; GN = queC PE=3 SV=1
MIRTDAKGGALVLFSGGQDSATCVAWALEHYSTVETLGFDYGQRHRVELECREGVREALRTRFPQWTNRLGDDHMIDLSVLGAISDTAMTRAIEIETSANGLPNTFVPGRNLLFMTIAAALAYRRGLKVLVGGMCETDFSGYPDCRDDTMKALQVALNLGMDTRMVLETPLMWLDKADTWRLAEQLGGAELVELVRVETHTCYVGERAELHDWGFGCGACPACKLRKRGYEAYRSGEQVTEMPA

SEQ ID NO: 36853 - protein, 244 aa, Burkholderia gladioli; identical to SEQ ID NO: 36852
  REGION 1..244: note = tr|A0A095HTX5|A0A095HTX5_BURGA 7-cyano-7-deazaguanine synthase OS=Burkholderia gladioli; OX = 28095 GN=queC PE=3 SV=1

SEQ ID NO: 36854 - protein, 244 aa, Burkholderia glumae
  REGION 1..244: note = tr|A0A2J9H6K6|A0A2J9H6K6_BURGL 7-cyano-7-deazaguanine synthase OS=Burkholderia glumae; OX = 337 GN=queC PE=3 SV=1
MIRTDAKGGALVLFSGGQDSATCVAWALERYQTVETLGFDYGQRHRVELECREGVREALRTRFPQWAGRLGDDHMIDLSVLGAISDTAMTRSIEIETAANGLPNTFVPGRNLLFMTIAAAVAYRRGLKVLVGGMCETDFSGYPDCRDDTMKALQVALNLGMDTRVVLETPLMWLDKADTWRLAEQLGGAALVELVRVETHTCYVGERAELHDWGFGCGACPACKLRRRGYEAYRNGGQVTEAPL

SEQ ID NO: 36855 - protein, 244 aa, Burkholderia glumae; identical to SEQ ID NO: 36854
  REGION 1..244: note = tr|C5AF29|C5AF29_BURGB 7-cyano-7-deazaguanine synthase OS=Burkholderia glumae (strain BGR1) OX=626418; GN = queC PE=3 SV=1

SEQ ID NO: 36856 - protein, 233 aa, unidentified
  source 1..233: note = Burkholderia insecticola
  REGION 1..233: note = tr|R4WLU7|R4WLU7_9BURK 7-cyano-7-deazaguanine synthase OS=Burkholderia insecticola OX=758793 GN=queC; PE = 3 SV=1
MLFSGGQDSATCLAWALERFRTVETLGFDYGQRHRVELECRDGFRAAIQREFPQWAERLGEDHMIDLSVLGAISDTAMTREIEIQATASGLPNTFVPGRNLLFMTIAAALAYRRGLKVLVGGMCETDFSGYPDCRDDTMKALQVALNLGMETRYALETPLMWLDKADTWRLAETLGGEALVELIRVETHTCYLGERAELNEWGFGCGQCPACKLRKRGYEAYRAGEQVTTAPV

SEQ ID NO: 36857 - protein, 244 aa, Burkholderia lata; identical to SEQ ID NO: 36848
  REGION 1..244: note = sp|Q39BV2|QUEC_BURL3 7-cyano-7-deazaguanine synthase; OS = Burkholderia lata (strain ATCC 17760 / DSM 23089 / LMG 22485 / NCIMB 9086 / R18194 / 383) OX=482957 GN=queC P E=3; SV = 1

SEQ ID NO: 36858 - protein, 244 aa, Burkholderia lata
  REGION 1..244: note = tr|A0A3G3HAW8|A0A3G3HAW8_BURL3 7-cyano-7-deazaguanine synthase OS=Burkholderia lata (strain ATCC 17760 / DSM 23089 / LMG 22485 / NCIMB 9086 / R18194 / 383) OX=482957GN=queC PE=3 SV=1
MTRTDAKDGALVLFSGGQDSATCVAWALERYQTVETLGFDYGQRHRVELECREGVREALKRDFPAWSDRLGDDHMIDLSVLGAISDTAMTRTIEIETAANGLPNTFVPGRNLMFMTIAAAIAYRRGLRVLVGGMCETDFSGYPDCRDDTMKALQVALNLGMDTRVVLETPLMWLDKAQTWQLAEQLGGEALVELIRVETHTCYVGERAELHEWGFGCGECPACKLRKRGYEAYLKGERVTEAPL

SEQ ID NO: 36859 - protein, 206 aa, Burkholderia latens
  REGION 1..206: note = tr|A0A1B4NZ18|A0A1B4NZ18_9BURK 7-cyano-7-deazaguanine synthase OS=Burkholderia latens; OX = 488446 GN=WK25_20485 PE=3 SV=1
MKSALLLASGGLDSTTVGYQLAATGVEVVPIFFDYGQHCVDVEWSRVTEVLPADMRRPERFDISDIFRGSQSRLIREADLWTEEVKDDDLYIPYRTMLFFAAAAARAQTVAILDVYTGFINSNHAKEIDCTAAFMNSLDGLTSSIGPVRFHSPFRYSSKADVARVAAKLGVPIGRTYSCQASAQFPCGACPNCVERLNALKEAKLV

SEQ ID NO: 36860 - protein, 244 aa, Burkholderia latens
  REGION 1..244: note = tr|A0A1B4NVK0|A0A1B4NVK0_9BURK 7-cyano-7-deazaguanine synthase OS=Burkholderia latens; OX = 488446 GN=queC PE=3 SV=1
MIRTDAKDGALVLFSGGQDSATCVAWALERYQTVETLGFDYGQRHRVELECREGVREALKRQFPAWADRLGDDHMIDLSVLGAISDTAMTRTIEIETAANGLPNTFVPGRNLLFMTIAAAIAYRRGLRVLVGGMCETDFSGYPDCRDDTMKALQVALNLGMDTRVVLETPLMWLDKAQTWQLAEQLGGAALVELIRVETHTCYVGERAELHDWGFGCGECPACKLRKRGYEAYLKGERVTEAPL

SEQ ID NO: 36861 - protein, 244 aa, Burkholderia mallei
  REGION 1..244: note = sp|Q62MS6|QUEC_BURMA 7-cyano-7-deazaguanine synthase; OS = Burkholderia mallei (strain ATCC 23344) OX=243160; GN = queC PE=3 SV=1
MIRTDAKDGALVLFSGGQDSATCVAWALERYQTVETLGFDYGQRHRVELECREGVRDALKRRFPQWSHKLGDDHLIDLSVLGSISDTAMTRAIEIETASNGLPNTFVPGRNLLFMTIAAAIAYRRGLRALVGGMCETDFSGYPDCRDDTMKALQVALNLGMDTRFVLETPLMWLDKADTWRLAEQLGGAPLVELIRVETHTCYVGERSELHDWGFGCGECPACKLRKRGYDAYLRGESVTEAPA

SEQ ID NO: 36862 - protein, 244 aa, Burkholderia mallei; identical to SEQ ID NO: 36861
  REGION 1..244: note = sp|A1V788|QUEC_BURMS 7-cyano-7-deazaguanine synthase; OS = Burkholderia mallei (strain SAVP1) OX=320388 GN=queC; PE = 3 SV=1

SEQ ID NO: 36863 - protein, 244 aa, Burkholderia metallica
  REGION 1..244: note = tr|A0A1B4HXP4|A0A1B4HXP4_9BURK 7-cyano-7-deazaguanine synthase OS=Burkholderia metallica; OX = 488729 GN=queC PE=3 SV=1
MIRTDAKDGALVLFSGGQDSATCVAWALERYQTVETLGFDYGQRHRVELECREGVRDALKRKFPAWSDRLGDDHMIDLSVLGAISDTAMTRTIEIETAANGLPNTFVPGRNLMFMTIAAAIAYRRGLRVLVGGMCETDFSGYPDCRDDTMKALQVALNLGMDTRIVLETPLMWLDKAQTWQLAEQLGGEALVELIRVETHTCYVGERAELHDWGFGCGECPACKLRKRGYEAYLKGERVTEAPL

SEQ ID NO: 36864 - protein, 244 aa, Burkholderia multivorans
  REGION 1..244: note = tr|A0A1W0ZJM3|A0A1W0ZJM3_9BURK 7-cyano-7-deazaguanine synthase OS=Burkholderia multivorans OX=87883 GN=queC PE=3 SV=1
MIRTDAKDGALVLFSGGQDSATCVAWALERYQTVETLGFDYGQRHRVELECREGVREALKRQFPAWADRLGDDHMIDLSVLGAISDTAMTRAIEIETAANGLPNTFVPGRNLLFMTIAAAVAYRRGLRVLVGGMCETDFSGYPDCRDDTMKALQVALNLGMDTRIVLETPLMWLDKAQTWQLAEQLGGQALVELIRVETHTCYVGERAELHDWGFGCGECPACKLRKRGYEAYLKGERVTEAPL

SEQ ID NO: 36865 - protein, 244 aa, Burkholderia multivorans
  REGION 1..244: note = sp|A9AC62|QUEC_BURM1 7-cyano-7-deazaguanine synthase; OS = Burkholderia multivorans (strain ATCC 17616 / 249); OX = 395019 GN=queC PE=3 SV=1
MIRTDAKDGALVLFSGGQDSATCVAWALERYQTVETLGFDYGQRHRVELECREGVREALKRQFPAWADRLGDDHMIDLSVLGAISDTAMTRAIEIETAANGLPNTFVPGRNLLFMTIAAAIAYRRGLRVLVGGMCETDFSGYPDCRDDTMKALQVALNLGMDTRIVLETPLMWLDKAQTWQLAEQLGGQALVELIRVETHTCYVGERAELHDWGFGCGECPACKLRKRGYEAYLKGERVTEAPL

SEQ ID NO: 36866 - protein, 244 aa, unidentified
  source 1..244: note = Burkholderia novacaledonica
  REGION 1..244: note = tr|A0A2U3IBU5|A0A2U3IBU5_9BURK 7-cyano-7-deazaguanine synthase OS=Burkholderia novacaledonica OX=1544861 GN=queC PE=3 SV=1
MTRIDAKDSALVLFSGGQDSATCLAWALERYKTVETLGFDYGQRHRVELECREGFRAAVVREFPHWAARLGEDHMIDLSVLGAISDTAMTREIEIQANASGLPNTFVPGRNLLFMTIAAAVAYRRGLKVLVGGMCETDFSGYPDCRDDTMKALQVALNLGMETRYALETPLMWLDKADTWRLAETLGGESLVELIRIETHTCYVGERAELHDWGFGCGQCPACRLRKRGYEAYRAGEQVDVAPV

SEQ ID NO: 36867 - protein, 198 aa, Burkholderia oklahomensis
  REGION 1..198: note = tr|A0A381BZ58|A0A381BZ58_9BURK 7-cyano-7-deazaguanine synthase OS=Burkholderia oklahomensis OX=342113 GN=NCTC13388_03648 PE=3 SV=1
MRTALLLSGGMDSIAIAYWVRPAVGITVAYGQRAAQAEVRAAAAVCEALNIEHHVIDADLSTLGSGDMAGLAPSTLAPVSEWWPFRNQMLVTLAAMRAVALDVNRLLIGSLRTDGIHADGKPEFIAAMSAVLQCQEGGIALEAPAIKLSGAELIKTSGVPIDLLAWAHSCHVANEACGICRGCRKHYETLEELGFAPY

SEQ ID NO: 36868 - protein, 244 aa, Burkholderia oklahomensis
  REGION 1..244: note = tr|A0A381BU09|A0A381BU09_9BURK 7-cyano-7-deazaguanine synthase OS=Burkholderia oklahomensis OX=342113 GN=queC PE=3 SV=1
MIRTDAKDGALVLFSGGQDSATCVAWALERYQTVETLGFDYGQRHRVELECRDGVRDALKQRFPQWENKLGDDHMIDLSVLGAISDTAMTRAIEIETASNGLPNTFVPGRNLLFMTIGAAIAYRRGLRVLVGGMCETDFSGYPDCRDDTMKALQVTLNLGMDTRFVLETPLMWLDKADTWRLAEQLGGKPLVELIRVETHTCYVGERSELHDWGFGCGECPACKLRKRGYEAYQRGESVTEAPV

SEQ ID NO: 36869 - protein, 198 aa, Burkholderia plantarii
  REGION 1..198: note = tr|A0A0B6RYU4|A0A0B6RYU4_9BURK 7-cyano-7-deazaguanine synthase OS=Burkholderia plantarii; OX = 41899 GN=BGL_1c17310 PE=3 SV=1
MRTALLLSGGMDSVAIAYWVRPEVGITVAYGQRAAQAEARAAAAVCDALNIEHHLIQADLSALGSGDMAGLSPATLAPVSEWWPFRNQMLVTLAAMKAVTLNVNRLMIGSLRTDDIHADGKPEFITAMSAVLQCQEGGITLDAPAIQLSGAELIKTSGVPTDLLAWAHSCHVANEACGMCRGCRKHYETLEELGLDPY

SEQ ID NO: 36870 - protein, 244 aa, Burkholderia plantarii
  REGION 1..244: note = tr|A0A0B6RXE9|A0A0B6RXE9_9BURK 7-cyano-7-deazaguanine synthase OS=Burkholderia plantarii; OX = 41899 GN=exsB PE=3 SV=1
MIRTDAKGGALVLFSGGQDSATCVAWALERYQTVETLGFDYGQRHRVELECREGVREALRTRFAQWAGRLGDDHMIDLSVLGAISDTAMTRSIEIEMADNGLPNTFVPGRNLLFMTIAAAVAYRRGLKVLVGGMCETDFSGYPDCRDDTMKALQVALNLGMDTRVVLETPLMWLDKADTWRLAEQLGGAALVELVRVETHTCYVGERAELHDWGFGCGACPACKLRRRGYEAYRNGEQVTEAPA

SEQ ID NO: 36871 - protein, 244 aa, Burkholderia pseudomallei; identical to SEQ ID NO: 36861
  REGION 1..244: note = sp|Q63YL0|QUEC_BURPS 7-cyano-7-deazaguanine synthase; OS = Burkholderia pseudomallei (strain K96243) OX=272560; GN = queC PE=3 SV=1

SEQ ID NO: 36872 - protein, 244 aa, Burkholderia pseudomallei; identical to SEQ ID NO: 36861
  REGION 1..244: note = sp|Q3JXD3|QUEC_BURP1 7-cyano-7-deazaguanine synthase; OS = Burkholderia pseudomallei (strain 1710b) OX=320372; GN = queC PE=3 SV=1

SEQ ID NO: 36873 - protein, 244 aa, unidentified
  source 1..244: note = Burkholderia pseudomultivorans
  REGION 1..244: note = tr|A0A132ED45|A0A132ED45_9BURK 7-cyano-7-deazaguanine synthase OS=Burkholderia pseudomultivorans OX=1207504 GN=queC PE=3 SV=1
MIRTDAKDGALVLFSGGQDSATCVAWALERYQTVETLGFDYGQRHRVELECREGVREALKRQFPQWSDRLGDDHMIDLSVLGAISDTAMTRTIEIETAANGLPNTFVPGRNLLFMTIAAAIAYRRGLRVLVGGMCETDFSGYPDCRDDTMKALQVALNLGMDTRIVLETPLMWLDKAQTWQLAEQLGGEALVELIRVETHTCYVGERAELHDWGFGCGECPACKLRKRGYEAYLKGERVTEAPL

SEQ ID NO: 36874 - protein, 244 aa, unidentified
  source 1..244: note = Burkholderia puraquae
  REGION 1..244: note = tr|A0A1X1PBC7|A0A1X1PBC7_9BURK 7-cyano-7-deazaguanine synthase OS=Burkholderia puraquae; OX = 1904757 GN=queC PE=3 SV=1
MIRTDAKDGALVLFSGGQDSATCVAWALERYQTVETLGFDYGQRHRVELECREGVREALKREFSAWSDRLGDDHMIDLTVLGAISDTAMTRTIEIETAANGLPNTFVPGRNLMFMTIAAAIAYRRGLRVLVGGMCETDFSGYPDCRDDTMKALQVALNLGMDTRIVLETPLMWLDKAQTWQLAEQLGGEALVELIRVETHTCYVGERAELHDWGFGCGECPACKLRKRGYEAYLKGERVTEAPL

SEQ ID NO: 36875 - protein, 244 aa, Burkholderia pyrrocinia
  REGION 1..244: note = tr|A0A118Q4Z1|A0A118Q4Z1_BURPY 7-cyano-7-deazaguanine synthase OS=Burkholderia pyrrocinia; OX = 60550 GN=queC PE=3 SV=1
MIRTDAKDGALVLFSGGQDSATCVAWALERYQTVETLGFDYGQRHRVELECREGVRDALKRQFPAWAERLGDDHMVDLSVLGAISDTAMTRAIEIETAANGLPNTFVPGRNLLFMTIAAAIAYRRGLRVLVGGMCETDFSGYPDCRDDTMKALQVALNLGMDTRIVLETPLMWLDKSQTWQLAEQLGGPALVELIRVETHTCYVGERAELHDWGFGCGECPACKLRKRGYEAYLKGERVTEAPL

SEQ ID NO: 36876 - protein, 244 aa, Burkholderia pyrrocinia
  REGION 1..244: note = tr|A0A087P2W8|A0A087P2W8_BURPY 7-cyano-7-deazaguanine synthase OS=Burkholderia pyrrocinia; OX = 60550 GN=queC PE=3 SV=1
MIRTDAKDGALVLFSGGQDSATCVAWALERYQTVETLGFDYGQRHRVELECREGVREALKRDFSAWTDRLGDDHMIDLSVLGAISDTAMTRTIEIETTASGLPNTFVPGRNLLFMTIAAAIAYRRGLRVLVGGMCETDFSGYPDCRDDTMKALQVALNLGMDTRIVLETPLMWLDKAQTWQLAEQLGGEALVELIRVETHTCYVGERAELHDWGFGCGECPACKLRKRGYEAYLKGERVTEAPL

SEQ ID NO: 36877 - protein, 198 aa, unidentified
  source 1..198: note = Burkholderia reimsis
  REGION 1..198: note = tr|A0A365QPZ4|A0A365QPZ4_9BURK 7-cyano-7-deazaguanine synthase OS=Burkholderia reimsis; OX = 2234132 GN=DPV79_26920 PE=3 SV=1
MRTALLLSGGMDSVAIAYWVRPEVGITVAYGQRAAQAEVRAAAAVCEALNIEHHVIETDLSALGSGDMAGLAPTTLAPVSEWWPFRNQMLVTLAAMKAVTLNVNKLLIGSLRTDGIHADGKPEFIAAMSAVLQCQEGGITLEAPAIKLSGAELIKTSGVPTDLLAWAHSCHVANEACGMCRGCRKHYETLEELGFDPY

SEQ ID NO: 36878 - protein, 244 aa, unidentified
  source 1..244: note = Burkholderia reimsis
  REGION 1..244: note = tr|A0A365QTJ6|A0A365QTJ6_9BURK 7-cyano-7-deazaguanine synthase OS=Burkholderia reimsis; OX = 2234132 GN=queC PE=3 SV=1
MIRTDAKDGALVLFSGGQDSATCVAWALERYQTVETLGFDYGQRHRVELECREGVREALKRDFPAWSDRLGDDHMIDLSVLGAISDTAMTRTIEIETAANGLPNTFVPGRNLMFMTIAAAIAYRRGLRVLVGGMCETDFSGYPDCRDDTMKALQVALNLGMDTRIVLETPLMWLDKAQTWQLAEQLGGEALVELIRVETHTCYVGERAELHEWGFGCGECPACKLRKRGYEAYLKGERVTEAPL

SEQ ID NO: 36879 - protein, 244 aa, Burkholderia seminalis
  REGION 1..244: note = tr|A0A103K2S6|A0A103K2S6_9BURK 7-cyano-7-deazaguanine synthase OS=Burkholderia seminalis; OX = 488731 GN=queC PE=3 SV=1
MTRTDAKDGALVLFSGGQDSATCVAWALERYQTVETLGFDYGQRHIVELECREGVREALKRDFPAWSDRLGDDHMIDLSVLGAISDTAMTRTIEIETTANGLPNTFVPGRNLMFMTIAAAIAYRRGLRVLVGGMCETDFSGYPDCRDDTMKALQVALNLGMDTRMVLETPLMWLDKAQTWQLAEQLGGEALVELIRVETHTCYVGERAELHDWGFGCGECPACKLRKRGYEAYLKGERVTEAPL

SEQ ID NO: 36880 - protein, 244 aa, unidentified
  source 1..244: note = Burkholderia singularis
  REGION 1..244: note = tr|A0A118DNM2|A0A118DNM2_9BURK 7-cyano-7-deazaguanine synthase OS=Burkholderia singularis; OX = 1503053 GN=queC PE=3 SV=1
MIRTDAKDGALVLFSGGQDSATCVAWALERYETVETLGFDYGQRHRVELECREGVRDALKRDFPQWAGRLGDDHMIDLSVLGAISDTAMTRAIQIETAANGLPNTFVPGRNLLFMTIGAAIAYRRGLRALVGGMCETDFSGYPDCRDDTMKALQVALNLGMDTRFVVETPLMWLDKADTWRLAERLGGTRLVDLIRVETHTCYVGERSELHDWGFGCGECPACKLRKRGYEAYLCGEHVTQAPA

SEQ ID NO: 36881 - protein, 244 aa, unidentified
  source 1..244: note = Burkholderia singularis
  REGION 1..244: note = tr|A0A238H1Q9|A0A238H1Q9_9BURK 7-cyano-7-deazaguanine synthase OS=Burkholderia singularis; OX = 1503053 GN=queC PE=3 SV=1
MIRTDAKDGALVLFSGGQDSATCVAWALERYETVETLGFDYGQRHRVELECREGVRDALKRDFPQWAGRLGDDHMIDLSVLGAISDTAMTRAIQIETAANGLPNTFVPGRNLLFMTIGAAIAYRRGLRALVGGMCETDFSGYPDCRDDTMKALQVALNLGMDTRFVVETPLMWLDKADTWRLAEQLGGTRLVDLIRVETHTCYVGERSELHDWGFGCGECPACKLRKRGYEAYLCGEHVTQAPA

SEQ ID NO: 36882 - protein, 244 aa, Burkholderia sp.
  REGION 1..244: note = tr|A0A4R9MG36|A0A4R9MG36_9BURK 7-cyano-7-deazaguanine synthase OS=Burkholderia sp. USM B20 OX=1571773 GN=queC PE=3 SV=1
MIRTDAKDGALVLFSGGQDSATCVAWALERYQTVETLGFDYGQRHRVELECREGVRDALKRQFPAWADRLGDDHMVDLSVLGAISDTAMTRTIEIETAANGLPNTFVPGRNLLFMTIAAAIAYRRGLRVLVGGMCETDFSGYPDCRDDTMKALQVALNLGMDTRMVLETPLMWLDKAQTWQLAEQLGGEALVELIRVETHTCYVGERAELHDWGFGCGECPACKLRKRGYEAYLKGERVTEAPL

SEQ ID NO: 36883 - protein, 244 aa, Burkholderia sp.
  REGION 1..244: note = tr|A0A3P0SAC7|A0A3P0SAC7_9BURK 7-cyano-7-deazaguanine synthase OS=Burkholderia sp. Bp9004; OX = 2184559 GN=queC PE=3 SV=1
MIRTDAKDGALVLFSGGQDSATCVAWALERYQTVETLGFDYGQRHRVELECREGVREALKRKFPAWSDRLGDDHMIDLSVLGAISDTAMTRTIEIETSANGLPNTFVPGRNLLFMTIAAAIAYRRGLRVLVGGMCETDFSGYPDCRDDTMKALQVALNLGMDTRVVLETPLMWLDKAQTWQLAEQLGGEALVELIRVETHTCYVGERAELHDWGFGCGECPACKLRKRGYEAYLKGERVTEAPL

SEQ ID NO: 36884 - protein, 244 aa, Burkholderia stabilis
  REGION 1..244: note = tr|A0A4Q2AS17|A0A4Q2AS17_9BURK 7-cyano-7-deazaguanine synthase OS=Burkholderia stabilis; OX = 95485 GN=queC PE=3 SV=1
MIRTDAKDGALVLFSGGQDSATCVAWALERYQTVETLGFDYGQRHRVELECREGVREALKRKFPAWSDRLGDDHMIDLSVLGAISDTAMTRTIEIETTANGLPNTFVPGRNLMFMTIAAAIAYRRGLRALVGGMCETDFSGYPDCRDDTMKALQVALNLGMDTRIVLETPLMWLDKAQTWQLAEQLGGEALVELIRVETHTCYVGERAELHDWGFGCGECPACKLRKRGYEAYLKGERVTEAPL

SEQ ID NO: 36885 - protein, 244 aa, Burkholderia stabilis
  REGION 1..244: note = tr|A0A498RN51|A0A498RN51_9BURK 7-cyano-7-deazaguanine synthase OS=Burkholderia stabilis; OX = 95485 GN=queC PE=3 SV=1
MIRTDAKDGALVLFSGGQDSATCVAWALERYQTVETLGFDYGQRHRVELECREGVREALKREFPAWSDRLGDDHMIDLSVLGAISDTAMTRTIEIETTANGLPNTFVPGRNLMFMTIAAAIAYRRGLRVLVGGMCETDFSGYPDCRDDTMKALQVALNLGMDTRIVLETPLMWLDKAQTWQLAEQLGGEALVELIRVETHTCYVGERAELHDWGFGCGECPACKLRKRGYEAYLKGERVTEAPL

SEQ ID NO: 36886 - protein, 206 aa, unidentified
  source 1..206: note = Burkholderia stagnalis
  REGION 1..206: note = tr|A0A125KIY9|A0A125KIY9_9BURK 7-cyano-7-deazaguanine synthase OS=Burkholderia stagnalis; OX = 1503054 GN=WT44_13430 PE=3 SV=1
MKRALLLASGGLDSTTVGYQLAATGADVVPIFFDYGQHCVDVEWSRVNEVLPADMRRPERFDISDIFRGSQSRLIREADLWTEEVKDDDLYIPYRTMLFFAAAAARAQTIGILDVYTGFINSNHAKEIDCTAAFMNSLDGLTSSIGPVRFHSPFRYSSKVDVARAATELGVPIGRTYSCQASAQFPCGACPNCVERLNALKEAKLV

SEQ ID NO: 36887 - protein, 244 aa, unidentified
  source 1..244: note = Burkholderia stagnalis
  REGION 1..244: note = tr|A0A104LHY8|A0A104LHY8_9BURK 7-cyano-7-deazaguanine synthase OS=Burkholderia stagnalis; OX = 1503054 GN=queC PE=3 SV=1
MIRTDAKDGALVLFSGGQDSATCVAWALERYQTVETLGFDYGQRHRVELECREGVRDALKRQFPAWAERLGDDHMVDLSVLGAISDTAMTRAIEIETAANGLPNTFVPGRNLLFMTIAAAVAYRRGLRVLVGGMCETDFSGYPDCRDDTMKALQVALNLGMDTRIVLETPLMWLDKAQTWQLAEQLGGPALVELIRVETHTCYVGERAELHDWGFGCGECPACKLRKRGYEAYLKGERVTEAPL

SEQ ID NO: 36888 - protein, 244 aa, unidentified
  source 1..244: note = Burkholderia territorii
  REGION 1..244: note = tr|A0A106M5H7|A0A106M5H7_9BURK 7-cyano-7-deazaguanine synthase OS=Burkholderia territorii; OX = 1503055 GN=queC PE=3 SV=1
MIRTDAKDGALVLFSGGQDSATCVAWALERYQTVETLGFDYGQRHRVELECREGVRDALKRRFPAWAGRLGDDHMIDLSVLGAISDTAMTRTIEIETAANGLPNTFVPGRNLLFMTIAAAIAYRRGLRVLVGGMCETDFSGYPDCRDDTMKALQVALNLGMDTRIVLETPLMWLDKAQTWQLAEQLGGEALVELIRVETHTCYVGERAELHDWGFGCGECPACKLRKRGYEAYLKGERVTEAPL

SEQ ID NO: 36889 - protein, 244 aa, unidentified; identical to SEQ ID NO: 36850
  source 1..244: note = Burkholderia territorii
  REGION 1..244: note = tr|A0A108LPB8|A0A108LPB8_9BURK 7-cyano-7-deazaguanine synthase OS=Burkholderia territorii; OX = 1503055 GN=queC PE=3 SV=1

SEQ ID NO: 36890 - protein, 206 aa, Burkholderia thailandensis
  REGION 1..206: note = tr|A0A5F1C401|A0A5F1C401_BURTH 7-cyano-7-deazaguanine synthase OS=Burkholderia thailandensis OX=57975 GN=C6946_14290 PE=3 SV=1
MKKALLLSSGGLDSTTVGYKLAATGVDVVPIFFDYGQHCVEVEWGRVNEVLPADMQRPERFDISDIFRGSPSRLIREADLWTEAVKDDDLYIPYRTMLFFAAAAARAQTVGILDVYTGFINSNHAKEIDCTAAFMNSLDGLTASIGPVRFHSPFRYSSKADVARAAAELGVPIGRTYSCQASAHFPCGACPNCVERLNALKEAKLV

SEQ ID NO: 36891 - protein, 244 aa, Burkholderia thailandensis
  REGION 1..244: note = sp|Q2T2A4|QUEC_BURTA 7-cyano-7-deazaguanine synthase; OS = Burkholderia thailandensis (strain ATCC 700388 / DSM 13276 / CIP 106301 / E264) OX=271848 GN=queC PE=3 SV=1
MIRTDAKDGALVLFSGGQDSATCVAWALERYQTVETLGFDYGQRHRVELECREGVRDALKRRFPQWSHKLGDDHMIDLSVLGAISDTAMTRAIEIETASNGLPNTFVPGRNLLFMTIGAAIAYRRGLRALVGGMCETDFSGYPDCRDDTMKALQVALNLGMDTRFVLETPLMWLDKADTWRLAEQLGGKPLVELIRVETHTCYVGERSELHDWGFGCGECPACKLRKRGFEAYLRGESVTQAPV

SEQ ID NO: 36892 - protein, 404 aa, Burkholderia ubonensis
  REGION 1..404: note = tr|A0A103RPG8|A0A103RPG8_9BURK Uncharacterized protein OS=Burkholderia ubonensis OX=101571 GN=WJ33_20770; PE = 4 SV=1
MTVDTIKIYRGCDKCGMPLHYDAIMSGDETATIPASGLCGHCSGLKPGRKAEYEKEPDYEWLLDAMIDVVKGERRLLRKGASLVSSLPLVNRSGLGVAAGILDSIPAPETRSTYDAMVLYSGGKDSTYMLINLAEKGLKVCAWMLDPGYQSPQTIDNAKRITARLGVELVIDKADKTFADSLFRSGFEIDENSDIELKKGAMTYGSACWPCFSVIAVSASRFANSHRIPLCFIGTQKGQNRLNLEGSGVLSSKQLPKLNELVRKFVDPFKKAIPDQARMLQPDPDSVDFPTVLVPFYELVQKPDKEAQIRYLEERGWVMPKNTGACSSNCMINELGRAVMRSKFGFDLYQVIDSNERRLGHRADEAAYGAPDPKMVKLGAVMLGLSDQELKHLGVQANGEDQNA

SEQ ID NO: 36893 - protein, 244 aa, Burkholderia ubonensis
  REGION 1..244: note = tr|A0A119UP37|A0A119UP37_9BURK 7-cyano-7-deazaguanine synthase OS=Burkholderia ubonensis; OX = 101571 GN=queC PE=3 SV=1
MIRTDAKDGALVLFSGGQDSATCVAWALERYQTVETLGFDYGQRHRVELECREGVRDALKREFPAWAGRLGDDHMIDLSVLGAISDTAMTRAIEIETSANGLPNTFVPGRNLLFMTIAAAIAYRRGLRVLVGGMCETDFSGYPDCRDDTMKALQVALNLGMDTRIVLETPLMWLDKAQTWQLAEQLGGQALVELIRVETHTCYVGERAELHDWGFGCGECPACKLRKRGYEAYLKGERVTEAPL

SEQ ID NO: 36894 - protein, 244 aa, Burkholderia vietnamiensis
  REGION 1..244: note = tr|A0A103MSU4|A0A103MSU4_BURVI 7-cyano-7-deazaguanine synthase OS=Burkholderia vietnamiensis OX=60552 GN=queC PE=3 SV=1
MIRTDAKDGALVLFSGGQDSATCVAWALERYQTVETLGFDYGQRHRVELECREGVRDALKHRFPAWAGRLGDDHMIDLSVLGAISDTAMTRTIEIETAANGLPNTFVPGRNLLFMTIAAAIAYRRGLRVLVGGMCETDFSGYPDCRDDTMKALQVALNLGMDTRVVLETPLMWLDKAQTWQLAEQLGGAALVELIRVETHTCYVGERAELHDWGFGCGECPACKLRKRGYEAYLKGERVTEAPL

SEQ ID NO: 36895 - protein, 244 aa, Burkholderia vietnamiensis; identical to SEQ ID NO: 36894
  REGION 1..244: note = sp|A4JIU1|QUEC_BURVG 7-cyano-7-deazaguanine synthase; OS = Burkholderia vietnamiensis (strain G4 / LMG 22486); OX = 269482 GN=queC PE=3 SV=1

SEQ ID NO: 36896 - protein, 224 aa, unidentified
  source 1..224: note = Burkholderiaceae bacterium
  REGION 1..224: note = tr|A0A0F0DSN9|A0A0F0DSN9_9BURK 7-cyano-7-deazaguanine synthase OS=Burkholderiaceae bacterium 26 OX=1619951 GN=queC PE=3 SV=1
MKKRAIVLLSGGLDSATVLAMANADGFETYALSMRYGQRHSSELEAAKKVAATLGAVRHEIVDLDLRKFGGSALTDDALDVPTDGAQSGIPITYVPARNTIMLSLALGWAEAVGARDLFFGANAVDYSGYPDCRPEYVAAYETLANLATKAGVEGERIRVNAPIINMTKAEIIQAGVRLGVDYGLTVSCYQADDDGRACGVCDSCRIRKAGFDAAGVPDPTRYA

SEQ ID NO: 36897 - protein, 236 aa, unidentified
  source 1..236: note = Burkholderiaceae bacterium
  REGION 1..236: note = tr|A0A4U8V9W7|A0A4U8V9W7_9BURK 7-cyano-7-deazaguanine synthase OS=Burkholderiaceae bacterium PBA OX=795666 GN=queC PE=3 SV=1
MTSRAIVLLSGGLDSATVLAMARAQGFETYALSMRYGQRHSSELDAARRVARALGAQRHEIIDLDLRPFGGSALTDDTLDVPVDGNSTGIPITYVPARNTIMLSVALGWAEAVGAYDLFFGANAVDYSGYPDCRPEFVAAYETLANIATKAGVEGQRIRVQAPIIAMSKAEIIRTGIGLGVDYGMTVSCYLADAEGRACGVCDSCRLRRAGFEAAGVADPTRYQTDQTDPAAGAKQ

SEQ ID NO: 36898 - protein, 236 aa, unidentified
  source 1..236: note = Burkholderiales bacterium
  REGION 1..236: note = tr|A0A1F4GQ31|A0A1F4GQ31_9BURK 7-cyano-7-deazaguanine synthase OS=Burkholderiales bacterium GWA2_64_37 OX=1797549 GN=queC PE=3 SV=1
MRPGHALVLFSGGQDSTTCLAWALENFAHVETIGFDYGQRHHIELQARQTVLSSLRAQFPHWAAKLGDDHRLDLAVLGHISDTALTSDTEIQMTAAGLPNTFVPGRNLLFFQLAAAVGYRRGLHTLVGGMCETDFSGYPDCRDDTLKALQVAVSLGMGQRFTFDTPLMWLDKAETWELARSLGGQALVDLIVNDSHTCYHGVRDTLHAWGYGCGTCPACALRRSGYERWKGGSASV

SEQ ID NO: 36899 - protein, 236 aa, unidentified; identical to SEQ ID NO: 36700
  source 1..236: note = Burkholderiales bacterium
  REGION 1..236: note = tr|A0A1Q3XXL3|A0A1Q3XXL3_9BURK 7-cyano-7-deazaguanine synthase OS=Burkholderiales bacterium 67-32 OX=1895729 GN=queC PE=3 SV=1

SEQ ID NO: 36900 - protein, 231 aa, Buttiauxella agrestis
  REGION 1..231: note = tr|A0A381CB37|A0A381CB37_9ENTR 7-cyano-7-deazaguanine synthase OS=Buttiauxella agrestis; OX = 82977 GN=queC PE=3 SV=1
MKRAVVVFSGGQDSTTCLIQALQQYDEVHCVTFDYGQRHRAEIDVARELALKLGARAHKVLDVTLLNELAVSSLTRDNIPVPDYDPQESGIPSTFVPGRNILFLTLTAIYAYQVEAEAVITGVCETDFSGYPDCRDEFVKALNHAVSLGMARDIRFETPLMWLDKAETWALADYWQQLELVRNDTLTCYNGIQGDGCGECAACHLRANGLNHYLADKPAVMAAMKKKTGLK

SEQ ID NO: 36901 - protein, 231 aa, Buttiauxella agrestis; identical to SEQ ID NO: 36900
  REGION 1..231: note = tr|A0A085GI42|A0A085GI42_9ENTR 7-cyano-7-deazaguanine synthase OS=Buttiauxella agrestis ATCC 33320 OX=1006004 GN=queC PE=3 SV=1

SEQ ID NO: 36902 - protein, 231 aa, Buttiauxella brennerae
  REGION 1..231: note = tr|A0A1B7IV44|A0A1B7IV44_9ENTR 7-cyano-7-deazaguanine synthase OS=Buttiauxella brennerae ATCC 51605 OX=1354251 GN=queC PE=3 SV=1
MKRAVVVFSGGQDSTTCLIQALQQYDEVHCVTFDYGQRHRAEIDVARELALKLGARAHKVLDVTLLNELAVSSLTRDSIPVPGYNPEEKGIPSTFVPGRNILFLTLTAIYAYQVEAEAVITGVCETDFSGYPDCRDEFVKALNHAVSLGMARDIRFETPLMWLDKAETWALADYWQQLGLVRNETLTCYNGIQGDGCGECAACNLRANGLNHYLADKPAVMAAMKKKTGLK

SEQ ID NO: 36903 - protein, 231 aa, Buttiauxella gaviniae
  REGION 1..231: note = tr|A0A1B7HUF7|A0A1B7HUF7_9ENTR 7-cyano-7-deazaguanine synthase OS=Buttiauxella gaviniae ATCC 51604 OX=1354253 GN=queC PE=3 SV=1
MKRAVVVFSGGQDSTTCLIQALHQYDEVHCVTFDYGQRHRAEIDVARELALKLGARAHKVLDVTLLNELAVSSLTRDSIPVPGYDPEEKGIPSTFVPGRNILFLTLTAIYAYQVEAEAIITGVCETDFSGYPDCRDEFVKALNHAVSLGMARDIRFETPLMWLDKAETWALADYWQQLDLVRSGTLTCYNGIKGDGCGECAACNLRSNGLNHFLADKPGVMAAMKKKTGLK

SEQ ID NO: 36904 - protein, 231 aa, Buttiauxella izardii
  REGION 1..231: note = tr|A0A3A5JL98|A0A3A5JL98_9ENTR 7-cyano-7-deazaguanine synthase OS=Buttiauxella izardii; OX = 82991 GN=queC PE=3 SV=1
MKRAVVVFSGGQDSTTCLIQALQQYDEVHCVTFDYGQRHRAEIDVARELSLKLGARAHKVLDVTLLNELAVSSLTRDSIPVPGYDPEEKGIPSTFVPGRNILFLTLTAIYAYQVEAEAVITGVCETDFSGYPDCRDEFVKALNHAVSLGMGRDVRFETPLMWLDKAETWALADYWQQLDLVRNDTLTCYNGIQGDGCGECAACNLRANGLNHYLADKPTVMAAMKKKTGLK

SEQ ID NO: 36905 - protein, 231 aa, Buttiauxella noackiae
  REGION 1..231: note = tr|A0A1B7I1M7|A0A1B7I1M7_9ENTR 7-cyano-7-deazaguanine synthase OS=Buttiauxella noackiae ATCC 51607 OX=1354255 GN=queC PE=3 SV=1
MKRAVVVFSGGQDSTTCLIQALQQYDEVHCVTFDYGQRHRAEIDVARELALKLGARAHKVLDVTLLNELAVSSLTRDSIPVPGYSPEEKGIPSTFVPGRNILFLTLTAIYAYQVEAEAVITGVCETDFSGYPDCRDEFVKALNHAVSLGMARDIRFETPLMWLDKAETWALADYWQQLDLVRSETLTCYNGIKGDGCGECAACNLRANGINHYLADKPGVMAAMKKKTSLK

SEQ ID NO: 36906 - protein, 231 aa, Buttiauxella sp.
  REGION 1..231: note = tr|A0A4R8F2B9|A0A4R8F2B9_9ENTR 7-cyano-7-deazaguanine synthase OS=Buttiauxella sp. BIGb0552 OX=2485120 GN=queC PE=3 SV=1
MKRAVVVFSGGQDSTTCLIQALQQYDEVHCVTFDYGQRHRAEIDVARELALKLGARAHKVLDVTLLNELAVSSLTRDSIPVPGYDPEEKGIPSTFVPGRNILFLTLTAIYAYQVEAEAIITGVCETDFSGYPDCRDEFVKALNHAVSLGMARDIRFETPLMWLDKAETWALADYWQQLDLVRSETLTCYNGIKGDGCGECAACNLRSNGLNHFLADKPGVMAAMKKKTGLK

SEQ ID NO: 36907 - protein, 231 aa, Buttiauxella sp.
  REGION 1..231: note = tr|A0A4P5QF20|A0A4P5QF20_9ENTR 7-cyano-7-deazaguanine synthase OS=Buttiauxella sp. A111; OX = 2563088 GN=queC PE=3 SV=1
MKRAVVVFSGGQDSTTCLIQALKQYDEVHCVTFDYGQRHRAEIDVARELALKLGARAHKVLDVTLLNELAVSSLTRDNIPVPHYDPSENGIPSTFVPGRNILFLTLTAIYAYQVEAEAVITGVCETDFSGYPDCRDEFVKALNHAVSLGMGRDVRFETPLMWLDKAETWALADYWLQLDLVRNDTLTCYNGIQGDGCGECAACNLRSNGLNHYLADKPAVMAAMKKKTGLK

SEQ ID NO: 36908 - protein, 231 aa, Buttiauxella warmboldiae
  REGION 1..231: note = tr|A0A3N5DSI9|A0A3N5DSI9_9ENTR 7-cyano-7-deazaguanine synthase OS=Buttiauxella warmboldiae OX=82993 GN=queC PE=3 SV=1
MKRAVVVFSGGQDSTTCLIQALQQYDEVHCVTFDYGQRHRAEIDVARELALKLGARAHKVLDVTLLNELAVSSLTRDSIPVPGYDPEEKGVPSTFVPGRNILFLTLSAIYAYQVEAEAVITGVCETDFSGYPDCRDEFVKALNHAVSLGMARDIRFETPLMWLDKAETWALADYWQQLDRVRKETLTCYNGIQGDGCGECAACNLRANGLNHYLADKAAVMATMKKKTGLK

SEQ ID NO: 36909 - protein, 229 aa, unidentified
  source 1..229: note = Butyricicoccus porcorum
  REGION 1..229: note = tr|A0A252F6Z4|A0A252F6Z4_9CLOT 7-cyano-7-deazaguanine synthase OS=Butyricicoccus porcorum; OX = 1945634 GN=queC PE=3 SV=1
MKALVLSSGGVDSTTCLGLAIEKYGKENIVALSITYGQLHTKEVEAAKKIADYYGVEFLTLDLAKIFQYDTKCSLLQGSQNEIPEESYANQLQKTDGKPVSTYVPFRNGLFLSSAASIALSKDCSVIYYGAHSDDAAGNAYPDCSSAFHNAMRDAIYIGSGNQLTIEAPFVHSTKADVVREGLRLGVPYELTWSCYEGGDKPCGKCGTCRDRAAAFAANGVADPALQEG

SEQ ID NO: 36910 - protein, 274 aa, Butyricicoccus pullicaecorum
  REGION 1..274: note = tr|R8W6K1|R8W6K1_9CLOT TIGR00268 family protein; OS = Butyricicoccus pullicaecorum 1.2 OX=1203606; GN = HMPREF1526_01828 PE=4 SV=1
MKEAWAQSNREQMPFVFYERVIFMTLQAFFTQYPRAAVAFSGGVDSAFVLWAAKKYGCDVRAYYVHSAFQPAFELEDAKKLAEQLDIPMTVIEVDILSVPKAVENGADRCYHCKHALFTTLWERVRADGYTVLLDGTNASDDASDRPGMRALKELSVLSPLRLCGVTKAQVREQSRQADLFTWDKPAYACLATRVPTGTPITQDKLTKIERAEQALAELGFTDFRVRLAGNTARLEMTAAQLAQAAARYEQIIAALGADFDAVVLDLTPRRASR

SEQ ID NO: 36911 - protein, 251 aa, Butyricicoccus pullicaecorum
  REGION 1..251: note = tr|A0A1Y4LA24|A0A1Y4LA24_9CLOT TIGR00268 family protein OS=Butyricicoccus pullicaecorum OX=501571; GN = B5F15_13890 PE=4 SV=1
MTLQAFFTQYPRAAVAFSGGVDSAFVLWAAKKYGCDVRAYYVHSAFQPAFELEDAKKLAEQLDIPMTVIEVDILSVPKAVENGADRCYHCKHALFTTLWERVRADGYTVLLDGTNASDDASDRPGMRALKELSVLSPLRLCGVTKAQVREQSRQADLFTWDKPAYACLATRVPTGTPITQDKLTKIERAEQALAELGFTDFRVRLAGNTARLEMTAAQLAQAAARYEQIIAALGADFDAVVLDLTPRRASR

SEQ ID NO: 36912 - protein, 228 aa, Butyricicoccus sp.
  REGION 1..228: note = tr|A0A417HNT7|A0A417HNT7_9CLOT 7-cyano-7-deazaguanine synthase OS=Butyricicoccus sp. AM28-25 OX=2292294 GN=queC PE=3 SV=1
MSEKAMVLCSGGVDSTTCLALAIQKHGKENVCALSIYYGQKHVKEIQAAKAVLEYYGIEGTSLDLTPVFAYSDCSLLSHSTEDIPEESYAEQLAQRGGKPVTTYVPFRNGLFLSTAASVALSKNCSVIYYGAHHDDAAGNAYPDCSEEFVNAMNHSIVLGSGGDVRIEAPFVRWNKAQIVAEGLRLQVPYQLTWSCYEGGDKPCGKCGTCLDRIRAFEANGVTDPAMR

SEQ ID NO: 36913 - protein, 228 aa, Butyricicoccus sp.
  REGION 1..228: note = tr|A0A396MIS0|A0A396MIS0_9CLOT 7-cyano-7-deazaguanine synthase OS=Butyricicoccus sp. AF10-3 OX=2292196 GN=queC PE=3 SV=1
MSEKAMVLCSGGVDSTTCLALAIEKHGKENVCALSIYYGQKHVKEIQAAKAVLEYYGIEGTSLDLTPVFAYSDCSLLSHSTEDIPEESYAEQLAQRGGKPVTTYVPFRNGLFLSAAASVALSKNCSVIYYGAHHDDAAGNAYPDCSEEFVNAMNHSIVLGSGGDVRIEAPFVRWNKAQIVAEGLRLQVPYQLTWSCYEGGDKPCGKCGTCLDRIRAFEANGVTDPAMR

SEQ ID NO: 36914 - protein, 223 aa, unidentified
  source 1..223: note = Butyricimonas faecalis
  REGION 1..223: note = tr|A0A3S9VQ83|A0A3S9VQ83_9BACT 7-cyano-7-deazaguanine synthase OS=Butyricimonas faecalis; OX = 2093856 GN=queC PE=3 SV=1
MKKALVLLSGGLDSTTALYVAKEQGFDELYAITFEYGQKHDKEIKAAKAVAKAAGVKEHKFVKIMLNQWDGCSLTDEKMDIHDGDINRTTIPDTYVPARNMVFLSVAASYADALDITDIFIGVSEVDYSGYVDCREEFIRSMEQTINLGTVLGAEKKQKITLHAPFMHMTKADEVRLGDRLGVDYSLTWTCYRGNEKPCGTCDSCLLRAKAFEEAGIKDPLVN

SEQ ID NO: 36915 - protein, 224 aa, Butyricimonas sp.
  REGION 1..224: note = tr|A0A3D2DYQ3|A0A3D2DYQ3_9BACT 7-cyano-7-deazaguanine synthase OS=Butyricimonas sp.; OX = 1969738 GN=queC PE=3 SV=1
MMKKALVLLSGGLDSTTALYVAREQGFDELYAITFEYGQKHDKEIKAAKAVAKAAGVKEHKFVKIMLNQWDGCSLTDEKMDIHDGDINRTTIPDTYVPARNMVFLSVAASYADALDITDIFIGVSEVDYSGYVDCREEFIRSMEQTINLGTVLGAEKKQKITLHAPFMHMTKADEVRLGNRLGVDYSLTWTCYRGGKKPCGTCDSCLLRAKAFEEAGIKDPLSY

SEQ ID NO: 36916 - protein, 225 aa, Butyricimonas sp.
  REGION 1..225: note = tr|A0A1Y3VYD8|A0A1Y3VYD8_9BACT 7-cyano-7-deazaguanine synthase OS=Butyricimonas sp. An62; OX = 1965649 GN=queC PE=3 SV=1
MKKALVLLSGGLDSTTALYVAQEQGFDELYAITFEYGQKHDKEIKAAKAVAKAAGVKEHKFVKIMLNQWDGCSLTDEKMDIHDGDINRTTIPDTYVPARNMVFLSVAASYADALDITDIFIGVSEVDYSGYVDCREEFIRSMEQTINLGTVLGAEKKQKITLHAPFMHMTKADEVHLGNRLGVDYSLTWTCYRGDEKPCGTCDSCLLRAKAFEEAGIKDPLFNGK

SEQ ID NO: 36917 - protein, 223 aa, Butyricimonas synergistica
  REGION 1..223: note = tr|A0A1U7LAU9|A0A1U7LAU9_9BACT 7-cyano-7-deazaguanine synthase OS=Butyricimonas synergistica OX=544644 GN=queC PE=3 SV=1
MKKALVLLSGGLDSTTALYVAKEQGFNELYAITFEYGQKHDKEIKAAKAVAKAAGVKEHKFVKIMLNQWDGCSLTDEKMDIHDGDINRTTIPDTYVPARNMVFLSVAASYADALDITDIFIGVSEVDYSGYVDCREEFIRSMEQTINLGTVLGAEKKQKITLHAPFMHMTKADEVRLGNRLGVDYSLTWTCYRGDEKPCGTCDSCLLRAKAFEEAGIKDPLSN

SEQ ID NO: 36918 - protein, 225 aa, Butyricimonas virosa
  REGION 1..225: note = tr|A0A412X6C5|A0A412X6C5_9BACT 7-cyano-7-deazaguanine synthase OS=Butyricimonas virosa; OX = 544645 GN=queC PE=3 SV=1
MKKALVLLSGGLDSTTALYVAQEQGFDELYAITFEYGQKHDKEIKAAKAVAKAAGVKEHKFVKIMLNQWDGSSLTDEKMDIHDGDINRTTIPDTYVPARNMVFLSVAASYADALDITDIFIGVSEVDYSGYVDCREEFIRSMEQTINLGTVLGAEKKQKITLHAPFMHMTKADEVRLGNRLGVDYSLTWTCYRGDKKPCGTCDSCLLRAKAFEEAGLKDPLFNGK

SEQ ID NO: 36919 - protein, 224 aa, Butyricimonas virosa; identical to SEQ ID NO: 36915
  REGION 1..224: note = tr|A0A415QRV6|A0A415QRV6_9BACT 7-cyano-7-deazaguanine synthase OS=Butyricimonas virosa; OX = 544645 GN=queC PE=3 SV=1

SEQ ID NO: 36920 - protein, 227 aa, Butyrivibrio crossotus
  REGION 1..227: note = tr|R5LHC1|R5LHC1_9FIRM 7-cyano-7-deazaguanine synthase OS=Butyrivibrio crossotus CAG:259 OX=1263062; GN = queC PE=3 SV=1
MRALVLSSGGVDSTTCLGMAVDKYGKENVVSLSVFYGQKHTKELEAATKVAKYYGVEHMAIDLSLIFKDSDCSLLTHSTEEIPHESYAKQLEKTDGKPVSTYVPFRNGLFLATAASIALSKKCDVIYYGAHADDAAGNAYPDCSEVFYNAMNTAVYEGSGRQLKIEAPLVTWNKATVVKKGLELKVPYELTWSCYEGGDKPCMKCGTCIDRMKAFEANNVKDPVLGE

SEQ ID NO: 36921 - protein, 227 aa, Butyrivibrio crossotus
  REGION 1..227: note = tr|D4RWH3|D4RWH3_9FIRM 7-cyano-7-deazaguanine synthase OS=Butyrivibrio crossotus DSM 2876 OX=511680; GN = queC PE=3 SV=1
MRALVLSSGGVDSTTCLGMAVDKYGKENVVSLSVFYGQKHTKELEAATKVAKYYGVEHMAIDLSLIFKDSDCSLLSHSTEKIPHESYAEQLEKTDGKPVSTYVPFRNGLFLATAASIALSKKCDVIYYGAHADDAAGNAYPDCSEVFYNAMNTAVYEGSGRQLKIEAPLVTWNKATVVKKGLELKVPYELTWSCYEGGDKPCMKCGTCIDRMKAFEANNVKDPVLGE

SEQ ID NO: 36922 - protein, 228 aa, Butyrivibrio fibrisolvens
  REGION 1..228: note = tr|D4IW44|D4IW44_BUTFI 7-cyano-7-deazaguanine synthase OS=Butyrivibrio fibrisolvens 16/4 OX=657324; GN = queC PE=3 SV=1
MKALVLVSGGVDSTTCLGMAVKEYGSENVVGLSIFYGQRHDKEIKAADAVCEHYNVEHITLDLSTMFQFSDCTLLQHSDGEIPEESYAEQLAKTDGKPVSTYVPFRNGLFLSSASAIALSKGCSKIYYGAHSDDAAGNAYPDCSEAFNNAMNTAIYEGSGKQLQIEAPFINLTKAQVVKKGLEIGVPYELTWSCYEGHEKACGKCGTCIDRKAAFELNGTTDPIAYEN

SEQ ID NO: 36923 - protein, 227 aa, Butyrivibrio sp.
  REGION 1..227: note = tr|A0A3C0J6S6|A0A3C0J6S6_9FIRM 7-cyano-7-deazaguanine synthase OS=Butyrivibrio sp.; OX = 28121 GN=queC PE=3 SV=1
MRALVLSSGGVDSTTCLGMAVDKYGKENVVSLSVFYGQKHTKELEAATKVAKYYGVEHMAIDLSLIFKDSDCSLLSHSTEEIPHESYAKQLEKTDGKPVSTYVPFRNGLFLATAASIALSKKCDVIYYGAHADDAAGNAYPDCSEVFYNAMNTAVYEGSGRQLKIEAPLVTWNKATVVKKGLELKVPYELTWSCYEGGDKPCMKCGTCIDRMKAFEANNVKDPVLGE

SEQ ID NO: 36924 - protein, 227 aa, Butyrivibrio sp.; identical to SEQ ID NO: 36920
  REGION 1..227: note = tr|A0A350RPY4|A0A350RPY4_9FIRM 7-cyano-7-deazaguanine synthase OS=Butyrivibrio sp.; OX = 28121 GN=queC PE=3 SV=1

SEQ ID NO: 36925 - protein, 232 aa, unidentified
  source 1..232: note = Bythopirellula goksoyri
  REGION 1..232: note = tr|A0A5B9QHZ2|A0A5B9QHZ2_9PLAN 7-cyano-7-deazaguanine synthase OS=Bythopirellula goksoyri; OX = 1400387 GN=queC PE=3 SV=1
MTDSPKHAVVLLSGGLDSATTAAIALSQGFQVHALSIDYGQRHRFELTSARRVADSLKIQDHKLVSIDLASLGGSALTADIEVPQGRSGEEMSVGIPVTYVPARNTVMLSLALGFAEVLGAADIFVGVNAVDYSGYPDCRPEFIVAFEQLANLATKAGVEGATKFSIHAPLIQMTKAEIIRQGMELSVDYGLTHTCYSPNEAGLACGKCDACQLRKQGFADAGLEDPIEYQV

SEQ ID NO: 36926 - protein, 244 aa, unidentified
  source 1..244: note = Caballeronia arationis
  REGION 1..244: note = tr|A0A158CGV8|A0A158CGV8_9BURK 7-cyano-7-deazaguanine synthase OS=Caballeronia arationis; OX = 1777142 GN=queC PE=3 SV=1
MTRTDAKDSALVLFSGGQDSATCLAWALERYRTVETLGFDYGQRHRVELECRDGFRAAIAREFPQWVDRLGDDHMIDLSVLGAISETAMTREIEIEATTNGLPNTFVPGRNLMFMTIAAAIAYRRGLKVLVGGMCETDFSGYPDCRDDTMKALQVALNLGMETRYALETPLMWLDKADTWRLAETLGGEKLVELVRVETHTCYVGERAELHEWGFGCGQCPACKLRKRGFEAYRAGEQVTTEPV

SEQ ID NO: 36927 - protein, 244 aa, unidentified
  source 1..244: note = Caballeronia arvi
  REGION 1..244: note = tr|A0A158HFG5|A0A158HFG5_9BURK 7-cyano-7-deazaguanine synthase OS=Caballeronia arvi; OX = 1777135 GN=queC PE=3 SV=1
MTRIDAKDSALVLFSGGQDSATCLAWALERYTTVETLGFDYGQRHRVELECRDGFRAAIAREFPQWAERLGEDHMIDLSVLGAISDTAMTREIEIQATASGLPNTFVPGRNLLFMTIAAAVAYRRGLKVLVGGMCETDFSGYPDCRDDTMKALQVALNLGMETRYALETPLMWLDKADTWRLAETLGGDALVELIRIETHTCYVGERAELHDWGFGCGQCPACKLRKRGYEAYRAGEQVDVAPV

SEQ ID NO: 36928 - protein, 244 aa, unidentified
  source 1..244: note = Caballeronia calidae
  REGION 1..244: note = tr|A0A157Z6W2|A0A157Z6W2_9BURK 7-cyano-7-deazaguanine synthase OS=Caballeronia calidae; OX = 1777139 GN=queC PE=3 SV=1
MTRIDAKDSALVMFSGGQDSATCLAWALERYKTVETLGFDYGQRHRVELECRDGFRAAITRAFPQWAERLGEDHTIDLSVLGAISDTAMTREIEIQSTASGLPNTFVPGRNLLFMTIAAAVAYRRGLKVLVGGMCETDFSGYPDCRDDTMKALQVALNLGMETRYALETPLMWLDKADTWRLAETLGGEALVELIRVETHTCYVGERAELHDWGFGCGQCPACKLRKRGYEAYRAGEQVTTAPV

SEQ ID NO: 36929 - protein, 244 aa, unidentified
  source 1..244: note = Caballeronia catudaia
  REGION 1..244: note = tr|A0A157Z4M2|A0A157Z4M2_9BURK 7-cyano-7-deazaguanine synthase OS=Caballeronia catudaia; OX = 1777136 GN=queC PE=3 SV=1
MTRIDAKDSALVLFSGGQDSATCLAWALERYRTVETLGFDYGQRHRVELECRDGFRAAIAREFPHWAERLGEDHMIDLSVLSAISDTAMTREIEIQATASGLPNTFVPGRNLLFVTIAAAVAYRRGLKVLVGGMCETDFSGYPDCRDDTMKALQVALNLGMETRYALETPLMWLDKADTWRLAETLGGDALVELIRVETHTCYVGERAELHDWGFGCSQCPACKLRKRGYEAYRAGEQVDVAPV

SEQ ID NO: 36930 - protein, 244 aa, unidentified
  source 1..244: note = Caballeronia choica
  REGION 1..244: note = tr|A0A158FH06|A0A158FH06_9BURK 7-cyano-7-deazaguanine synthase OS=Caballeronia choica; OX = 326476 GN=queC PE=3 SV=1
MTRIDAKDSALVLFSGGQDSATCLAWALERYRTVETLGFDYGQRHRVELECREGFRAAVTREFPQWAERLGEDHMIDLSLLGAISDTAMTREIEIEATASGLPNTFVPGRNLMFMTIAAAIAYRRGLKVLVGGMCETDFSGYPDCRDDTMKALQVALNLGMQTRYVLETPLMWLDKADTWRLAEQLGGEPLVELIRIETHTCYVGERAELHDWGFGCGQCPACKLRKRGFEAYRAGEQVTTEPV

SEQ ID NO: 36931 - protein, 244 aa, unidentified
  source 1..244: note = Caballeronia cordobensis
  REGION 1..244: note = tr|A0A158F1U2|A0A158F1U2_9BURK 7-cyano-7-deazaguanine synthase OS=Caballeronia cordobensis OX=1353886 GN=queC PE=3 SV=1
MTRIDAKDSALVLFSGGQDSATCLAWALERYRTVETLGFDYGQRHRVELECRDGFRAAIAREFPRWAERLGEDHMIDLSVLGAISDTAMTREIEIQATASGLPNTFVPGRNLLFMTIAAALAYRRGLKVLVGGMCETDFSGYPDCRDDTMKALQVALNLGMETRYALETPLMWLDKADTWRLAETLGGEALVELVRVETHTCYVGERAELHDWGFGCGQCPACKLRKRGFEAYRAGEQVDVAPV

SEQ ID NO: 36932 - protein, 244 aa, unidentified
  source 1..244: note = Caballeronia fortuita
  REGION 1..244: note = tr|A0A157Z6M0|A0A157Z6M0_9BURK 7-cyano-7-deazaguanine synthase OS=Caballeronia fortuita; OX = 1777138 GN=queC PE=3 SV=1
MTRIDAKDSALVLFSGGQDSATCLAWALERYKTVETLGFDYGQRHRVELECRDGFRNAIVREFPQWAGRLGEDHMIDLSVLGAISDTAMTREIEIQATANGLPNTFVPGRNLLFMTIAAAVAYRRGLKVLVGGMCETDFSGYPDCRDDTMKALQVALNLGMETRYALETPLMWLDKADTWRLAETLGGDALVELVRIETHTCYVGERAELHDWGFGCGQCPACKLRKRGYEAYRAGEQVDTAPV

SEQ ID NO: 36933 - protein, 244 aa, unidentified
  source 1..244: note = Caballeronia glathei
  REGION 1..244: note = tr|A0A069PSR0|A0A069PSR0_9BURK 7-cyano-7-deazaguanine synthase OS=Caballeronia glathei; OX = 60547 GN=queC PE=3 SV=1
MTRTDAKDSALVLFSGGQDSATCLAWALERYRTVETLGFDYGQRHRVELECRDGFRAAVSRAFPQWAGRLGEDHMIDLSVLGAISDTAMTREIEIEATANGLPNTFVPGRNLMFMTIAAAIAYRRGLKVLVGGMCETDFSGYPDCRDDTMKALQVTLNLGMQTRYSLETPLMWLDKADTWRLAEQLGGDTLVELIRVETHTCYVGERAELHEWGFGCGQCPACKLRKRGFEAYRAGEQVTTEPV

SEQ ID NO: 36934 - protein, 234 aa, unidentified
  source 1..234: note = Caballeronia glebae
  REGION 1..234: note = tr|A0A158CZU7|A0A158CZU7_9BURK 7-cyano-7-deazaguanine synthase OS=Caballeronia glebae; OX = 1777143 GN=queC PE=3 SV=1
MKTRAMVLFSGGQDSTTCLAWALDRYEHVETVGFDYGQRHSVELECRPKVLSRLREQFPDWGKKLGDDHMLDLSILGQISDTALTQGKAIEMEKSGLPNTFVPGRNLLFFMLAAAVAYRRGLQVLVGGMCETDYSGYPDCRDSTLKALQVAIALGMDQPLVIETPLMWIDKAQTWEMASQLGGIGLVDLIRTETHTCYVGDHTTQHDWGYGCGKCPACELRQKGYQSYLATEAP

SEQ ID NO: 36935 - protein, 244 aa, unidentified
  source 1..244: note = Caballeronia glebae
  REGION 1..244: note = tr|A0A157ZQJ1|A0A157ZQJ1_9BURK 7-cyano-7-deazaguanine synthase OS=Caballeronia glebae; OX = 1777143 GN=queC PE=3 SV=1
MTRIDAKDSALVLFSGGQDSATCLAWALERYKTVETLGFDYGQRHRVELECREGFRAAIVREFPQWAERLGEDHTVDLSVLGAISDTAMTREIEIEATANGLPNTFVPGRNLLFMTIAAAVAYRRGLKVLVGGMCETDFSGYPDCRDDTMKALQVALNLGMETRYALETPLMWLDKADTWRLAETLGGEALVELVRVETHTCYVGERAELHDWGFGCGQCPACKLRKRGYEAYRAGEQVDTAPV

SEQ ID NO: 36936 - protein, 244 aa, unidentified
  source 1..244: note = Caballeronia humi
  REGION 1..244: note = tr|A0A158GED5|A0A158GED5_9BURK 7-cyano-7-deazaguanine synthase OS=Caballeronia humi; OX = 326474 GN=queC PE=3 SV=1
MTRIDAKDSALVLFSGGQDSATCLAWALERYTTVETLGFDYGQRHRVELECRGGFRAAVVREFPQWAGRLGEDHMIDLSVLGAISDTAMTREIEIKATASGLPNTFVPGRNLMFMTIAAAVAYRRGLKVLVGGMCETDFSGYPDCRDDTMKALQVALNLGMETRYALETPLMWLDKADTWRLAEQLGGETLVELIRVETHTCYVGERAELHEWGFGCGQCPACKLRKRGFEAYRAGEQVTTEPV

SEQ ID NO: 36937 - protein, 244 aa, unidentified
  source 1..244: note = Caballeronia hypogeia
  REGION 1..244: note = tr|A0A157Z7T4|A0A157Z7T4_9BURK 7-cyano-7-deazaguanine synthase OS=Caballeronia hypogeia; OX = 1777140 GN=queC PE=3 SV=1
MTRIDAKDSALVLFSGGQDSATCLAWALERYRTVETLGFDYGQRHRVELECRDGFRAAVSREFPHWADRLGEDHMIDLSVLGAISDTAMTREIEIQATASGLPNTFVPGRNLLFMTIAAAVAYRRGLKVLVGGMCETDFSGYPDCRDDTMKALQVALNLGMETRYALETPLMWLDKADTWRLAETLGGEALVELIRVETHTCYVGERAELHEWGFGCGQCPACKLRKRGYEAYRAGEQVDTAPV

SEQ ID NO: 36938 - protein, 244 aa, unidentified
  source 1..244: note = Caballeronia jiangsuensis
  REGION 1..244: note = tr|A0A038GLX0|A0A038GLX0_9BURK 7-cyano-7-deazaguanine synthase OS=Caballeronia jiangsuensis OX=1458357 GN=queC PE=3 SV=1
MTRIDAKDSALVLFSGGQDSATCLAWALERYKTVETLGFDYGQRHRVELECRDGFRAAIAREFPQWTERLGEDHMIDLSVLGAISDTAMTREIEIQANASGLPNTFVPGRNLLFVTIAAAVAYRRGLKVIVGGMCETDFSGYPDCRDDTMKALQVALNLGMETRYALETPLMWLDKADTWRLAETLGGESLVELIRVETHTCYVGERAELHDWGFGCGQCPACKLRKRGYEAYRAGEQVTIAPV

SEQ ID NO: 36939 - protein, 260 aa, unidentified
  source 1..260: note = Caballeronia megalochromosomata
  REGION 1..260: note = tr|A0A149RNE9|A0A149RNE9_9BURK 7-cyano-7-deazaguanine synthase OS=Caballeronia megalochromosomata OX=1399969 GN=queC PE=3 SV=1
MRRATPISNTEYGVFTVTRIDAKDSALVLFSGGQDSATCLAWALERYKTVETLGFDYGQRHRVELECRDGFRAAIVREFPQWAERLGEDHMIDLSVLGAISDTAMTREIEIQASASGLPNTFVPGRNLLFMTIAAAVAYRRGLKVLVGGMCETDFSGYPDCRDDTMKALQVALNLGMETRYALETPLMWLDKSDTWRLAETLGGESLVELIRVETHTCYVGERAELNDWGFGCGQCPACKLRKRGYEAYRAGEQVTIAPV

SEQ ID NO: 36940 - protein, 244 aa, unidentified
  source 1..244: note = Caballeronia mineralivorans
  REGION 1..244: note = tr|A0A0J1CQT4|A0A0J1CQT4_9BURK 7-cyano-7-deazaguanine synthase OS=Caballeronia mineralivorans PML1(12) OX=908627 GN=queC PE=3 SV=1
MTRTDAKDSALVLFSGGQDSATCLAWALDRYTSVETLGFDYGQRHRVELECREGFRTSLKQQFPQWAERLGEDHMIDLSVLGAISDTAMTREIEIEASASGLPNTFVPGRNLMFMTIAAAIAYRRGLTVLVGGMCETDFSGYPDCRDDTMKSLQITLNLGMDSRFLLETPLMWLDKADTWRLAEQLGGEALVELVRVETHTCYVGERAELHEWGFGCGQCPACKLRKRGYEAYKSGEQVTTEPV

SEQ ID NO: 36941 - protein, 206 aa, unidentified
  source 1..206: note = Caballeronia pedi
  REGION 1..206: note = tr|A0A157ZUB2|A0A157ZUB2_9BURK 7-cyano-7-deazaguanine synthase OS=Caballeronia pedi; OX = 1777141 GN=queC PE=3 SV=1
MKKVLLLASGGLDSTTVGYQLASSGIAVVPIFFDYGQHCVEMEWNRVNEVLPSDMIRPERFNISDIFKGSHSRLIREADLWTEEVKDDDLYIPYRTMLFFAAAAARAQTVGILDVYTGFINSNHAKEIDCTAAFMNDLDGLTSNIGPVRFHSPFRYSSKADVARAAVELGVPLGRTYSCQAASQFPCGACPNCVERLKALREAKLV

SEQ ID NO: 36942 - protein, 244 aa, unidentified
  source 1..244: note = Caballeronia pedi
  REGION 1..244: note = tr|A0A158A2R4|A0A158A2R4_9BURK 7-cyano-7-deazaguanine synthase OS=Caballeronia pedi; OX = 1777141 GN=queC PE=3 SV=1
MTRIDAKDSALVLFSGGQDSATCLAWALERYKTVETLGFDYGQRHRVELECRDGFRAAVAREFPQWAERLGEDHMIDLSVLGAISDTAMTREIEIQATANGLPNTFVPGRNLLFVTIAAAVAYRRGLKVLVGGMCETDFSGYPDCRDDTMKALQVALNLGMETRYAVETPLMWLDKADTWRLAETLGGEALVELIRIETHTCYVGERAELHDWGFGCGQCPACKLRKRGYEAYRAGEQVTTAPV

SEQ ID NO: 36943 - protein, 244 aa, unidentified
  source 1..244: note = Caballeronia peredens
  REGION 1..244: note = tr|A0A158G0G3|A0A158G0G3_9BURK 7-cyano-7-deazaguanine synthase OS=Caballeronia peredens; OX = 1777132 GN=queC PE=3 SV=1
MTRIDAKDSALVLFSGGQDSATCLAWALERFRTVETLGFDYGQRHRVELECRDGFRAAVVREFPQWAARLGEDHMIDLSVLGAISDTAMTREIEIQATASGLPNTFVPGRNLLFMTIAAALAYRRGLKVLVGGMCETDFSGYPDCRDDTMKALQVALNLGMETRYALETPLMWLDKADTWRLAETLGGETLVELIRVETHTCYVGERAELNEWGFGCGQCPACKLRKRGYEAYRAGEQVTTAPV

SEQ ID NO: 36944 - protein, 244 aa, unidentified
  source 1..244: note = Caballeronia ptereochthonis
  REGION 1..244: note = tr|A0A158CTR3|A0A158CTR3_9BURK 7-cyano-7-deazaguanine synthase OS=Caballeronia ptereochthonis OX=1777144 GN=queC PE=3 SV=1
MTRIDAKDSALVLFSGGQDSATCLAWALERYKTVETLGFDYGQRHRVELECRDGFRAAIASAFPQWAERLGEDHMIDLSILGAISDTAMTREIEIQNTASGLPNTFVPGRNLLFMTIAAAVAYRRGLKVLVGGMCETDFSGYPDCRDDTMKALQVALNLGMETRYALETPLMWLDKADTWRLAETLGGEALVELIRVETHTCYVGERAELHDWGFGCGQCPACKLRKRGYEAYRAGEQVTTAPV

SEQ ID NO: 36945 - protein, 425 aa, unidentified
  source 1..425: note = Caballeronia sordidicola
  REGION 1..425: note = tr|A0A158EPR1|A0A158EPR1_9BURK 7-cyano-7-deazaguanine synthase OS=Caballeronia sordidicola OX=196367 GN=queC PE=4 SV=1
MKITCALSDFDFSGIASDLDVVLYGNSGNPMRGSVGAALKQAIVREKVAPAARAWDLLSLALAVVSSDLAGHRDRSPDGWTREFDLTVSVADAPFWNDNAATLQQLLAYLSTDRWTLRFVEGGIFPQPERQPEHPSEDCIVLLSGGLDSYIGAIDLVEQGRRPLAVSQMVRGDGEKQVAFAAEIGGGLRHFQVNHNADVPDAENPPSQRARSIIFLAYGVLMATTLARYHAGDEVTLYVCENGFIALNPPLTGGRLGSLSTRTTHPIVFSLLQQVLDAAGLRVRIVNPYRFKTKGEMLEECLGQPLLAAHAYQTTSCGRFKQFGYKHCGRCVPCLVRRAAFHAWNGGDTTHYVYDNLALDDDEHAGFDDVRSALIGIAERREVGTNRWLGSTLSSSLVTDKPSLAAVVERGLAEIESLMLALGVR

SEQ ID NO: 36946 - protein, 244 aa, unidentified
  source 1..244: note = Caballeronia sordidicola
  REGION 1..244: note = tr|A0A242MX21|A0A242MX21_9BURK 7-cyano-7-deazaguanine synthase OS=Caballeronia sordidicola OX=196367 GN=queC PE=3 SV=1
MTRTDAKDSALVLFSGGQDSATCLAWALDRFTTVETLGFDYGQRHRVELECREGFRASLKKQFPKWADRLGEDHMIDLSVLGAISDTAMTREIEIEATANGLPNTFVPGRNLMFMTIAAAIAYRRGLKVLVGGMCETDFSGYPDCRDDTMKALQVALNLGMDSRFLLETPLMWLDKADTWRLAEVLGGESLVELVRVETHTCYVGERAELHAWGFGCGQCPACKLRKRGFEAYQSGEQVTTEPV

SEQ ID NO: 36947 - protein, 244 aa, unidentified
  source 1..244: note = Caballeronia telluris
  REGION 1..244: note = tr|A0A158JAI6|A0A158JAI6_9BURK 7-cyano-7-deazaguanine synthase OS=Caballeronia telluris; OX = 326475 GN=queC PE=3 SV=1
MTRTDAKDSALVLFSGGQDSATCLAWALERYKTVETLGFDYGQRHRVELECRDGFRAAVMREFPQWADRLGDDHMIDLSVLGAISETAMTREIEIEATANGLPNTFVPGRNLMFMTIAAAVAYRRGLKVLVGGMCETDFSGYPDCRDDTMKALQVALNLGMETRYALETPLMWLDKADTWRLAETLGGEKLVELVRVETHTCYVGERAELHEWGFGCGQCPACKLRKRGFEAYRAGEQVTTEPV

SEQ ID NO: 36948 - protein, 244 aa, unidentified
  source 1..244: note = Caballeronia temeraria
  REGION 1..244: note = tr|A0A157ZI40|A0A157ZI40_9BURK 7-cyano-7-deazaguanine synthase OS=Caballeronia temeraria; OX = 1777137 GN=queC PE=3 SV=1
MTRIDAKDSALVLFSGGQDSATCLAWALERYKTVETLGFDYGQRHRVELECRDGFRAAIVREFPQWAERLGEDHMIDLSVLGAISDTAMTREIEIQATANGLPNTFVPGRNLLFMTIAAAVAYRRGLKVLVGGMCETDFSGYPDCRDDTMKALQVALNLGMETRYALETPLMWLDKADTWRLAETLGGEALVELVRIETHTCYVGERAELHDWGFGCGQCPACKLRKRGYEAYRAGEQVDTAPV

SEQ ID NO: 36949 - protein, 244 aa, unidentified
  source 1..244: note = Caballeronia terrestris
  REGION 1..244: note = tr|A0A158JEL9|A0A158JEL9_9BURK 7-cyano-7-deazaguanine synthase OS=Caballeronia terrestris; OX = 1226301 GN=queC PE=3 SV=1
MTRIDAKDSALVLFSGGQDSATCLAWALERYTTVETLGFDYGQRHRVELECRGGFRAAVAQAFPHWAGRLGEDHMIDLSVLGAISDTAMTREIEIKATASGLPNTFVPGRNLMFMTIAAAVAYRRGLKVLVGGMCETDFSGYPDCRDDTMKALQVALNLGMETRYALETPLMWLDKADTWRLAEHLGGETLVELIRVETHTCYVGERAELHEWGFGCGQCPACKLRKRGFEAYRAGEQVTTEPV

SEQ ID NO: 36950 - protein, 244 aa, unidentified
  source 1..244: note = Caballeronia turbans
  REGION 1..244: note = tr|A0A158FHI6|A0A158FHI6_9BURK 7-cyano-7-deazaguanine synthase OS=Caballeronia turbans; OX = 1777134 GN=queC PE=3 SV=1
MTRIDAKDSALVLFSGGQDSATCLAWALDRYKTVETLGFDYGQRHRVELECRDGFRAAIAREFPQWTERLGEDHMIDLSVLGAISDTAMTREIEIQANASGLPNTFVPGRNLLFMTIAAAVAYRRGLKVLVGGMCETDFSGYPDCRDDTMKALQVALNLGMETRYALETPLMWLDKADTWRLAKTLGGEPLVELIRVETHTCYVGERAELHDWGFGCGQCPACKLRKRGYEAYRAGEQVTTAPV

SEQ ID NO: 36951 - protein, 425 aa, unidentified
  source 1..425: note = Caballeronia udeis
  REGION 1..425: note = tr|A0A158IYD1|A0A158IYD1_9BURK 7-cyano-7-deazaguanine synthase OS=Caballeronia udeis; OX = 1232866 GN=queC PE=4 SV=1
MRVMCLPAELIPEQLVDDTDYFSLYANTGRQNVGRISSGWVSSLARSGFAPPSAVWDFVTISLAVAAADIACSRQGSADGWTRMIELEVALHEPERWIAQKPSLERTFRFLTGDFWTLNFRDGGVAPPSTTAPRQTDADCVALLSGGLDSLVGGIELAATGRTPLFVSQMAKGDSDTQRLFARHLGGGERHFQWNHRITVPHVTERSTRGRSIVFLAFAILASTTLPGWQTGGTTALVIPENGFISLNIALNAGRFGSYSTKTTHPTFLEGIQRVVDEVGLRVRLVRPYQLVTKGELLVNCSNGLLLHELAGHSTSCGRFGYYNYTHCGRCVPCLVRRASFLRAGITDPTSRYIFPDLATAGRERGPNDVGSVATAYVNYSEKGVDRLIGGALSFAPPGERDSYSAVFARGMDELGELLRVHNVL

SEQ ID NO: 36952 - protein, 244 aa, unidentified
  source 1..244: note = Caballeronia udeis
  REGION 1..244: note = tr|A0A3M0V654|A0A3M0V654_9BURK 7-cyano-7-deazaguanine synthase OS=Caballeronia udeis; OX = 1232866 GN=queC PE=3 SV=1
MTRTDAKDSALVLFSGGQDSATCLAWALDRYTSVETLGFDYGQRHRVELECREGFRTSLKQQFPHWAERLGEDHMIDLSVLGAISDTAMTREIEIEASANGLPNTFVPGRNLMFMTIAAAIAYRRGLKVLVGGMCETDFSGYPDCRDDTMKSLQITLNLGMDSRFLLETPLMWLDKADTWRLAEQLGGEALVELVRVETHTCYVGERAELHDWGFGCGQCPACKLRKRGYEAYQSGEQVTTEPV

SEQ ID NO: 36953 - protein, 228 aa, Caldalkalibacillus thermarum
  REGION 1..228: note = tr|F5L556|F5L556_CALTT 7-cyano-7-deazaguanine synthase OS=Caldalkalibacillus thermarum (strain TA2.A1); OX = 986075 GN=queC PE=3 SV=1
MSKKAVIVLSGGLDSTTCMGIAHDQGYALYPLTFHYGQRHSREVEQAKKIAQYYQAADHRIINIRFLRDIGGSALTDDAIDVPDQGEDGSIPVTYVPARNLIFLSLAAAYAEVVGAEKIMIGVSAVDYSGYPDCRPEFIESLSRTIQLGTKAGVEGKAISIDAPLVHLSKAETIAWGMKLGVPYHLTTSCYKGGEVACGQCDSCRLRIKGFKEAGYRDPLPYAISIDW

SEQ ID NO: 36954 - protein, 246 aa, Caldanaerobius fijiensis
  REGION 1..246: note = tr|A0A1M4ZNZ0|A0A1M4ZNZ0_9THEO 7-cyano-7-deazaguanine synthase OS=Caldanaerobius fijiensis DSM 17918 OX=1121256 GN=queC PE=3 SV=1
MSDFSFNCINTYGILGFEVFRVKKAVVLLSGGLDSTTCMSVAYRDGYELYPLSFDYGQRHSRELQSAIKVAEYYGVKSHKIIRMDNVGGSALTDYSIDVPDYKGDSTEIPVTYVPARNIIFLSYAVGYAEVVGAEAIYIGVSSVDYSGYPDCRPEFIEAFQRVIDVGTKAGVEGRPIKIITPLINLSKAETIKLAYQNGAPLHLTTTCYKGGEKACGVCDSCRLRLKGFKEAGLKDPLEYEIEIDE

SEQ ID NO: 36955 - protein, 216 aa, unidentified
  source 1..216: note = Calderihabitans maritimus
  REGION 1..216: note = tr|A0A1Z5HXU5|A0A1Z5HXU5_9THEO 7-cyano-7-deazaguanine synthase OS=Calderihabitans maritimus OX=1246530 GN=queC PE=3 SV=1
MSAVVLLSGGLDSAVSMAMALEEMKVKKALTFDYGQRAALREIESARALCRHYGVSHQVIELKWLAALGGSALVDRSRPVPEVAPEDLEERADETAVQVWVPNRNGLFINIGACFAEALDCSLVVAGFNREEAQSFPDNSAAFVEAANRCLRFSTLNGVTVKSYTQDMSKREIVQMGRKLNLPFEYIWSCYYGGEKMCGRCESCQRLMRALGEKDR

SEQ ID NO: 36956 - protein, 221 aa, Caldicellulosiruptor bescii
  REGION 1..221: note = sp|B9MMB0|QUEC_CALBD 7-cyano-7-deazaguanine synthase; OS = Caldicellulosiruptor bescii (strain ATCC BAA-1888 / DSM 6725 / Z-1320) OX=521460 GN=queC PE=3 SV=1
MRAVVVLSGGMDSTTLLYDVKSQGYEVFAISFLYGQKHSKELEFAKKTCSLLSIPYKIVDISFFAELAPSALTTPDWNVPEGYYTDSTMKQTVVPNRNMVLLSISAAYAISLGAKKLFYGAHAGDHPIYPDCRKEFVEAMKNALYLADYIGLELEAPYVDMKKEDILRRGLELGVNYSLTWSCYKGGQKACGRCGTCTERIEAFKKVGVKDPIEYEIEIDW

SEQ ID NO: 36957 - protein, 228 aa, unidentified
  source 1..228: note = Caldicellulosiruptor changbaiensis
  REGION 1..228: note = tr|A0A3T0D201|A0A3T0D201_9FIRM 7-cyano-7-deazaguanine synthase OS=Caldicellulosiruptor changbaiensis OX=1222016 GN=queC PE=3 SV=1
MRAVVVLSGGMDSTTLLYDVKNQGYETYAISFLYGQKHSKELEFAKKTCELLKVPHKIVDISFFADLAPSALTKSGWSVPEGYYTDESMKQTVVPNRNMVFLSLATSYAISLKAQKLFYGAHAGDHPIYPDCRKEFVEAMKRSILLCDYQIVELEAPYVDLKKEDILKIGLKLGVDYSLTWSCYKGGEKACGRCGTCTERIEAFKKIGVKDPIEYEIEIDWDQKTREN

SEQ ID NO: 36958 - protein, 234 aa, Caldicellulosiruptor hydrothermalis
  REGION 1..234: note = tr|E4Q985|E4Q985_CALH1 7-cyano-7-deazaguanine synthase OS=Caldicellulosiruptor hydrothermalis (strain DSM 18901 / VKM B-2411 / 108) OX=632292 GN=queC PE=3 SV=1
MMLLLQRSEKLEKMRAVVVLSGGMDSTTLLYDVKSQGYEVFAISFLYGQKHSKELEFAKKTCSLLSIPHKIVDISFFAELAPSALTTPDWDVPEGYYTDSTMKQTVVPNRNMVLLSISAAYAISLGAKKLFYGAHAGDHPIYPDCRKEFVEVMKNALYLADYIGLELEAPYVDMKKEDILRRGLELGVNYSLTWSCYKGGQKACGRCGTCTERIEAFKKVGVKDPIEYEIEIDW

SEQ ID NO: 36959 - protein, 217 aa, Caldicellulosiruptor kristjanssonii
  REGION 1..217: note = tr|E4S6H9|E4S6H9_CALKI 7-cyano-7-deazaguanine synthase OS=Caldicellulosiruptor kristjanssonii (strain ATCC 700853 / DSM 12137 / I77R1B) OX=632335 GN=queC PE=3; SV = 1
MVLSGGVDSTTLLYDVKSQGYEVFAISFLYGQKHSKELEFAKKTCKLLSVPHKIVDISFFAELAPSALTTPDWNVPEGYYTDSTMKQTVVPNRNMVLLSISAAYAISLGAKKLFYGAHAGDHPIYPDCRKEFVEAMKNALYLADYIGLELEAPYVDMKKEDILRRGLELGVDYSLTWSCYKGGQKACGRCGTCTERIEAFKKVGMKDPIEYEIEIDC

SEQ ID NO: 36960 - protein, 221 aa, Caldicellulosiruptor kronotskyensis
  REGION 1..221: note = tr|E4SHH7|E4SHH7_CALK2 7-cyano-7-deazaguanine synthase OS=Caldicellulosiruptor kronotskyensis (strain DSM 18902 / VKM B-2412 / 2002) OX=632348 GN=queC PE=3 SV=1
MKAVVVLSGGMDSTTLLYDVKSQGYEVFAISFLYGQKHSKELEFAKKTCSLLSIPHKIVDISFFAELAPSALTALDWNVPEGYYTDSTMKQTVVPNRNMVLLSISAAYAISLGAKKLFYGAHAGDHPIYPDCRKEFVEAMKNALYLADYIGLELDAPYVDMKKEDILKRGLELGVDYSLTWSCYKGGQKACGRCGTCTERIEAFKKVGVKDPIEYEIEIDW

SEQ ID NO: 36961 - protein, 217 aa, Caldicellulosiruptor lactoaceticus
  REGION 1..217: note = tr|G2PWR7|G2PWR7_9FIRM 7-cyano-7-deazaguanine synthase OS=Caldicellulosiruptor lactoaceticus 6A; OX = 632516 GN=queC PE=3 SV=1
MVLSGGVDSTTLLYDVKSQGYEVFAISFLYGQKHSKELEFAKKTCKLLSVPHKIVDISFFAELAPSALTTPDWNVPEGYYTDSTMKQTVVPNRNMVLLSISAAYAISLGAKKLFYGAHAGDHPIYPDCRKEFVEAMKNALYLADYIGLELEAPYVDMKKEDILRRGLELGVDYSLTWSCYKGGQKACGRCGTCTERIEAFKKVGVKDPIEYEIDIEC

SEQ ID NO: 36962 - protein, 217 aa, unidentified
  source 1..217: note = Caldicellulosiruptor obsidiansis
  REGION 1..217: note = tr|D9THH6|D9THH6_CALOO 7-cyano-7-deazaguanine synthase OS=Caldicellulosiruptor obsidiansis (strain ATCC BAA-2073 / strain OB47) OX=608506 GN=queC PE=3 SV=1
MVLSGGMDSTTLLYDVKNQGYEVFAISFLYGQKHSKELEFAKKTCSLLLVPHKIVDISFFAELAPSALTMPDWNVPEGYYTDSTMKQTVVPNRNMVLLSISAAYAISLGAKKLFYGAHAGDHPIYPDCRKEFVEAMKKALYLADYIGLELEAPYVDMKKEDILKRGLELGVDYSLTWSCYKGGQKACGRCGTCTERIEAFKKAGVKDPIEYEIEIDW

SEQ ID NO: 36963 - protein, 217 aa, Caldicellulosiruptor owensensis
  REGION 1..217: note = tr|E4Q2A9|E4Q2A9_CALOW 7-cyano-7-deazaguanine synthase OS=Caldicellulosiruptor owensensis (strain ATCC 700167 / DSM 13100 / OL) OX=632518 GN=queC PE=3 SV=1
MILSGGMDSTTLLYDVKNQGYEVFAISFLYGQKHSKELEFAKKTCSLLSIPHRIVDISFFAELAPSALTMPDWDVPEGYYTDSTMKQTVVPNRNMVLLSISAAYAISLGAKKLFYGAHAGDHPIYPDCRKEFVEAMKKALYLADYIGLELEAPYVDMKKEDILRRGLELGVDYSLTWSCYKGGQKACGRCGTCTERIEAFKKVGVKDPVEYEIEIDW

SEQ ID NO: 36964 - protein, 225 aa, Caldicellulosiruptor saccharolyticus
  REGION 1..225: note = sp|A4XFR8|QUEC_CALS8 7-cyano-7-deazaguanine synthase; OS = Caldicellulosiruptor saccharolyticus (strain ATCC 43494 / DSM 8903 / Tp8T 6331) OX=351627 GN=queC PE=3 SV=1
MRAVVVLSGGMDSTTLLYDVKNQGYETYTISFLYGQKHSKELEFAKKTCELLKVPHKIVDISFFADLAPSALTKSSWSVPEGYYTDESMKQTVVPNRNMVFLSLATSYAISLKAQKLFYGAHAGDHPIYPDCRKEFVEAMKRSILLCDYQIVELEAPYVDLKKEDILKIGLKLGVDYSLTWSCYKGGEKACGRCGTCTERIEAFRKIGVKDPIEYEIEIDWDQKT

SEQ ID NO: 36965 - protein, 222 aa, unidentified
  source 1..222: note = Caldimicrobium thiodismutans
  REGION 1..222: note = tr|A0A2N7PL59|A0A2N7PL59_9BACT 7-cyano-7-deazaguanine synthase OS=Caldimicrobium thiodismutans OX=1653476 GN=queC PE=3 SV=1
MKKELAVVLLSSGMDSAVCASVAKEQYRLAFLHVQYGQKSAAKELKHFQKLCEFFRPEKILIAEAPFLKKIGGSSLTVEDLPIPEDEEGGIPSTYVPFRNGIFLSIAASWAEVISAKKIFIGVNQVDFSGYPDCRASFIEAFNQAIKEGTKPETQIEIEAPLLNLSKKEIVLLGVKLGTPFELTWSCYKDTEVACGRCASCKLRLKAFREAGVEDPIPYQRK

SEQ ID NO: 36966 - protein, 221 aa, unidentified
  source 1..221: note = Caldimicrobium thiodismutans
  REGION 1..221: note = tr|A0A0U5BX26|A0A0U5BX26_9BACT 7-cyano-7-deazaguanine synthase OS=Caldimicrobium thiodismutans OX=1653476 GN=queC PE=3 SV=1
MQKELAVVLLSAGMDSAVCASVASLNFRLALLHVQYGQRTALKELECFYKLCAYFQPEKNFVASAMFLKEIGASSLTDESKPIPEKEELSIPSTYVPFRNGIFLSIATAWAEAIGATRIFIGVNQIDFSGYPDCRESFLKAFNQAIQEGTKPETHIIIEAPLLHLSKKEIIQLGIQLKTPFELTWSCYQNTEVACGRCSSCKLRLKAFEEANLKDPIPYQL

SEQ ID NO: 36967 - protein, 221 aa, Calditerrivibrio nitroreducens
  REGION 1..221: note = tr|A0A2J6WK12|A0A2J6WK12_9BACT 7-cyano-7-deazaguanine synthase OS=Calditerrivibrio nitroreducens OX=477976 GN=queC PE=3 SV=1
MKRGIVLVSGGLDSCVTAAIAKNMGYSLYFLHINYGQKTEKKELESFYKLADFFKVVGKLIVDISYLKVIGGSSLTVDSMEIERGDLFRKDIPNTYVPFRNGNILSIAVSWAEVIRADRIFIGVVEEDSSGYPDCRKQFYDAFNQILKVGLAYTDLLIETPLIDKTKGEIVRIGAKLGAPFELTWSCYGENELACGVCDSCLLRLKGFKEAGMVDPIPYRK

SEQ ID NO: 36968 - protein, 221 aa, Calditerrivibrio nitroreducens
  REGION 1..221: note = tr|E4TIZ3|E4TIZ3_CALNY 7-cyano-7-deazaguanine synthase OS=Calditerrivibrio nitroreducens (strain DSM 19672 / NBRC 101217 / Yu37-1) OX=768670 GN=queC PE=3 SV=1
MKKGIVLVSGGLDSCVTAAIAKNMGYSLYFLHINYGQKTEKKELESFNKLADFFKVVGKLIVDISYLKVIGGSSLTVDSIEIERGDPFRKDIPNTYVPFRNGNILSIAVSWAEVIRADRIFIGVVEEDSSGYPDCRKQFYDAFNQILKVGLAYTDLLIETPLIDKTKGEIVRIGAKLGAPFELTWSCYGENEVACGVCDSCLLRLKGFKEAGMVDPIPYKK

SEQ ID NO: 36969 - protein, 227 aa, Caldithrix abyssi
  REGION 1..227: note = tr|H1XNE8|H1XNE8_9BACT 7-cyano-7-deazaguanine synthase OS=Caldithrix abyssi DSM 13497 OX=880073 GN=queC; PE = 3 SV=1
MKDKAVVLVSGGLDSCVTAAIAAEKYEPAFLHLNYGQRTEKRELKAFNDIADYYSVTQRLVVDVSYLKQIGGSSLTDERIEVSKADLQYQGVPTSYVPFRNANILAIATSWAEVIGATRIFIGAVEEDSSGYPDCREEFYAAFNKVIELGTRPETHIVIETPIIHLKKWQIVKKGLELSAPLDKTWSCYQSEDEACGVCDSCALRLRGFQMAGVDDPIPYRTRPNYL

SEQ ID NO: 36970 - protein, 228 aa, Caldithrix sp.
  REGION 1..228: note = tr|A0A523HNQ9|A0A523HNQ9_9BACT 7-cyano-7-deazaguanine synthase OS=Caldithrix sp.; OX = 1962856 GN=queC PE=3 SV=1
MKRELVVVLASGGMDSAVTTAIANQTSRLALLHLNYGQRTAERELQAFKELAEFYQVEKTLVINVDHLSQIGGSSLTDTDIAIAQADLESTEIPTSYVPFRNANLLAIATSWAEVISATKIFLGAVEEDSSGYPDCRREFYDAFEKVIDAGTKPSTQIEIVTPIITLKKYEIVLKGRELGVPFELTWSCYQHEDTACGVCDSCGFRLRGFEKAGLQDPIEYAERPVYQ

SEQ ID NO: 36971 - protein, 228 aa, Caldithrix sp.
  REGION 1..228: note = tr|A0A523IR86|A0A523IR86_9BACT 7-cyano-7-deazaguanine synthase OS=Caldithrix sp.; OX = 1962856 GN=queC PE=3 SV=1
MKRELVVVLASGGMDSAVTTAIANQTSRLAFLHLNYGQRTAERELQAFKELAEFYQVEKKLVINVDHLSQIGGSSLTDTDIAIAQADLESTEIPTSYVPFRNANLLAIATSWAEVISATKIFLGAVEEDSSGYPDCRREFYDAFQKVIDAGTKPSTQIEIVTPIITLKKYEIVLKGRELGVPFELTWSCYQHEDTACGVCDSCGFRLRGFEKAGLQDPIEYAERPVYQ

SEQ ID NO: 36972 - protein, 227 aa, unidentified
  source 1..227: note = Calditrichaeota bacterium
  REGION 1..227: note = tr|A0A3N9MVH7|A0A3N9MVH7_9BACT 7-cyano-7-deazaguanine synthase OS=Calditrichaeota bacterium OX=2212469 GN=queC PE=3 SV=1
MAKEKAVVLVSGGMDSCVTAAVAIEDYHAFFLHLNYGQRTEKRELKAFIDIADFYRISERLVVDVSYFKQIGGSSLTDTSIAVTKADPENRNIPASYVPFRNGNILSIASSWAEQVKATKIFIGAVEEDSSGYPDCRESFFKAFQQAVNLGTKPETQIEIITPVIHMKKKEIVLKGIELKAPLHLTWSCYQNEDKACGVCDSCVLRLRGFKSAGLKDPLEYAENIDF

SEQ ID NO: 36973 - protein, 231 aa, unidentified
  source 1..231: note = Calditrichaeota bacterium
  REGION 1..231: note = tr|A0A3M2FLZ5|A0A3M2FLZ5_9BACT 7-cyano-7-deazaguanine synthase OS=Calditrichaeota bacterium OX=2212469 GN=queC PE=3 SV=1
MKTKAVVLVSGGMDSCVTAAIAAEKHTLAFLHLNYGQRTEKREAQAFHAIADHYQVKERLEVDARFFNTIGGSSLTDPNIPVKQADLEFEGIPDSYVPFRNANILAIATSYAEVIGAAHIYIGAVEEDSSGYPDCREAFYEAYNKVIDIGTRPETRIRIETPLIHMKKAEIIQKGMALEAPLHLSWSCYQDSEIACGVCDSCALRLRGFAAAGLEDPIPYRIRPDYDSSGG

SEQ ID NO: 36974 - protein, 226 aa, unidentified
  source 1..226: note = Calditrichales bacterium
  REGION 1..226: note = tr|A0A524L5P2|A0A524L5P2_9BACT 7-cyano-7-deazaguanine synthase OS=Calditrichales bacterium OX=2528038 GN=queC PE=3 SV=1
MKRELAVVAVSGGMDSCVTSAIANDSFNLAFLHLNYGQKTEKREFRAFEEIAAFYNVTKRLVVDMHHFADIGGSSLTDPSIPVSPGDLKATQVPSSYVPFRNANILAIATSWAEVIGAQKIFIGAVQEDSSGYPDCRDSFFKAFNRVIAEGTHPDTHIVIETPLIHLSKKQIIEKGIALGAPLQLSWSCYRNEERACGTCDSCLLRLRGFKQAGIDDPIPYLTRQD

SEQ ID NO: 36975 - protein, 230 aa, Caloramator australicus
  REGION 1..230: note = tr|I7LHK9|I7LHK9_9CLOT 7-cyano-7-deazaguanine synthase OS=Caloramator australicus RC3 OX=857293 GN=queC; PE = 3 SV=1
MTKALVLASGGLDSTVLLSKVVKEYGCENVTALNIFYGQKHKKEAEFAKYQAEKYGVNYITADLSSVFKFSKDCPLLEGSDNEIPEKSYAEQLKDMGGQGTVSTYVPFRNGLFLSYAAAIAIQFGASKIFYGAHSDDAAGSAYPDCSGSFIENMARAIYEGTGGEVSLEAPFWNLTKKDIVKIGLDLGVDFAHTWSCYKGKEEPCRRCATCIDRERAFELNGIEDPLIRR

SEQ ID NO: 36976 - protein, 229 aa, Caloramator fervidus
  REGION 1..229: note = tr|A0A1H5WTM6|A0A1H5WTM6_9CLOT 7-cyano-7-deazaguanine synthase OS=Caloramator fervidus; OX = 29344 GN=queC PE=3 SV=1
MKALVLTSGGLDSTVLLAKIVKEYGSQNVTALNIYYGQKHSKEAEFAKYQAEKYGVNYITADLSEVFKFSKDCPLLKGSDKEIPKKSYAEQLKEMGGHGVVSTYVPFRNGLFLSYAAAVALQIGAQKIFYGAHADDAAGSAYPDCSEKFIESMAKAIFEGTGNKVNLEAPFWNLTKKDIVKIGLDLDVDFSHTWSCYEGKEAPCRKCATCIDRERAFELNNTIDPLVRR

SEQ ID NO: 36977 - protein, 230 aa, Caloramator mitchellensis
  REGION 1..230: note = tr|A0A0R3JRZ4|A0A0R3JRZ4_9CLOT 7-cyano-7-deazaguanine synthase OS=Caloramator mitchellensis OX=908809 GN=queC PE=3 SV=1
MEKALVLASGGLDSTVLLAKVVKEFGNENVTALNIFYGQKHKKEAEFARYQAEKYGVNYLTADLSSVFKFSNDCPLLEGSENEIPEKSYAEQLKEMGGQGVVSTYVPFRNGLFLSYAAAIAIQVGASKIFYGAHSDDAAGNAYPDCSGSFIDSMAKAIYEGTGGQVRLEAPFWNLTKKDIVKTGLDLGVDFAHTWSCYKGKDEPCRTCATCIDREKAFELNGEVDPLIRR

SEQ ID NO: 36978 - protein, 225 aa, Caloramator proteoclasticus
  REGION 1..225: note = tr|A0A1M4TRA0|A0A1M4TRA0_9CLOT 7-cyano-7-deazaguanine synthase OS=Caloramator proteoclasticus DSM 10124 OX=1121262 GN=queC PE=3 SV=1
MKKAVVLLSGGLDSTTALYLAKSQGFETYAISFDYGQRHDKELECAKRVAEAAGVKEHIIVKTNMDAWGGSALTDKNIDVPEGDINRSDIPITYVPARNMIFLAFAASYAEKIGAQDIFIGVSEVDYSGYVDCRQEFLDAMEQAINKGTVCGVEGRRIKINAPFINMTKAEEIKLGMELGVDYSLTWSCYKGEEKACGVCDSCLLRLKAFKEAGFEDPIEYKEER

SEQ ID NO: 36979 - protein, 230 aa, unidentified
  source 1..230: note = Caloramator quimbayensis
  REGION 1..230: note = tr|A0A1T4YEI6|A0A1T4YEI6_9CLOT 7-cyano-7-deazaguanine synthase OS=Caloramator quimbayensis OX=1147123 GN=SAMN05443428_1429 PE=3 SV=1
MEKALVLVSGGLDSTVLLAKIVKELKEENVTALNIFYGQKHAKEAEFAKFQAEKYNVKYITADLSEVFKFSKDCPLLEGSRNEIPEKSYAEQLKDMGGCGTVSTYVPFRNGLFLSYAAAVGIQVGAFKIYYGAHSDDAAGNAYPDCSYNFIQSMAAAIYEGTGGKIKLEAPFWNFTKKDIVRVGLDLGVDFSHTWSCYKGEDEPCRSCATCIDREKAFELNDAIDPLLRR

SEQ ID NO: 36980 - protein, 266 aa, Caloramator sp.
  REGION 1..266: note = tr|A0A5B7TMD9|A0A5B7TMD9_9CLOT ATP-dependent sacrificial sulfur transferase LarE OS=Caloramator sp. E03; OX = 2576307 GN=larE PE=4 SV=1
MSWENKYLSLTQYLNKLEKIAIAFSGGMDSSLLLKAATDSNLKKVVAITINTPYIPSWEIDEAKQLANELKIRHRVLNLAFIDEIKFNPENRCYLCKKSLFKSMIDEAKKESIEYILDGTNTDDLKDYRPGIMALKELNIKSPLLELGFTKKDIREILKNLNLSTWDKKPNACLLSRIPYGEEINLDKIKRIEESEKYILNLGFDAVRVRSHGDMARIEVPKNQRKKFFDEKLLDEVANYLKNLGFKYVSIDIEGYRTGSLNEAIK

SEQ ID NO: 36981 - protein, 230 aa, Caloramator sp.
  REGION 1..230: note = tr|A0A5B7TGZ8|A0A5B7TGZ8_9CLOT 7-cyano-7-deazaguanine synthase OS=Caloramator sp. E03; OX = 2576307 GN=queC PE=3 SV=1
MDKALVLVSGGLDSTVLLAKVVKELKGENVTALNIFYGQKHAKEAKFAKLQAEKYNVNYITADLSSVFKFSKDCPLLEGSKNEIPEKSYAEQLKDMGGYGTVSTYVPFRNGLFLSYAAAVGIQLGASRIYYGAHSDDAAGNAYPDCSYNFIQSMASAIYEGTGGKIKLEAPFWSFTKKDIVREGLDLGVDFSHTWSCYKGQDEPCRSCATCIDREKAFELNDTIDPLLRR

SEQ ID NO: 36982 - protein, 220 aa, Caloranaerobacter azorensis
  REGION 1..220: note = tr|A0A096BJV7|A0A096BJV7_9CLOT 7-cyano-7-deazaguanine synthase OS=Caloranaerobacter azorensis H53214 OX=1156417 GN=queC PE=3 SV=1
MKKAVILLSGGLDSTTCMGIAQNEGYELYPISFDYKQRHRKELEAAKKIAEYYNVKEHKIISLDNVGGSALTDENIDVPEYKGDGEIPVTYVPARNILFLSYALGYAEVIGAEAIFIGVSSVDYSGYPDCRPEFIEAFQKVVDVGTAAGVKGKSIKIIAPLINLSKAETIKLGTKYGVPYHLTTSCYNGKEKACGVCDSCVLRLKGFAEAGIEDPIEYEK

SEQ ID NO: 36983 - protein, 220 aa, Caloranaerobacter azorensis
  REGION 1..220: note = tr|A0A1M5RTY3|A0A1M5RTY3_9CLOT 7-cyano-7-deazaguanine synthase OS=Caloranaerobacter azorensis DSM 13643 OX=1121264 GN=queC PE=3 SV=1
MKKAVILLSGGLDSTTCMGIAQNEGYELYPISFDYKQRHRKELEAAKKIAEYYNVKEHRIISLDNVGGSALTDKNIDVPEYKGDGEIPVTYVPARNILFLSYALGYAEVIGAEAIFIGVSSVDYSGYPDCRPEFIEAFQKVVDVGTAAGVKGKSIKIIAPLINLSKAETIKLGTKYGVPYHLTTSCYNGKEKACGVCDSCVLRLKGFAEAGIEDPIEYEK

SEQ ID NO: 36984 - protein, 219 aa, Caloranaerobacter sp.
  REGION 1..219: note = tr|A0A0N8NMH4|A0A0N8NMH4_9CLOT 7-cyano-7-deazaguanine synthase OS=Caloranaerobacter sp. TR13 OX=1302151 GN=queC PE=3 SV=1
MKKAVILLSGGLDSTTCMGIAQKEGYELYPISFDYRQRHRRELEAAKKIAEYYNVKEHKIISLDNVGGSALTDKNIDVPEYKGDGEIPVTYVPARNILFLSYALGYAEVIGAEAIFIGVSSVDYSGYPDCRPEFIKAFQNVVDVGTAAGVKGKSIKIVAPLINLSKAETIKIGTKYGVPYHLTTSCYNGKEKACGVCDSCVLRLKGFEEAGIEDPIEYM

SEQ ID NO: 36985 - protein, 224 aa, unidentified
  source 1..224: note = Calothrix brevissima
  REGION 1..224: note = tr|A0A1Z4JVA7|A0A1Z4JVA7_9CYAN 7-cyano-7-deazaguanine synthase OS=Calothrix brevissima NIES-22 OX=1973478 GN=queC PE=3 SV=1
MKAVILLSGGLDSSTILYQAKADGYECHALSFDYRQRHQRELQSALLVAQKAGVATHQIVNFDLRQWGGSALTDDDIDLPQERSLTEMSQNIPVTYVPARNTIFLSFALAYAETITAERVYIGVNALDYSGYPDCRPDYIQAMQEVFRLGTKQGREGEPITIVAPLINLKKTEIIQLGNQLGVPWELTWSCYAGADVACGVCDSCRLRLAAFGELGLSDPVAYA

SEQ ID NO: 36986 - protein, 214 aa, unidentified
  source 1..214: note = Calothrix desertica
  REGION 1..214: note = tr|A0A433VIJ1|A0A433VIJ1_9CYAN 7-cyano-7-deazaguanine synthase OS=Calothrix desertica PCC 7102 OX=232991 GN=queC PE=3 SV=1
MKNSLILYSGGMDSTVLLYHKREEIALAVSFNYGSKHNDREFYYAALNTKKLGIEHVKLDLSDIIGKHFSSHLLKTGSEIPDGHYQEPIMKQTVVPFRNGIMLSIAVGLAESKGLKQIYLANHFGDHAIYPDCTSAFIEPFKEAAKAGTYEKIEIVSPYVSITKRDIALIGKDLDVPFKYTWSCYKGKEHHCGKCGTCVERKEALEGFDETVYT

SEQ ID NO: 36987 - protein, 59 aa, unidentified
  source 1..59: note = Calothrix desertica
  REGION 1..59: note = tr|A0A433UUP5|A0A433UUP5_9CYAN Uncharacterized protein OS=Calothrix desertica PCC 7102 OX=232991; GN = DSM106972_083190 PE=4 SV=1
MKDSLILYSGGMDSTVLLYDKREEIALAVSFNYGSKHNERELYFASLNTQKLGIEQFNA

SEQ ID NO: 36988 - protein, 231 aa, unidentified
  source 1..231: note = Calothrix elsteri
  REGION 1..231: note = tr|A0A2A2TAE5|A0A2A2TAE5_9CYAN 7-cyano-7-deazaguanine synthase OS=Calothrix elsteri CCALA 953 OX=987040 GN=queC PE=3 SV=1
MKAVILLSGGLDSSTVLYQALADGYDCYVMSFDYQQRHKRELESAFAVAKKAGVTQHQLVNFDLRQWGGSALTDNKLDLPVQRSLTEMSQDIPITYVPARNTIFLSFALAYAETIAAERVYIGINALDYSGYPDCRPDYINAMQSVFRLGTKQGREGQPISIIAPLIHLKKTEIIQLGNKLGVPWELTWSCYAGNEAACGICDSCRLRLAAFAELGFKDPINYTVNGLKFD

SEQ ID NO: 36989 - protein, 227 aa, Calothrix parasitica
  REGION 1..227: note = tr|A0A1Z4LML3|A0A1Z4LML3_9CYAN 7-cyano-7-deazaguanine synthase OS=Calothrix parasitica NIES-267 OX=1973488 GN=queC PE=3 SV=1
MKAVILLSGGLDSSTTLYQALADGYECYPISFDYQQRHRKELNSAHLIAEKAGVSQHQVIKFDLTQWGGSALTDNNIDLPQERSLKEMSQDIPITYVPARNTIFLSFACAYAETMAAERVYIGVNALDYSGYPDCRPDYIQGMQEVFRLGTKQGREGNPIKIATPLIDLKKTEIIQLGNKLGVPWELTWSCYSNGDLPCGVCDSCRLRLAAFDELGLTDPVGYEVRG

SEQ ID NO: 36990 - protein, 227 aa, Calothrix sp.
  REGION 1..227: note = tr|A0A0T7C056|A0A0T7C056_9CYAN 7-cyano-7-deazaguanine synthase OS=Calothrix sp. 336/3; OX = 1337936 GN=queC PE=3 SV=1
MKAVILLSGGLDSTCVLYQAMADGCDCYAISFDYQQRHRRELHSALTIAKEAGITQHQVISFDLRLWGGSALTDSAIDLPSERSLAEMSENIPVTYVPARNTIFLSFALAYGEAIAAERVYIGVNALDYSGYPDCRPDYIQGMQEVFRLGTKQGREGNPISIVTPLINLKKTEIIQLGNQLGVPWELTWSCYAGGESACGVCDSCRLRLAAFAELGLVDPIDYEHRG

SEQ ID NO: 36991 - protein, 225 aa, Calothrix sp.
  REGION 1..225: note = tr|A0A1Z4G7Q1|A0A1Z4G7Q1_9CYAN 7-cyano-7-deazaguanine synthase OS=Calothrix sp. NIES-2098; OX = 1954171 GN=queC PE=3 SV=1
MKAVILLSGGLDSSTILYQAKAEGYECHALSFDYRQRHQRELQSALLVAQKAGVAKHQVVNFDLRQWGGSALTDDRIDLPEERSLDEMSQNIPVTYVPARNTIFLSFALAYSEAIAAQRVYIGVNALDYSGYPDCRPDYIQAMQEVFRLGTKQGREGEPITIAAPLINLKKTEIIQLGNQLGVPWELTWSCYAGADVACGVCDSCRLRLAAFAELGLKDPILYAQ

SEQ ID NO: 36992 - protein, 236 aa, Camelimonas lactis
  REGION 1..236: note = tr|A0A4R2GVN8|A0A4R2GVN8_9RHIZ 7-cyano-7-deazaguanine synthase OS=Camelimonas lactis; OX = 659006 GN=queC PE=3 SV=1
MLNNDRALVLLSGGQDSSTCLAWALARFAEVETIGFDYGQRHAVELTCRDAIRAGMATPSGALTGRLGDDHMLKLEALGAISDTAMTRDIAIVASENGLPNTFVPGRNLLFVTFAAALAYRRGCRHIVLGVCETDYSGYPDCRDDAIKAMQVALNIGMETRFVLHTPLMWRDKAATFALAEDLGGAPLLDLIVEHSHTCYVGDRSQRHPWGYGCGECPACQLRADGWRRFMSARDA

SEQ ID NO: 36993 - protein, 289 aa, Camelimonas lactis
  REGION 1..289: note = tr|A0A4R2GGH7|A0A4R2GGH7_9RHIZ Queuosine biosynthesis protein QueC (Fragment) OS=Camelimonas lactis; OX = 659006 GN=EV666_1431 PE=4 SV=1
RLPEAWNRCPRCRGIHAHDRVESMPIIRGIRKTVRGDADKQVDFAAKIGGGLGHLQLNHNAHTPGVQEASQRARSLVFITFGVIAATALKAYREVAEVPLFVCENGFIAINPPLTGGRLGSLSTRTAHPEFLARLQKVLDAAGLRVKITNPYASKTKGEMLKDCADQKLLGAEAARSTSCGRFQRFNYRQCGRCVPCQVRRAAFLAWDPTQDSTDYVYESIGKDDADYSGFDDVRSVAIALAAIKADGIEAWLGHALASPFIIDRPALVGMLERGLEELRALHQAYGVK

SEQ ID NO: 36994 - protein, 221 aa, Caminibacter mediatlanticus
  REGION 1..221: note = tr|A0A4P9DX00|A0A4P9DX00_9PROT 7-cyano-7-deazaguanine synthase OS=Caminibacter mediatlanticus TB-2 OX=391592 GN=queC PE=3 SV=1
MKKAVVILSGGMDSTTATFIAKKEGYELIPLHFNYGQRTEKRELKAFNDICDYLELKNRYVIDIPFFKQIGASALVDENIEVPTDGIKPGIPITYVPFRNGIFLSIATAVAEKEGAEAIYIGVVEEDSSGYPDCREEFIKSIEDAINKGTKPQTQIKIKTPLIHLKKEDIVKKAVEVGVPLELTWSCYKEEDKACGVCDSCRLRLKGFKKAGIKDKILYKQ

SEQ ID NO: 36995 - protein, 222 aa, Caminicella sporogenes
  REGION 1..222: note = tr|A0A1M6R8D3|A0A1M6R8D3_9CLOT 7-cyano-7-deazaguanine synthase OS=Caminicella sporogenes DSM 14501 OX=1121266 GN=queC PE=3 SV=1
MKKAVVLLSGGLDSTTCMAVAKSEGYELYPISFDYGQRHNRELECAKNVAKYFGVKQHKIIKMENVGGSALTDKNIDVPDYKGDNEIPVTYVPARNILFLSYALGYAEVIGAEAIFIGVSAVDYSGYPDCRPEFIKAFQKVVDEGTAAGVKGKSIEIKAPLIYLSKAETIKLGTKLGAPYELTTSCYKGGEKACGVCDSCVLRLKGFEEAGIKDKIEYERSL

SEQ ID NO: 36996 - protein, 221 aa, Campylobacter avium
  REGION 1..221: note = tr|A0A222MVN5|A0A222MVN5_9PROT 7-cyano-7-deazaguanine synthase OS=Campylobacter avium LMG 24591 OX=522484 GN=queC PE=3 SV=1
MKKALCIISGGMDSTLCAYLARKNGYEIVALHFNYGQRTEQREELCFKQICDDLGVVSRYVFDTSFIKCIGANSLTDENLQIPKDELNKYDTPNTYVPFRNGIFLSIAAAVAEKEECEAIFIGVLQEDNSGYADCSQAFITKAEDFINEGRATKIKLSIQTPLINLSKKDVVLLAHKEGVPLHLTYSCYERNDKACGHCDSCLLRLRGFKEANLKDEIEYV

SEQ ID NO: 36997 - protein, 224 aa, unidentified
  source 1..224: note = Campylobacter blaseri
  REGION 1..224: note = tr|A0A2P8R015|A0A2P8R015_9PROT 7-cyano-7-deazaguanine synthase OS=Campylobacter blaseri; OX = 2042961 GN=queC PE=3 SV=1
MKKALCIISGGMDSTLCAYIAKNEGYEIVALHFDYLQRTMEREKESFLKICDDLNVYKKEILDVSFIAQIGANALTDKSIEIPKNNLSDKEIPITYVPFRNGIFLSIAAALAEKEGCEAIFIGVVEEDSSGYPDCSEEFIKSFEKSINLGRATKVKTKVKMPLVHLSKAEIVKEAMKLNVPLKYTWSCYEASDKACGECDSCKLRLKGFKLAGYKDEIPYKIEV

SEQ ID NO: 36998 - protein, 226 aa, Campylobacter coli
  REGION 1..226: note = tr|W8KKD4|W8KKD4_CAMCO 7-cyano-7-deazaguanine synthase OS=Campylobacter coli RM4661 OX=1183379 GN=queC; PE = 3 SV=1
MSKKALCIISGGMDSTLCAYLAKKEGYEIIALHFDYEQRTQEKEKECFKQICKALKVEKSYILDVSFIKDIGGNALTDKSIDIPKNELCTSDTPPITYVPFRNGIFLSIAGSLAEKENCESIFIGVVEEDGSGYPDCTDEFIQKAQEFINEGTSKNFKVCIKTPLVRLNKAKIVELALKENVPLELTWSCYESEDEACGECDSCLLRLRGFERAGFKDKIKYKLKS

SEQ ID NO: 36999 - protein, 226 aa, Campylobacter coli; identical to SEQ ID NO: 36998
  REGION 1..226: note = tr|A0A3X8VMP7|A0A3X8VMP7_CAMCO 7-cyano-7-deazaguanine synthase OS=Campylobacter coli; OX = 195 GN=queC PE=3 SV=1

SEQ ID NO: 37000 - protein, 232 aa, Campylobacter concisus
  REGION 1..232: note = tr|U2F511|U2F511_9PROT 7-cyano-7-deazaguanine synthase OS=Campylobacter concisus UNSW2 OX=1242965; GN = queC PE=3 SV=1
MYNFSKFKGQNMKKAVCIMSGGMDSTLCAVMAKRAGYDVVALHFDYNQRTMKREKRAFDEICERLGVVKKINLDVSFIAQIGGNSLTDKSLQIRKDGVSNDVPNTYVPFRNGVFISIAAALAEKEGAQAIYIGVVEEDSSGYPDCKESFIKSINEAINLGTSADFSCEIITPLVNLSKADIVAKSLELNSPIELTWSCYESEDEACGLCDSCRLRLNGFKKANAVDKIPYKK

SEQ ID NO: 37001 - protein, 221 aa, Campylobacter concisus
  REGION 1..221: note = sp|A7ZCA8|QUEC_CAMC1 7-cyano-7-deazaguanine synthase; OS = Campylobacter concisus (strain 13826) OX=360104 GN=queC; PE = 3 SV=1
MKKAVCIMSGGMDSTLCAVMAKRAGYDVVALHFDYNQRTMKREKRAFDEICERLGVVKKINLDVSFIAQIGGNALTDTSMQIRKDGVSNDVPNTYVPFRNGVFISIAAALAEKEGAQAIYIGVVEEDSSGYPDCKESFIKSINEAINLGTSADFSCEIITPLVNLSKADIVSKSLELNSPIELTWSCYESEDEACGLCDSCRLRLNGFKKANAVDKIPYKK

SEQ ID NO: 37002 - protein, 222 aa, Campylobacter cuniculorum
  REGION 1..222: note = tr|A0A1W6BYK3|A0A1W6BYK3_9PROT 7-cyano-7-deazaguanine synthase OS=Campylobacter cuniculorum DSM 23162 = LMG 24588 OX=1121267 GN=queC PE=3; SV = 1
MKRALCIMSGGMDSTLCAYLAKKQGFKIIALHFDYRQRTQLKEKECFEKICKDLGVYKSYILNTDLIENIGANALTDTKIPIPKNELGQNEFPITYVPFRNGIFLSIAGALAEKEKCQSIFIGVVEEDGSNYPDCTKKFIKKAQKFINQGTAIKHKISIQTPLIKFKKKDIVSLALKEKVPLELTWSCYENNDLACGECDSCLLRLKGFKQAGFKDKIAYKI

SEQ ID NO: 37003 - protein, 223 aa, Campylobacter curvus
  REGION 1..223: note = sp|A7GXH1|QUEC_CAMC5 7-cyano-7-deazaguanine synthase; OS = Campylobacter curvus (strain 525.92) OX=360105 GN=queC; PE = 3 SV=1
MKKAVCIMSGGMDSTLCAVMAKREGYEIIALHFDYEQRTMRREKMAFEQICDYLGIKKRLNLDVSFIADIGGNALTDKNLAVSKSGLGDEIPNTYVPFRNGIFISIAAALAEKEGAQAIYIGVVEEDSSGYPDCKGEFIERMNAAINVGTAPETKIKIVTPLVNLSKADIVAKSLEFGSPLELTWSCYEREDEACGLCDSCRLRLRGFERAGVKDKIKYANLS

SEQ ID NO: 37004 - protein, 223 aa, Campylobacter fetus
  REGION 1..223: note = tr|A0A2S0JAA2|A0A2S0JAA2_CAMFE 7-cyano-7-deazaguanine synthase OS=Campylobacter fetus subsp. testudinum OX=1507806 GN=queC PE=3 SV=1
MVNLKKAVCVISGGMDSALAAYKAKNLGYEIVALHFDYNQRTMDKERECFNLICDDLDVEKRLILDVGFIAQIGGNALTDKTLNIPKDGISENIPITYVPFRNGIFLSIAAALAQKEGCEAIYIGVVEEDSSGYPDCSEQFISSINKAINLGTADDSIVIKTPLVHLSKGDIVKEASRLKVPLELTWSCYENSDFACGVCDSCRLRLKGFKEAKLSDKIPYKS

SEQ ID NO: 37005 - protein, 223 aa, Campylobacter fetus
  REGION 1..223: note = sp|A0RM81|QUEC_CAMFF 7-cyano-7-deazaguanine synthase; OS = Campylobacter fetus subsp. fetus (strain 82-40); OX = 360106 GN=queC PE=3 SV=1
MVNLKKAVCVISGGMDSALAAYKAKNSGYEIVALHFDYNQRTMNKERECFNLICDDLDVEKRFILDVGFIAQIGGNALTDKTLNIPKDGISENIPITYVPFRNGIFLSIAAALAQKEGCEAIYIGVVEEDSSGYPDCTEQFINSINKAINLGTADNNIVIKTPLVHLSKGDIVKEASSLKVPLELTWSCYENSEFACGTCDSCRLRLKGFKEAKLSDKIPYKS

SEQ ID NO: 37006 - protein, 225 aa, unidentified
  source 1..225: note = Campylobacter geochelonis
  REGION 1..225: note = tr|A0A128ES02|A0A128ES02_9PROT 7-cyano-7-deazaguanine synthase OS=Campylobacter geochelonis OX=1780362 GN=queC PE=3 SV=1
MKKAVCVISGGMDSTLCAYIAKNEGYEIVALHFDYNQRTMEKERESFYKICDKLGVKTRLVLDVSFISQIGANALTDKTLEVPKDGLGAEVPITYVPFRNGIFLSIAAALAEKEGCEAIFIGVVEEDSSGYPDCSESFIKSMQESINLGRATKVKSQIKMPLVHLSKAQIVEKALNLGVALELTWSCYENSDEACGVCDSCRLRLNGFKQAGFKDKIPYKNCNKN

SEQ ID NO: 37007 - protein, 391 aa, Campylobacter gracilis
  REGION 1..391: note = tr|C8PJP9|C8PJP9_9PROT 7-cyano-7-deazaguanine synthase OS=Campylobacter gracilis RM3268 OX=553220; GN = CAMGR0001_1449 PE=3 SV=1
MRALCVISGGMDSATCAYIARREGYEIVALHFDYDQRTMGKERECFGKICDDLGVAKRLILDARFIAQIGGSALTDGTLPIRKGAAELCGAANTTGAEIDSAANSKSAELGELNFIETNSIAEVNGQNSIAANSTNAETGGQNFTASNFMASSADATLGADSARDSRLQSGEILIQDAEILLGGDEFSPQGSKILACDDKISSQGSKILVQEGEISSQSGAQPQQGDKISSKRAEGEIPSQSQSDKISPSSGESAFSDLPSTYVPFRNGVFLSIAAALAEKERCDAIFIGVVQEDSSGYPDCGASFIAAFERALELGTSRDFHPRIKTPLVHLSKAQIVSLALEIGVPLELTWSCYEREDAACGLCDSCLLRLKGFAGAGAKDKIPYAIEA

SEQ ID NO: 37008 - protein, 231 aa, Campylobacter helveticus
  REGION 1..231: note = tr|A0A4V7ID64|A0A4V7ID64_9PROT 7-cyano-7-deazaguanine synthase OS=Campylobacter helveticus OX=28898 GN=queC PE=3 SV=1
MKKALCVISGGMDSTLCAYLAKSEGYEIIALHFDYQQRTETKERECFVKICENLGVLKRYILNANFLKDIGGNALVDESLAVPKNALHQNALPNTYVPFRNGIFLSIAASLAEKEGCEALYIGVVQEDSSGYPDCSESFIKKAENFINEGTSKDFTLSIKTPLVHLGKAEIVSLALKENVPLELTWSCYESEDSACGACDSCLLRLKGFEKAGVKDKIRYQNLSPDDCGTH

SEQ ID NO: 37009 - protein, 225 aa, unidentified
  source 1..225: note = Campylobacter hepaticus
  REGION 1..225: note = tr|A0A424Z0K2|A0A424Z0K2_9PROT 7-cyano-7-deazaguanine synthase OS=Campylobacter hepaticus; OX = 1813019 GN=queC PE=3 SV=1
MNKKALCIISGGMDSTVCAYLAKKEGYEIIALHFDYEQRTQVKERECFRQICKALKVEKSYILDVSFIKNIGGNALTDKSIHIPKNQLCLSNATPPITYVPFRNGIFLSIAGSLAEKENCESIFIGVVEEDGSGYPDCTSDFIKKAQAFINEGTSNKFKVCLKAPLLHYNKSQIVHIALEEKIPLELTWSCYENENEACGECDSCLLRLQGFKKAGFKDKIKYKS

SEQ ID NO: 37010 - protein, 220 aa, Campylobacter hominis
  REGION 1..220: note = sp|A7I1D0|QUEC_CAMHC 7-cyano-7-deazaguanine synthase; OS = Campylobacter hominis (strain ATCC BAA-381 / LMG 19568 / NCTC 13146 / CH001A) OX=360107 GN=queC PE=3 SV=1
MKAVCVISGGMDSSTAAFIAKEQGYEILALHFDYNQRTMKKERECFNLICDDLGVKSREILDVSFIAQIGANSLTDKNLTIQKTGVKSGEIPNTYVPFRNGIFLSVAAAFAEKEGADALFIGVVEEDSSGYPDCSENFIKKIESAINAGTSPNFKLEIKIPLVHLSKTQIVKKALEIGVPLEHTWSCYEREDKACGFCDSCRLRLKGFKGADTKDTIPYI

SEQ ID NO: 37011 - protein, 227 aa, Campylobacter hyointestinalis
  REGION 1..227: note = tr|A0A330G0X2|A0A330G0X2_CAMHY 7-cyano-7-deazaguanine synthase OS=Campylobacter hyointestinalis subsp. lawsonii OX=91353 GN=queC PE=3 SV=1
MKKNVKNKKAVCVISGGMDSALSAYIAKNEGYDIIALHFDYQQKTMNKEKDCFHKICECLGVSKKVILDTSFIANIGGNALTDLDVKVPKDGVKSDLPITYVFFRNGIFLSIAAALAQKEDCEAIFIGVVEEDSSGYPDCSEEFIKAMNKAINLGTSDNSIKIRTPLVHCTKENIVKKALELKVPLEFTWSCYDSEDEACGKCDSCRLRLKGFELANLEDKIPYKKA

SEQ ID NO: 37012 - protein, 223 aa, Campylobacter hyointestinalis
  REGION 1..223: note = tr|A0A381CL49|A0A381CL49_CAMHY 7-cyano-7-deazaguanine synthase OS=Campylobacter hyointestinalis OX=198 GN=queC PE=3 SV=1
MENKKAVCVISGGMDSALCAYMAKNEGYDIIALHFDYKQKTMNKEKDCFHKICECLGVSKRVILDTSFIANIGGNALTDPDVKVPKDGVKNDLPITYVFFRNGIFLSIAAALAQKENCEAIFIGVVEEDGSGYPDCSEEFICMMNSAINLGTGDNNIKIRMPLVHCTKENIVKKALELKVPLEFTWSCYDSEDEACGKCDSCRLRLKGFELANLEDKIPYKKA

SEQ ID NO: 37013 - protein, 223 aa, unidentified
  source 1..223: note = Campylobacter iguaniorum
  REGION 1..223: note = tr|A0A076F9M0|A0A076F9M0_9PROT 7-cyano-7-deazaguanine synthase OS=Campylobacter iguaniorum OX=1244531 GN=queC PE=3 SV=1
MSKKAVCVISGGMDSTLCAYKARELGYEIIALHFDYNQRTMQKERECFNQICDELNVAKKLILDVSFIADIGGNALTDTSLEVPKTGLSDELPITYVPFRNGIFLSIAGALAQKEQCEAVFIGVVEEDSSGYPDCSEEFITVMNKAINLGTSDESIKLITPLVHLSKADIVKESVRLNVPLNLTWSCYENSDLACGVCDSCRLRLNGFKQARISDKIAYKQDI

SEQ ID NO: 37014 - protein, 221 aa, Campylobacter insulaenigrae
  REGION 1..221: note = tr|A0A0A8H0W9|A0A0A8H0W9_9PROT 7-cyano-7-deazaguanine synthase OS=Campylobacter insulaenigrae NCTC 12927 OX=1031564 GN=queC PE=3 SV=1
MKKALCIISGGMDSTLCAYLAKKEGYEIIALHFDYNQRTMLKERECFEKICKELKIKNKYILNVSFISDIGGNSLTDPTLDIPKNSLHKNNIPNTYVPFRNGIFLSIAGAIAEKEKCESIFIGVVQEDSSGYPDCSEKFIQNATNFINSGTNPDFKTQLKTPLIHLNKAQIVSLAIEENVALQYTWSCYEREDKACGKCDSCLLRLKGFEQIKRKDMIDYI

SEQ ID NO: 37015 - protein, 224 aa, Campylobacter jejuni
  REGION 1..224: note = sp|P0C634|QUEC_CAMJE 7-cyano-7-deazaguanine synthase; OS = Campylobacter jejuni subsp. jejuni serotype O:2 (strain ATCC 700819 / NCTC 11168) OX=192222 GN=queC PE=3 SV=1
MSKKALCIISGGMDSTLCAYLAKKEGYEIIALHFDYEQRTQEKEKECFKQICKALKVEKSYILDVSFIKDIGGNALTDKSIDIPKNELCTSDTPPITYVPFRNGIFLSIAGSLAEKENCESIFIGVVEEDGSGYPDCTDEFIQKAQEFINEGTSKNFKVCIKTPLVRLNKAKIVELALKENVPLELTWSCYESEDEACGECDSCLLRLRGFEKAGFKDKIKYKS

SEQ ID NO: 37016 - protein, 224 aa, Campylobacter jejuni; identical to SEQ ID NO: 37015
  REGION 1..224: note = sp|Q5HXE2|QUEC_CAMJR 7-cyano-7-deazaguanine synthase; OS = Campylobacter jejuni (strain RM1221) OX=195099 GN=queC; PE = 3 SV=1

SEQ ID NO: 37017 - protein, 225 aa, Campylobacter lanienae
  REGION 1..225: note = tr|A0A1X9SNA0|A0A1X9SNA0_9PROT 7-cyano-7-deazaguanine synthase OS=Campylobacter lanienae NCTC 13004 OX=1031753 GN=queC PE=3 SV=1
MRRALCIISGGMDSAVAASIAKSEGYEIVGLHFDYHQRTMLKERECFDKICDDLGVVDRIVINADFIASVGGNSLTDKSIEIPKNSLNDKELPNTYVAFRNGIFISIGASVAQVRNCEAIYMGLVEADSSGYPDCRLEFLKAMNRAVNLGTGCEFVFKAPLIGLSKSQIVSKAYELGVNLANTWSCYESGEAACGECDSCLLRLKGFRDSGKIDPIEYKKIKFKD

SEQ ID NO: 37018 - protein, 225 aa, Campylobacter lanienae
  REGION 1..225: note = tr|A0A562Y7E5|A0A562Y7E5_9PROT 7-cyano-7-deazaguanine synthase OS=Campylobacter lanienae; OX = 75658 GN=queC PE=3 SV=1
MRRALCIISGGMDSAVAASIAKSEGYEIVGLHFDYHQRTMLKERECFDKICDDLGVIDRIVINADFIASVGGNSLTDKSIEIPKNSLNDKELPNTYVAFRNGIFISIGASVAQVRNCEAIYMGLVEADSSGYPDCRLEFLKAMNRAVNLGTGCEFVFKAPLIGLSKSQIVSKAYELGVNLANTWSCYESGDAACGECDSCLLRLKGFRDSGKIDPVEYKKIKFKD

SEQ ID NO: 37019 - protein, 221 aa, Campylobacter lari
  REGION 1..221: note = tr|A0A0A8H663|A0A0A8H663_CAMLA 7-cyano-7-deazaguanine synthase OS=Campylobacter lari subsp. concheus LMG 11760 OX=1031536 GN=queC PE=3 SV=1
MKKALCIISGGMDSTLCAYLAKKEGYEIIALHFDYNQRTMLKERECFNKICEKLNIKTKYILDVSFIANIGGNSLTDLNLEIPKEKLHEKEVPNTYVPFRNGIFLSIAGAIAEKEKCESIFIGVVQEDSSGYPDCSANFIQKTSEFINEGTTKTCNVVIKTPLVHLSKRQIVELALKEKVALECTWSCYEREDKACGKCDSCLLRLKGFKEANVKDFIEYI

SEQ ID NO: 37020 - protein, 221 aa, Campylobacter lari
  REGION 1..221: note = tr|A0A0A8HVD6|A0A0A8HVD6_CAMLA 7-cyano-7-deazaguanine synthase OS=Campylobacter lari NCTC 11845 OX=1388749 GN=queC PE=3 SV=1
MKKALCIISGGMDSTLCAYLAKKEGYEIIALHFDYNQRTMFKERECFNKICEKLNIKTKYILDVSFIANIGGNSLTDLNLEIPKEKLHEKEVPNTYVPFRNGIFLSIAGAIAEKEKCESIFIGVVQEDSSGYPDCSANFIQKASEFINEGTTKTYNVKIKTPLIHLSKRQIVNLALKEKVALEHTWSCYEREDKACGKCDSCLLRLKGFKEANINDFIEYI

SEQ ID NO: 37021 - protein, 221 aa, unidentified
  source 1..221: note = Campylobacter ornithocola
  REGION 1..221: note = tr|A0A1C2FU67|A0A1C2FU67_9PROT 7-cyano-7-deazaguanine synthase OS=Campylobacter ornithocola OX=1848766 GN=queC PE=3 SV=1
MKKALCIISGGMDSTLCAYLAKKEGYEIIALHFDYNQRTMLKERECFNKICEKLSIKTKYILDVSFIANIGGNSLTDLNLEIPKEKLHEKEIPNTYVPFRNGIFLSIAGAIAEKEKCESIFIGVVQEDSSGYPDCSEKFIQKASEFINEGTTKTYNVKIKTPLIHLSKGQIVNLSLKEKVALEHTWSCYEREDKACGKCDSCLLRLKGFKEANINDFIEYI

SEQ ID NO: 37022 - protein, 221 aa, Campylobacter peloridis
  REGION 1..221: note = tr|A0A5C7DVS8|A0A5C7DVS8_9PROT 7-cyano-7-deazaguanine synthase OS=Campylobacter peloridis; OX = 488546 GN=queC PE=3 SV=1
MKKALCIISGGMDSTLCAYLAKKEGYEIIALHFDYNQRTMLKERECFNKICEKLNIKTKYILDVSFIANIGGNSLTDLNLEIPKEKLHEKEVPNTYVPFRNGIFLSIAGAIAEKEKCESIFIGVVQEDSSGYPDCSAKFIQKASEFINEGTTKTCNVTIKTPLVHLSKGQIVELALKEKVALEYTWSCYEREDKACGKCDSCLLRLKGFQNTKTKDFIDYI

SEQ ID NO: 37023 - protein, 221 aa, Campylobacter peloridis
  REGION 1..221: note = tr|A0A0A8GS57|A0A0A8GS57_9PROT 7-cyano-7-deazaguanine synthase OS=Campylobacter peloridis LMG 23910 OX=1388753 GN=queC PE=3 SV=1
MKKALCIISGGMDSTLCAYLAKKEGYEIIALHFDYNQRTMQKEKECFNKICEKLNIKTKYILDVSFIANIGGSSLTDLNLEIPKEKLHEKEVPNTYVPFRNGIFLSIAGAIAEKEKCESIFIGVVQDDSSGYPDCSHNFIQKAKEFINEGTNKSFKVDIKTPLVHLNKGEIVTLALKEKVALEYTWSCYEREDKACGKCDSCLLRLKGFQNAKAKDLIDYI

SEQ ID NO: 37024 - protein, 221 aa, unidentified
  source 1..221: note = Campylobacter pinnipediorum
  REGION 1..221: note = tr|A0A1S6TLS5|A0A1S6TLS5_9PROT 7-cyano-7-deazaguanine synthase OS=Campylobacter pinnipediorum subsp. pinnipediorum OX=1660067 GN=queC PE=3; SV = 1
MKKAVCIMSGGMDSTLCAVLAKKQGYDIVALHFDYNQRTMSREKRAFNEICDKIGVVKKVELDVSFIADIGANALTDLSMDIRKDGVADDVPNTYVPFRNGIFISIAAALAEKEGAEALFIGVVEEDSSGYPDCSDEFIKSINNAINKGTKDSTNIKIHMPLVHLSKSDIVKTSLQNNSPLELTWSCYENEDDACGLCDSCRLRLNGFELAGAKDPIKYIS

SEQ ID NO: 37025 - protein, 228 aa, unidentified
  source 1..228: note = Campylobacter pinnipediorum
  REGION 1..228: note = tr|A0A1S6U5C5|A0A1S6U5C5_9PROT 7-cyano-7-deazaguanine synthase OS=Campylobacter pinnipediorum subsp. caledonicus OX=1874362 GN=queC PE=3; SV = 1
MKKAVCIMSGGMDSTLCAVLAKKQGYDIVALHFDYNQRTMSREKRAFKEICDKIGVVKKVELDVSFISDIGANALTDLSMDIRKDGVADDVPNTYVPFRNGIFISIAAALAEKEGAEALFIGVVEEDSSGYPDCSDEFIKSINDAINKGTKDSTNIKIHMPLVHLSKADIVKSSLQNNSPLELTWSCYENEDEACGLCDSCRLRLNGFELAGAKDPIRYKNLNSKIKL

SEQ ID NO: 37026 - protein, 224 aa, Campylobacter rectus
  REGION 1..224: note = tr|A0A3P1X7C1|A0A3P1X7C1_CAMRE 7-cyano-7-deazaguanine synthase OS=Campylobacter rectus; OX = 203 GN=queC PE=3 SV=1
MVKKAVCIMSGGMDSTLCAVLAKRAGYEIIALHFDYGQRTMKREKLAFEQICERIGALKKVNLDASFIANIGGNALTDESLAIRKDGAKPDTPSTYVPFRNGIFISIAAALAEREGAQALYIGIVEEDGSGYPDCTADFIAKIESAVNAGTSKDFSLRIETPLVNLSKADIVQKSLEAGSPLELTWSCYEREDEACGECDSCRLRLRGFELAGEKDRIKYANLK

SEQ ID NO: 37027 - protein, 223 aa, Campylobacter rectus
  REGION 1..223: note = tr|B9D1X7|B9D1X7_CAMRE 7-cyano-7-deazaguanine synthase OS=Campylobacter rectus RM3267 OX=553218 GN=queC; PE = 3 SV=1
MKKAVCIMSGGMDSTLCAVLAKRAGYEIVALHFDYGQRTMEREKLAFEQICERIGALKKVNLDAHFIASIGGNALTDENLAIRKDGAKPDTPSTYVPFRNGIFISIAAALAEKEGAQALYIGIVEEDGSGYPDCTADFIAKIESAVNAGTSKDFSLRIETPLVNLSKAGIVRKSLEAGSPLELTWSCYELEDEACGECDSCRLRLRGFELAGEKDRIKYANLK

SEQ ID NO: 37028 - protein, 241 aa, Campylobacter showae
  REGION 1..241: note = tr|M3GW01|M3GW01_9PROT 7-cyano-7-deazaguanine synthase (Fragment) OS=Campylobacter showae CC57C; OX = 1073353 GN=H740_10762 PE=3 SV=1
NPTKYKPKRRANKKRIKMVKKAVCIMSGGMDSTLCAVLAKRAGYEIIALHFDYGQRTMKREKIAFEQICERIGALKKVNLDAHFIADIGGNALTDESLAIRKDGAKADTPSTYVPFRNGIFISIAAALAEKEGAQALYIGIVEEDGSGYPDCTADFIAKIESAVNAGTSKDFSLRIVTPLVNLSKADIVRKSLEAGSPLELTWSCYEREDEACGECDSCRLRLRGFELAGEKDRIKYVNLK

SEQ ID NO: 37029 - protein, 223 aa, Campylobacter showae
  REGION 1..223: note = tr|C6RG62|C6RG62_9PROT 7-cyano-7-deazaguanine synthase OS=Campylobacter showae RM3277 OX=553219 GN=queC; PE = 3 SV=1
MKKAVCIMSGGMDSTLCAVLAKRAGYEIIALHFDYGQRTMKREKLAFEQISERIGALKKVNLDASFIASIGGNALTDESLAIRKDGAKPDTPTTYVPFRNGIFISIAAALAEKEGAQALYIGIVEEDGSGYPDCTADFIGKIESAVNAGTSKDFSLRIVTPLVNLSKADIVRKSIEAGSPLELTWSCYEREDEACGECDSCRLRLRGFELAGEKDRIKYVNLK

SEQ ID NO: 37030 - protein, 226 aa, Campylobacter sp.
  REGION 1..226: note = tr|A0A4Y8BS77|A0A4Y8BS77_9PROT 7-cyano-7-deazaguanine synthase OS=Campylobacter sp. US33a; OX = 2498120 GN=queC PE=3 SV=1
MSKKALCIISGGMDSTLCAYLAKKQGYEIIALHFDYNQRTQEKEKECFKQICKALKVEKSYILDVSFIANIGGNALTDKNINIPKNELNKSDTPPITYVPFRNGIFLSIAGSLAEKENCESIFIGVVEEDSSGYPDCTQSFIQKAQEFINEGTSKDFKTQIKTPLVHLKKAEIVALALSENVPLELTWSCYESQDLACGECDSCLLRLRGFEEAGFKDKIAYKNAH

SEQ ID NO: 37031 - protein, 225 aa, Campylobacter sp.
  REGION 1..225: note = tr|A0A1X9T0J3|A0A1X9T0J3_9PROT 7-cyano-7-deazaguanine synthase OS=Campylobacter sp. RM8964 OX=1660074 GN=queC PE=3 SV=1
MRKALCIISGGMDSAVAASIAKSEGYEIVALHFDYGQRTMKKERECFDKIASSLNALKKFVIDTSFIADVGGNALTDKNIKIPKNALQDKEPPATYVAFRNGIFLSIATGIAQVQGCEAIYIGLVEADGSGYPDCSSEFLEAMNKAVNLGTGCDIKFKAPLIGLSKGQIVATAYKLGVNLANTWSCYENEDLACGECDSCLLRLKGFKENNLNDPIEYKKIKFKD

SEQ ID NO: 37032 - protein, 220 aa, Campylobacter sputorum
  REGION 1..220: note = tr|A0A381DL46|A0A381DL46_9PROT 7-cyano-7-deazaguanine synthase OS=Campylobacter sputorum biovar sputorum OX=32024 GN=queC PE=3 SV=1
MKKALCIISGGMDSTLCAYMAKNEGYEIVALHFDYNQRTMNKERECFNKICNDLNIKKREILDVSFISQIGANALTDTNLEIPKTGISDDIPITYVPFRNGVFLSIAAALAQKENCDAIFIGVVEEDSSGYPDCSEEFIKSMQLSINLGRGTKDTKIVTPLVHLSKADIVKKAISLNVPLELTWSCYESEDKACGKCDSCRLRLNGFKKAGFKDKIPYKE

SEQ ID NO: 37033 - protein, 221 aa, Campylobacter subantarcticus
  REGION 1..221: note = tr|A0A0A8HAC6|A0A0A8HAC6_9PROT 7-cyano-7-deazaguanine synthase OS=Campylobacter subantarcticus LMG 24374 OX=1388751 GN=queC PE=3 SV=1
MRKALCVISGGMDSTLCAYLAKKEGYEIIALHLDYNQRTMNKERECFNKICKELNIQTKYILDVSFIANIGGNSLTDYTLEIPKEKLHEVEVPNTYVPFRNGIFLSIAGAIAEKEKCESIFIGVVQEDSSGYPDCSEKFIQKASKFINEGTTNSCKIQIKTPLVHLNKSQIVDLALKEKVALEYTWSCYEREDKACGKCDSCLLRLKGFQEANVKDFIEYV

SEQ ID NO: 37034 - protein, 221 aa, Campylobacter ureolyticus
  REGION 1..221: note = tr|A0A381E974|A0A381E974_9PROT 7-cyano-7-deazaguanine synthase OS=Campylobacter ureolyticus OX=827 GN=queC PE=3 SV=1
MKKALCIISGGMDSVTSAYIAKNEGYEIVALHFDYNQRTMNKEKECFNKICDELKVVKKEILNVSFISQIGANALTDSSLEIPKDGLSDEVPITYVPFRNGIFLSIAAALAEREKCEAIFIGVVEEDSSGYPDCSQEFIKSMEKSINLGRETGIKTKILTPLVHLSKAQIVQKAFSLKVPLQYTWSCYEREDLACGVCDSCRLRLKGFKEAGKKDLIKYAN

SEQ ID NO: 37035 - protein, 221 aa, Campylobacter ureolyticus
  REGION 1..221: note = tr|S3YK38|S3YK38_9PROT 7-cyano-7-deazaguanine synthase OS=Campylobacter ureolyticus ACS-301-V-Sch3b; OX = 883165 GN=queC PE=3 SV=1
MKKALCIISGGMDSVTSAYIAKNEGYEIVALHFDYNQRTMNKEKECFNKICDELKVVKKEILDVSFISQIGANALTDRSLEIPKDGLSNEVPITYVPFRNGIFLSIAAALAEREKCEAIFIGVVEEDSSGYPDCSQEFIKSMEKSINLGRETSIKTKILTPLVHLSKAQIVQKAFSLKVPLQYTWSCYEREDLACGVCDSCRLRLKGFKEAGKKDLIKYAN

SEQ ID NO: 37036 - protein, 221 aa, Campylobacter volucris
  REGION 1..221: note = tr|A0A5C7DSP4|A0A5C7DSP4_9PROT 7-cyano-7-deazaguanine synthase OS=Campylobacter volucris; OX = 1031542 GN=queC PE=3 SV=1
MKKALCIISGGMDSTLCAYLAKKEKYEIIALHFDYNQRTMHKERECFEKICKELDVKNKYILDVSFIADIGNNSLTDFNLDIPKNELYKNELPNTYVPFRNGIFLSIAGAIAEKENCESIFIGVVQEDSSGYPDCSQNFIQDANKFINSGTSKNFKTQIKTPLIHLNKAQIVTLAIKENVALKYTWSCYEKEDKACGKCDSCLLRLKGFNEIGIKDTIEYE

SEQ ID NO: 37037 - protein, 221 aa, Campylobacter volucris
  REGION 1..221: note = tr|A0A5C8L2F4|A0A5C8L2F4_9PROT 7-cyano-7-deazaguanine synthase OS=Campylobacter volucris; OX = 1031542 GN=queC PE=3 SV=1
MKKALCIISGGMDSTLCAYLAKKEKYDIIALHFDYNQRTMRKERECFEKICKELDVKNKYILDVSFIADIGNNSLTDFNLTIPKNELHKNELPNTYVPFRNGIFLSIAGAIAEKENCESIFIGVVQEDSSGYPDCSQNFIQDANKFINSGTSKNFKTQIKTPLIKLSKAQIVALAIQENVALKYTWSCYEKEDKACGKCDSCLLRLKGFNEIGIKDEIEYE

SEQ ID NO: 37038 - protein, 227 aa, unidentified
  source 1..227: note = Campylobacteraceae bacterium
  REGION 1..227: note = tr|A0A1V4R8C4|A0A1V4R8C4_9PROT 7-cyano-7-deazaguanine synthase OS=Campylobacteraceae bacterium 4484_166 OX=1956165 GN=queC PE=3 SV=1
MNKVAIVVLSGGLDSTTCAYIAKNKGFDIVALHFNYGQKTLNKELETFRAICDVLDIETKKRYEIDLPFFTKIGCSALTDKDIDVPIDGLDDNIPITYVPFRNGIFLSIATALAIKYNSFDIFIGVVSEDGSGYPDCTKEFIKNQQNCINEGANTKHHITIQTPLIDKTKEQIVHIAKDLSVAISKTWSCYKDEFEACGVCDSCRLRLHGFKKAGFKDEIKYKATDI

SEQ ID NO: 37039 - protein, 212 aa, unidentified
  source 1..212: note = Campylobacteraceae bacterium
  REGION 1..212: note = tr|A0A1Y1RE16|A0A1Y1RE16_9PROT 7-cyano-7-deazaguanine synthase OS=Campylobacteraceae bacterium 4484_4 OX=1970775 GN=queC PE=3 SV=1
MDSALSAYIAKKEEHYEIIAVHYNYGQKTEKKELEAFKKIAESLGSLKEYILDLHFIKEIGGSALTDEEISVPKEGITPGIPVTYVPFRNGIFLSVAAAIAEKEGAEAIFIGVVEEDSSGYPDCREEFIEKLEAAIDAGTKPQTHIRLRTPLVHLKKEQIVKEAYRIGVPLNETWSCYEREDAACGECDSCRLRLKGFEIAGIEDEIPYLKR

SEQ ID NO: 37040 - protein, 222 aa, unidentified
  source 1..222: note = Campylobacterales bacterium
  REGION 1..222: note = tr|A0A258X5K1|A0A258X5K1_9PROT 7-cyano-7-deazaguanine synthase OS=Campylobacterales bacterium 16-40-21 OX=1970501 GN=queC PE=3 SV=1
MNKKALCIMSGGMDSTLVAYTMRAQGYEIIALHFNYGQRTVAKELEAFRAITDALGTQERYEIDLDFFKTIGASALTDHSIDVPTEGIEPGIPITYVPFRNGIFLSIATAIAEKEGCEVMAIGVVEEDSSGYPDCRDAFIRSFEQSANLGTKETTHIRIEMPLVHLQKSQIVQEAYKLNVPLELTWSCYQSDDTACGVCDSCRLRLRGFELAGQKDPIAYAL

SEQ ID NO: 37041 - protein, 230 aa, unidentified
  source 1..230: note = Scalindua sp.
  REGION 1..230: note = tr|A0A286TUF4|A0A286TUF4_9BACT 7-cyano-7-deazaguanine synthase OS=Candiadtus Scalindua japonica OX=1284222 GN=queC PE=3 SV=1
MKSIDMSAKNLAVVLLSGGLDSCVTMAIAREEYNIALLHVGYAQRTQTREYNCFRSIARYYKIPETRTLALELDFLRKIGGSCLTDPNIPVDKDTIHEKIPTSYVPFRNTHLLSIAVSWAEVINANKVYIGAVQQDSPDYPDCRAEYYDAYNKLVEVGTKPSTNIKVITPLLNMSKTEIVKKGLELQAPLQLTWSCYERNDKACGHCQSCLLRLKAFEEAGVKDKIHYAL

SEQ ID NO: 37042 - protein, 241 aa, unidentified
  source 1..241: note = Zixibacteria bacterium
  REGION 1..241: note = tr|A0A1F4YPL3|A0A1F4YPL3_9BACT 7-cyano-7-deazaguanine synthase OS=candidate division Zixibacteria bacterium RBG_16_53_22 OX=1802787 GN=queC; PE = 3 SV=1
MEMAKALVVLSGGQDSTTCLFWARTKFDEVHAITFDYGQRHRAEVEAAKRIARMAKVASHEVVKVPDILLGTSPLVNSAQSVEEYADAQSLPGGIEKTFVPMRNTLFLTIAANRAVVLGCSDIITGVGQEDFGGYPDCREAFLFMLQKTFQESLRGVAEVNLVAPLLYLIKKETVELACELGVECLDALAYTHTCYKGEYPPCGHCHACLLRQKGFDEAGIADPLIVRSGPVPIVGGHCVR

SEQ ID NO: 37043 - protein, 200 aa, unidentified
  source 1..200: note = Unknown
  REGION 1..200: note = tr|A0A1F4U6M4|A0A1F4U6M4_9BACT 7-cyano-7-deazaguanine synthase OS=candidate division WOR-1 bacterium RIFOXYC2_FULL_46_14 OX=1802587 GN=queC; PE = 3 SV=1
MKAILLLSGGLDSTTTLYYAIGKGYQCHALIFDYGQKHRKEIRYAVAAAKRVSVAYRVVQIKLPWKGSSLLDPRHKKKAKGIPPTYVPARNTIFLSFALSYAEAIGAEAIFYGANAIDYSGYPDCRPEFVRAFQNLIKAGARDCGIKVSAPLIKKTKAQIVQLAKKLGVPIDKTWSCYEGSAKPCGVCDSCKLREKGLKG

SEQ ID NO: 37044 - protein, 618 aa, unidentified
  source 1..618: note = Abyssubacteria bacterium
  REGION 1..618: note = tr|A0A3A4PFH2|A0A3A4PFH2_9BACT Uncharacterized protein OS=Candidatus Abyssubacteria bacterium SURF_5; OX = 2093360 GN=C4520_00505 PE=4 SV=1
MTARAGRHIILGNGAEGPENVVNPFVLNYLDGRGPVNVRIGLQRLVRSVYHLPPRILDLLEIAGYVFAADRSISRGRNDLVEYHSWSRSIEFHIRVRDCEFWSQHLVTERLREVLKFMTGDAEFSFHFQPGHSTEPTSLFDLPECRIEPKAGEPNVCLFSGGIDSLCGALDLLAHEDKEVILVSHQSQPGTVRTQKSLVDALDRLYPRRVAHFKFECTLKGARADEETQRSRSFLYTSVAYAIAWAYGQKRINVFENGVTSINLRRREDLANARASRTTHPQTMARMATLLSLIDGQPFEIALPYLFSTKTDVIRKLASVAEDLLASSVSCSRTVKKRDTTHCGHCFQCIDRRIASYAAEAETIDHRGLYMTDIVSDHIDDREARNIMIDYIRQAKSFSEDSADKFYEEYLSDLAECLDYLPLDCLDQEKVCRIWDLFRKHGNQVRDGLNRIRALHEDVFESLPEHSLLHLISLREYLKPEVERLVATICKTLQSPIAEMFARHRPVDEPDLNEKLGAFLRSHEPKIRSEHPNVSFACARVIPDHGSIEVDLLIEAKYIRGNTSPSKATEGIAADLTKYPDQAYILFIVYDPEHKILDDNAFCKDIRAKRPSRVLIIR

SEQ ID NO: 37045 - protein, 225 aa, unidentified
  source 1..225: note = Abyssubacteria bacterium
  REGION 1..225: note = tr|A0A419EQR2|A0A419EQR2_9BACT 7-cyano-7-deazaguanine synthase OS=Candidatus Abyssubacteria bacterium SURF_17 OX=2093361 GN=queC PE=3; SV = 1
MKRELAIALVSGGMDSCVAAALAAQEHRLALLHVSYGQRTWRRELEAFRGIAAHYGVEQTLVADIGYLSTIGGSSLTDSEMSVQPADLNRSGIPSSYVPFRNTHFLAIAVSWGEVIGAGRIFIGAVEPDSSGYPDCREVYYKVFNELIRVGTRPETHIEVVAPLIRMKKSEIVKLGLKLGAPLQLTWSCYRNDNVPCGDCDSCALRAKGFEEAGAIDPIVKHVIS

SEQ ID NO: 37046 - protein, 182 aa, unidentified
  source 1..182: note = Accumulibacter sp.
  REGION 1..182: note = tr|A0A011NTE1|A0A011NTE1_9PROT 7-cyano-7-deazaguanine synthase OS=Candidatus Accumulibacter sp. SK-12 OX=1454001 GN=queC PE=3 SV=1
MALAASEHRVVRLRLADFGGSALTDTSVALPVNGLRPGIPATYVPARNTVMLSLALAWAEVLRSQDVFIGVNAVDYSGYPDCRPEYIAAFERMANLATKAAVEGSALRIHAPLIDLGKAEIIRRGLELGIDYSLTVSCYQADAAGRACGVCDSCRLRRAGFAAAGVADPTPYASRQPPEGHR

SEQ ID NO: 37047 - protein, 232 aa, unidentified
  source 1..232: note = Accumulibacter aalborgensis
  REGION 1..232: note = tr|A0A1A8XWC7|A0A1A8XWC7_9PROT 7-cyano-7-deazaguanine synthase OS=Candidatus Accumulibacter aalborgensis OX=1860102 GN=queC PE=3 SV=1
MNMQTSSPGQAAVVLLSGGLDSATTLAIARASGFACYCLSLDYGQRHRAELQAAAAVAEAIGASEHRVLRLSLDDFGGSALTDDAIAIPVDGVQPGIPVTYVPARNTVMLSLALAWAEVLGSRDIFIGVNAVDYSGYPDCRPEYIDAFEGMANLATRAAVEGSTLRIHAPLIDLGKAEIIERGVTLGVDYGLTVSCYQADETGRACGVCDSCRLRRAGFTAAGLADPTRYTA

SEQ ID NO: 37048 - protein, 260 aa, unidentified
  source 1..260: note = Acididesulfobacter guangdongensis
  REGION 1..260: note = tr|A0A519BEW8|A0A519BEW8_9DELT 7-cyano-7-deazaguanine synthase OS=Candidatus Acididesulfobacter guangdongensis OX=2597225 GN=queC PE=3; SV = 1
MNNSKKAVILFSGGLDSSTVLKIALDEGYEVIPVSFFYNQRHKTEIDHAKKIAEYFNIKNHIIINLDFSSIKGSALVDFDISVPKNQIKIAAASDPLYTTDNSESSELAAQKDNTPKAQKNNIPITYVPARNTIFLSYAIAVGEVNNAGDIFIGVNWIDYSGYPDCRPEYIQSFEKMANIATKASVTGQLKFKIHTPLINMGKKDIIKKAHDINVPLEMTHSCYDPIGGLACGVCDSCILRKNGFIEAGIEDPTIYAKLF

SEQ ID NO: 37049 - protein, 260 aa, unidentified
  source 1..260: note = Acididesulfobacter diazotrophicus
  REGION 1..260: note = tr|A0A519BL88|A0A519BL88_9DELT 7-cyano-7-deazaguanine synthase OS=Candidatus Acididesulfobacter diazotrophicus OX=2597226 GN=queC PE=3; SV = 1
MNSENLNNLESLEIKSNAKNAIVLFSGGLDSSTVLKIALDEGYNVIPVSFFYNQRHQTEIDHAKKIIEYFKIKNHIIINLDFSQIKGSSLVDLKIDVPKNQIKLINSCNNNNDVNDNANDNKNNSIPITYVPARNTIFLSYAIAVGEVNNAGDIFIGVNWIDYSGYPDCRPEYILAFEQMANIATKVSVLGELEFKIHTPLISMGKKDIIKKAYEIGVPLELTHSCYDPINGLACGVCDSCILRKNGFIEAGIKDSTVYA

SEQ ID NO: 37050 - protein, 239 aa, unidentified
  source 1..239: note = Acidulodesulfobacterium ferriphilum
  REGION 1..239: note = tr|A0A519BBP7|A0A519BBP7_9DELT 7-cyano-7-deazaguanine synthase OS=Candidatus Acidulodesulfobacterium ferriphilum OX=2597223 GN=queC; PE = 3 SV=1
MHNANDKRAVVLFSGGLDSATVLKIAIDEGFEVIPLTFFYNQRHKTEIEHAKKIVKFFNLKNHAIVNLDFGQIKGSALVDLSMDVPKNRINKSEPKKAGGKNDIPITYVPARNTIFLSYALAVAEVNMAGDIFIGANYIDYSGYPDCRPGYLRAFEKMANLATKASVTGEINFKINAPLLKLTKKDIIIRAFEIGAPLELTHSCYDPIEGLACGVCDSCILRRRGFEEAEIKDPTKYYK

SEQ ID NO: 37051 - protein, 232 aa, unidentified
  source 1..232: note = Aegiribacteria bacterium
  REGION 1..232: note = tr|A0A1V4MY19|A0A1V4MY19_9BACT 7-cyano-7-deazaguanine synthase OS=Candidatus Aegiribacteria bacterium MLS_C OX=1775674 GN=queC PE=3 SV=1
MTPPEGAVVLLSGGLDSATVLHIAVDMGFEVHALTFGYGQRHSPELRAAALVAERAGVKDHITVFLDPRLFQGSALTGYGEVPDGSALREEGAIPSTYVPARNTVFLSLALARAESIGSRDVFIGVNSLDYSGYPDCRPEFIEAFRRMAGLATRDALEGRPVRIHAPLLEMTKARIIERGLELGVDYSLTLSCYRPDGHGRPCGTCDSCMLRLRGFREAGTEDPAVYSTEGE

SEQ ID NO: 37052 - protein, 268 aa, unidentified
  source 1..268: note = Aerophobetes bacterium
  REGION 1..268: note = tr|A0A523YS48|A0A523YS48_9BACT ATP-dependent sacrificial sulfur transferase LarE OS=Candidatus Aerophobetes bacterium OX=2030807 GN=larE PE=4 SV=1
MEEKLASLKRILSNMGSVLIAFSGGVDSTFLLKVAHDVLGKKIVAATASSETYPASELEAAKKIARKLGVKHLVIQTEELSKQDFVKNSPQRCYFCKRELFSRLNKIARGQGLNYVADASNYDDLADFRPGRQAGQELGIKSPLKEARLTKAEIRSLSHKMNLPTWNKPSLACLASRIPYGTRITREKLKRIDEGERFLKGLGIRQLRIRDHDGIARIEVAQEEMSLFWQENMVRLIIDKLKRLGYTYVTLDLEGYRPGSMNEVLEKR

SEQ ID NO: 37053 - protein, 222 aa, unidentified
  source 1..222: note = Aerophobetes bacterium
  REGION 1..222: note = tr|A0A1V5K6J4|A0A1V5K6J4_9BACT 7-cyano-7-deazaguanine synthase OS=Candidatus Aerophobetes bacterium ADurb.Bin490 OX=1852830 GN=queC PE=3 SV=1
MKTNSKCVVLLSGGQDSTTALFWAKKKFKTVMAVSFNYGQRHKIELKSAAKIAKLARVKHTIITVKEYEAIQNSALLDKTSSVNKHDKINKKLPASFVPGRNILFLTAAAAYGYVNKAENIVIGVSQADYSGYPDCRGEFIRSMEKSLSLGMEYPVKIHTPLLNKNKIQTVLLAKKLGVLDMMKYTHTCYEGDNKPCSKCPACRLRAKGFKEAGIADPVLRR

SEQ ID NO: 37054 - protein, 381 aa, unidentified
  source 1..381: note = Amesbacteria bacterium
  REGION 1..381: note = tr|A0A0G1V3H6|A0A0G1V3H6_9BACT 7-cyano-7-deazaguanine synthase OS=Candidatus Amesbacteria bacterium GW2011_GWA1_48_9 OX=1618355 GN=UY33_C0003G0018; PE = 3 SV=1
MDKKLGAINGREITSSLIGLTDPQLYNIDSVVKTSLLTTLAGYLESDSITVYGNAFADSKFLQTFLSYILNDKRAAPRDFNLLLNFVSNGSVFHPNQDSNSYDCLVSFSGGIDSTAGLMYSLDAKRKVLPVWIGFGQKNENRELAVVNELCKKLNVQPWIIKLDLARYVDAGWSRWKSGIIPARNLLFASIAAEIASRSNSPSVDILLCAHKEEITPVNTDKSQRFYDSTTLLFNSAYKKNIRVTTPFYSYTKPEIVSYWSRYWTDRYGISPGETTSCYLGNNCGSCKACFNRAVAFTCSGYKNDHFLQDPFIDQSNTIWGGYITRFDSLESERQLDILYSLNSHIDIAPPRIAKFVEYHYPHFRNAIKKRQKQIRNVLIS

SEQ ID NO: 37055 - protein, 381 aa, unidentified; identical to SEQ ID NO: 37054
  source 1..381: note = Amesbacteria bacterium
  REGION 1..381: note = tr|A0A1F5A1P7|A0A1F5A1P7_9BACT 7-cyano-7-deazaguanine synthase OS=Candidatus Amesbacteria bacterium RIFOXYD1_FULL_47_9 OX=1797267 GN=A2576_00675; PE = 3 SV=1

SEQ ID NO: 37056 - protein, 231 aa, unidentified
  source 1..231: note = Aminicenantes bacterium
  REGION 1..231: note = tr|A0A1F5ATQ6|A0A1F5ATQ6_9BACT 7-cyano-7-deazaguanine synthase OS=Candidatus Aminicenantes bacterium RBG_13_59_9 OX=1797268 GN=queC; PE = 3 SV=1
MNITIVLLSGGIDSTTALHWAIARGGRVEALTFDYGQRHRLEVGAARRTCRRLSVPWHVLKVDLGQVGGSCLTDPTLPLPEYKNLAGFPDGPPVTYVPFRNGIFLALAAAWAEAHGGREIVCGFNVIDSPNYPDTRKSFVRAMQRAVNQGTGAAWSGRRIRILAPFLDMKKSEIIKTGLRLGADYSSSISCYGGKETPCGRCSACLLRKRAWEEMGSRDHLIIRLEREGRI

SEQ ID NO: 37057 - protein, 251 aa, unidentified
  source 1..251: note = Aminicenantes bacterium
  REGION 1..251: note = tr|A0A1F5AYM0|A0A1F5AYM0_9BACT 7-cyano-7-deazaguanine synthase (Fragment) OS=Candidatus Aminicenantes bacterium RBG_13_59_9 OX=1797268; GN = A2Y69_11710 PE=3 SV=1
MSNRPAALKKAGFSSNIKLVMHQSRKALVLFSGGIDSTTALYWAQGRYAEVSALSFDYGQRHRVELALARCLARRLRLPHRVLKFDLRQVGGSALTDLSVSVPRIVHQEDIGPGVPPTYVPFRNGIFLALAAAWAEAKGINDMVCGFNTIDSPNYPDTRASFVRAMQRAVDLGTGAGSRGHRLRIVAPFIRMKKSEIIRLGLSLGADYSFSISCYSGGEVPCRRCSSCLLRKRAWEEAGTKDHLFTRLRKE

SEQ ID NO: 37058 - protein, 224 aa, unidentified
  source 1..224: note = Amulumruptor caecigallinarius
  REGION 1..224: note = tr|A0A4V1LAL5|A0A4V1LAL5_9BACT 7-cyano-7-deazaguanine synthase OS=Candidatus Amulumruptor caecigallinarius OX=2109911 GN=queC PE=3 SV=1
MSDTAKDTILVLSGGMDSTTMLYEFRQRIALAVTFDYGSNHNAREIECAAYNCRKLGVPHLVIPLGFIGRYFESSLLSGGDAVPTGHYDGENLRSTVVPFRNGIMLAVAAGLAESRGLAKVMIANHAGDHEIYPDCRPGFVKAMGEAISEGTFAPVVLDAPYTGLTKADIALRGLRLGLDYDHTYSCYKGGEKPCGECATCVEREEALAQAHKMLRACLKINVK

SEQ ID NO: 37059 - protein, 230 aa, unidentified
  source 1..230: note = Aquarickettsia rohweri
  REGION 1..230: note = tr|A0A3R9ZBY5|A0A3R9ZBY5_9RICK 7-cyano-7-deazaguanine synthase OS=Candidatus Aquarickettsia rohweri OX=2602574 GN=queC PE=3 SV=1
MKNAVVLLSGGLDSSTTLALAKERGYATYCMSFDYGQKQLIELKSARKVKNSIAPEAGHKIVKIDLKTFGNSAITDNIDVPKNRSEKEILSKIPITYVPARNTIFLSYALAYAEVLQANDIFIGANILDYSGYPDCRPAYIEAFNIMANLATSRAVGGEKIKIHTPLIQLNKAQIIEEGLRLGIDYSMTLSCYNPDENGYSCGECDACILRLQAFKELGKDAPIKYISHK

SEQ ID NO: 37060 - protein, 234 aa, unidentified
  source 1..234: note = Atelocyanobacterium thalassa
  REGION 1..234: note = tr|A0A086CGM2|A0A086CGM2_9CHRO 7-cyano-7-deazaguanine synthase OS=Candidatus Atelocyanobacterium thalassa isolate SIO64986 OX=1527444; GN = queC PE=3 SV=1
MSDKSLAVVLLSGGLDSATSAAIAASQGYELIALSFSYGQLHQKELKSARIIAKELDINSHHIVNVDISQWGGSSLTDKSLAIPLSGVNPYQIPSTYVPGRNTVFIALALSLAEAKGAKAIYLGINMIDYSGYPDCRSEYLKTYQDLAKLSSKAGIEGNAPQLIAPLIKKNKVDIIKEAVRLGVPIEKTWSCYQGGHEACGLCDSCRIRDQALIEAGYPFLVTTKGKEIYNLNR

SEQ ID NO: 37061 - protein, 301 aa, unidentified
  source 1..301: note = Atribacteria bacterium
  REGION 1..301: note = tr|A0A359LIK6|A0A359LIK6_9BACT ATP-dependent sacrificial sulfur transferase LarE OS=Candidatus Atribacteria bacterium OX=2053509 GN=larE PE=4 SV=1
MDKINYNKNLGLRFIESGEKSIKRKAQRNNLKDKLDNLYNILSEMGSILLAYSGGVDSTFLLKVAREELGDKVIAVTIKSEIHPLSEITVAKKMAQQFKVKHLINNIEILSKKEFTSNPKERCYICKKELFNRISELAKELNLNFVVDGSNYDDLSDYRPGMKAIRELKIRSPLQEALLTKDDIRFLSKEMNLPTWDKPSNSCLATRVPYGEEITLEKLKRIEEAEDFIHNLGIEQVRVRHYSNLAKIEVREKDMLFLMKKDWREKIIIKLKQLGFIYITLDLQGYRSGSMNESFMEKGKN

SEQ ID NO: 37062 - protein, 274 aa, unidentified
  source 1..274: note = Atribacteria bacterium
  REGION 1..274: note = tr|A0A523RHS9|A0A523RHS9_9BACT ATP-dependent sacrificial sulfur transferase LarE OS=Candidatus Atribacteria bacterium OX=2053509 GN=larE PE=4 SV=1
MNIKKEKLNNLRKILSETGSVLIAYSGGVDSTFLLKIAREELGDKIIAVTVKSEIHHLSEVTDAKKMAQKFKVKHLFIDIDILSNKEFVNNPKERCYICKKEIFSRISEIAKELNLNFVADGSNYDDLSDYRPGMKAVRELRIRSPLQEALLTKDDIRLLSKEMDLPTWDKPSNSCLATRIPYGDKITLEKLKRIEKAEGFFHDLGIEQVRVRCHNKLAKIEVGEKDLLFLMEEDLRKKIISKLKQLGFIYVTLDLQGYRSGSMNEELNEKAED

SEQ ID NO: 37063 - protein, 228 aa, unidentified
  source 1..228: note = Aureabacteria bacterium
  REGION 1..228: note = tr|A0A3A4QU83|A0A3A4QU83_9BACT 7-cyano-7-deazaguanine synthase OS=Candidatus Aureabacteria bacterium SURF_26 OX=2093366 GN=queC PE=3; SV = 1
MTVKKAVVLLSGGIDSYTVAAIARKDGFILYALSFDYNQRHKYEIQAARRIAESLSVKQHIVSQLGFLRDIGGSALTSSIPVPENRSDMSDIPVTYVPARNILFLSYAVAWAEVLGACDIFIGVNAIDYSGYPDCRPEFIAAYQQAVNVGTKAGVNGQFFCIRTPLIGMTKREIILAGRAVGCDYSLSISCYQADSHGLACGACDSCLIRMKGFQDAGVPDPTQYRIR

SEQ ID NO: 37064 - protein, 218 aa, unidentified
  source 1..218: note = Azambacteria bacterium
  REGION 1..218: note = tr|A0A350QJJ0|A0A350QJJ0_9BACT 7-cyano-7-deazaguanine synthase OS=Candidatus Azambacteria bacterium OX=2053511 GN=queC PE=3 SV=1
MSQKVVVIYSGGMDSFTVLQKAVAAGHDVYALSFNYGQRHVKELICAANVCKELNIKHKIVDISAINQLIAGSSLTSDIDVPEGHYAADNMKSTIVPNRNMILLSLAVGYADSIGARAVHYGAHSGDHFIYPDCRPEFVQKMNDVCQIANYQPVDIVSPYLYQTKIEILADGLAMGLDYSKTWTCYNGRDKACGKCGSCQERLEAFKLNNASDPLPYE

SEQ ID NO: 37065 - protein, 222 aa, unidentified
  source 1..222: note = [Bacteroides] periocalifornicus
  REGION 1..222: note = tr|A0A0Q4B0G7|A0A0Q4B0G7_9BACT 7-cyano-7-deazaguanine synthase OS=Candidatus [Bacteroides] periocalifornicus OX=1702214 GN=queC PE=3; SV = 1
MGKKAVVLLSGGLDSTVALHVAKRDYDELYALSFTYGQLHSKELACAQWQGEHAGVKEHRIVELKLDAWGDCSLTHAAEPIEPGNVQRTSTPNTYVPARNMVFLSVAASYAEAVGASTIFIGVSEVDYSGYVDCREEFIVQMEAAINAGTERKLTHGDPIRIMAPFIHMRKADEVLLGAKLGVDFSHTWTCYQGDEKPCGVCDSCLLRAKAFAEAGVPDPLG

SEQ ID NO: 37066 - protein, 230 aa, unidentified
  source 1..230: note = Baumannia cicadellinicola
  REGION 1..230: note = tr|A0A088MY01|A0A088MY01_9GAMM 7-cyano-7-deazaguanine synthase OS=Candidatus Baumannia cicadellinicola OX=186490 GN=queC PE=3 SV=1
MKQTVVVFSGGQDSTTCLIQALTQYDKVHCLTFDYGQRHRAEINIARRLAIALGVYVHKVINASVLNMLAVSSLTRNHMLVPVSPEDKHLSSTFVPGRNIFFLTLAAIYAYQIEAEVIITGVCETDFSGYPDCRNNFIRALNQAINLGMARDIRFITPLMWLNKAETWALADYYKKLDLVRNETLTCYNGLKGEGCRRCSSCHLRSRGLETYQQQPQLIMSSLKAKTGLR

SEQ ID NO: 37067 - protein, 116 aa, unidentified
  source 1..116: note = Beckwithbacteria bacterium
  REGION 1..116: note = tr|A0A2H0B6X4|A0A2H0B6X4_9BACT 7-cyano-7-deazaguanine synthase (Fragment) OS=Candidatus Beckwithbacteria bacterium CG23_combo_of_CG06-09_8_20_14_all_34_8; OX = 1974497GN=COX08_01335 PE=3 SV=1
MALKGLKKSKILNWLANALECYTNLKVIRISLPWKGSSLIDKSYSLPQISSEKDIGGSIPSTYVPGRNLIFLAFAFSYAESVNASLILIGANSVDFSGYPDCRPQFYRLLNRLAQI

SEQ ID NO: 37068 - protein, 217 aa, unidentified
  source 1..217: note = Beckwithbacteria bacterium
  REGION 1..217: note = tr|A0A1J5BAH6|A0A1J5BAH6_9BACT 7-cyano-7-deazaguanine synthase OS=Candidatus Beckwithbacteria bacterium CG2_30_44_31 OX=1805035; GN = AUK18_01000 PE=3 SV=1
MKAINRKIAVCTVSGGLDSAVAFAILADKDYKLHFIFFDWGQKTLEKERKCAKALAKHYNVDLKIVEIPFLKSLPDVSLTAKETLTTEINEYVPNRNAILESQAVAYAESLKAGIICVGSTGGDHICPDNSPKFIKAMQALINQGTMLKPPIQIIAPLMDTDKIGAVKLGIKLKVPFELTWSCHNNTDKACGKCSNCLARLEAFKVNNISDPTKYQK

SEQ ID NO: 37069 - protein, 284 aa, unidentified
  source 1..284: note = Berkelbacteria bacterium
  REGION 1..284: note = tr|A0A2H0W622|A0A2H0W622_9BACT 7-cyano-7-deazaguanine synthase OS=Candidatus Berkelbacteria bacterium CG10_big_fil_rev_8_21_14_0_10_43_13 OX=1974514; GN = COT78_03180 P E=3 SV=1
MKRAVLKKKSKELILHSLTKKTKENIAIIKSIENFFIQMRGYVFKMPKPGTPVVVSLSGGADSVITTAILLEEYGLEVFPFFISRGQKAEKPELKSVKYFSKYFSKHYPNLYHKPVIMSVPNPASEIKHLLKESLIEGTGYPMRNSIIIEYGAQYAFGLGSEGVHVRNIFCSFVACDGDFGAQTSMTGLRSLMQHICIDMGDMTWQVTALPLEKEMGFYLDKDDLLRWAKSVDLPVENTRSCFGSQEKHCGVCYACKHRKISFEDARLEDKTKYLDTRASKDLP

SEQ ID NO: 37070 - protein, 583 aa, unidentified
  source 1..583: note = Berkiella aquae
  REGION 1..583: note = tr|A0A0Q9YYP1|A0A0Q9YYP1_9COXI 7-cyano-7-deazaguanine synthase OS=Candidatus Berkiella aquae OX=295108 GN=queC PE=4 SV=1
MKYHIIGDRTKHKLEINGQSIHLPFSNRSKLHTDLLMPAKHSPEGKIPPIVQDLIDVATMIYHADKLCKRGEREQWIRNFSLEIQLRCPKQFDKIKSKLIECLSILSSDNFKFSFLPGKFKQQPIFSPDKDINDWGTLTDISLLSGGQDSLVGASRLLANGRNPLFVHVFTRDKAPAGELKDRLKKHHKRNNIAYFNQVISSLATTQKEDNENFQVEPSQRLRSFYFLSIASALAYSHSVKNIYINENGIMAIHLPLDTARSSSFSTKTAHPAFLKLFEEIISELFEQQMHILNPFVLETKAEVIERSKKLKIEKLMGLTVSCAHSATIENSIKKNKHKRNILNPSAHNNHCGYCFPCILRKISMWAAGLELKDVRYCYDPFIAFVDAEADDYDFIYEAMSAILGLLRMTTKIESSTDEELLIEYPQLLDSASNLENVSAHALIKFHRKFAQEVNSFIVKKVPYLKFLLDHNASHTLSMRVNALLTEANLDDLIAVNQKRSVTDAFYENFFKMIERWRIHLQIALFEKTFSEASIKKMMKEIFQEVIPRNQPKITKNDLSPLREGIWKRLKSRDCPPFWEANK

SEQ ID NO: 37071 - protein, 223 aa, unidentified
  source 1..223: note = Brocadia sp.
  REGION 1..223: note = tr|A0A399WLS7|A0A399WLS7_9BACT 7-cyano-7-deazaguanine synthase OS=Candidatus Brocadia sp.; OX = 2172549 GN=queC PE=3 SV=1
MKDLAIVLVSGGMDSCVTAAIAHAQYQLALLHVNYGQRTESRELKAFHDIASYYNIPKDRILIANIDYLRKIGGSSLTDPRMNVQDAQSDIKEIPTSYVPFRNTHLLAIAVSWGEVIGARKVFIGAVEQDSPGYPDCRPIYYEAFNKLIRVGTRPTTCIEVETPLIHKGKSEIVKTGISLGAPLHLSWSCYKNTDKACGQCHSCFLRLKAFKEAGVKDPIPYV

SEQ ID NO: 37072 - protein, 237 aa, unidentified
  source 1..237: note = Brocadia sapporoensis
  REGION 1..237: note = tr|A0A1V6M0A1|A0A1V6M0A1_9BACT 7-cyano-7-deazaguanine synthase OS=Candidatus Brocadia sapporoensis OX=392547 GN=queC PE=3 SV=1
MKDLAIVLVSGGMDSCVTAAIAHTQYELALLHVNYGQRTESRELKAFHDIASFYNVPKEKILISNIDYLSKIGGSSLTDRSMSVPDAQANTEEIPTSYVPFRNTHLLAIAVSWGEVIGARKIFIGAVEQDSPGYPDCKPAYYEAINNLIKVGTKPTTSLEVETPLIHMKKSEIIKIGISLEAPLNLSWSCYQNTEKACGLCHSCFLRLKAFQEAGVKDPIPYDKPKPVIDNEGDSYG

SEQ ID NO: 37073 - protein, 224 aa, unidentified
  source 1..224: note = Brocadiaceae bacterium
  REGION 1..224: note = tr|A0A5C6D4C7|A0A5C6D4C7_9BACT 7-cyano-7-deazaguanine synthase OS=Candidatus Brocadiaceae bacterium S225 OX=2528033 GN=queC PE=3 SV=1
MIDKNLAVVLLSGGLDSCVTMAIAREKHNVALLHVGYAQRTQTREYNCFRSIARYYKVPETRTLALELDFLRKIGGSSLTDLNIPVDKGNTSRDIPTSYVPFRNTHLLSIAVSWAEVIKAESIYIGAVQQDSPDYPDCRAEYYEAFNRLVEVGTKPSTNIKVITPLLNMSKSEIVKKGIELAAPLQLTWSCYERNDKSCGYCQSCRIRLKAFEEAGFKDKIHYV

SEQ ID NO: 37074 - protein, 237 aa, unidentified
  source 1..237: note = Brocadiaceae bacterium
  REGION 1..237: note = tr|A0A5C6EYM1|A0A5C6EYM1_9BACT 7-cyano-7-deazaguanine synthase OS=Candidatus Brocadiaceae bacterium B188 OX=2528032 GN=queC PE=3 SV=1
MKDLAIVLVSGGMDSCVTAAIAHTQYELALLHVNYGQRTESRELKAFHDIASFYNVPKERILISNIDYLSKIGGSSLTDRSMSVPDAQVNTEEIPTSYVPFRNTHLLAIAVSWGEVIGARKIFIGAVEQDSPGYPDCKPAYYEAINNLIKVGTKPATSLEVETPLIHMKKSEIIKIGISLEAPLNLSWSCYQNTEKACGLCHSCFLRLKAFQEAGVKDPIPYDKPKPVIDNEGDSYG

SEQ ID NO: 37075 - protein, 288 aa, unidentified
  source 1..288: note = Buchananbacteria bacterium
  REGION 1..288: note = tr|A0A1G1XUS5|A0A1G1XUS5_9BACT 7-cyano-7-deazaguanine synthase OS=Candidatus Buchananbacteria bacterium RIFCSPHIGHO2_01_FULL_39_8; OX = 1797533 GN=A2731_02955 PE=3 SV=1
MVELIGVKHNKYRIENKENEDVKLLKILDDIFIEKRGYVVKLPPAGSSVVCCMSGGGDSVANIFILLNEFKYNVYPFFINRGQSAYGWEKNAVEHYDDIFSARFPWRYHRTLEIKVDTPAKEYKDDLREVKKVMADKEFSNHISYPARNSIIFLTGMEYAYSLRKNGAIANTLFSSHLASDSSFHCSQTWQRIMNLEMCHILHDWSFQFISLPIETAFGNYFDKDIFIKYCQENNFDLTQTRTCVKNTKTQCGTCPCCWDRRRSFLEAGIEDKTEYSAPYPEKPGAYY

SEQ ID NO: 37076 - protein, 510 aa, unidentified
  source 1..510: note = Buchananbacteria bacterium
  REGION 1..510: note = tr|A0A2H0VZT1|A0A2H0VZT1_9BACT GMP synthase [glutamine-hydrolyzing] OS=Candidatus Buchananbacteria bacterium CG10_big_fil_rev_8_21_14_0_10_42_9 OX=1974526; GN = guaA PE =3 SV=1
MIVILNFGGQYIHLIARRVREMGVYSEIVPHNISAQKLKSLKPEGIILSGGPASVYAKNAPQPNKAIFKLGIPMLGICYGHQLIARYNGAHVDPSALGRFGKIQMTVNNKSGLLKSLKGKEQVWFSNYDVVTAVPKTFKVTAKTTSCPVAVMESQSKKQYGLQFHPEVIHTPSGKKILENFVFGICHAKKSWETKYLPETLGKSVKKTVGQNNVLLAVSGGVDSTVVAALLHQALGSQLYCVHVDHGLMRKDEVSEIKRMFKHLKVKNFKVVDASNLFLQRLKNVSDPEQKRKIIGHTFIEVFEKEAKRLKRSAHISFLAQGTIYPDRIESGSTSKQAAKIKSHHNLTLPKRMQLKILEPIKDLYKDEVRALGLQLGLPKEFIYRHPFPGPGLAVRILGPVDKAKVKILQEADAIFIDELKKQKEYHKIAQAFAALFPVKAVGVMGDSRSYEYVISLRAVSTTDFMTADWYRMNGNLLSDVSNRIVNEVRGVNRVVYDITQKPPGTVEYE

SEQ ID NO: 37077 - protein, 244 aa, unidentified
  source 1..244: note = Burkholderia pumila
  REGION 1..244: note = tr|A0A0J7JHE7|A0A0J7JHE7_9BURK 7-cyano-7-deazaguanine synthase OS=Candidatus Burkholderia pumila OX=1090375 GN=queC PE=3 SV=1
MTRLDAKDSALALFSGGQDSATCLAWALERYQTVETLGFDYGQRHRVELECREGFRAAVAREFPHWTERLGEDHMIDLSVLGAISDTAMTREIEIEATANGLPNTFVPGRNLLFMTIAAAVAYRRGLKVLVGGMCETDFSGYPDCRDDTMKALQVALNLGMETRYALETPLMWLDKADTWRLAETLGGDTLVDMIRVETHTCYVGERAELHEWGFGCGQCPACKLRKRGYEAYRAGEQVDVAPV

SEQ ID NO: 37078 - protein, 445 aa, unidentified
  source 1..445: note = Burkholderia verschuerenii
  REGION 1..445: note = tr|A0A0L0MG01|A0A0L0MG01_9BURK Uncharacterized protein OS=Candidatus Burkholderia verschuerenii OX=242163; GN = BVER_04092 PE=4 SV=1
MGELPAMIEIDVRPEAADLPPPNDRRIPVQLYGASAAKDMGAIGGSVIDRVSRIAAPLDHAAFDFLSLSLSLAVAAADTFADRSEAADGWAREINLVVALADPERWRPAQSLLEKALRFLSGDQWSLRFVEGGRPLPAPRTRVSNKLVLADCRSACLFWGGLDSAIGMLDLRAEGERSVLISHAYTHDAGRQAEILNRAGGATPRLALHANPTKRLDHNNDVRMRTRSFNFFAMGALVAATLSKNYLQGKAVPLYVPENGLIAINSPLTNRRIGALSTRTTHPHYMLLIQQVFDAVGLPVRLHNPYATLTKGEMIAECADQGALRSFVSRTVSCGKWKRSGIQCGRCVPCLIRRASLYHAGWEDQTEYKASSKNLREVLKAGNDSDDLMAMILAARRMDSRDVSSWIAKTGPLPKDAAEQKALADVVSRGMAEVAQYLRSEQLPA

SEQ ID NO: 37079 - protein, 226 aa, unidentified
  source 1..226: note = Cloacimonas sp.
  REGION 1..226: note = tr|A0A1W9QP15|A0A1W9QP15_9BACT 7-cyano-7-deazaguanine synthase OS=Candidatus Cloacimonas sp. 4484_275 OX=1970770 GN=queC PE=3 SV=1
MKAIVLVSGGMDSLVTAAIAASENEEIYFLHLNYGQKTEKKELELFRKIVDYFQPKDTLIADVSYLKQIGGSSLTDENIDVKNYDGSEGIPNSYVPFRNAHLLTIATSWAEVIGADRIYIGAVEEDSSGYPDCRENFYRNFQKAIDSGTKDETKIKIVTPVIHKTKAEIIQIGKKLNVPFELSWSCYKNNEVACGVCDSCVLRINAFKKAGEIDPIPYEIKIDWKN

SEQ ID NO: 37080 - protein, 121 aa, unidentified
  source 1..121: note = Cloacimonas sp.
  REGION 1..121: note = tr|A0A3D3EZB3|A0A3D3EZB3_9BACT 7-cyano-7-deazaguanine synthase (Fragment) OS=Candidatus Cloacimonas sp. OX=2053534 GN=DHW79_07455 PE=3 SV=1
MTRAIVLLSGGMDSLVTAAIAARECDELYLLHFSYGQRTESKEKWCFRQIASHYKSREARVVDYRWLAEIGGSALTDKDMSLSEDNGVPNTYVPFRNATMLCAAIAWAEVIEADSIYIGAV

SEQ ID NO: 37081 - protein, 224 aa, unidentified
  source 1..224: note = Cloacimonetes bacterium
  REGION 1..224: note = tr|A0A2N2KYF0|A0A2N2KYF0_9BACT 7-cyano-7-deazaguanine synthase OS=Candidatus Cloacimonetes bacterium HGW-Cloacimonetes-2 OX=2013734; GN = queC PE=3 SV=1
MRRAVVLVSGGMDSLVAAAIAVKECEEVNFLHIDYGQTTMSKEAECFEAMCVHYMPKRSKTIKMMWLSEIGGSALTDESMQIEDHSELNEIPNTYVPFRNANLIGAAVSWAEVINASRVYIGAVEEDSSGYPDCREDFFRALQLAIGKGTKTPNPIMISTPVLHMSKAQIVKKGLELGAPFQHSWSCYRDNQIACGTCDSCYLRLKAFREAGIHDPIPYKNQGI

SEQ ID NO: 37082 - protein, 226 aa, unidentified
  source 1..226: note = Cloacimonetes bacterium
  REGION 1..226: note = tr|A0A523XJ82|A0A523XJ82_9BACT 7-cyano-7-deazaguanine synthase OS=Candidatus Cloacimonetes bacterium OX=2030808 GN=queC PE=3 SV=1
MNKGIAVVLVSGGMDSAVVCAIAKNKYNLALLHINYGQRTEERELKAFNSLADFYTSKKRLVVDFDHLKKIGGTSLIGQDIEIPGGLSKEGAPSTYVPFRNAQFLCVAVSWAEVIGATTVISGATEEDAAGYPDCRKEFYAIFSRLVEAGTKKETKIEIVTPLISLKKKDIIRLGVELGVPFELTWSCYRNNEKACGRCDSCLRRLRAFKEAGVEDRIEYELQTQD

SEQ ID NO: 37083 - protein, 251 aa, unidentified
  source 1..251: note = Coatesbacteria bacterium
  REGION 1..251: note = tr|A0A1W9S0T4|A0A1W9S0T4_9BACT 7-cyano-7-deazaguanine synthase OS=Candidatus Coatesbacteria bacterium 4484_99 OX=1970774 GN=B6D57_04040; PE = 3 SV=1
MRILPTRYQIYREGRRRSVLSRSGRRMRTVQNTDHRCVALLSGGLDSALATLLAVEEYEQVLALTFDYGQKPARMEIEASGEIARYLSIERQVIKLDIYRDFAEMAHLPLISGVTSDEDISYWMPNRNGVMIEVASAIAEGVGASYVVVGFNTDEAQSFPDNTTEYLDALNHALEYSTQGRVKVISPTVNMTKSEILDMLHQSGFPIKHIYPCYTGEELLCGECPSCRKFISALKKVGIYDRFSWRFADAT

SEQ ID NO: 37084 - protein, 222 aa, unidentified
  source 1..222: note = Coatesbacteria bacterium
  REGION 1..222: note = tr|A0A1F5FF46|A0A1F5FF46_9BACT 7-cyano-7-deazaguanine synthase OS=Candidatus Coatesbacteria bacterium RBG_13_66_14 OX=1817816; GN = A2Y64_03775 PE=3 SV=1
MSGKSLVLLSGGLDSYGAAAELWAGGLLGAALWVDYGQRAAGGERVAAESQAGGLGVHLHTATTDIYRGLPRVGALIAGELEDDAGVERLWVPARNAVLFSLGAAVAESLGIATVAMGLNADEAVDFPDNSPSFLAAADRFLFLATAGRVQAVSPTVQRSKADIVARLLDLGLPLDRIYSCYRPPDARGRMCGRCPSCRRLKEALAANSGARGVDIPDGFAP

SEQ ID NO: 37085 - protein, 285 aa, unidentified
  source 1..285: note = Collierbacteria bacterium
  REGION 1..285: note = tr|A0A0G1JYK1|A0A0G1JYK1_9BACT 7-cyano-7-deazaguanine synthase OS=Candidatus Collierbacteria bacterium GW2011_GWC2_44_18 OX=1618392; GN = UW41_C0014G0026 PE=3 SV=1
MKLPIKSEETILEEISNHPKENPLAINILEKALKEFRGYVFKMPDPGTPVVSGMSGGADTTTTIAILLEEFGLEVYPFFVNRGQRSYQQEKQSVEYFSNIFKLKYPKLFHDPIEIKVPIPANEIKKDLTEKLRHDVGHPMRNSILTEYGVQYAFSLANHDKHVRNIFCSVVSSDGNYLYHSTLTAMRSLMFHIAVDMGDPSWQVTSLPVEKEMGFYFDKDTLVKWASKHDLPLEKTRTCVELSEKHCGVCDCCYDRKRSFEVAGVKDKTEYIDIRPSSQIRANNN

SEQ ID NO: 37086 - protein, 258 aa, unidentified
  source 1..258: note = Collierbacteria bacterium
  REGION 1..258: note = tr|A0A3D5S9K6|A0A3D5S9K6_9BACT 7-cyano-7-deazaguanine synthase OS=Candidatus Collierbacteria bacterium OX=2053540 GN=DHT69_02900 PE=3; SV = 1
MTPSEKVLKDNRGYVSQYPKNKKVVMIVSGGLDSIATSARLMEEFDLEIFPLHIHRGQTNTNAENNAVNFFTDYFQNRYGKNKFHTPQMISVNVPPVEFKKDLLPYTKVKGHPMRDPIMHLLGVEYAVAVSQASDEPVKTIYCAIVPEDYFPHSSLDGLRANTVNTCINMGDWDWQISSPNIDPFLSTPFGKKEEIAWCMERQISIGKTISCNEASEKTNHLACGLCKSCFRRHTAFTNLGFEDPTEYYEKPHFEQFI

SEQ ID NO: 37087 - protein, 228 aa, unidentified
  source 1..228: note = Competibacteraceae bacterium
  REGION 1..228: note = tr|A0A433I307|A0A433I307_9GAMM 7-cyano-7-deazaguanine synthase OS=Candidatus Competibacteraceae bacterium OX=2053538 GN=queC PE=3 SV=1
MMSTALVVLSGGQDSTTCLYWALARFGAGQVSAVTFDYGQRHRIELDCAARVAAHAAVPHTVLPIDTFAALGGNALTDTGVAVQAGVDAHTQLPNTFVPGRNLIFLTFAAALAYQRDIHHLVTGVAQTDYSGYPDCRQTTLQALEQALRLGMEYELTLHTPLMFKSKAETVLIARDLGALPALADTHTCYQGQQPPCGTCPACLLRAKGFAEAGIADPLAERFRATQR

SEQ ID NO: 37088 - protein, 227 aa, unidentified
  source 1..227: note = Competibacteraceae bacterium
  REGION 1..227: note = tr|A0A433ILA1|A0A433ILA1_9GAMM 7-cyano-7-deazaguanine synthase OS=Candidatus Competibacteraceae bacterium OX=2053538 GN=queC PE=3 SV=1
MTRALVVLSGGQDSTTCLYWALHRFGAGQVEALSFDYGQRHRIELDCARTIAARAAVPYAVLPINTFAALGGNALTDPGIAVQGAAENSTALPNTFVPGRNLIFLTFAAAYAYPRGIRHLVTGVAQTDYSGYPDCRQGTISALEQAISLGMDCDFTLHTPLMHKSKADTVRMARELGALEALADSHTCYHGQRPPCGSCPACVLRARGFAEAGIADPLLERFRADPP

SEQ ID NO: 37089 - protein, 229 aa, unidentified
  source 1..229: note = Contendobacter odensis
  REGION 1..229: note = tr|A0A2G6PFL3|A0A2G6PFL3_9GAMM 7-cyano-7-deazaguanine synthase OS=Candidatus Contendobacter odensis OX=1400860 GN=queC PE=3 SV=1
MNIIVVCSGGLDSVVLAHKVAREHQLIQLVSFNYGQRHKKELEYAKSCAAHLNTRHSVIDISSIGAMLCGSALTDDVKVPDGHYAEESMKITVVPNRNAIMLAITFGIACICKANAVATAVHGGDHFIYPDCRPEFIKAFEVMQRHSLEGLAAIRLYTPFMALSKSEIVTEGAKLGINFSDTWSCYKGGAYHCGRCATCIERLGAFAQASVDDPTVYEDREYWKTVSHV

SEQ ID NO: 37090 - protein, 634 aa, unidentified
  source 1..634: note = Cryosericum hinesii
  REGION 1..634: note = tr|A0A398DID9|A0A398DID9_9BACT Asparagine synthetase B family protein OS=Candidatus Cryosericum hinesii; OX = 2290915 GN=SMC3_08080 PE=4 SV=1
MFLLMPATSVYFEWLSAQRIYSPFRLTRHGHTGEILRSSLGGACVPCRDWGGELNMAPLFVNTPSDGRPRCVELMASPSVVLLCSTRWEVQNGVAVRGQGVADGKRIGALELAKLVESVPPRAVGSLMGKLAGSFAVLDAREPGVVRLVSDMVSSMPVYYTLDGSRLTVSDDSVALAQETGCLSEIDSQASLAMLLAGFTLGTSTICRRVHCLQAAECVVLTCKGSYWASTQDDLFSWEWRPDGGHTDDYWFSAWSEVLNDEFEDIITELDGRTAVIPLSGGHDSTLILLMLKRLGYEKVVAFSYGRRGNQDSTVSERVAAALRVPWFFVEYGTETWRQFLSSRDYNNYATWAGGLRSIAHVGDFVAVRELASGGRIDAGSVLIPGHTMDLVSGGHIPLQWQERLMTGSGSVTADDIAQITFERHMGLWNRRFAIATLHQTGLQVAEANDLFEQLQEELCPAGGVVDVVEACSVVDAFDWRNRQGKFIANSVRVYDWFGFDWLLPYWDRRIIDFWLRVPPELRLNRRLQKNVTFQIGADLGIDLHQLGLPSVASLARNMSGLRLRQIGRVVPGVRLILDVERKRRCIARDPLGAFEGWPDARERRLLWQNSPSPTINSLASLHASRLLQNGGKA

SEQ ID NO: 37091 - protein, 227 aa, unidentified
  source 1..227: note = Dactylopiibacterium carminicum
  REGION 1..227: note = tr|A0A272EWD7|A0A272EWD7_9RHOO 7-cyano-7-deazaguanine synthase OS=Candidatus Dactylopiibacterium carminicum OX=857335 GN=queC PE=3 SV=1
MSAPRAVVLLSGGLDSTTCLAIARDQGFETYALSVAYGQRHAAELQAAQRVVAALGAREHRVAHVDLGQFGGSALTDASIAVPVDGLQTGIPVTYVPARNTVMLSVALGWAEVLGANDIFVGVNAVDYSGYPDCRPAFIQAFETMANLATKVGVEGNRLRIHAPLIDLTKAQIVQLGNSLGVDYGLTVSCYQADDDGRACGKCDACRLRSAGFDAAGLVDPTRYIKA

SEQ ID NO: 37092 - protein, 347 aa, unidentified
  source 1..347: note = Dadabacteria bacterium
  REGION 1..347: note = tr|A0A3M0ZHA9|A0A3M0ZHA9_9BACT Uncharacterized protein OS=Candidatus Dadabacteria bacterium OX=2080303; GN = D6815_06125 PE=4 SV=1
MNYCRLCTLPDTYPGVAFEDGVCALCLRESDSEQAELRQQEQLARAREQMLAAYKDARGQSWFDCIVCYSGGKDSTYVLRQIVEEHRLRPLAITIDNGFISPVALENIDRVVAHLGIEHHRIRVDRTFLSDLVSASLFEDLSYGNEYKRMSAVCSSCIALVNATALRYAVQYEAPLIIAGFTAGQVPAAVYSNDRTMLADGRTQRLTRLEASIGPAARAYFSVDEERLRAMSPYPVHVNPLMCESYREEHVLESIRSLGWRMPQDTGKCSSNCGLNCLGINAHVRRYGFNPYAREISELVRRGAISYARGMEMMRDTDYSEGVRACLRELGISEQAFEAAYEQDRKA

SEQ ID NO: 37093 - protein, 179 aa, unidentified
  source 1..179: note = Dadabacteria bacterium
  REGION 1..179: note = tr|A0A523I574|A0A523I574_9BACT 7-cyano-7-deazaguanine synthase (Fragment) OS=Candidatus Dadabacteria bacterium OX=2080303 GN=queC PE=3 SV=1
MSLKAVIIASGGIDSSTLLYKMVNEGFEVYALTFIYGQRHLKEINSANRISESLNIAHKVVNISAMKELLLGSALTDSNVEVPEVPETAEHFETLKVTIVPNRNAIFLSIAIGYAVSIGANHVFFGAHFSDRGVYPDCRKEFVEAFQNSERLATDNDKLVIDAPFVDIEKSEIIKLGVE

SEQ ID NO: 37094 - protein, 230 aa, unidentified
  source 1..230: note = Daviesbacteria bacterium
  REGION 1..230: note = tr|A0A1F5MGH4|A0A1F5MGH4_9BACT 7-cyano-7-deazaguanine synthase OS=Candidatus Daviesbacteria bacterium RIFCSPLOWO2_02_FULL_36_7; OX = 1797792 GN=A3I48_03175 PE=3 SV=1
MSTEIKTKLNKELLRGLQRQPSGKAVLLYSAGIDSTAAGLLLKQDGYQVWPLFIKYGQSAEAAEEYLVRTAPKTLGFEPTRTIETDLLKQLTRSRLLGQQSIGDSDAWVPGRNTLFMVLAGIYAKQIDADGISIGYMLDDNFVFGDNDFFHHQAIEGVLSRSFLQPTRVLLPTMASHKKDLIRLLYEKGALDLTVSCWNANMAGERIISCSICANCIERNKYINKVRGKK

SEQ ID NO: 37095 - protein, 239 aa, unidentified
  source 1..239: note = Daviesbacteria bacterium
  REGION 1..239: note = tr|A0A0G0ZD93|A0A0G0ZD93_9BACT 7-cyano-7-deazaguanine synthase OS=Candidatus Daviesbacteria bacterium GW2011_GWB1_41_5 OX=1618429; GN = queC PE=3 SV=1
MRKAVVVYSGGMDSSTLLAYVVSQVYKVYAISFNYGQRHKKELDYAKKFAKQFANVVEHKIIDIGVINELVQGSSLTTPAIAVPDGHYALETMKKTVVPNRNAIMLSLACGYAVSLCADRLFVGVHSGDHFIYPDCRPEFIEAIDKAFRLGNQGFASEDFRIVAPFMYSTKADIAKLGKQLGVDYSKTWSCYKGGDIHCGRCGTCFERREAFVLAGVSDPTKYKDNRQLDVIQKETETK

SEQ ID NO: 37096 - protein, 213 aa, unidentified
  source 1..213: note = Deianiraea vastatrix
  REGION 1..213: note = tr|A0A5B8XEG9|A0A5B8XEG9_9RICK 7-cyano-7-deazaguanine synthase OS=Candidatus Deianiraea vastatrix OX=2163644 GN=queC PE=3 SV=1
MKKCVLLLSGGLDSVTTLALVNSQKYDVYAISFLYGQKHSIELEYAKHNAEVFKVKHKIFDMRSAFSDFNSSLLGVGEISKTGVIDDGIPNTYVPARNIIFLSIALGYAESINAKEIFIGANAIDYSGYPDCRPEFIESFQKMANIGTTFSNGELKIQTPLIAMKKSEIIKLGLSLGVDYSKTISCYSPENGKECGKCDSCIIRKKGFEEAEN

SEQ ID NO: 37097 - protein, 224 aa, unidentified
  source 1..224: note = Delongbacteria bacterium
  REGION 1..224: note = tr|A0A348NWU5|A0A348NWU5_9BACT 7-cyano-7-deazaguanine synthase OS=Candidatus Delongbacteria bacterium OX=2044594 GN=queC PE=3 SV=1
MKKAVVLLSGGLDSTTCLAIAKNQGFEIHALSFDYGQKHACELKYARFNARKFKAEEHRIVKLDRKFFLNSALTDKNIEVKKGSYSEKEIPLTYVPARNTVFLSYALAYVETIKAEHIFIGVNSIDYSGYPDCRPEFISAYEKMANLALKEVVEKKMKIIIETPLMFLTKSEIIIIGKKLGIDYSKTISCYDPVDGKACGHCDSCLLRKRGFEGSGYKDETVYV

SEQ ID NO: 37098 - protein, 227 aa, unidentified
  source 1..227: note = Delongbacteria bacterium
  REGION 1..227: note = tr|A0A2G6P4F1|A0A2G6P4F1_9BACT 7-cyano-7-deazaguanine synthase OS=Candidatus Delongbacteria bacterium OX=2044594 GN=queC PE=3 SV=1
MKEKAIVLLSGGLDSTTCLSIALNEGYEVYTLSFDYGQKHNYELDLAKLNSKNMGAVKHIVCKLDPAFFRNSALTNPSLEVPKNNDSDEIPITYVPARNTVFLSYALALAESINCFNIYIGVNSLDYSGYPDCRPEFIESFEKMANLGTAFGEKQNRKVNIKVPLISLTKGEIINIGKSLDVDYSKTITCYDPIDNKACGKCDSCKLRIKGFKESNYDDETIYFENQ

SEQ ID NO: 37099 - protein, 228 aa, unidentified; identical to SEQ ID NO: 36062
  source 1..228: note = Dependentiae bacterium
  REGION 1..228: note = tr|A0A1V5UBB7|A0A1V5UBB7_9BACT 7-cyano-7-deazaguanine synthase OS=Candidatus Dependentiae bacterium ADurb.Bin246 OX=1852839 GN=queC PE=3 SV=1

SEQ ID NO: 37100 - protein, 231 aa, unidentified
  source 1..231: note = Desantisbacteria bacterium
  REGION 1..231: note = tr|A0A1J5EKU5|A0A1J5EKU5_9BACT 7-cyano-7-deazaguanine synthase OS=Candidatus Desantisbacteria bacterium CG2_30_40_21 OX=1817895 GN=queC; PE = 3 SV=1
MKTSICLLSGGLDSIVAMTIAVQQTTVLLGVTFDYGQRAKKQEIDAASRVCEYLRIPHRKITIDWLGQTGSAILQHGRDVPAFSFEKSDPIQTAKAVWVPNRNGVFINIAASLAEEMGADVVVVGFNREEAETFPDNSLKFVQAINQSLLFSTLSKVQVLSFTQDMNKKEIVVLGKQLAAPFHLLWSCYLGGDKMCGRCESCQRCIRAFKSAGVFEVIRERFEDEYAPSLS

SEQ ID NO: 37101 - protein, 231 aa, unidentified; identical to SEQ ID NO: 37100
  source 1..231: note = Desantisbacteria bacterium
  REGION 1..231: note = tr|A0A2M7JBY2|A0A2M7JBY2_9BACT 7-cyano-7-deazaguanine synthase OS=Candidatus Desantisbacteria bacterium CG_4_8_14_3_um_filter_40_12; OX = 1974545 GN=queC PE=3 SV=1

SEQ ID NO: 37102 - protein, 223 aa, unidentified
  source 1..223: note = Desulfofervidus auxilii
  REGION 1..223: note = tr|A0A127AN00|A0A127AN00_9DELT 7-cyano-7-deazaguanine synthase OS=Candidatus Desulfofervidus auxilii OX=1621989 GN=queC PE=3 SV=1
MKTLAIVLVSGGLDSCVTAAIANQSYQLAFLHVNYGQRTEKRELKAFMDIADYYKVKHRLVTSLSFLKEIGGSSLTNFKMPIPQGLPKSKDIPSTYVPFRNTHFIAIAVSWGEVIKAEKIFIGAMEEDSSGYPDCREEYFSIYNQLITLGTRPETKIEIVTPIIHLKKAQVVKKGVELGAPLHLTWSCYQREDIACGRCESCQLRLKAFARAGIKDPIPYLNQ

SEQ ID NO: 37103 - protein, 330 aa, unidentified
  source 1..330: note = Desulfofervidus auxilii
  REGION 1..330: note = tr|A0A127AN75|A0A127AN75_9DELT FAD synthetase; OS = Candidatus Desulfofervidus auxilii OX=1621989; GN = HS1_000379 PE=4 SV=1
MKICKNCVLPETFPNIRFNEDGICNYCLEFKSKKNWQEEKQKYLNRFKTIVKEHKGKQPIDCLVAYSGGKDSTYTLYILKEQFNLRLLALTFDNGFISPKALKNMKKVTEVLDIDHIIIKPRFELLKKIFVASAKKTLYSKKALERASSICTSCIAFVKSLSLKTAIEKHIPFVAFGWSPGQAPLLSSVLKTNPLLIKSTQKVIEDALRKIVKDEIKPYFLESHHFKKPELFPYLTHPLAFLEYNEEAILEKIKQFGWERPDDTDPNSTNCLLNAFANKLHKEQFHFHPYALEIAGLVRTGIMSREEGLKRLNQPENLEIIKWVKKRLGL

SEQ ID NO: 37104 - protein, 215 aa, unidentified
  source 1..215: note = Desulforudis sp.
  REGION 1..215: note = tr|A0A3A6N5T4|A0A3A6N5T4_9FIRM 7-cyano-7-deazaguanine synthase OS=Candidatus Desulforudis sp. OX=2093368 GN=queC PE=3 SV=1
MKGIVLLSGGLDSSVCLAFAVREMEVALCLTADYGQIAAAREIEAARNLSAHYEVPHQVVDLPFIKEVSNTALFGETPLPKLPENALDDREVTKESARAVWVPNRNGVLINVAACFAEARDCQCVVAGFNREEGATFPDNSPGFVDAVNALLSYSTLNQVRLVSYTLHLDKTEIVDLGKRLGLPWNLIWSCYCGGDEPCGVCESCLRLRRALDNG

SEQ ID NO: 37105 - protein, 220 aa, unidentified
  source 1..220: note = Desulforudis audaxviator
  REGION 1..220: note = tr|A0A3S8S572|A0A3S8S572_9FIRM 7-cyano-7-deazaguanine synthase OS=Candidatus Desulforudis audaxviator OX=471827 GN=queC PE=3 SV=1
MKGIVLLSGGLDSAVCLAFGVRSLEVALCLTADYGQLAAGREIAAAAALSAHYGIRHQVVELPFLREIDCSALTGRLGLPEPEEMELDDPVRSAETARQVWVPNRNGLLVNVAACYAEALGCERIIAGFNREEAQHFPDNSPQFLDAVNHSLAYSTLSGIRVISYTQQLDKAEIVALGQRLGLPWSLVWSCYRGGDEACGVCESCRRLERAKRSAGGVRV

SEQ ID NO: 37106 - protein, 230 aa, unidentified
  source 1..230: note = Desulfosporosinus infrequens
  REGION 1..230: note = tr|A0A2U3LU07|A0A2U3LU07_9FIRM 7-cyano-7-deazaguanine synthase OS=Candidatus Desulfosporosinus infrequens OX=2043169 GN=queC PE=3 SV=1
MAGIVLLSGGLDSTLALALYLETDIINLALTFDYGQRANQNEVSAAQRIAKYYNIPHKVINLPFLEEQTHSALVNRSKNLPFVGLEELDNLEQTQQSAQQVWVPNRNGLFMNIAAVFAENLGEPTSLITGFNLEEAATFPDNSVEFIDAVNQSLSYSTQEKVTVVSPTSILTKTEIVKEGLRLNVPFKYIWSCYESTERICGQCESCQRLKRALLGNNAQELVDQLFGAP

SEQ ID NO: 37107 - protein, 235 aa, unidentified
  source 1..235: note = Dojkabacteria bacterium
  REGION 1..235: note = tr|A0A3M0YZE9|A0A3M0YZE9_9BACT 7-cyano-7-deazaguanine synthase OS=Candidatus Dojkabacteria bacterium OX=2099670 GN=D6810_00655 PE=3 SV=1
MVPKGELNMVKEVEIQKKLRIINRRSVVCTVSGGLDSAVASALMAKADFELHFIFFDWGQKTYKKELRCAQALARHFDATMKIVEVPLLKSLPGISLTQKETLTTAINEYVPNRNAILESQAVAYAEYLKAGAVCIGSTGGDHICPDNSPKFVDIMQLLVNEGTLLKPSIQIIAPLIHTDKVGVVKLGIKLGVPFEFTWSCHNNIDVACGHCSNCESRLEAFKLNGKKDPIRYAK

SEQ ID NO: 37108 - protein, 225 aa, unidentified
  source 1..225: note = Edwardsbacteria bacterium
  REGION 1..225: note = tr|A0A1F5RDM1|A0A1F5RDM1_9BACT 7-cyano-7-deazaguanine synthase OS=Candidatus Edwardsbacteria bacterium GWF2_54_11 OX=1817851 GN=queC; PE = 3 SV=1
MGLNKKAVILLSGGLDSATVLFWAIKKGYHPQALIFDYGQRHSREVASARALCKKTGVPFRVISIKLPWQGSSLLDKKTTLPRAGSVKNIGLKIPSTYVPGRNTLFLSYGLSFAEATGAGAVMIGANALDYSGYPDCRPDFIEAMSKVFKLGTKAGRQGRPIKIVAPLLKLTKSQIIKLGINLGVPYELTWSCYRGGKRPCGTCDSCLLRNKGFDEAGVEDPALN

SEQ ID NO: 37109 - protein, 225 aa, unidentified; identical to SEQ ID NO: 37108
  source 1..225: note = Edwardsbacteria bacterium
  REGION 1..225: note = tr|A0A3B9EAX0|A0A3B9EAX0_9BACT 7-cyano-7-deazaguanine synthase OS=Candidatus Edwardsbacteria bacterium OX=2053551 GN=queC PE=3 SV=1

SEQ ID NO: 37110 - protein, 231 aa, unidentified
  source 1..231: note = Eisenbacteria bacterium
  REGION 1..231: note = tr|A0A1F5RMW6|A0A1F5RMW6_9BACT 7-cyano-7-deazaguanine synthase OS=Candidatus Eisenbacteria bacterium RBG_16_71_46 OX=1817856 GN=queC; PE = 3 SV=1
MARAVVLLSGGLDSATCLAWARAQGFECVTLAVDYGQRHRVELAAAARVSRALGAREHRVVAVDLRAIGGSALTADIDVPRDRSDEAMRAGVPPTYVPARNTVFLALALSLAETLGATDLVAGMNAIDYSGYPDCRPEFVAAFETLAGLATRAGDEGARFRIHTPLMRLDKAGIIRLGASLGVDFGATHSCYDPAAGGAACGRCDACRLRIKGFREAGVADPTRYATLHRT

SEQ ID NO: 37111 - protein, 128 aa, unidentified
  source 1..128: note = Eisenbacteria bacterium
  REGION 1..128: note = tr|A0A538SK19|A0A538SK19_9BACT 7-cyano-7-deazaguanine synthase (Fragment) OS=Candidatus Eisenbacteria bacterium OX=2212470 GN=E6K73_05000 PE=3 SV=1
FLAIALGYAETLGARHLVAGMNAIDYSGYPDCRPEFLRAFESLARVGTRPGAEGLTLRIHAPLLELDKAGIIRLGLSLGVDYSLTHSCYDPAPAGEACGRCDACLLRLRGFREAGLSDPGRYATAHRP

SEQ ID NO: 37112 - protein, 270 aa, unidentified
  source 1..270: note = Electronema sp.
  REGION 1..270: note = tr|A0A521FZB7|A0A521FZB7_9DELT 7-cyano-7-deazaguanine synthase OS=Candidatus Electronema sp. GS OX=2005002 GN=queC PE=3 SV=1
MQSSGEYFHKERYDALIQLSMIGDKCVSDNIKPDCAENFSMKKAVVLLSGGLDSSTVLAIARSRGFQCHCLSFRYGQKQDIELERAAVIAKAMRAEQHLILRLDLGLIGGSALTSAIEVPKDRKAEEISAGIPVTYVPARNIIFLSQAVAWAEVLGAADIFLGINAVDYSGYPDCRPDFLRAFELAVNLGTKAGSTGSPFRLHAPLIELSKKEIIEVGMRLGVDYSLTHSCYDPVQGLACGHCDACILRLKGFAEAGMKDPVNYLQQAVK

SEQ ID NO: 37113 - protein, 249 aa, unidentified
  source 1..249: note = Electrothrix aarhusiensis
  REGION 1..249: note = tr|A0A3S3R0Y7|A0A3S3R0Y7_9DELT 7-cyano-7-deazaguanine synthase OS=Candidatus Electrothrix aarhusiensis OX=1859131 GN=queC PE=3 SV=1
MPRRTAGREERNKGEQGMNTKRKKAVILLSGGLDSTTVLAIARSRGFQCYCLSFRYGQKQDIELQRAAAIAQNMEAAEHLVLRLDLGAIGGSALTSNIAVPKDREVAEMEQEIPVTYVPARNIIFLSHALAWAEVIGATDIFLGINAVDYSGYPDCRPDFLKAFERAANLGTKEGSTGSPFTLHAPLIELSKKEIIEVGNQLGVDYSKTHSCYDPVDDLACGHCDACILRLRGFAEAGLKDPAPYVVQG

SEQ ID NO: 37114 - protein, 94 aa, unidentified
  source 1..94: note = Electrothrix marina
  REGION 1..94: note = tr|A0A444JDC4|A0A444JDC4_9DELT 7-cyano-7-deazaguanine synthase (Fragment) OS=Candidatus Electrothrix marina OX=1859130 GN=VU01_12176 PE=3 SV=1
CRPEFLKAFERAANLGTKEGSTGSPFTLHAPLIELSKKEIIEVGNQLGVDYSKTHSCYDPADDLACGHCDACILRLRGFAEAGLEDPAPYVAST

SEQ ID NO: 37115 - protein, 227 aa, unidentified
  source 1..227: note = Endobugula sertula
  REGION 1..227: note = tr|A0A1D2QLZ1|A0A1D2QLZ1_9GAMM 7-cyano-7-deazaguanine synthase OS=Candidatus Endobugula sertula OX=62101 GN=queC PE=3 SV=1
MALEKKKAVVLVSGGLDSTTVLAIAISQGYECHTLSFDYGQRHRAELVAADQVSQSMGAIEHKVMALDLKTIGGSALTDDTIDIPEEARDGIPVTYVPARNTIFLSIALGWAEVLGANDIFIGVNAVDYSGYPDCRPDYITAYEKMAKLATKASIEGDTLRIQTPLIDLSKAEIIQQGNALGVDYSQTMSCYQMYDQGLACGKCDSCRLRQQGFIEAGVTDPTKYMV

SEQ ID NO: 37116 - protein, 234 aa, unidentified
  source 1..234: note = Endolissoclinum sp.
  REGION 1..234: note = tr|A0A1Z9XYA5|A0A1Z9XYA5_9PROT 7-cyano-7-deazaguanine synthase OS=Candidatus Endolissoclinum sp. TMED26 OX=1986636 GN=queC PE=3 SV=1
MTERAIVLFSGGQDSATCLAWALDHFDHVETMAFDYGQNHRVELDVRLRFLEKLRAAFPAWASKLGDDHLIDMNLLAAISDTALTQDRAIEMTAAGLPNTFVPGRNLMFFTTAAAVAYRRDARHLVGGMCETDYSGYPDCRDDTLKALQVALTLGLDRRTTLHTPLMWINKAQTWSMAATLGGQTLINLIIEDSHTCYRGDRQNRHDWGYGCGDCPACELRKTGWDSYQDKVTT

SEQ ID NO: 37117 - protein, 106 aa, unidentified
  source 1..106: note = Endolissoclinum sp.
  REGION 1..106: note = tr|A0A1Z8VAV5|A0A1Z8VAV5_9PROT 7-cyano-7-deazaguanine synthase OS=Candidatus Endolissoclinum sp. TMED55 OX=1986641 GN=CBC15_10420 PE=3; SV = 1
MHVGDHFIYPDCRPEFVDAFREMQLLALDGVSRVDLYAPFVGSSKADIVSIGSELDVPFHETWSCYKGLEKHCGRCGTCVERLEAFHLAGIEDPTSYNDTEFWKTA

SEQ ID NO: 37118 - protein, 214 aa, unidentified
  source 1..214: note = Endomicrobium trichonymphae
  REGION 1..214: note = tr|A0A1E5IFU2|A0A1E5IFU2_9BACT 7-cyano-7-deazaguanine synthase OS=Candidatus Endomicrobium trichonymphae OX=1408204 GN=queC PE=3 SV=1
MKKRAVILFSSGLDSTTVLYYALFKGYKCTCLIFDYGQKHGKEILSAVKIAKSVKTEYSIIKINLPWSGDSLTGKNKEIPVHKHLPKTVPSTYVPGRNTIFLSYALSCAQSVNARSIFIGVNSVDFSNYPDCTPEFIKAYNNVLKALKTKIVVQSPLLNLNKAQIIKLGIKLNVPYKDTWTCYNGYEKPCMECDSCKLRAKGFKEAEINDPALA

SEQ ID NO: 37119 - protein, 228 aa, unidentified
  source 1..228: note = Enterovibrio escacola
  REGION 1..228: note = tr|A0A2A5T2K8|A0A2A5T2K8_9GAMM 7-cyano-7-deazaguanine synthase OS=Candidatus Enterovibrio escacola OX=1927127 GN=queC PE=3 SV=1
MGKAIVVFSGGQDSTTCLIQALSSFDEVHCITFDYNQRHLHEVDVARDIAKQLGATSHKVMDVGLLNELATSSLTRKNIPVSHKLKKNELPNSFVPGRNILFFTLASIYAYQLEANTVITGVCETDFSGYPDCRNDFINAMNRALVLGMDHPLEICTPLMWLNKAETWALADKFNKLEYVRDNTLTCYNDIIGKGCANCPACDLRQKGLNKYLQDKDVVMTELNNKSK

SEQ ID NO: 37120 - protein, 222 aa, unidentified
  source 1..222: note = Enterovibrio luxaltus
  REGION 1..222: note = tr|A0A291BBJ9|A0A291BBJ9_9GAMM 7-cyano-7-deazaguanine synthase OS=Candidatus Enterovibrio luxaltus OX=1927128 GN=queC PE=3 SV=1
MKKAVIAFSGGQDSTTCLVQALPEFDEVHCMTFDYGQRHKQEIKVAEAVVKELGATSHKIMNVSLLNELTSSSLTCDNIPVSHELQENGLPNSFVPGRNILFLTLTCIYAYQLGAETVITGLCEIDFSGYPDCRNDFVQAINKALVLGMDHQLEIRTPLMWLNKAETWALADKLNKFEYIRDNTLTCYHGVIGSGCGDCSACKLRQKGLNSYINKKCNNIMQ

SEQ ID NO: 37121 - protein, 264 aa, unidentified
  source 1..264: note = Entotheonella gemina
  REGION 1..264: note = tr|W4LT97|W4LT97_9BACT 7-cyano-7-deazaguanine synthase OS=Candidatus Entotheonella gemina OX=1429439; GN = ETSY2_37665 PE=3 SV=1
MDAGDKTAVICLSGGMDSTSLLMHLLVRGYNVFGLSFDYGQKHRLELERLAQNLIYLRHNGLEVTHETVDISILGRLYHSALTDTAWQIPEGHYEEDTMKATVVPNRNAIFSAIAYGYALSIANRLQTEAALALGVHSGDHAIYPDCRPEFYEAIFHAFRIGNWDAERVSLYLPYLHSDKYDILKDAQGAIRELNLDFATIFRNTNTSYEPDEQGRASGKTGADVERILAFDKLGVPDPIAYVAPWEVVVEQARALELEAKTQE

SEQ ID NO: 37122 - protein, 264 aa, unidentified
  source 1..264: note = Entotheonella factor
  REGION 1..264: note = tr|W4L663|W4L663_9BACT 7-cyano-7-deazaguanine synthase OS=Candidatus Entotheonella factor OX=1429438; GN = ETSY1_39580 PE=3 SV=1
MDAGDKTAVICLSGGMDSTSLLMHLLVRGYHVFGLSFDYGQKHRLELERLAQNLTYLRQNGFEVAHETVDISILGRLYHSALTDTAWQIPEGHYEEETMKATVVPNRNAIFSAIAYGYALSIANRLQTEVALALGVHSGDHAIYPDCRPEFYEAIYHAFQIGNWDAERVSLYLPYLHDDKYGILKDAQGAIRDLNLDFATIFRNTNTSYEPDEQGRASGKTGADVERILAFHKLGVPDPIDYIAPWEVVVEQAQALETEAKAQG

SEQ ID NO: 37123 - protein, 233 aa, unidentified
  source 1..233: note = Erwinia haradaeae
  REGION 1..233: note = tr|A0A451DAM2|A0A451DAM2_9GAMM 7-cyano-7-deazaguanine synthase OS=Candidatus Erwinia haradaeae OX=1922217 GN=queC PE=3 SV=1
MMQATVVVFSGGQDSTICLIQAIQEYEFVHCITFDYGQRHSYEIDIARDIVKKLGVHSHKIINLSMLNDLSASCLTRENIAVPASGALSDIRIPITFVPGRNILFLTLASIYAYQLQAKTVITGVCETDFSGYPDCRKEFIIAMNQAISLGMETTLILKTPLMRLTKAEIWALADMFGMLEFVIEETMTCYNGIKSYGCRSCNACHLRNRGLREYLSNKSIVQKTLYTKQNIL

SEQ ID NO: 37124 - protein, 232 aa, unidentified
  source 1..232: note = Erwinia dacicola
  REGION 1..232: note = tr|A0A1E7YYJ9|A0A1E7YYJ9_9GAMM 7-cyano-7-deazaguanine synthase OS=Candidatus Erwinia dacicola OX=252393 GN=queC PE=3 SV=1
MDSKKAVVVFSGGQDSTTCLVKALAEYDEVHCITFNYGQKHVSEIEIAQHIAKTLDITSHSIIDMSVLNALAVSSLTKSNIDVPKYTDQRNQEYPSTFVPGRNIVFLTLAAIYANQIQAQDVITGVCETDFSGYPDCRDKFVKALNNAVTLGLGSTVNFITPLMWLTKAETWALADDLGKLDFIISETLTCYNGEKSFGCGKCDACHLRNKGLNEYLTNKDEVRKRLHKKMA

SEQ ID NO: 37125 - protein, 386 aa, unidentified
  source 1..386: note = Falkowbacteria bacterium
  REGION 1..386: note = tr|A0A2H0V145|A0A2H0V145_9BACT 7-cyano-7-deazaguanine synthase OS=Candidatus Falkowbacteria bacterium CG10_big_fil_rev_8_21_14_0_10_43_10 OX=1974567; GN = COT99_04265 P E=3 SV=1
MDIGAIGKNEKKINFIADSGLVKMKQIYLLNNYSKLAILSILAGYEKCDYIYVNDRFSKKVEIKSLNNFISYTLNHNIAPKKFDIKISYNKNFNGAKNTLPLNKYDGILSFSGGIDSTAGLLYALSKKQKVLPMWINFRQRNNYAERKSALKILRKLKIKPVIISIDLSKFILKGWKDWSFIVPGRNFLFLSFANSLLQNSERQRGHIYLCAHKDEMGHKKNRDKSKYFFQRSSIFFSRDGTKKITAETPFANYSKAELLSLWKKKWEKKFGISPHETTTCYYENGCGRCEACLKRVIYLLAAGYTVDQKIKVNPMTDPSGLIINKWIPGIINGKMSRTNKLDFLIAVEKSLDIVPEKIRKFYSNLSGKTISNIKKRKKEIEYVKI

SEQ ID NO: 37126 - protein, 234 aa, unidentified
  source 1..234: note = Fermentibacteria bacterium
  REGION 1..234: note = tr|A0A496UJI5|A0A496UJI5_9BACT 7-cyano-7-deazaguanine synthase OS=Candidatus Fermentibacteria bacterium OX=2044591 GN=queC PE=3 SV=1
MDRKAVVLLSGGLDSATTLYIAGEEGFSTHAVSFRYGQQHTQELKSASEVARAAGAADHLIIPLDARLFKGSALTGPSAVPENRSPDEMASMIPPTYVPARNTVFLAMSLSYAEVIGARDIFIGVNAVDYSGYPDCRPEFIAAFGRLAELATKEAIEGRPARIHAPLLNMTKAQIIRRGLELGVDYSLTHSCYNPDTEGRSCGRCDACILRLSGFAENGMNDPVAYQPEMNNGL

SEQ ID NO: 37127 - protein, 222 aa, unidentified
  source 1..222: note = Fermentibacteria bacterium
  REGION 1..222: note = tr|A0A2G6LV68|A0A2G6LV68_9BACT 7-cyano-7-deazaguanine synthase OS=Candidatus Fermentibacteria bacterium OX=2044591 GN=queC PE=3 SV=1
MKAVVLLSGGLDSATVLAMASKDEYSVTALSFRYGQKHSIELDKAAATAAAWNVRDHVVLQLDPEPFRASSLTGEGEVQNGNIQRTEIPSTYVPARNTVFLSLALALAESREADAVFIGVNALDYSGYPDCRPAFIKAFRNLAAVATKSAVQGNPVRIEAPLLHMTKAEIIRAGLDLGVDYSLTLSCYRPDSQGRSCGTCDSCLLRLKGFRENGETDPATYV

SEQ ID NO: 37128 - protein, 233 aa, unidentified
  source 1..233: note = Filomicrobium marinum
  REGION 1..233: note = tr|A0A0D6JI46|A0A0D6JI46_9RHIZ 7-cyano-7-deazaguanine synthase OS=Candidatus Filomicrobium marinum OX=1608628 GN=queC PE=3 SV=1
MLDSALVLFSGGQDSTVCLASALDRFERVETVGFAYGQRHALELDARLRVRARISELNSRWGERLGDDHFLELPEFGKISDTALTRDREIEMTVAGLPSTFVPGRNLLFFTYAAAVAYRRGIEVLVGGMCETDYSGYPDCRAETLDALEKAISLGMGRTFKIDTPLMFIDKAATWVMTEELGGAPLVDLIINETHTCYLGIRGRLHEWGYGCGHCPACQLRQKGWEKWQAAKS

SEQ ID NO: 37129 - protein, 215 aa, unidentified
  source 1..215: note = Firestonebacteria bacterium
  REGION 1..215: note = tr|A0A1F5UUE8|A0A1F5UUE8_9BACT 7-cyano-7-deazaguanine synthase OS=Candidatus Firestonebacteria bacterium RIFOXYC2_FULL_39_67 OX=1817861; GN = queC PE=3 SV=1
MANKKAVILLSGGLDSTTTLYYAKAKGFKCFCLLFDYGQRHKKELKAAVKLAKMNKCIYIVVKIALPWSKSALTDRKVKVPVKNKQIGKDIPVTYVPARNTIFLGFAASYAESIGAKKIFIGANALDYSGYPDCRPNYIKAYEKAVNLGTKSGVSGNKLKIETPLINLTKAEIIKLGIKLKVPYELTWSCYNGGKKPCGVCDSCLLREKGFRKIK

SEQ ID NO: 37130 - protein, 216 aa, unidentified
  source 1..216: note = Firestonebacteria bacterium
  REGION 1..216: note = tr|A0A1F5UM06|A0A1F5UM06_9BACT 7-cyano-7-deazaguanine synthase OS=Candidatus Firestonebacteria bacterium GWA2_43_8 OX=1817858 GN=queC; PE = 3 SV=1
MANEKSVILLSGGLDSTTTLYYAKAKGYKCFCLLFDYGQRHKKELKAAVKLAKLSKCPYTVVKIALPWSKSALTDKKVKIPVKGKQIGKEIPVTYVPARNTIFLSFAASYAESIGAKRIFIGANALDYSGYPDCRPNYIKAYEKAVNLGTKSGVSGNKLKIETPLIALTKAQIIKLGTKLKVPYGLTWSCYKGGKKPCEVCDSCILRNKGFKEAVK

SEQ ID NO: 37131 - protein, 230 aa, unidentified
  source 1..230: note = Fischerbacteria bacterium
  REGION 1..230: note = tr|A0A1F5VR68|A0A1F5VR68_9BACT 7-cyano-7-deazaguanine synthase OS=Candidatus Fischerbacteria bacterium RBG_13_37_8 OX=1817863 GN=queC; PE = 3 SV=1
MEEKKAIILLSGGIDSATCLALAIEQHYEPFCLSVLYKQRHAVELEAAKRIAAFFNVKEHKILTLDLSAIGGSALTSSLEVPKDRIIEHSEEIPKTYVPARNTIFLALALAWAEVMEAGDIFIGTNAVDFSGYPDCRPGFIKKFEELANIATKAAVENKIHFRIHAPLVHLTKSAIITLAIKKGVNLSLTHSCYDPTVKGIACGRCDSCLLRLKGFKEAGLEDPAVYFEY

SEQ ID NO: 37132 - protein, 245 aa, unidentified
  source 1..245: note = Fokinia solitaria
  REGION 1..245: note = tr|A0A2U8BSL7|A0A2U8BSL7_9RICK 7-cyano-7-deazaguanine synthase OS=Candidatus Fokinia solitaria OX=1802984 GN=queC PE=3 SV=1
MNRGKAVVLLSGGLDSVTVAHYVKNELQFDICAITFLYGQMNAAEIEFAKFNAHKLDVFEHIFVTLDISHISYSSLIDSALPLPLDREVSDIERQNVPSTYVPARNMIFLSHAACYAETIKSYDIFIGVNSVDYSGYPDCRSGFITAFQNAINQGCNLYANGKKPLRVHAPLARYSKADIVKLGLKNGVDYSMTLSCYRPLVKESIEPRQLSVTNCGRCDACRLRDIGMTANNLQGGSRTVMIAL

SEQ ID NO: 37133 - protein, 222 aa, unidentified
  source 1..222: note = Frackibacter sp.
  REGION 1..222: note = tr|A0A1H7ZWB6|A0A1H7ZWB6_9FIRM 7-cyano-7-deazaguanine synthase OS=Candidatus Frackibacter sp. WG12 OX=2017977 GN=queC PE=3 SV=1
MTKRAIVLSSGGLDSTTCLSIALDEGYEVYPLTFLYGQKHSKEVEQAKLVRSELGIPEDNHLFARIDNIGHSALTSDEIEIPDGEGEGIPDTYVPARNILFLSYAVSLAEGIDAEVVYIGVSSIDYSGYPDCRPEFINAYQQVINVGTKAGVEGNPIEIKTPLIDKTKAETIEIGLKLDAPYYLTTTCYRGDEKACGSCPACEIRLKAFAKVGVEDPIEYEI

SEQ ID NO: 37134 - protein, 222 aa, unidentified
  source 1..222: note = Frackibacter sp.
  REGION 1..222: note = tr|A0A139CGT2|A0A139CGT2_9FIRM 7-cyano-7-deazaguanine synthase OS=Candidatus Frackibacter sp. T328-2 OX=1785949 GN=queC PE=3 SV=1
MTKRAIVLSSGGLDSTTCLSIALDEGYEVYPLTFLYGQKHSKEVEQAKLVRSELGIPEDNHLFARIDNIGHSALTSDEIEIPDGEGEGIPDTYVPARNILFLSYAVSLAEGIDAEVVYIGVSSIDYSGYPDCRPEFINAYQQVINVGTKAGVEGNPIEIKTPLIDKTKAETIEIGLKLDAPYYLTTTCYRGDEKACGSCPACEIRLKAFAKVGVEDPIEYKI

SEQ ID NO: 37135 - protein, 245 aa, unidentified
  source 1..245: note = Fukatsuia symbiotica
  REGION 1..245: note = tr|A0A2U8I941|A0A2U8I941_9GAMM 7-cyano-7-deazaguanine synthase OS=Candidatus Fukatsuia symbiotica OX=1878942 GN=queC PE=3 SV=1
MKRAVVVFSGGQDSTTCLIQAKREKKYDEIYCITFDYGQCHREEIEVAKKLARQFEVQGHKILDTTLLNELTTSSLMQDSISTPIHNRLNEKDGEENSEGGKPSLPSTFVPGRNILFLTLAAIYAYQVQANAVISGVCQTDFSGYPDCRDEFVKSLNGAIKLGINRDISFITPLMWLDKAETWALADYYQQLDTVRNSTLTCYNGTKSDGCGTCAACHLRSRGLNRYLADREKVMASLKKKTGLS

SEQ ID NO: 37136 - protein, 224 aa, unidentified
  source 1..224: note = Gallionella acididurans
  REGION 1..224: note = tr|A0A139BXP6|A0A139BXP6_9PROT 7-cyano-7-deazaguanine synthase OS=Candidatus Gallionella acididurans OX=1796491 GN=queC PE=3 SV=1
MKKAVVLLSGGMDSATVLAMAAAQGFDCHALSVDYGQRHHAELAAAQRVAQELGAREHRVVNIDLTGFGGSSLTDKKIAVSQQPTEGIPLTYVPARNTIMLALALAWAEVLQARDIFIGVNAVDYSGYPDCRPAYIEAFERMANLATKAAVEGHPLAVHAPLQHMSKAEIIRQGLALGVDFSHTVSCYQADESGRACGVCDACRLRHTGFVAAGIGDTTRYRVL

SEQ ID NO: 37137 - protein, 222 aa, unidentified
  source 1..222: note = Gastranaerophilales bacterium
  REGION 1..222: note = tr|A0A292RIG0|A0A292RIG0_9BACT 7-cyano-7-deazaguanine synthase OS=Candidatus Gastranaerophilales bacterium HUM_9 OX=1916320 GN=queC; PE = 3 SV=1
MNKSIVLLSGGLDSLVSLGLAKEEYNIELALTFDYGQKSLEKEVAASNEIAKYYGLKHEIIELEFLKNITHTSVVGDDEVPTDIYGTEESAKAVWVPNRNGLFLNIAASYADSYDYSHIIIGANKEEGQTFSDNTQEFIDGINESFKYSTMVGVKVVAPLINYDKNDIVKFALDNSIPLDMVMSCYNGDTGNKKHCGKCESCKHLLYALEYNKAYDLIERLF

SEQ ID NO: 37138 - protein, 224 aa, unidentified
  source 1..224: note = Gastranaerophilales bacterium
  REGION 1..224: note = tr|A0A292RVU2|A0A292RVU2_9BACT 7-cyano-7-deazaguanine synthase OS=Candidatus Gastranaerophilales bacterium HUM_11 OX=1916216 GN=queC; PE = 3 SV=1
MKKAVILLSGGLDSLVALGFPQSEYRIELALTFDYGQKSVQNEIDASQKICKYYNVEHKVIKLEWLKEITKTALVSAEEIPVANLGTKESAAAVWIPNRNGLFLNIAASFADSFGFDYILYGANKDEGTTFPDNTEEFRREISKVFKTSTLKKPCVLAPLINYTKNDIVRIAIENAMPLELVRSCYGGGEKHCGMCESCRHLKQALIANHGEKYIEILFGNYEN

SEQ ID NO: 37139 - protein, 250 aa, unidentified
  source 1..250: note = Glomeribacter gigasporarum
  REGION 1..250: note = tr|G2JAM2|G2JAM2_9BURK 7-cyano-7-deazaguanine synthase OS=Candidatus Glomeribacter gigasporarum BEG34; OX = 1070319 GN=queC PE=3 SV=1
MSEALHTKIIRTADHKRALVLFSGGQDSATCVVWALARCDYVETLGFDYGQRHRVELECREGFRAALTHQFPQWADKLGSDHMIDLSVLGAVSHTAMTREIQIKIQENGLPNTFVPGRNLMFMTIAAAIAYRRGLKVLVGGMCETDFSGYPDCRDDTIKALQVALNLGMDRRFLVETPLMWLDKAATWRLAESLGGAALVELIRVKTHTCYLGERAELHPWGFGCGACPACALRANGYDAFLKGKRAIET

SEQ ID NO: 37140 - protein, 223 aa, unidentified
  source 1..223: note = Goldbacteria bacterium
  REGION 1..223: note = tr|A0A2N1W5S2|A0A2N1W5S2_9BACT 7-cyano-7-deazaguanine synthase OS=Candidatus Goldbacteria bacterium HGW-Goldbacteria-1 OX=2013807 GN=queC PE=3 SV=1
MKKINSRCVVLLSGGQDSTTALFWAMKKFKNVMAVSFDYGQRHKIELKSAAKIAKLAGVKHTVIVVKEYEAIQNSALLDKTSSINKHDKINKKLPASFVPGRNILFLTAAAAYAYVNKAENIVIGVSQADYSGYPDCRGEFIRSMEKSLSLGMEYPVKIHTPLLNKNKMQTVLLAKELKVLDMMKYTHTCYEGNNKPCNKCPACRLRAKGFKEAGIADPLKHN

SEQ ID NO: 37141 - protein, 308 aa, unidentified
  source 1..308: note = Gottesmanbacteria bacterium
  REGION 1..308: note = tr|A0A1F5ZLP8|A0A1F5ZLP8_9BACT 7-cyano-7-deazaguanine synthase OS=Candidatus Gottesmanbacteria bacterium RIFCSPHIGHO2_02_FULL_39_11; OX = 1798382 GN=A3D77_05320 PE=3 SV =1
MTSNIIAKYMHPKKNIGKQSLEDLHLLKKIESIFKEKRGYIFRMPKPGSKVISLLSGGLDTTIVTSLLLDKYKLEVYPVHFLRPYPAANPQSVLRSASYFCNLFKRKYKTLCHDLIILPLQFPAKNIERSILNEGQVIINNKTGQRRGIPFQPSSFIHEIINYSYTLKTEEQRGIKTIFAATLASNVNWYAYESLTSYRALMLAVCIMLNDFSWQITSFPIEKEMGWYMDKHDLIQMGSYLNLPLEKTFTCQKDYRYQCGKCIVCLLRRVAFKKANLPDKTVYETNRTDVIGKIKRKNSLLKDILRKM

SEQ ID NO: 37142 - protein, 185 aa, unidentified
  source 1..185: note = Gottesmanbacteria bacterium
  REGION 1..185: note = tr|A0A2H0NIY2|A0A2H0NIY2_9BACT 7-cyano-7-deazaguanine synthase (Fragment) OS=Candidatus Gottesmanbacteria bacterium CG11_big_fil_rev_8_21_14_0_20_37_11 OX=1974575 GN =COV53_04470 PE=3 SV=1
LHFIFFDWGQKTLEKERKCAKALAKHYNVDLKIVEIPFLKSLPDVSLTAKETLTTEINEYVPNRNAILESQAVAYAESLKAGIICVGSTGGDHICPDNSPKFIKAMQALINQGTMLKPPIQIIAPLMDTDKIGAVKLGIKLKVPFELTWSCHNNTDKACGKCSNCLARLEAFKVNNISDPTKYQK

SEQ ID NO: 37143 - protein, 231 aa, unidentified
  source 1..231: note = Gullanella endobia
  REGION 1..231: note = tr|A0A143WSI9|A0A143WSI9_9ENTR 7-cyano-7-deazaguanine synthase OS=Candidatus Gullanella endobia OX=1070130 GN=queC PE=3 SV=1
MKRAVVVFSGGQDSTTCLIQALSQYDEVYCITFDYGQRHREEINFARKLAIQFGVCAHKIIDARLLNTLTLSSLTHDNIHVPDYENRKNCFPSTFVPGRNILFLTLSAIYAYQIKASVVITGVCETDFSGYPDCRNDFIKALNIAVNLGMANELNFVTPLMWLDKAEIWALADYYHQLDRVCYCTLTCYNGIKGDGCGQCTACHLRSKGLANYWAKPHAVMVSMRTKIGLY

SEQ ID NO: 37144 - protein, 230 aa, unidentified
  source 1..230: note = Hamiltonella defensa
  REGION 1..230: note = tr|A0A249E1S1|A0A249E1S1_9ENTR 7-cyano-7-deazaguanine synthase OS=Candidatus Hamiltonella defensa (Bemisia tabaci) OX=672795 GN=queC PE=3 SV=1
MKRAVLVFSGGQDSTTCLIQALHQYDEVHCITFDYGQRHRSEIAIAQALAKKLKTTSHKILDLQLLNELAVSSLTRENIPLPKKQHSEGSLPNTFVPGRNIVFLTFSAIYAYQLDADVVITGVCETDFSGYPDCRDEFVKSLNHAVTLGMQKNITFVTPLMWLNKAETWALADYYQQMPLIRNQTLTCYNGIQGDGCSECLSCELRLKGLKYYLAHKEEVTENLKLKSQL

SEQ ID NO: 37145 - protein, 236 aa, unidentified
  source 1..236: note = Hamiltonella defensa
  REGION 1..236: note = tr|A0A2D3TE07|A0A2D3TE07_9ENTR 7-cyano-7-deazaguanine synthase OS=Candidatus Hamiltonella defensa OX=138072 GN=queC PE=3 SV=1
MRKNNPIKRAVLVFSGGQDSTTCLIQALHQYDEVHCITFDYGQRHRSEIAIAQALAKKLQATSYKILDLQLLNELTVSSLTRENIPLPKKQNSEGSLPNTFVPGRNIVFLTFSAIYAYQLDADVVITGVCETDFSGYPDCRDEFVKSLNHAVTLGMQKNITFVTPLMWLNKAETWALADYYQQMPLIRNKTLTCYNGIQGDGCGECLSCELRLKGLKYYLAHKEEVTENLKLKSQL

SEQ ID NO: 37146 - protein, 386 aa, unidentified
  source 1..386: note = Hydrogenedentes bacterium
  REGION 1..386: note = tr|A0A1V5Z0L8|A0A1V5Z0L8_9BACT Uncharacterized protein OS=Candidatus Hydrogenedentes bacterium ADurb.Bin170 OX=1852848 GN=BWY07_00722 PE=4 SV=1
MTTSASEVKEPVRCNRCIMDETVGGIRFDKDGVCNYCHMHDSMDKLFPIGKAGEKILKDIAVSIRKSGKGKPYDCVVGFSGGRDTSYCLHYAKEVLGLKPLAVHFDNGWTSEKARSNMENICAKLGVDLHIVTMDWDDSRELTNANIRACVPYVDLTNDIGIAYTLYSTAAKNDIKYILLSHSFREEGVAPLLWNYMDARYTRAIIKRFAKTKINHFKNADIHHFLYWLFIKRIKVVNVTNYYNDMGRQIENTLIERYGWQEPDGHHMDNELFILIYNYAWRKFGIDWRVVDVAAQVRTGILTREEGLAIMASPPYFDNEEFVSQSLEKQQMSREEFEAIIAAPNKYFLDYPNYYSWVKLFKWPFKLLCRMHILPIHAYEKYFEAI

SEQ ID NO: 37147 - protein, 223 aa, unidentified
  source 1..223: note = Hydrogenedentes bacterium
  REGION 1..223: note = tr|A0A1V6EKC4|A0A1V6EKC4_9BACT 7-cyano-7-deazaguanine synthase OS=Candidatus Hydrogenedentes bacterium ADurb.Bin101 OX=1852847 GN=queC; PE = 3 SV=1
MQKAVVLVSGGIDSTVLLFSLPRQDYALHALAFRYGQRHQRELECAQRQCDTAGVQNVKCVSMPFLGELLQEGSTLMETGGPVPDLDDIPQALRDQPPTYVPHRNMLFLSIAAAYAESIGAARVFYGAQAQDEYGYWDCTPVFLERINALLSLNRRRAVTVEAPLLRNSKADNVKLGLALGVDFSMTWSCYRGEMLACGRCPTCVERLNAFKQAGLPDPLPYQ

SEQ ID NO: 37148 - protein, 223 aa, unidentified
  source 1..223: note = Jettenia caeni
  REGION 1..223: note = tr|I3INJ3|I3INJ3_9BACT 7-cyano-7-deazaguanine synthase OS=Candidatus Jettenia caeni OX=247490 GN=queC; PE = 3 SV=1
MKDLAIVLVSGGMDSCVTSAIADTQYELAFLHVNYGQRTEARELKAFREIALYYRIPDERILISDIDYLRKIGGSSLTDHRMNIQEAQLHNKEIPTSYVPFRNTIFLTIAVSWGEVIGARKIFIGAVEQDSPGYPDCKPVYYEIFNKLIKAGTKPTTFLEVETPLIGKSKSEIVTKGLSLMAPLHLSWSCYKNTDKACGLCHSCFLRLKAFKEAHAVDPIPYV

SEQ ID NO: 37149 - protein, 223 aa, unidentified
  source 1..223: note = Jettenia ecosi
  REGION 1..223: note = tr|A0A533QA21|A0A533QA21_9BACT 7-cyano-7-deazaguanine synthase OS=Candidatus Jettenia ecosi OX=2494326 GN=queC PE=3 SV=1
MKDLAIVLVSGGMDSCVTSAIANTQYELAFLHVNYGQRTETRELEAFREIALYYRIPDERILISDIDYLRKIGGSSLTDPGMNIQEAQLYNKEIPNSYVPFRNTIFLTIAVSWGEVIGARKIFIGAVEQDSPGYPDCKPVYYEIFNKLIKTGTKPTTFLEVETPLIGKSKSEIVTMGLSLMAPLHLSWSCYKNTDKACGLCHSCFLRLKAFKEVHAVDQIPYV

SEQ ID NO: 37150 - protein, 250 aa, unidentified
  source 1..250: note = Kaiserbacteria bacterium
  REGION 1..250: note = tr|A0A1F6DYR3|A0A1F6DYR3_9BACT 7-cyano-7-deazaguanine synthase OS=Candidatus Kaiserbacteria bacterium RIFCSPHIGHO2_02_FULL_55_20; OX = 1798497 GN=A3D71_02790 PE=3 SV=1
MKKIVVCLLSGGVDSTVAAVLKAKEPTTLVALLSVYYGQGAEQSEKRQSAVVADWLYHHFDSVIEHFYLRIDGTIRWTRRQRSARFKDPTGEEILLRGFVGWRHPEGGWSQAGYPSTRDEVFALMAAAGVEARLHDIPDTTEGEIVLATTGEDLFNFEDIEASTYTVHLNEVLARKMMPRRGKPMRIVLPLIEMTKAEVIRTGVEIGAPLELTWSCYFGEPGRPCGQCDQCKWRREAFQAAGVQDPASTV

SEQ ID NO: 37151 - protein, 237 aa, unidentified
  source 1..237: note = Kapabacteria sp.
  REGION 1..237: note = tr|A0A1M3KYN8|A0A1M3KYN8_9BACT 7-cyano-7-deazaguanine synthase OS='Candidatus Kapabacteria' thiocyanatum OX=1895771 GN=queC PE=3 SV=1
MKSTLAVVLLSGGMDSCVTCARAIEDGYDVAALHVNYGQRTQERELRSFHAICDHYGIVRRLVVDISHLAAIGGSSLTDDLISVDDTTLAKNGAGAGDDADAVPSSYVPFRNANILAIATSWAEVLSARAIYIGAVEEDSSGYPDCRDVFFRAFEQVIETGTKPGFSISIETPVIHFTKRRIVEEGIRLGAPLEHTWSCYRDNDIACGTCDSCALRLRGFQQAGVTDPIDYLVRPAY

SEQ ID NO: 37152 - protein, 497 aa, unidentified
  source 1..497: note = Kapabacteria sp.
  REGION 1..497: note = tr|A0A1M3KX01|A0A1M3KX01_9BACT Uncharacterized protein OS='Candidatus Kapabacteria' thiocyanatum; OX = 1895771 GN=BGO89_09440 PE=4 SV=1
MQHFDITLDQHAPFIEGGGIVVGIMFDPRTKRRIQPDEAVRMVNERKSLDVDGHYAGIAVVDGRIVELVDPYELRRLYRMTLPDGRIRYMTRLPGSSPQGSLDLRVLANAWMPVMGFTHSSMVEGIERCLPSPDPLHSTSRTSTERRNDLTPSLDGFPDSVLALSGGFDSRTLLAWSIREGVDISTTSYGSMDMPDCSTASDVASRAGVRHTFFDVATVVDRMSIDDMQSIARHTALASEGTYHFAHAMVLPSIASILPPGGILIDGGFGGFLRGGLANGLRYQGRAALHSGDARRILPYLMARSNDVFVDDVARRMTDMVTEDLQRALDEQGPCTKGSEREWIDNFFASWYLHGYVASPQGVYDHYLDSTIPFLHRSVVDWVFSRPASFRDHGRWFRSVISASAPRTTSVPFVGKRSLYPWFCAGRPLMNALHSKISRTRFVQSDTISDVVYGKMKEPVDDLLHSSWVGQLGIWDIGNLRSAADKLAVYGYLQLIT

SEQ ID NO: 37153 - protein, 245 aa, unidentified
  source 1..245: note = Kentron sp.
  REGION 1..245: note = tr|A0A451BY04|A0A451BY04_9GAMM 7-cyano-7-deazaguanine synthase OS=Candidatus Kentron sp. G OX=2126341 GN=queC PE=3 SV=1
MTTTHPQTTNPRRAVVLLSGGLDSATCLAIAKSQGFVCHALSFDYGQRHLAELAAAERIAHTLGAERHKTVRIDLTDICRCALTDRTSMIPRQPDSEIPSTYVPARNTIFLAIALGWAETVEARHIFIGVNAIDYSGYPDCRPEFITAFAQAANLGTKAGIEGRGFTIHTPLMEMGKADIIRAGSALGVDFARTVSCYQANDAGEACGLCDACRLRRAGFEAAGVTDPTRYTFNGRILNLRANEH

SEQ ID NO: 37154 - protein, 282 aa, unidentified
  source 1..282: note = Kentron sp.
  REGION 1..282: note = tr|A0A451A821|A0A451A821_9GAMM 7-cyano-7-deazaguanine synthase (Queuosine biosynthesis); OS = Candidatus Kentron sp. UNK OX=2126344; GN = BECKUNK1418G_GA0071005_102228 PE= 4 SV=1
MCLLSGGADSLVGAIDAVAEGKTPVLVGRKAGDTKRQKTFARSLGKPLSLLQLHQAKPAGRLESSQRARSILFLAYGLIAAMHLSEKDDGNHKTLLVPENGFISLNVPLTSLRVGSLSTRTTHPWFIQKIQAIFDTCGFPLQIENPYQLKTKGEMFDECQNPELLRKLAAHSMSCSRSKRLHQHCGRCVPCLIRRAAFVRAGIHDETPYLFSNLSTNDSDHLQFDDVQAARYAIHSVSTKGVEQWAGSAISTAQLGEVEPYLGVAERGIRELEALFQGMGIR

SEQ ID NO: 37155 - protein, 248 aa, unidentified
  source 1..248: note = Kinetoplastibacterium galatii
  REGION 1..248: note = tr|M1LXM5|M1LXM5_9PROT 7-cyano-7-deazaguanine synthase OS=Candidatus Kinetoplastibacterium galatii TCC219 OX=1208921 GN=queC PE=3 SV=1
MNVRFIDKMTNNSGKRREKALVLFSGGQDSTTCLFWALNNYEIVETLGFQYGQRHSIEMDCRLSILNIINFQKKTYCNGKLGNDHIIDLGFMSQLTENALTRKLDIKFSDRVPNTFVPGRNLLFLNTAAIVCYNMNIGTIIGGMSEVDFSGYPDCRDDTIKSQQVTLSLGLDRPINIETPLMWKNKSEIWQMAMDIGGNDLIKIIREYTHTCYIGCRDNLYDWGYGCGTCPACILRKTGWDTWINVKS

SEQ ID NO: 37156 - protein, 234 aa, unidentified
  source 1..234: note = Kinetoplastibacterium desouzaii
  REGION 1..234: note = tr|M1LR48|M1LR48_9PROT 7-cyano-7-deazaguanine synthase OS=Candidatus Kinetoplastibacterium desouzaii TCC079E OX=1208919 GN=queC PE=3 SV=1
MINHNNKALVLFSGGQDSTTCLAWALETYEKVETISFYYGQRHDIELTSRLSVLNSIRSSFPKWDKKLGADHLIEVDFIKNFFNTALTNDLVIENTNDMPNTFVPGRNLLFFTIAAAFGYKSDFNVIVGGMSETDFSGYPDCRDSTIKSQQVTLTLGLEKNIILETPLMWKNKSQVWDFAKNIGGDALIEIIVKYTHTCYIGNHYDFHSWGYGCGDCPACVLRKNGWENWINVE

SEQ ID NO: 37157 - protein, 233 aa, unidentified
  source 1..233: note = Kryptonium thompsoni
  REGION 1..233: note = tr|A0A0P1LC01|A0A0P1LC01_9BACT 7-cyano-7-deazaguanine synthase OS=Candidatus Kryptonium thompsoni OX=1633631 GN=queC PE=3 SV=1
MTEKEIAVVLVSGGLDSCVTAAIANSLGYELAFLHLNYGQRTEQRELKAFHDIADFYGVKKRLVINIEHLKLIGGSSLTDENIPVEEADLNRKAIPTSYVPFRNANMLSIAVSWAEVIGATKIFIGAVEEDSSGYPDCRKEFYKAFNEVIKLGTKAGVEGRPIEIVTPVIEMKKVDIVKKGIELKAPLHLTWSCYQREDVACGVCDSCAFRLRGFQLAGVDDPIPYEVKPVYI

SEQ ID NO: 37158 - protein, 229 aa, unidentified
  source 1..229: note = Lambdaproteobacteria bacterium
  REGION 1..229: note = tr|A0A1F6GQ28|A0A1F6GQ28_9PROT 7-cyano-7-deazaguanine synthase OS=Candidatus Lambdaproteobacteria bacterium RIFOXYD2_FULL_56_26; OX = 1817773 GN=queC PE=3 SV=1
MIDSKALVIFSGGQDSTTCLGWAKNRYREVVAISFYYGQKHQIELEQAKKIASALSVPLELVDIHFYQQMVYSALTGDPMAMNAPHRDNAALPASFVPNRNALFILLAHSYAQQVKAHTMVAGLCQTDYSGYPDCREPFAKSLILALNQGSDQQIELLTPLMYLTKAETFALAEQEGVLPLVLAESHTCYQGSSTPNPWGRGCGLCPACLLRAKGYQEYLSTLERSTHG

SEQ ID NO: 37159 - protein, 226 aa, unidentified
  source 1..226: note = Lambdaproteobacteria bacterium
  REGION 1..226: note = tr|A0A1F6GFS7|A0A1F6GFS7_9PROT 7-cyano-7-deazaguanine synthase OS=Candidatus Lambdaproteobacteria bacterium RIFOXYD2_FULL_50_16; OX = 1817772 GN=queC PE=3 SV=1
MEDKKALVIFSGGQDSTTCLAWAKQRYKEVAAISFIYGQVHEIEIVQATLIAETLGVPLDVWDISFYQEMVTSALTGNLPDMNAQHRDNNLLPASFVPNRNALFILLAHSFAQQIKAQVLVTGICQTDYSGYPDCRDEFAKAFIAALNSGADQHIELKTPLMYKTKAETFQMAEEAGILDLVVRESHSCYNGDPNLNKWGRGCGHCPACKIRERGFAEFLALKQGK

SEQ ID NO: 37160 - protein, 225 aa, unidentified
  source 1..225: note = Latescibacteria bacterium
  REGION 1..225: note = tr|A0A3N5WLS7|A0A3N5WLS7_9BACT 7-cyano-7-deazaguanine synthase OS=Candidatus Latescibacteria bacterium OX=2053570 GN=queC PE=3 SV=1
MRSVVLVSGGMDSLVTAALAADAGGTAFLHVSYGQRTEARERTAFRRIADHFDIRHRLEAAMPAVRAIGGSALTDPAIPIRTDGVDRAGIPASYVPFRNAQLLALAVSWAEVLGARSVWIGAVEEDSSGYPDCREAFFHAFGESVRLGTARPGAIRIEAPLLHKTKAEIVRLGLRLGVPFELSWSCYVSEEEACGTCDSCRLRLGAFRENGVVDPIRYAPPASRP

SEQ ID NO: 37161 - protein, 221 aa, unidentified
  source 1..221: note = Latescibacteria bacterium
  REGION 1..221: note = tr|A0A3D4H125|A0A3D4H125_9BACT 7-cyano-7-deazaguanine synthase OS=Candidatus Latescibacteria bacterium OX=2053570 GN=queC PE=3 SV=1
MPETRGSFLLLSGGMDSTTLLWWMQAQGVDEIHTVAVDYGQRHRAELDCGARLSAEGGAQSHRVLQLDLTQLGGNPLTDADFAVPSANEDNQIGTVVPFRNMLFVTLSAALAETQGILDIYLSPVRDDHESYRDCRREFYDLLEKTLRLGATRHAEFRVHTPFVEMWKKEVVRVGIELGVPYARTHTCYEGIRPACGKCDACVERLAAFAANCTVDPLPYK

SEQ ID NO: 37162 - protein, 231 aa, unidentified
  source 1..231: note = Levybacteria bacterium
  REGION 1..231: note = tr|A0A2M8FC84|A0A2M8FC84_9BACT 7-cyano-7-deazaguanine synthase OS=Candidatus Levybacteria bacterium CG_4_9_14_0_2_um_filter_35_21 OX=1974627; GN = CO028_02965 PE=3 SV=1
MNEKEPVKTKSNEDFLEGLQRKETGRVVLMYSGGVDCTAAGLLLREQGLDVFPLFVDYGQSSSEAERVLVENVPVRLGFRPAHIVETDIMKQLTKSKLLGQEALSDDDAWVPGRNTLFMVIAGIYAKQIDGDGIAIGYMLDDNFVFGDNDYFHHKGIEQVLSHSFLQPMQVFLPTRSMTKRELIQKLTNAGFIDLTVSCWNAKVEKNKIISCHECANCLEREKGINELKKE

SEQ ID NO: 37163 - protein, 238 aa, unidentified
  source 1..238: note = Liberibacter solanacearum
  REGION 1..238: note = tr|A0A095BEM2|A0A095BEM2_9RHIZ 7-cyano-7-deazaguanine synthase OS=Candidatus Liberibacter solanacearum OX=556287 GN=queC PE=3 SV=1
MNNNREKTSSALLLFSGGQDSSTCLSWALDKFDKVETLSFDYGQRNKVELECRLRLREKIVQLTPKWKDSLGTDHILPLATLGDISHSSLTKNIEIKIQENNLPNTFVPGRNIIFLVFAAALAYRRGITNIIAGMCEMDYSGYPDCRNETIRAIEMTLNLGMESNFTIHTPLMHLKKHETWKLVKDIGGQNLVDLILEESHTCYLGTRDKRYEWGYGCNSCPSCNLRQKGWVEFKEKY

SEQ ID NO: 37164 - protein, 241 aa, unidentified
  source 1..241: note = Liberibacter europaeus
  REGION 1..241: note = tr|A0A2T4VWB3|A0A2T4VWB3_9RHIZ 7-cyano-7-deazaguanine synthase OS=Candidatus Liberibacter europaeus OX=744859 GN=queC PE=3 SV=1
MIDNIENKSSAILLFSGGQDSSTCLAWALNKFNRVETIGFDYGQRNKVELECRLRIRQKIIQLIPEWERSLGEDFILPITTIGEISNSSIIKNIEMKMNDNGLPNTFVPGRNIIFLVVAAALAYSRGIKNIVAGMCETDYSGYPDCRNNTIRAVELALNLGMEGDFTLHTPLMWLKKQQTWQMIQNIGGQNLIDLIVEESHTCYLGVRDKLHEWGYGCNSCKACQLRKKGWMEYKNTKNTS

SEQ ID NO: 37165 - protein, 225 aa, unidentified
  source 1..225: note = Lindowbacteria bacterium
  REGION 1..225: note = tr|A0A1F6LKU6|A0A1F6LKU6_9BACT 7-cyano-7-deazaguanine synthase OS=Candidatus Lindowbacteria bacterium RIFCSPLOWO2_12_FULL_62_27; OX = 1817870 GN=A3G34_05895 PE=3 SV=1
MPALNRRPDMAVLASGGMDSACLLEWAARRARGAVRPLYVSFGLRWEPGEWKALRRWVRTLKRPNLLPPVMLRAPAGDLYGDHWSLSGRGVPGSRSRDSAVYLPGRNLLMLSKTAVYCAQAGIRTLAIGTLSANPFADATPKFFSDFSRIASRALGRRIRIVAPFRRLTKRRLIRRFAHLPLSLCFSCLRPSAGCRPCGRCNKCVEWRRALSAAGWRVRKTFRPC

SEQ ID NO: 37166 - protein, 534 aa, unidentified
  source 1..534: note = Lloydbacteria bacterium
  REGION 1..534: note = tr|A0A1G2DJ69|A0A1G2DJ69_9BACT Uncharacterized protein OS=Candidatus Lloydbacteria bacterium RIFCSPHIGHO2_02_FULL_54_17 OX=1798664 GN=A3C93_03755 PE=4; SV = 1
MSSVVFVTGRNQCGAVALFSSICYVNLPMKTAKWNYKGVVIFGPPASGKTTLARELRLRERGVFCLEGSKVLRSFGTVLSREEARALYGRLVKSHGKTFIGKALERVALKKGGFVIASGLRGYENAVYLKERGYFVVCLEASQSALLRRLCIRGDGRSLQKEIKDEERIYHTKHIKKVAHVVFHTEKERVVAMAKKILDEVRYRECRICVNGNRNPVIRLSGEGYCDICAQFRKYFRKSILKDELRAFTSQVGKGHRGFDIMVGISGGKDSSAMLRQLQKRGFRILAFSFDTGYYPKHVFSRAARVARQLGVQYKRIDIRPYIRPIDRRSFALTAALYDEKPSPKLSEKFRRLYKEGRKHYSVKCSHALPFVRTCQLCRRVVIRAYYAEALKHGVRTVVLGINEWAHLSKHGRAPEFRATRVLKPFHNKPAVSIVHSPFLFRRTEKETKKILKKMGWELPPGEKLIETNANSCLFARAAETKALHMLGFHPDATRLSREVTAGFITKKRAEKALSVTHQSRYSVRHILAKANIL

SEQ ID NO: 37167 - protein, 224 aa, unidentified
  source 1..224: note = Macondimonas diazotrophica
  REGION 1..224: note = tr|A0A4Z0F9G4|A0A4Z0F9G4_9GAMM 7-cyano-7-deazaguanine synthase OS=Candidatus Macondimonas diazotrophica OX=2305248 GN=queC PE=3 SV=1
MTRSAIVLLSGGLDSATTLALAKQQGFDCAALSFAYGQRHDAELAAAARVAAHAGVSVHRTVTLDLAAFGGSALTDSSIAVPTAPSSGIPITYVPARNTVFLAHALAWAEVLPARDLFIGVNAVDYSGYPDCRPAFIEAFERLANLATRAGVEGSPFRVHAPLIHWSKAEIIQRGVALGVDFSMTVSCYQADTSGAACGLCDACRLRASGFAEAGIDDPTRYWT

SEQ ID NO: 37168 - protein, 243 aa, unidentified
  source 1..243: note = Magasanikbacteria bacterium
  REGION 1..243: note = tr|A0A1F6NZ87|A0A1F6NZ87_9BACT 7-cyano-7-deazaguanine synthase OS=Candidatus Magasanikbacteria bacterium RIFOXYD2_FULL_36_9 OX=1798707; GN = queC PE=3 SV=1
MHNSVLKNNTNQSGIEKKAVVLLSGGLDSATTAILAKSNGFEIHAISFAYGQRHSVELEAAKRVVDFLGIKHHIVVPIDLRIFGGSALTSNIEVPKDRTTDEMIAKEIPITYVPARNTIFLSFALAYAEILGSADIFIGVNALDYSGYPDCRLEFINAFEKMANLATKAGVEGLHIKIHTPLINLTKAEIITRGMEFKFDYGLTISCYDPSENGLACGHCDSCILRQKGFKEGGFSDPTKYYN

SEQ ID NO: 37169 - protein, 219 aa, unidentified
  source 1..219: note = Magnetobacterium bavaricum
  REGION 1..219: note = tr|A0A0F3GKJ3|A0A0F3GKJ3_9BACT 7-cyano-7-deazaguanine synthase OS=Candidatus Magnetobacterium bavaricum OX=29290 GN=queC PE=3 SV=1
MVLLSGGIDSSTTLAIAHAEGFELNALTIDYGQRHKVEIESAGAIAHRFGVKRHLVLSLDMAGIGGSALTTTNIDVPKDRLASVGGDLTTDIPVTYVPARNTVFLSLALAWAETLQADTIFIGANAVDYSGYPDCRPEFIRAFEEMANLATKAAVQGGVRFKVRTPLITMSKVEIIRRGRALGLDYSMTWSCYDPTPTGKPCLRCDSCIIREKALRKHD

SEQ ID NO: 37170 - protein, 223 aa, unidentified
  source 1..223: note = Magnetobacterium bavaricum
  REGION 1..223: note = tr|A0A0F3GZG8|A0A0F3GZG8_9BACT 7-cyano-7-deazaguanine synthase OS=Candidatus Magnetobacterium bavaricum OX=29290 GN=queC PE=3 SV=1
MSNCVVLLSGGIDSSTTLAIAHAEGFDLNALTIDYGQRHKIEIGCARAIAHRFDVKRHLVLSLDMTGIGGSALTTDNIDIPRDRLTGVGRGLTTDIPVTYVPARNTIFLSLALAWAETLEADTIFIGANAVDYSGYPDCRPEFIRAFEEMANLATRAAVQGGVRFKVRTPLISISKVEIIQRGLALGLDYSMTWSCYDPTPAGKPCLRCDSCIIRENALREHY

SEQ ID NO: 37171 - protein, 236 aa, unidentified
  source 1..236: note = Magnetoglobus multicellularis
  REGION 1..236: note = tr|A0A1V1PDQ8|A0A1V1PDQ8_9DELT 7-cyano-7-deazaguanine synthase OS=Candidatus Magnetoglobus multicellularis str. Araruama OX=890399; GN = queC PE=3 SV=1
MINQYNDKKAIVVYSGGQDSTTCLIWALTNFKKVKAISFDYGQKHQNELDVASKIAFSLKVEHQIVNLKMLRYLTTSALFSNSSQGVNDAHLIHDHLPASFVPNRNALFLTLAHAHAQQIGHSHIVTGVCQTDYSGYPDCRDNFIKSINVSLNIGSESNIEILTPLMYLDKKEIWQLADNLGAIDTILQTHTCYNNSQKSNNWGRGCGTCPACKLRSKGFQQYTAQIGIGEKGCRT

SEQ ID NO: 37172 - protein, 222 aa, unidentified
  source 1..222: note = Magnetoglobus multicellularis
  REGION 1..222: note = tr|A0A1V1P5D2|A0A1V1P5D2_9DELT 7-cyano-7-deazaguanine synthase OS=Candidatus Magnetoglobus multicellularis str. Araruama OX=890399; GN = queC PE=3 SV=1
MINAIIILSGGMDSVTLLHYLIKRQKISPAIITFMYGQKHHKEIACAKEHARILDCQDHLIVDLTFLKPLFARSSLVSNQIQIPNMDDIKGNPQPSTYVPNRNMIFLSLAAAYAETLGVPDIYYGAQKHDAYGYWDTTTQFVTQLNALFGQNREIPIQIKAPFVDYSKTAILQLGQSLDVDYAKTWSCYKGDSLACGYCPTCYERLKAFADCDLRDPLPYNK

SEQ ID NO: 37173 - protein, 235 aa, unidentified
  source 1..235: note = Magnetomorum sp.
  REGION 1..235: note = tr|A0A0N0D3K9|A0A0N0D3K9_9DELT 7-cyano-7-deazaguanine synthase OS=Candidatus Magnetomorum sp. HK-1 OX=1509431 GN=queC PE=3 SV=1
MYKQKAVLLSSGGLDSTTALAIAKHEGFDVYSMSFNYGQRHSFELKAAEKVAETLDVAQHLVINVNMRQIGGSALTDEMDVPKDRSADAMTKDIPVTYVPARNTIFLSYALAWAEVLGAFDIIIGVNAVDYSGYPDCRPEFIDAFEKMANLATKAGIEAQHKIRINAPLIHLTKAQIILKGTELGVDYGITHSCYDPSPDGLACSKCDSCILRRKGFLEAGVEDPTKYAQNMFNH

SEQ ID NO: 37174 - protein, 150 aa, unidentified
  source 1..150: note = Magnetoovum chiemensis
  REGION 1..150: note = tr|A0A0F2IT26|A0A0F2IT26_9BACT 7-cyano-7-deazaguanine synthase OS=Candidatus Magnetoovum chiemensis OX=1609970 GN=MCHI_003916 PE=3 SV=1
MPKENKDILIQSVIPVTYVPARNTIFLSFALSWAEVLQAPDIFIGANAIDYSGYPDCRPEYIKAFENMANLATKISVDKELTFKINAPLINMSKADIIKKGIELGLDYSLTWSCYDPINDTTPCGRCDSCLLRQRGFEQAGISDHLRKNL

SEQ ID NO: 37175 - protein, 216 aa, unidentified
  source 1..216: note = Margulisbacteria bacterium
  REGION 1..216: note = tr|A0A1F6QEM0|A0A1F6QEM0_9BACT 7-cyano-7-deazaguanine synthase OS=Candidatus Margulisbacteria bacterium GWE2_39_32 OX=1817872; GN = A2X41_03655 PE=3 SV=1
MKALVLLSAGLDSLVNMAQALDNGYELEALTFDYGQKAAQKELEHAANICTFYSIPHRVIELPWLAEVTTTSLVASRNEVPVFNEERINDTDYINSTAKAVWVPNRNGTFINIAASVSEAKGIDEIIVGFNKEEAATFPDNTKEYLEKVNDALAYSTLSKVKVISFTTDFDKIAIVNLGKRLAVPFKYCWPCYHNGAQLCGRCESCVRYFRALSAY

SEQ ID NO: 37176 - protein, 228 aa, unidentified
  source 1..228: note = Margulisbacteria bacterium
  REGION 1..228: note = tr|A0A1F6QVN0|A0A1F6QVN0_9BACT 7-cyano-7-deazaguanine synthase OS=Candidatus Margulisbacteria bacterium GWF2_35_9 OX=1817873 GN=queC; PE = 3 SV=1
MQINDKSALVILSGGQDSTTALFWAKQQFMSVETISFDYGQRHKIELDCAKKIASIAEVPNKRVSLSSLSQLSDNAMVNETNIELNKETSLPTTFVPGRNLLFVTMAAAFAYEKRIPNLILGVSQVDYSGYPDCREETMKSLEKTISLGMEFPFKIHTPLIHKTKRETVLLAKELGIVDVLKFTHTCYKGQNPPCGDCPACELRAKGFAEVGINDPLIKSPFERGGTK

SEQ ID NO: 37177 - protein, 218 aa, unidentified
  source 1..218: note = Marinamargulisbacteria bacterium
  REGION 1..218: note = tr|A0A328RJE5|A0A328RJE5_9BACT 7-cyano-7-deazaguanine synthase OS=Candidatus Marinamargulisbacteria bacterium SCGC AG-414-C22; OX = 2184344 GN=queC PE=3 SV=1
MSIKALVLFSGGQDSTTCLAQACNDFPGRVAAVAFDYGQRHRVELEQAQIIAKLADVPLTVVPLPFISDLTSNALTRPDMDIATPTDSLPNTFVDGRNLFFLSVAAVIAKQQDCSILYTGVCETDYSGYPDCRQSFITSCTETLNLAMDYTFEIRTPLMYLTKAETVLLMKNLNCLDWYAHTHTCYNGQRPACGTCPACELRLKGFADAGLTDPLEYQ

SEQ ID NO: 37178 - protein, 222 aa, unidentified
  source 1..222: note = Marinamargulisbacteria bacterium
  REGION 1..222: note = tr|A0A328RSZ5|A0A328RSZ5_9BACT 7-cyano-7-deazaguanine synthase OS=Candidatus Marinamargulisbacteria bacterium SCGC AAA071-K20; OX = 2184347 GN=queC PE=3 SV=1
MKYKSGLVLLSGGQDSTTCLAIAQNECETVYSVSFDYGQRHRIELQQAQKIASLANVDFHIIDATFINKLNNNALTDSSIEISQVDNEIPNTFVPGRNLFFLAMAAVYARERECNIIYTGVCETDYSGYPDCRSDFIKSAEQTINLAMESHFEIKTPLMTLSKAATVRLMYSFNKMDWYSHSHTCYEGKRPACGVCPACILRLKGFKDAGFEDPLSYEYVLK

SEQ ID NO: 37179 - protein, 235 aa, unidentified
  source 1..235: note = Marinimicrobia bacterium
  REGION 1..235: note = tr|A0A4Y8IBW1|A0A4Y8IBW1_9BACT 7-cyano-7-deazaguanine synthase OS=Candidatus Marinimicrobia bacterium MT.SAG.3 OX=2552982; GN = E3V55_00150 PE=3 SV=1
MVIESVNREAWTVIGSTAELRILFSGGIESAVLMGEAIEAGLVPIPVYVATGTRWENTELKSANIYLETLELGLSDKIIIRKYTPGDVEKHWAYNKGSYPLAEEDIQTLEISGRNETLLREAVRFGEDDQKLILVIGTTADNPFKDGDQQFYSEMETTLSAQRRARVTILTPLKGLTKSDVIKRGKRFPLGLTLSCVAPLNGKACGECIKCASRTAAFLTAEVIDKYEMEELNES

SEQ ID NO: 37180 - protein, 230 aa, unidentified
  source 1..230: note = Marinimicrobia bacterium
  REGION 1..230: note = tr|A0A4Y8I144|A0A4Y8I144_9BACT 7-cyano-7-deazaguanine synthase OS=Candidatus Marinimicrobia bacterium MT.SAG.3 OX=2552982 GN=queC PE=3; SV = 1
MENRDNSLAVVAVSGGLDSAVATAIAAERHELALMHINYGNKTQKRELEAFHAIADFYKIDNRFVADIDHLRKIGSSSLTDRNIEVADYDPDAQGIPQTYVPFRNANILSIAVSWGEAIGANLIYVGMMEEDSAGYPDCTEEFINAFNTMVKIGTRPETNIELIAPLIHMSKREVIKKGMELGAPLDLTWSCYRSEEESCGECESCVLRLNGYKELGIEDPIKYVEMEVK

SEQ ID NO: 37181 - protein, 229 aa, unidentified
  source 1..229: note = Melainabacteria bacterium
  REGION 1..229: note = tr|A0A1F6RG22|A0A1F6RG22_9BACT 7-cyano-7-deazaguanine synthase OS=Candidatus Melainabacteria bacterium RIFOXYA2_FULL_32_9 OX=1801611; GN = queC PE=3 SV=1
MNKSIILLSGGLDSVISLACAKEEYNISLALTFNYGQRAKNQEIAAAADIAKYYNIEYKVINLPWLAEITSTSLVNISEKLPALKINELDTLDLTEESAKKVWVPNRNGVFINIAASFADSYNYTHIIFGANSEEATTFPDNSQEFISRINESLQYSTMVKPELVAPLINYNKKEIVKIGIEKKIPFNLIRSCYTDNQKHCGECESCLRLKRALTEIADKETCKLVFGD

SEQ ID NO: 37182 - protein, 223 aa, unidentified
  source 1..223: note = Melainabacteria bacterium
  REGION 1..223: note = tr|A0A327JBT7|A0A327JBT7_9BACT 7-cyano-7-deazaguanine synthase OS=Candidatus Melainabacteria bacterium OX=2052166 GN=queC PE=3 SV=1
MSKRNSIILLSGGLDSLVSLGLKKDSVALAITFDYGQKSAKEEIEASRKICEYYNVEHKVIKLDWLKEITNTTLVSGDVPTISIDKLDDESTKDSVWVPNRNALFINIAGAFADSVGYEYIIIGANKEEAAAFPDNTEEFIKRVNKVFEYSTRVKPQVISPLIIFNKNDIVKSAVENNIPLKLARSCYNGNSKHCGECESCQRLKRALKSNGLNSLVKEMFLK

SEQ ID NO: 37183 - protein, 242 aa, unidentified
  source 1..242: note = Methylomirabilis limnetica
  REGION 1..242: note = tr|A0A2T4TYR9|A0A2T4TYR9_9BACT 7-cyano-7-deazaguanine synthase OS=Candidatus Methylomirabilis limnetica OX=2033718 GN=queC PE=3 SV=1
MSACNVQAGKRAVVLLSGGLDSATAAAMAKAEGYALHALTFRYGQRHAREVESAKKIAAALGVVRHLILKLDLRQIGGSALTADIPVPKGRGLEEIEAGIPVTYVPARNTIFLSHALAWAEVIGSKDIVLGVNAIDYSGYPDCRPEYIAAFEQMANLATQAGVEGGSRLTIHTPLIHFTKAEIVRRGAALGVDFALTWSCYDPTPDGRPCRACDSCILREKGFAEAGLLDPGPTASKLPFER

SEQ ID NO: 37184 - protein, 233 aa, unidentified
  source 1..233: note = Methylomirabilis oxyfera
  REGION 1..233: note = tr|D5MMR4|D5MMR4_9BACT 7-cyano-7-deazaguanine synthase OS=Candidatus Methylomirabilis oxyfera OX=671143; GN = queC PE=3 SV=1
MVLLSGGIDSATAAALAKAKGYQLHALTFRYGQRHAREVESATRIAAALGASQHLILDLDLRRIGGSALTAEIPVPKGREMDEIGSGIPVTYVPARNTIFLSYALAWAEVIGSEDIVLGVNAIDYSGYPDCRPEYIAAFERMANLATRAGAEGRSTLTIYTPLIHLSKAEIIRRGAALGIDFRLTWSCYDPTQDGRPCRACDSCILREKGFAEAGIADPGLGEAKDEDKPAHL

SEQ ID NO: 37185 - protein, 222 aa, unidentified
  source 1..222: note = Methylopumilus planktonicus
  REGION 1..222: note = tr|A0A0D6EWW5|A0A0D6EWW5_9PROT 7-cyano-7-deazaguanine synthase OS=Candidatus Methylopumilus planktonicus OX=1581557 GN=queC PE=3 SV=1
MSKAVVLLSGGLDSATTLAIAKSEGYECYALSVNYHQRHIAELDAAKKIALLFKVKDHKTVEMDLSWMLTSALTNPDLKMPTELTSHIPITYVPARNTLMLTLALGWAEVIGAHDIFIGVNAVDYSGYPDCRPEYIAQFQKMANLGTKSGVEGQNIHLHTPLIHLSKEAIILQGMKLGVDYGLTVSCYQADQDGYACGVCDSCRLRQNGFKAAGVDDPTSYQ

SEQ ID NO: 37186 - protein, 223 aa, unidentified
  source 1..223: note = Methylopumilus rimovensis
  REGION 1..223: note = tr|A0A5B8DID6|A0A5B8DID6_9PROT 7-cyano-7-deazaguanine synthase OS=Candidatus Methylopumilus rimovensis OX=2588535 GN=queC PE=3 SV=1
MVSKAVVLLSGGLDSATTLAIAKNEGYECYALSINYRQRHIAELEAAKKIAQQFKVKDHRTVEMDLSWMLTSALTNPDLKVPTELSSHIPITYVPARNTLMLSLALGWAEVIGAHDIFIGVNAVDYSGYPDCRLEYIEQFQKMANLATKSAVEGQNIQLHTPLIHLSKEAIILQGMKLGVDYGFTVSCYQADKDGQACGVCDSCRLRQHGFKAAGMDDPTSYQ

SEQ ID NO: 37187 - protein, 244 aa, unidentified
  source 1..244: note = Methyloumidiphilus alinensis
  REGION 1..244: note = tr|A0A2W4RGN2|A0A2W4RGN2_9GAMM 7-cyano-7-deazaguanine synthase OS=Candidatus Methyloumidiphilus alinensis OX=2202197 GN=queC PE=3 SV=1
MKKAVILLSGGLDSATLLALAKQQGYICHALSFNYGQRHGAELNAARHIAEHARVVEHKVVHIGLDAFGGSALTDTSLDVPSQPTTGIPITYVPARNTVFLAFALGWAEVLGAWDIFIGVNAVDYSGYPDCRPEFIGAFEKLARLATKAGVEGQSFKVHTPLIDMGKGEIIRLGLDLGVDYAHTVSCYSADDAGRACGVCDSCRLRKAGFEGAGVDDPTRYQKFTDVTHGCWNPRRHVRSIGNL

SEQ ID NO: 37188 - protein, 239 aa, unidentified
  source 1..239: note = Microgenomates bacterium
  REGION 1..239: note = tr|A0A3A4ZKN9|A0A3A4ZKN9_9BACT 7-cyano-7-deazaguanine synthase OS=Candidatus Microgenomates bacterium OX=2093373 GN=C4564_01900 PE=3; SV = 1
MTTSILLYSGGLDSFITAMLNPEVSLLYVDTRASYNAKEKYFLRRLMPDRPVIIDNRLDLSGLEREDKIVPSRNLLLIAIASYYGNDVWLSATAGDNSRDKDGTFAELASNLFSYMLSGGHYPNAEKVQVRLPYKWWSKGQLVDKYLAAGHPPEFLSKTVSCYHPVLEHCGRCKACIRKWIALAGNAVDKTHWSFPPWEAEIWPDIVAKILAPEGVWRCKAEDSETLEVLATFRPDLLR

SEQ ID NO: 37189 - protein, 240 aa, unidentified
  source 1..240: note = Micropelagos thuwalensis
  REGION 1..240: note = tr|U2WCR8|U2WCR8_9PROT 7-cyano-7-deazaguanine synthase OS=Candidatus Micropelagos thuwalensis OX=1397666; GN = mhpF PE=3 SV=1
MTDSRTALVLFSGGQDSTVCLAHALATYSHVETVGFDYGQTHRVELDCRLDVLAQIRAAFPDWAEKLGDDHVLALPALADIGGTALTGDGEIRVLDNGLPSTFVPGRNLLFLTYAAAIAYRRGLSVLVGGMCETDYSGYPDCRRDTLDHLAKAISAGMDAPIEIETPLMYLDKAATWAMTETLGGDMLIDLIREATHSCYRGDRTTRHEWGYGCNDCPACELRSKGYAQWVAQKKVSHDL

SEQ ID NO: 37190 - protein, 265 aa, unidentified
  source 1..265: note = Micropelagos thuwalensis
  REGION 1..265: note = tr|U2WCQ2|U2WCQ2_9PROT Acyl-[acyl-carrier-protein]--UDP-N-acetylglucosamine O-acyltransferase OS=Candidatus Micropelagos thuwalensis; OX = 1397666 GN=queC PE=3 SV=1
MSNIHPTAEVDKGAEIGNGVEIGPFCVIGPNVKIGDNTVLHSHVSISGHTTIGMGNEVFPYASLGHIPQDLKFKNEKSFLEIGDGNRIRENVTINLGTEGGGGITRVGNNSLFMVGVHIAHDCILGDNIVMANYAALGGHVEIANNVIFGGFSAIHQFSKAGKYSFIGAGAMVVGNVIPFSTVMGDRACLVGLNLVGLKRANFKREDIHSLRNAYKLLFSSSDVDLLEQRVQQAEEEFGGSPLVNDLLSFIKSIDKRGICLPPQN

SEQ ID NO: 37191 - protein, 232 aa, unidentified
  source 1..232: note = Muproteobacteria bacterium
  REGION 1..232: note = tr|A0A1F6TJD6|A0A1F6TJD6_9PROT 7-cyano-7-deazaguanine synthase OS=Candidatus Muproteobacteria bacterium RIFCSPHIGHO2_01_FULL_65_16; OX = 1817764 GN=queC PE=3 SV=1
MSVNDSRKAVVLVSGGLDSATVLAHARAEGCACYCLTFDYGQRHRVELEAARRVAASLGAADHRVVRLDLSWMGGSALTDLSIPVPEKPSEGIPVTYVPARNTVFLSIALGWAEVQGAQDIFIGANAVDYSGYPDCRPEYMEAFERLANLATRAAVEGRRVRVRTPLMQMRKADIIREGVRLGVDYSLTSSCYQPDAAGRACGACDSCRLRAAGFRAAGVPDPASYARPPAV

SEQ ID NO: 37192 - protein, 229 aa, unidentified
  source 1..229: note = Muproteobacteria bacterium
  REGION 1..229: note = tr|A0A1F6TWU2|A0A1F6TWU2_9PROT 7-cyano-7-deazaguanine synthase OS=Candidatus Muproteobacteria bacterium RIFCSPLOWO2_01_FULL_60_18; OX = 1817768 GN=queC PE=3 SV=1
MPADADAGRKAVVLVSGGLDSATVLALARAAGARCYALTLDYGQRHRVELEAARRVAQQLGAADQRVVKLDIGWIGGSALTDTRIAVPHESSPGIPVTYVPARNSVFLSIALGWAEVLGASAIYIGANAVDYSGYPDCRPEFIRAFESLANLATRAGVEGKAFHVHAPLMNMRKHEIIRTGARLGVDYALTLSCYDPDAAGRACGRCDACRLRAQGFAEAGVADPTRYR

SEQ ID NO: 37193 - protein, 292 aa, unidentified
  source 1..292: note = Nealsonbacteria bacterium
  REGION 1..292: note = tr|A0A1G2EPC8|A0A1G2EPC8_9BACT 7-cyano-7-deazaguanine synthase OS=Candidatus Nealsonbacteria bacterium RIFOXYB1_FULL_40_15 OX=1801677; GN = A2365_00785 PE=3 SV=1
MQLMGNQSKKFHVWEKENEDKSIVNVIGQILKYKRGYIVRMPEKGGPVVCCMSGGADAVSNIFIMLNDFGYEVFPFFINRGQSAYQWERASIKHYDQLFKERFPKLYHETKEIKVNTPAREYKKDLREVKKKCYETEASAHVSYPARNSIIFLTGMEYALSLKNKGKDVTTLFVAHVASDTSYHCSLTWQRILNLEICHTFHDYQLQLISLPIEIEFGNYFDKDVYLKYCYKNGLDLTKTRTCIRKDEIQCGTCPCCWDRRRSFLEAGIKDETRYQKPYPEKSGRYYDSTLK

SEQ ID NO: 37194 - protein, 512 aa, unidentified
  source 1..512: note = Nealsonbacteria bacterium
  REGION 1..512: note = tr|A0A1G2EFZ4|A0A1G2EFZ4_9BACT GMP synthase [glutamine-hydrolyzing] OS=Candidatus Nealsonbacteria bacterium RIFCSPLOWO2_01_FULL_43_32 OX=1801672 GN=guaA; PE = 3 SV=1
MSMIIILNFGGQYTHLIARRIRELGCYAEILPFDISSSKIKELKPNGLILSGSPFSVYDENAPLPKSEIFSLNIPILGICYGQQIIAKILGGEVEKGKLREFGREILTVLDKKNLFKGLNKKEAVWFSHGDLVTKLPKGFKVIGKSRTSKIASFANSDNKIFGIQFHPEVIHTNKGLKIIENFIYGICNEKKSWKISNIKNNLIVELKKTLGNEAVLIGVSGGVDSLVAASLLKAAIGDKLYCIFVDNGLMRKNEAEEIEKIFVKTKFKNFIVADAKEKFLSALKKVTDPEKKRKIIGRTFIRVFERKAKELEKQAKFKFLAQGTIYPDRIESAQPSKNAAKIKSHHNVTLPKKLKFQIVEPLRELYKDEVRRLGKKLGLPKSIIGRHPFPGPGLAVRILGEITKDRLDILREADSIFISELKKAGLYDKIWQAFAALLPLKTVGVMGDARTYEYIISLRAVNSKDGMTADWAKIPNEVLENISSKIVNEVRGVNRVVYDISQKPPATIEYE

SEQ ID NO: 37195 - protein, 220 aa, unidentified
  source 1..220: note = Nitrosoglobus terrae
  REGION 1..220: note = tr|A0A1Q2SK04|A0A1Q2SK04_9GAMM 7-cyano-7-deazaguanine synthase OS=Candidatus Nitrosoglobus terrae OX=1630141 GN=queC PE=3 SV=1
MILVSGGLDSATTLAIAKDLGFACYAISFDYSQRNRVELQAAAEISSLLGVIEHKVIRVDWGGIGGSALTDSNIPIPEKIAVGAIPVTYVPARNTLFLAFALGWAEILKAQDIFIGVNTIDYSGYPDCCPEFIKAFEYLANLATCASMKGQVFHIQAPLLYLSKAEIIRKGINLGIDYSRTVSCYQADEAKRACGVCDSCRFRKQGFLEANIADPTIYYR

SEQ ID NO: 37196 - protein, 232 aa, unidentified
  source 1..232: note = Nitrospira inopinata
  REGION 1..232: note = tr|A0A0S4KY62|A0A0S4KY62_9BACT 7-cyano-7-deazaguanine synthase OS=Candidatus Nitrospira inopinata OX=1715989 GN=queC PE=3 SV=1
MSDSTAQRAVVLASGGLDSTVAAAVAGRDGYDLDLLTIAYGQRHAIEVERAGRIATALKARRHLVINLDLRAIGGSALTGDVPVPKNRPEAERSREVPVTYVPARNLIFLSLAAAYAETIDAPVVYFGANVLDYSGYPDCRPEFIKAFESAVRAGTKAGTEGRSFEVRAPLLTLTKAQIVTLGLSLNVPFHLTHSCYDPAGAVACGQCDSCLIRRKGFAEAGVADPIPYMVP

SEQ ID NO: 37197 - protein, 232 aa, unidentified
  source 1..232: note = Nitrospira nitrificans
  REGION 1..232: note = tr|A0A0S4LC36|A0A0S4LC36_9BACT 7-cyano-7-deazaguanine synthase OS=Candidatus Nitrospira nitrificans OX=1742973 GN=queC PE=3 SV=1
MNGQISERAVVLASGGLDSTVTAALARREGYALYLLTIAYQQRHAVEIERSRQVATALEAHQHVVIDVDLRAIGGSALTGNQSVPKRRTVSERNRDVPVTYVPGRNLIFLSLAAAHAEVLGASIIYFGANVIDYSGYPDCRPEFIKTVEAAIQAGTKAGMQGKGIEIRTPLLRMSKAEIIRLGLTLNVPFHLTHSCYDPIGLMACGQCDSCLIRKRGFAEAGVVDPIQYAVC

SEQ ID NO: 37198 - protein, 225 aa, unidentified
  source 1..225: note = Nitrotoga sp.
  REGION 1..225: note = tr|A0A3E1D734|A0A3E1D734_9PROT 7-cyano-7-deazaguanine synthase OS=Candidatus Nitrotoga sp. MKT OX=2184311 GN=queC PE=3 SV=1
MKNAVVLLSGGLDSATVMAMAKQQGYLCHALSVDYGQRHYAELAAAERVAQALGAIEQRVIRVDLTGFGGSALTDARIAVPEQRTTGIPLTYVPARNTIMLSLALAWAEVLQVQDIFIGVNAVDFSGYPDCRPEYIAAFENMANLATKTAVEGNYLTLHAPLLRLSKADIVKLGTELGVDYSLTVSCYQADSDGRACAVCDSCQLRRAGFKTAGIVDPTRYRIAG

SEQ ID NO: 37199 - protein, 225 aa, unidentified
  source 1..225: note = Nitrotoga sp.
  REGION 1..225: note = tr|A0A3E1DDD8|A0A3E1DDD8_9PROT 7-cyano-7-deazaguanine synthase OS=Candidatus Nitrotoga sp. SPKER OX=2184312 GN=queC PE=3 SV=1
MKKAVVLLSGGLDSATVMAMAKRQGYICYTLSVDYGQRHYAELAAAERVAQALGAIEQRVVSVDLTGFGGSALTDKRIAVPEQATSGIPLTYVPARNTIMLSLALAWAEVLQVQDIFIGVNAVDFSGYPDCRPEYIAAFESMANLATKAAVEGKYLTLHAPLLRLSKADIVKLGMELGVDYSLTVSCYQADSDGRACALCDSCQLRRAGFKTAGIVDPTRYHIAG

SEQ ID NO: 37200 - protein, 225 aa, unidentified
  source 1..225: note = Nomurabacteria bacterium
  REGION 1..225: note = tr|A0A0G0ZE03|A0A0G0ZE03_9BACT 7-cyano-7-deazaguanine synthase OS=Candidatus Nomurabacteria bacterium GW2011_GWC2_42_20 OX=1618756; GN = UV12_C0015G0008 PE=3 SV=1
MNGLAVVLKKRVLVLLSGGIDSAVCATKLCTDGNDVYALSIRYPNSANAEEIDNAIFHAKRLHIKHVVVDFNFIEQLTVGVDANMSFNVGGAINNCISRGKVPMPMSVELLHVVALMFARMREIRHIYWSIHKDDIVGDSEKKIFEYLRALEGPATLGRYSSCKFELPFIGFSKKEVIEIGESLDVNFDHTHSCSSSSRVACGVCRQCVLRADAFESLHPKKLAG

SEQ ID NO: 37201 - protein, 218 aa, unidentified
  source 1..218: note = Nomurabacteria bacterium
  REGION 1..218: note = tr|A0A1F6YI68|A0A1F6YI68_9BACT 7-cyano-7-deazaguanine synthase OS=Candidatus Nomurabacteria bacterium RIFOXYA1_FULL_35_17 OX=1801798; GN = A2192_02660 PE=3 SV=1
MKNKKAICLISGGLDSAVASAITINEGYEPIFLFLRYGQKTLEKEEWCLDKLTKYWKVKQVYKVDLPWIKEFGGSALLDKNIPLDEINFRLEYVPFRNSIFLAVATALAEVEKADIIVVGSTGGDHICPDNRPEFIKAFQKIISMGTMLKKDIKIFHPLTKTDKTGAVKIGEKLKVPFELTWSCHNKIDFACGHCSNCLSRIEAFNLNVFRDPIEYEK

SEQ ID NO: 37202 - protein, 460 aa, unidentified; identical to SEQ ID NO: 28914
  source 1..460: note = Omnitrophica bacterium
  REGION 1..460: note = tr|A0A1J4VN28|A0A1J4VN28_9BACT Multifunctional fusion protein OS=Candidatus Omnitrophica bacterium CG1_02_49_10 OX=1805289 GN=queE PE=3 SV=1

SEQ ID NO: 37203 - protein, 226 aa, unidentified
  source 1..226: note = Omnitrophica bacterium
  REGION 1..226: note = tr|A0A2H0Y5S5|A0A2H0Y5S5_9BACT 7-cyano-7-deazaguanine synthase OS=Candidatus Omnitrophica bacterium CG08_land_8_20_14_0_20_41_16 OX=1974743 GN=queC; PE = 3 SV=1
MANNIAVVLLSGGLDSATTLYLARKQGYKCFCLIFDYGQRQKKEIEYAKKIARAANCPYKIIKINLPWKGSALLDKKIKIPKLANLRTCELANKIPSTYVPARNIIFLSFALSYAEAIGAKAIFIGAHVQDYSGYPDCRPQFYRAFKKVVLTGTKAGVEKKRIRIGTPLIHKTKAQIIKLGERLGVSFGLTWSCYRGGRVPCGECDSCYYRAKGFKEAGIKDPLKK

SEQ ID NO: 37204 - protein, 202 aa, unidentified
  source 1..202: note = Omnitrophus magneticus
  REGION 1..202: note = tr|A0A0F0CVZ4|A0A0F0CVZ4_9BACT 7-cyano-7-deazaguanine synthase OS=Candidatus Omnitrophus magneticus OX=1609969 GN=OMAG_000430 PE=3 SV=1
MHKAVVLLSGGMDSAVTLYIAKQKYQCHVLIFDYGQQARKEIISAKNLAKQSSSDFYVIKITLPWKGSALLDKNIKIPENGDYLGKGIPSTYVPARNIIFLSFGVSFAEAIGANAIFIGAHELDFSNYPDCRGEFFDSFQKVINKGTKSGVNKSPVKIITPILNKTKKEIVKTDIKHSFYIFFILIIFIPTFLLILILNIFF

SEQ ID NO: 37205 - protein, 80 aa, unidentified
  source 1..80: note = Omnitrophus magneticus
  REGION 1..80: note = tr|A0A0F0CQL5|A0A0F0CQL5_9BACT 7-cyano-7-deazaguanine synthase OS=Candidatus Omnitrophus magneticus OX=1609969 GN=OMAG_002320 PE=3 SV=1
MLLTAMAAPHPKVWNLASVITPILNKTKKEIVKTGTKLGVPFQYTWSCYKGGKKPCGTCESCAFRAKGFQSADIVDPIGV

SEQ ID NO: 37206 - protein, 269 aa, unidentified
  source 1..269: note = Ozemobacter sibiricus
  REGION 1..269: note = tr|A0A367ZMK4|A0A367ZMK4_9BACT 7-cyano-7-deazaguanine synthase OS=Candidatus Ozemobacter sibiricus OX=2268124 GN=queC PE=3 SV=1
MTSPRSPSGSARAATTSPLGRTTSTRRKPASSAQRPLAVIVASGGMDSTVCISIAVDEGFEPALFHLDYGQRTERRERRAFRALARHFGARHTLVVKAAHFRQIGGSALTDHRIAVPTGRAAARATARATAGHGLPVTYVPFRNANILAMAVSWAEVIGATRVYIGAVEEDSSGYPDCRETFIRAFDRAIKAGTGAGHALSLKAPLLHLSKKEIVRWGMSLGTPFHLTWSCYQREDLACGECDSCRLRLRGFRQAGFMDPLPYARNEQG

SEQ ID NO: 37207 - protein, 316 aa, unidentified
  source 1..316: note = Pacebacteria bacterium
  REGION 1..316: note = tr|A0A2H0SXM7|A0A2H0SXM7_9BACT 7-cyano-7-deazaguanine synthase OS=Candidatus Pacebacteria bacterium CG10_big_fil_rev_8_21_14_0_10_40_26 OX=1974767; GN = COU64_04285 PE= 3 SV=1
MLNKISKKKFNLLLKNKKNEDLDFLKFSEDFLIKKRGFIFKQPKKGDKVILLLSGGIDSVVAWAVLMKVYGYQVYPVIIDRGSNKRAKRELSAVRYFEKYFSKKYPEQYIRPFHLSVNTVAKEIIDTLDKNNITPEDIVLNYKENKFLAEDNSNVVIARAKGVSPYLMPFYGVVYSDYLKFIKGLDIHTILVGVNFSDGIVVSSQTFTALRSTLLSMCVATDNYKWNFSSVFLERETGVYMDKLEIIKLGNKLGIPLKRTWSCYNDGIMQCGDSCATCIDRKRSFYLAGIKDETYYRPYLFRLIKDKVKSWVFFFK

SEQ ID NO: 37208 - protein, 316 aa, unidentified
  source 1..316: note = Pacebacteria bacterium
  REGION 1..316: note = tr|A0A3D1CTW1|A0A3D1CTW1_9BACT 7-cyano-7-deazaguanine synthase OS=Candidatus Pacebacteria bacterium OX=2053589 GN=DEP87_03925 PE=3 SV=1
MIFSATSKKNFEKKILSREHEDFGVIKHIETELKRKRGWVFQLPKPEQPVVLLLSGGLDSIVAWHLLMKKYGLMVYPLVINKGMKRTHLEMRSVKYYSKLYQKLFPDLYQAPFHINLPLTEISIGQAVFTEKVHPLVILENLTDSAALKLSLSLGSSILTPFVAKLYAQFLYSTQHLTIKTIFCAVTKGDGENSLVPEQTFTALRTMMWSLCVLTRDYEWQYASVALEKELGNFLSKADLIAWADQHQIPLEHTWTCYHPSIDQTHCGECITCSDRIKSFEKVGVIDRTIYYDQKASLYRRLIDKFKLFIRYYFNL

SEQ ID NO: 37209 - protein, 257 aa, unidentified
  source 1..257: note = Pandoraea novymonadis
  REGION 1..257: note = tr|A0A2P6UYN1|A0A2P6UYN1_9BURK 7-cyano-7-deazaguanine synthase OS=Candidatus Pandoraea novymonadis OX=1808959 GN=queC PE=3 SV=1
MTSATDTALVLFSGGQDSTTCLAWALSCYSYVETIGFDYGQRHKAELRCRIDVLAKIRECFPAWASKLGEDHLIDFSVLGKITDSALTQKVAITMEAGNLPNTFVPGRNLLFMTIGAAIAYRRGLGVLVGGMCEIDFSGYPDCRDDTMKALQVVLNLGMDSHFIIKTPLMWIDKAETWQLANDLGGDRLVKLICEDTHTCYLNIRDELHPWGYGCGKCPACQLRRRGFDAWCDRKTVTQFISESQDGEKGKANGICC

SEQ ID NO: 37210 - protein, 241 aa, unidentified
  source 1..241: note = Pantoea carbekii
  REGION 1..241: note = tr|U3U8E4|U3U8E4_9GAMM 7-cyano-7-deazaguanine synthase OS=Candidatus Pantoea carbekii OX=1235990 GN=queC; PE = 3 SV=1
MINIRKKTKQAVVLFSGGQDSTTCLIQACQFYNKVYCITFDYNQRHRQEIKVAMRLAKHLGIQEHKILDITILNELTISSLTRFNIPIPNYKFNTTCLPSTFVPGRNILFLTISAIYAYTIGAESVIAGISENDFLNYPDCRKEFINLFGNAINLGMERNINFEMPLMSLNKAETWALADYFQQLQLIRLETLTCYNGIKGDGCGNCSACYARASGLADYEANRSNIMKEMKKKCFLKNVL

SEQ ID NO: 37211 - protein, 265 aa, unidentified
  source 1..265: note = Paraburkholderia kirkii
  REGION 1..265: note = tr|G4M7T7|G4M7T7_9BURK 7-cyano-7-deazaguanine synthase OS=Candidatus Paraburkholderia kirkii UZHbot1; OX = 1055526 GN=queC PE=3 SV=1
MRRATPITITEYGVFTVTRIDAKDSALVLFSGGQDSATCLAWALERYRRTVETLGFDYGQRHRVELECREGYRAAIAREFPHWAERLGEDHMIDLSVLGAISDTAMTREIEIQATASGLPNTFVPGRNLLFMTVAAAVAYRRGLKVLVGGMCETDFSGYPDCRDDTMKALQVALNLGMKTRYETRYAVETPLMWLDKADTWRLAETLGGEALVELIRVETHTCYVGERAELYDWGFGCGQCPACKLRKRGYEAYRAGEQVTTAPV

SEQ ID NO: 37212 - protein, 234 aa, unidentified
  source 1..234: note = Paraburkholderia kirkii
  REGION 1..234: note = tr|A0A0L0LZZ4|A0A0L0LZZ4_9BURK 7-cyano-7-deazaguanine synthase OS=Candidatus Paraburkholderia kirkii OX=198822 GN=queC PE=3 SV=1
MLFSGGQDSATCFAWALERYRTVETLGFDYGQRHRVELECRDGFRAAIASGFPQWAERLGEDHMIDLSVLGAISDTAMIREIEIRTTTTSGLPNTFVPGRNLLFMTIAAVVAYRRGLKVLVGGMCETDFFGYPDCRDDTMKALQVALNLGMETRYALETPLMWLDKADTWRLAETLGGEALVELIRVETHTCYVGERAELHDWGFGCGQCPACKLRKRGYEAYRAGEQVTIAPV

SEQ ID NO: 37213 - protein, 229 aa, unidentified
  source 1..229: note = Parcubacteria bacterium
  REGION 1..229: note = tr|A0A3R6ZQL5|A0A3R6ZQL5_9BACT 7-cyano-7-deazaguanine synthase OS=Candidatus Parcubacteria bacterium OX=2053309 GN=queC PE=3 SV=1
MGMSKPAVILLSGGLDSTTTLAIAKNEGFDVYAMSVRYGQRHSVELESAIKIARHFLVMKHQIVDIDLRAFGGSALTDEIDVPKDRSEEEMQDIPITYVPARNTIFLSYALAWAEVLGCQDIFCGVNAVDYSGYPDCRPEYIDAFEKMANLATKASVEGKKLKIHSPLIHLTKAEIIKKGYDLGVDYSVTLSCYDPSRAGEACGACDSCQLRKKGFEEAGIPDPTRYLP

SEQ ID NO: 37214 - protein, 216 aa, unidentified
  source 1..216: note = Parcubacteria bacterium
  REGION 1..216: note = tr|A0A3M0WV77|A0A3M0WV77_9BACT 7-cyano-7-deazaguanine synthase OS=Candidatus Parcubacteria bacterium OX=2053309 GN=D6827_03715 PE=3 SV=1
MDNKKYIALVSGGMDSTTLLYEYKHLIRAALYIDYASKHKEKEHAFAELHAKKNGIEFIKANLQDVAQYLKSNLIKNQGDIPDGHYTDLIMRKTVVPFRNGIMISIAAGIAESLEAKGVLLANHAGDHAIYPDCRNEFISKMAAAICSGTYAKIELIAPYTNITKRDIALKGMKLHIPYELTWSCYKGKDIHCGTCGTCVERKEALAGFDTTQYQA

SEQ ID NO: 37215 - protein, 279 aa, unidentified
  source 1..279: note = Pelagibacter sp.
  REGION 1..279: note = tr|A0A1Z9HY22|A0A1Z9HY22_9PROT 7-cyano-7-deazaguanine synthase OS=Candidatus Pelagibacter sp. TMED166 OX=1986805 GN=CBD26_02860 PE=3 SV=1
MIQTGKVIAFYQKYTMLSDKCSVLSFSGGMDSTSLLLKLISKNHIVHAISFKYGQKHEVEVELAKNNISYLKNNGFKDKVIHKVFDISNILSNFNSSLIDKNQDVPEGYYESDMMKSTFVPNRNAIFFSLIYGYAISISKNYDDKISISLGAHSGDHAIYPDCRLDFFESLFKSLQLGNWGSDNIELSVPYIDMDKKNILLDAEKSIKYLDLDFDTIFKNTITSYAPTKNGVSSGRTGSDIERILAFDSIKKKDPIKYQDSWENVLKNAKETEQEYLNG

SEQ ID NO: 37216 - protein, 345 aa, unidentified
  source 1..345: note = Pelagibacter sp.
  REGION 1..345: note = tr|A0A1Z8VWK0|A0A1Z8VWK0_9PROT ATPase (Fragment); OS = Candidatus Pelagibacter sp. TMED64 OX=1986830; GN = CBC24_08990 PE=4 SV=1
MKYCTKCLLPETHETIEFDHEGVCNICRNHEFKKEKIDWDQKRKDFLDIIEEYRGKYAYDCIVPFSGGKDSTYTLYQLAKEFDLKCLVVSFDHGFYRQTLIENNKRVFKALGVDSMVYKPNWLTVRKLMLESLLRKGDFCWHCHSGIFAYPMQVAISLNVPLVIWGEPQAEYTAYYSYEDTLNETEEVDEKRFNRFVNLGITADDMIGMLGDEELDPRDMDPFRYPKLRDLKRINYRSICLGSYIPWDVKKQVALIKDELGWQEDLNAGIPPEYGYEKIECQMQGIRDYLKYIKRGYSRTTHLTTIDIRNDRIKREDALELVEKYDGKRPESLDHFLEMLSLTED

SEQ ID NO: 37217 - protein, 222 aa, unidentified
  source 1..222: note = Peregrinibacteria bacterium
  REGION 1..222: note = tr|A0A1F7ABL8|A0A1F7ABL8_9BACT 7-cyano-7-deazaguanine synthase OS=Candidatus Peregrinibacteria bacterium RIFCSPLOWO2_01_FULL_39_12; OX = 1801897 GN=queC PE=3 SV=1
MKENSSKAVILLSGGQDSTTCLAWAKKKFDKIFAITFDYGQRHKTELLSAKKIAKLSGTPLKIIKIDVFKHLTKNALTDKFVKIKIQKNKLPTTFVPGRNLIFISIALIYAYQQNIQNIVTGVCQTDFSGYPDCRNEFIKSMEKTFALATEKKFKIHTPLMWLTKSKTVKLMQKLGSLNLLKYTHTCYKGLRPACGTCPACKLRIKGFKEAQIKDPLKYAKH

SEQ ID NO: 37218 - protein, 222 aa, unidentified; identical to SEQ ID NO: 37217
  source 1..222: note = Peregrinibacteria bacterium
  REGION 1..222: note = tr|A0A1F7AE26|A0A1F7AE26_9BACT 7-cyano-7-deazaguanine synthase OS=Candidatus Peregrinibacteria bacterium RIFCSPLOWO2_02_FULL_39_10; OX = 1801899 GN=queC PE=3 SV=1

SEQ ID NO: 37219 - protein, 208 aa, unidentified
  source 1..208: note = Peribacteria bacterium
  REGION 1..208: note = tr|A0A1F7BNE0|A0A1F7BNE0_9BACT 7-cyano-7-deazaguanine synthase OS=Candidatus Peribacteria bacterium RIFCSPHIGHO2_01_FULL_55_13 OX=1801917 GN=queC; PE = 3 SV=1
MDSVTLLHFLVKHRKCRMEAISFDYGQKHVKEISYAKKQCEALGVQHHLVALPFVGSLFSSALLQGGEEIPDGHYEEGNMKQTVVPNRNMIMIAIATGYGQSTGASFLALGVHAGDHAIYPDCREEFIDALRKAIELSDWNPFTVFAPFQRMTKVEILEIGFQLDPPVDYGKTWTCYKGKEEPCGTCGACRERGEAFEQIGAEDPQGF

SEQ ID NO: 37220 - protein, 248 aa, unidentified
  source 1..248: note = Phaeomarinobacter ectocarpi
  REGION 1..248: note = tr|X5MAR5|X5MAR5_9RHIZ 7-cyano-7-deazaguanine synthase OS=Candidatus Phaeomarinobacter ectocarpi; OX = 1458461 GN=queC PE=3 SV=1
MPRFKLPMTNASSSLGKTGALVLFSGGQDSTTTLAWALDRYAQVETIGFDYGQRHVIELEQREVVLDKIRAAYPDWAAKLGDDHMLDLTDLGRISETSLTRDAEIAFTEEGLPSTFVPGRNLLFFTYAAAIAFRRGLTVLVGGMCETDYSGYPDCRDTTLKSLQASLNLGMDRAFVIETPLMWIDKAQTWAMAHALGGDTLTHIIRDDTHTCYLGDRQTSHPWGKGCGTCPACELRAAGWDTWKAHIL

SEQ ID NO: 37221 - protein, 237 aa, unidentified
  source 1..237: note = Photodesmus blepharus
  REGION 1..237: note = tr|A0A084CM90|A0A084CM90_9GAMM 7-cyano-7-deazaguanine synthase OS=Candidatus Photodesmus blepharus OX=1179155 GN=queC PE=3 SV=1
MKKAIVVFSGGQDSTTCLIAALEEFDEVHTITFNYGQRHKLETEVAQNLAKELNVTSHRLIDVAILNELAVSSLTRNDILMSNKPEKNGLPNSFVPGRNILFLTLAAIYAYQIEVNSIITGLSETDFSGYPDCRNNFVQTLNSALVHGMERNLKIVTPLMWLNKAEIWAMAHKYNTFNFIRNKTLTCYNGIIGNGCEDCYACKLRQTGLLSYLQNSEFVMANYLEKTGSSKRKRFYF

SEQ ID NO: 37222 - protein, 230 aa, unidentified
  source 1..230: note = Photodesmus katoptron
  REGION 1..230: note = tr|S3DGM5|S3DGM5_9GAMM 7-cyano-7-deazaguanine synthase OS=Candidatus Photodesmus katoptron Akat1; OX = 1236703 GN=queC PE=3 SV=1
MKKAVVVFSGGQDSTICLVKALDEFDEVHAVTFDYAQRHRKEIKVAINLAQYFKVTTHKLMDLTLLNKLTISALTREELPVSNQLQNNGLPNSFVPGRNILFLTLAGIYAYQISADAVITGLCEADSSGYPDCRSVFLKNMNKTLIQGMDYKVNILAPLMRLNKAEVWAMADKYNVLDLIRYKTLTCYNGIIGIGCGNCLACKLRNIGLNNYLSNPKSIMKSYLKKVNSS

SEQ ID NO: 37223 - protein, 223 aa, unidentified
  source 1..223: note = Phycorickettsia trachydisci
  REGION 1..223: note = tr|A0A2P1P7D4|A0A2P1P7D4_9RICK 7-cyano-7-deazaguanine synthase OS=Candidatus Phycorickettsia trachydisci OX=2115978 GN=queC PE=3 SV=1
MKKAVALISGGADSATTLAIALQQGFEVHAISFDYGQKHRIELEKSKLVAQKAASHKVIKLDPTAFQRSALTNNNLNVPKYDSVDQIPQKVADTYVPARNLLFLSYATSYAESIGASSIFIGVHKEDFANYPDTRPEFIKSFQEVVNCGTDAQIKIYAPLIDLDKDGVIAKGKALGVDYSNTITCYKPDDQGRSCGKCIACLVRLAAFKKNNLVDTIPYRQNP

SEQ ID NO: 37224 - protein, 237 aa, unidentified
  source 1..237: note = Phycosocius bacilliformis
  REGION 1..237: note = tr|A0A2P2E9B8|A0A2P2E9B8_9PROT 7-cyano-7-deazaguanine synthase OS=Candidatus Phycosocius bacilliformis OX=1445552 GN=queC PE=3 SV=1
MLEPTHALVLFSGGQDSTACLAWALSRFARVETIGFDYGQRHRVELTQRLILLDALRGQFPQWADKLGDDHVLDLPVLGQISDTSLTRQTEIALAETGLPTTFVPGRNLIFLTFAAALAYRRGLGVLVGGMCETDFSGYPDCRRATLDAVEQSLSLGMDAPFQVSTPLMYLTKAQTWALAHQLGGQGLVDLTVEHSHTCYHGDRTHRHDWGYGCGTCPACDLRAAGWAAWQAEQAQS

SEQ ID NO: 37225 - protein, 229 aa, unidentified
  source 1..229: note = Poribacteria bacterium
  REGION 1..229: note = tr|A0A496BI55|A0A496BI55_9BACT 7-cyano-7-deazaguanine synthase OS=Candidatus Poribacteria bacterium OX=2026781 GN=queC PE=3 SV=1
MSEKAVVLLSGGLDSTTTLAIARDEGYDTYCMSFRYGQRHIVELKCAENVTKALGATRHIVVDIDLRTFGASALTADIEVPKNRSDAEMGNGGIPITYVPARNTIFLSYALAWAEVLGADTIFIGANAIDYSGYPDCRPEYIEAYQAMANLATQAGVEGKTQLTICAPLMNKTKAEIIQIGTALGVDYGLTLSCYDPDAEGRACGGCDSCLLRKKGFKEAGIPDPTFYI

SEQ ID NO: 37226 - protein, 216 aa, unidentified
  source 1..216: note = Poribacteria bacterium
  REGION 1..216: note = tr|A0A2E3I2X6|A0A2E3I2X6_9BACT 7-cyano-7-deazaguanine synthase OS=Candidatus Poribacteria bacterium OX=2026781 GN=queC PE=3 SV=1
MFSGGQDSTTCLYWALKQFDHVDTVGFDYGQKHLIELDIAKQICCDLSINYTVINLKDVFSNSSLVDSQQDVSEQHTVNSDLPSTFTAGRNAVFLSVTAGLAYNKNINNIVIGVCQTDYSGYPDCRRDFIDSMEDSLSLALDSKIKIHTPLMYLTKAETWKMAKDLDCLEVIIHQTHTDYNGNRTDFNEWGYGALDNPASQLRAKGYQEAKAKGWI

SEQ ID NO: 37227 - protein, 237 aa, unidentified
  source 1..237: note = Propionivibrio aalborgensis
  REGION 1..237: note = tr|A0A1A8XJH1|A0A1A8XJH1_9RHOO 7-cyano-7-deazaguanine synthase OS=Candidatus Propionivibrio aalborgensis OX=1860101 GN=queC PE=3 SV=1
MSTAFRSSPPRAVVLLSGGLDSATTLAIARDAGFDCHCLSLDYGQRHRIELEAAATVATALCASEHRVLHLGLDEFGGSALTDTRIAIPVDGVQPGIPATYVPARNTIMLSLALAWAEVLGSRDIFVGVNAVDYSGYPDCRPEYIAAFETMANLATKAGVEGRKLTVHAPLIDLSKAEIIRIGSKLGIDYRATVSCYQADEQGMACGVCDSCRLRREGFAAAGVADPTPYMRNPQEA

SEQ ID NO: 37228 - protein, 233 aa, unidentified
  source 1..233: note = Pseudomonas adelgestsugas
  REGION 1..233: note = tr|A0A481QMN2|A0A481QMN2_9PSED 7-cyano-7-deazaguanine synthase OS=Candidatus Pseudomonas adelgestsugas OX=1302376 GN=queC PE=3 SV=1
MNKKAVIVFSGGQDSTTCLIQALDIYDEVHCITFDYRQRNIAEIEVAQNLTKQLGVTVHKIIDIFSLSELASSSLTCNCIPIPTTMYSSVASFPNTFVPGRNILFLTMASIYAYQVNIKTVITGVCETDFSGYPDCRAEFIKALNKALVLGMEYKLRLDTPLMWLTKAETWALADSYQQLDLVQYKTLTCYNGIIGSGCGNCNACNLRTRGLNDYLQNSIDVMHNLKQKLEMS

SEQ ID NO: 37229 - protein, 227 aa, unidentified
  source 1..227: note = Raymondbacteria bacterium
  REGION 1..227: note = tr|A0A1F7F1B1|A0A1F7F1B1_9BACT 7-cyano-7-deazaguanine synthase OS=Candidatus Raymondbacteria bacterium RIFOXYD12_FULL_49_13 OX=1817890; GN = A2519_10625 PE=3 SV=1
MKKKNVLVIVSGGINSCLTAALVAAKYNPLFLHVSYGQKVEKRELKAFKDLASYFKVKKRLVASIKYLKEIGGSSLTDRNINIALANGENKKIPTSYVAFLNTHCIAIAVSWAEVIGVDKIFFGANEGGELSYPDCSKNYFAAMNKVISEGTRPDVKISLETPLISLKKSDIVKQAQDMGLPLHLTWSCYKNNDIACGECDACMRRLKGFKKAKLYDPLEYMVYPKL

SEQ ID NO: 37230 - protein, 124 aa, unidentified
  source 1..124: note = Regiella insecticola
  REGION 1..124: note = tr|G2GXP1|G2GXP1_9ENTR 7-cyano-7-deazaguanine synthase OS=Candidatus Regiella insecticola 5.15; OX = 1005043 GN=Rin_00005340 PE=3 SV=1
MQQSAVVVFSGGQDSTTCLIQALQQYEKVHCITFDYQQRHREEIEVAKKLVKTLNNERTEKNGIVHKILDVTLLNELTISSLTQNHISIPTYTDANKHANKKDIPNTFVPGRNILFLTLAAIYA

SEQ ID NO: 37231 - protein, 244 aa, unidentified
  source 1..244: note = Regiella insecticola
  REGION 1..244: note = tr|E0WSG7|E0WSG7_9ENTR 7-cyano-7-deazaguanine synthase OS=Candidatus Regiella insecticola LSR1 OX=663321; GN = queC PE=3 SV=1
MQQSAVVVFSGGQDSTTCLIQALQQYEKVHCITFDYQQRHREEIEVAKKLVKTLNTARTEKNSIVHKILDVTLLNELTISSLTQNHIPIPPYTDANKHTNKKAIPNTFVPGRNILFLTLAAIYAYKINTTTVITGVCETDFSGYPDCRDDFVKSLNQAINLGIDRSIDFITPLMWLNKAEIWALADHYQQLKLIRSSTLTCYQGNIGDGCKQCAACHLRSQGLIYYQANKQQVMESLQKKINRL

SEQ ID NO: 37232 - protein, 600 aa, unidentified
  source 1..600: note = Rhodobacter lobularis
  REGION 1..600: note = tr|A0A0J9EGD6|A0A0J9EGD6_9RHOB Uncharacterized protein OS=Candidatus Rhodobacter lobularis OX=1675527; GN = AIOL_000893 PE=4 SV=1
MPEIRARPAPGGDTRNYGLPFTLDGIEKAVSIRIEGLSRNLVADLPDLSLDLLEIAALVYGCDAAVSRGGPVDTRLGRAWYRDFQIEVPVRCQNLWTRKDVRTALSEVLNFVSGDQFKFTFTAHPGAGGHQEFFKFSPDDGWQADRVMMFSGGLDSFAGALEEMFEHKQQVALVSHFSATKIAPRQKALKAALEGRCGPKSCKHFPVKIQLGKGGNKETTYRTRSFLFAVLGMIVAQSFGRDRVSFYENGVVSLNLPLVANVVSTRATRTTHPKTLNLMTRFFTGVFERTAKIDNPYFWRTKTDVVETIARLGLAEKIRVTNSCADTRNRTEQHPHCGRCSQCIDRRFAVLAAGLEHEDPEEAYAVDLMQGARREVRDREIALSYVRNALDYEVMAPPDLQSCFPEVTDSIGSLGVPPQVGLEQVNALLQRHGKAVAGVMRTKAPKDPAPQSLPALFGDTQREPRLRAGPKVPVAPSPVLQARLILTLQSTSKITINDKIELVGPATVRLLTILAEQHLEAAGAGLDPFDYPCTEAGKLAGLLDVTDESLRRQISRMRGDLRKRFASADPTLSDEFEIIENVPWSGYRLAPDRVDVRRKT

SEQ ID NO: 37233 - protein, 440 aa, unidentified
  source 1..440: note = Riflebacteria bacterium
  REGION 1..440: note = tr|A0A2N1TR71|A0A2N1TR71_9BACT DNA-binding protein; OS = Candidatus Riflebacteria bacterium HGW-Riflebacteria-1; OX = 2013829 GN=CVV41_18095 PE=4 SV=1
MINFVFNHNHNLLPPASENTIPVQLYKLSGKIRNDVSFVGSPVLNKIKRLRGYVSPQAMDFLSIALAVTAADTFVQRSKSSDGWTREFRIKLPICDPVRWEPLKHKVEKALHFLSGDLWEFTFSPGGHPPPRPYRSRKERTEVIKLRNRDCVCLFSGGLDSAIGVIDLLSRGKSPLLVSHSYRGDKSFQEGIASSLPGQFSRLSASLSPRIALLKQGKTDITMRTRSLSFLALGALGISALNSVQQNGPIDFFVPENGFISLNTPLTPRRIGSLSTRTTHPFFISAIQEIFDEVGIPGIIKNPYQFDTKGEMGKKCLNQDLLKIIVDKTISCSHWKRNNEQCGACVPCLIRRAALHESNITELLNYSSNSLTDVLTQVDKRDDLLAMLIALNRKSSSNISSWITDAGPLPIEQLDDFKALFLRGLSEVKNYLQSEGIKCP

SEQ ID NO: 37234 - protein, 225 aa, unidentified
  source 1..225: note = Roizmanbacteria bacterium
  REGION 1..225: note = tr|A0A2M8KMR0|A0A2M8KMR0_9BACT 7-cyano-7-deazaguanine synthase OS=Candidatus Roizmanbacteria bacterium CG10_big_fil_rev_8_21_14_0_10_36_26 OX=1974851; GN = COU86_00250PE=3 SV=1
MAIKGELDMKAINRKIAVCTVSGGLDSAVAFAILADKDYKLHFIFFDWGQKTLEKERKCAKALAKHYNVDLKIVEIPFLKSLPDVSLTAKETLTTEINEYVPNRNAILESQAVAYAESLKAGIICVGSTGGDHICPDNSPKFIKAMQALINQGTMLKPPIQIIAPLMDTDKIGAVKLGIKLKVPFELTWSCHNNTDKACGKCSNCLARLEAFKVNNISDPTKYQK

SEQ ID NO: 37235 - protein, 239 aa, unidentified
  source 1..239: note = Roizmanbacteria bacterium
  REGION 1..239: note = tr|A0A1F7I222|A0A1F7I222_9BACT 7-cyano-7-deazaguanine synthase OS=Candidatus Roizmanbacteria bacterium RIFCSPHIGHO2_12_FULL_39_8; OX = 1802050 GN=queC PE=3 SV=1
MRKAVVVYSGGMDSSTLLAYVASQVFEVYAISFNYGQRHKKELQYAKKFAKLFTNLVEHKIIDISVINELIQGSSLTTPGIDVPDGHYAFETMKSTVVPNRNAIMLSLACGYAVSLGANCLFVGVHSGDHFIYPDCRPEFIETIDKAFRLGNQGFANEDLRIVAPFMYSTKADIVKLGKQLSIDYSKTWSCYKGGNIHCGRCGTCFERREACILAGVSDPTKYKDNRSLDVIQKEMEKK

SEQ ID NO: 37236 - protein, 229 aa, unidentified
  source 1..229: note = Rokubacteria bacterium
  REGION 1..229: note = tr|A0A0T5ZYY4|A0A0T5ZYY4_9BACT 7-cyano-7-deazaguanine synthase OS=Candidatus Rokubacteria bacterium CSP1-6 OX=1640509 GN=queC PE=3 SV=1
MKRAVVLLSGGLDSATTLAIARSEGYACHALSFQYGQRHSRELESAKKVAAALDAAEHLILTLDLRLIGGSALTADIPVPKGRSAAEIGHGIPITYVPARNTIFLSHALGWAEVLGAEDLFFGANVYDSSGYPDCRPEYIEAFERLANLATKAGVEGKSRFKIHAPLIQMTKAEIIKKGHALGVDFGLTWSCYEPAPDGRACGLCDSCALRLKGFKEAGLTDPLPYAAK

SEQ ID NO: 37237 - protein, 240 aa, unidentified
  source 1..240: note = Rokubacteria bacterium
  REGION 1..240: note = tr|A0A1Q7I5U7|A0A1Q7I5U7_9BACT 7-cyano-7-deazaguanine synthase OS=Candidatus Rokubacteria bacterium 13_1_40CM_4_67_11 OX=1805361 GN=queC PE=3 SV=1
MRVPRTSERDGGTEHRPAVVLLSGGLDSTTAMAVARAEGFACYALTIDYGQRHRVELTAAAHVAAALGARDHVVLAVDLRRFGGSALTADVALPRGRHPADMTDIPVTYVPARNTVFLSLALAWAETLCAEDIFIGVNVLDSSGYPDCRPEYVHAFEAMANLATKAGVEKRSRFSIHTPLIRLGKAEIVRRACELGVDLSLTWTCYDPGTELRPCGACDACILREKGFAEAGVDDPLRCR

SEQ ID NO: 37238 - protein, 261 aa, unidentified
  source 1..261: note = Saccharibacteria bacterium
  REGION 1..261: note = tr|A0A3C7Z8E5|A0A3C7Z8E5_9BACT 7-cyano-7-deazaguanine synthase OS=Candidatus Saccharibacteria bacterium OX=2026720 GN=DD425_02735 PE=3; SV = 1
MNPKFVLPMDDLPTLKRLEDVILTKRETLFQKPKKGEGIVFIVSGGLDSTTALARVLEEFDAEIYPLYIQRGARAEDNELSSLHHYLDIFSKKHANLHELEILTAEVPPAKYKQYIPEKQLSTIGHTLRNSMLQSYAVQYAVSVGYRDNIRIRTVFTSLVPDDDFPHCRLIALRAETILTCIDGDDWSWQVTSPLLEEGLWGWVDKTMSIKYAAENNIDLSHTYTCTDSPTIACGVCPACVERIKAFEDSGYPDPIEYKKS

SEQ ID NO: 37239 - protein, 116 aa, unidentified
  source 1..116: note = Saccharibacteria bacterium
  REGION 1..116: note = tr|A0A3C7Z8G9|A0A3C7Z8G9_9BACT Uncharacterized protein (Fragment) OS=Candidatus Saccharibacteria bacterium OX=2026720 GN=DD425_02745 PE=4 SV=1
MNNIANSYEQILQDNRGYVSEWPQDKIAVLIISGGLDSITMAAKLLKDGFTLYPLHIERGQTNFIAEHNSIERFAKIFNDQYPGKFKEVVYIKLNIPPKEFKEDLIPYTKEYGHPL

SEQ ID NO: 37240 - protein, 248 aa, unidentified
  source 1..248: note = Saccharicenans subterraneum
  REGION 1..248: note = tr|A0A3E2BNG6|A0A3E2BNG6_9BACT 7-cyano-7-deazaguanine synthase OS=Candidatus Saccharicenans subterraneum OX=2508984 GN=queC PE=3 SV=1
MKRMPRSGHSSAVEISKPRACLVLLSGGIDSTTALHWALRRYGRVQPVIFDYGQRHRVEIEMARKTCARLGLRPRTIKVDLRQVGGSALTDKKLSVPQFKKPEDIKKGLPATYVPFRNGIFISLAAALGESLGIFDIVCGFNVIDSPNYPDTTAAFVRAMNRTINTGTGAIFGQKRFRIIAPFINMKKSEIIRLGLKMGADYSYSITCYAGREVPCLRCSACLLRARAWKEAGQEDHLLARLKKEGKI

SEQ ID NO: 37241 - protein, 286 aa, unidentified
  source 1..286: note = Saccharicenans subterraneum
  REGION 1..286: note = tr|A0A3E2BLC6|A0A3E2BLC6_9BACT ATP-utilizing enzyme of the PP-loop superfamily OS=Candidatus Saccharicenans subterraneum OX=2508984 GN=OP8BY_0188 PE=4 SV=1
MRPTAGKKRGLSKNLNKKATFAKYQRLVEILKSFDGLLVAFSGGVDSSLLLKAAADSGAKVLAVTVDSPIYHRQEIREARQIASKLGVPFRLIKSDDYLREDFKKNDLLRCYHCKLAIFTRLREIARSEGLSAVVEGSNLDDERDYRPGRKALAELGIGSPLKEAGLGKAEIRFLARSFGLPNWDRPANACLATRIPYGQPVELRWLERIAAGETFLRKMGFSQVRLRHHGELARIEVWPNELALVISQPSREKIVRRLKKLGWKYVAFDLEGYRTGSLNPGGLKT

SEQ ID NO: 37242 - protein, 208 aa, unidentified
  source 1..208: note = Saganbacteria bacterium
  REGION 1..208: note = tr|A0A2H0XZY0|A0A2H0XZY0_9BACT 7-cyano-7-deazaguanine synthase OS=Candidatus Saganbacteria bacterium CG08_land_8_20_14_0_20_45_16; OX = 2014293 GN=queC PE=3 SV=1
MKKKAIILLSGGLDSTTTLYYAKKHGYECHALIFDYGQRHKKEVRSAVAVALLESVAYHVMRIKLPWKGSSLLDKKTKVPTNRKMKGIPSTYVPARNTIFLSFALSYAEAIEAQVIFIGANAVDFSGYPDCRPKFYQAFHSVIKEGTKAQKIKILTPLIDLSKAEIIKLAIKLKVPLELTWSCYQGGQKPCGICDSCRLRQRGFDSIS

SEQ ID NO: 37243 - protein, 224 aa, unidentified; identical to SEQ ID NO: 37073
  source 1..224: note = Scalindua brodae
  REGION 1..224: note = tr|A0A0B0EHW8|A0A0B0EHW8_9BACT 7-cyano-7-deazaguanine synthase OS=Candidatus Scalindua brodae OX=237368 GN=exsB PE=3 SV=1

SEQ ID NO: 37244 - protein, 237 aa, unidentified
  source 1..237: note = Scalindua sp.
  REGION 1..237: note = tr|A0A523CMJ3|A0A523CMJ3_9BACT 7-cyano-7-deazaguanine synthase OS=Candidatus Scalindua sp. AMX11 OX=2555784 GN=queC PE=3 SV=1
MRTKTQTPEKKRAIVLLSGGLDSCVTLAVANKEHNVALLHVQYSQRTQPRESMAFHNIANYYHVPEDKILITGLDHFKKIGGSSLTDTKLPIDKGEAETTMPNTYVPFRNTLLLAIAVSWAEVIKAETIFIGAVEQDSPNYPDCRQEYYDVFNQLVDVGTMPSTQIKVVTPLIGMKKFEIVKMGIELNAPLPLTWSCYENNDLACGRCQSCTLRLRAFEDAGYVDKIHYLEKNRRPS

SEQ ID NO: 37245 - protein, 225 aa, unidentified
  source 1..225: note = Schekmanbacteria bacterium
  REGION 1..225: note = tr|A0A1F7RS69|A0A1F7RS69_9BACT 7-cyano-7-deazaguanine synthase OS=Candidatus Schekmanbacteria bacterium RBG_16_38_10 OX=1817879 GN=queC; PE = 3 SV=1
MKKAVILLSGGLDSSTLMAIAKQEGYELYPITFRYGQKHKKEINSAKKIASVFKAKKHMIFDIDLKKIGGSSLTTEAPVPKQRKLKEISGSIPSTYVPARNTIFLGIALAWAETIGSRAIFIGVNSIDWSGYPDCRPEYIKAFQHLTDLATKTGAEKINKIKILAPLINMTKGEIIKKGLSLGVDYSITHSCYDPIKDGKPCGMCDSCILRKKGFAEAGIKDPLT

SEQ ID NO: 37246 - protein, 266 aa, unidentified
  source 1..266: note = Schekmanbacteria bacterium
  REGION 1..266: note = tr|A0A3M1RPJ4|A0A3M1RPJ4_9BACT ATP-dependent sacrificial sulfur transferase LarE OS=Candidatus Schekmanbacteria bacterium OX=2419984 GN=larE PE=4 SV=1
MESAEKKYKNLKRIISEYGNLLVAFSGGVDSTFLLKTAKDVLGENVIAVSALSETYVREELETAKKMAEKIGVKHIIIESKEVDIPQFRENPPDRCYYCKYELFSLLKKIAAENGIRYVADGTNYNDVRNDHRPGMRAAQELGVVSPLYEAKLNKEEIRYLSKNIGLETWNKPEMACLSSRFPYGTDITREKLQTIDEAERFLRGLGFKQLRVRHHGDTARIEIEQESLKRFSDDNMRISVVDKFKSLGFKYVALDLEGYRRGSMN

SEQ ID NO: 37247 - protein, 221 aa, unidentified
  source 1..221: note = Schmidhempelia bombi
  REGION 1..221: note = tr|A0A484GCK4|A0A484GCK4_9GAMM 7-cyano-7-deazaguanine synthase OS=Candidatus Schmidhempelia bombi str. Bimp OX=1387197 GN=queC PE=3 SV=1
MQKNKALVIFSGGQDSTTCLLQAIATYGVEHVQAITFAYGQRHAIELEKAAFIAKDLGIKQTVIDTTVLQQTTHNALMDTTLTVQAAGDKQYPNTFVDGRNALFLLLAACHAKQQGIHDIITGVCETDFSGYPDCRDVFIKSMNVTLNLAMDYSFNIITPLMYLTKAETWKLADELGYLDYIQQHTHTCYNGVAGGCRHCPSCQLREKGLQQYLAEQAKKR

SEQ ID NO: 37248 - protein, 325 aa, unidentified
  source 1..325: note = Shapirobacteria bacterium
  REGION 1..325: note = tr|A0A2M8L4L3|A0A2M8L4L3_9BACT 7-cyano-7-deazaguanine synthase OS=Candidatus Shapirobacteria bacterium CG10_big_fil_rev_8_21_14_0_10_40_9 OX=1974888; GN = COU95_00420 P E=3 SV=1
MRLNKISEKEFLSRLKKRRLEDLETIRVIEDFLLKKRGYVFRMPPPGSPVILLVSGGMDSITSWGISMEEFGLKVYPLSFDKGEKRRKKEEASLNFFSEFYSKRYPDLFVRPFKLSVDLRKISIPIEKATKILHPQIILDNLDSRGNISLNLSLGSFTLLPFYAMLFSRYLLSTQNIKIKTIFCSVTKGDDVPSQTLTALRITMMAMCVASREYDWQFSSAVFEKETRLFFSKADLVSWAEEEGIPLEKTWSCYRDFRYQCGDCIACYMRIKAFRKAGVADRTLYLSPFAPYQQKLRFEVARFLRSIGIDPKILKALYKKIFKGA

SEQ ID NO: 37249 - protein, 218 aa, unidentified; identical to SEQ ID NO: 37201
  source 1..218: note = Shapirobacteria bacterium
  REGION 1..218: note = tr|A0A0G0N3L5|A0A0G0N3L5_9BACT 7-cyano-7-deazaguanine synthase OS=Candidatus Shapirobacteria bacterium GW2011_GWE2_38_30 OX=1618490; GN = US90_C0001G0026 PE=3 SV=1

SEQ ID NO: 37250 - protein, 301 aa, unidentified
  source 1..301: note = Staskawiczbacteria bacterium
  REGION 1..301: note = tr|A0A1G2HZW0|A0A1G2HZW0_9BACT 7-cyano-7-deazaguanine synthase OS=Candidatus Staskawiczbacteria bacterium RIFCSPHIGHO2_02_FULL_34_9; OX = 1802206 GN=A3D35_01675 PE=3 SV =1
MNKILGNIGKTKFESKENEDSDLLRIYDNILKNKRGYVVKMPKKGESVVVCFSGGQDSVANIGILLKEFGLNVYPFFINRGQSNYKYEKKSVDYFNRFYKKNFPKLYHSYKEIIVMTPGIEYKDMLRKTKRMMDNIPLSHNISYPARGPIVFLTGMEYGYSLKSKGVDIKTLFASNMSSDFSYHCSQTWVRLMNILFCQILNDWSWQFISLPIETEFKNYFDKDVFIKWAFENNIPLYKARTCVKSFEIECGDCPTCWDRRRGYKEAGVKDLTRYKFEMAEKYPTYYDHEKEEKNEKRNRG

SEQ ID NO: 37251 - protein, 253 aa, unidentified
  source 1..253: note = Sulfobium mesophilum
  REGION 1..253: note = tr|A0A2U3QHG2|A0A2U3QHG2_9BACT 7-cyano-7-deazaguanine synthase OS=Candidatus Sulfobium mesophilum OX=2016548 GN=queC PE=3 SV=1
MTRNNRAIVLLSGGIDSSTSLAIAQAEGYEVYALSFNYNQRHEVELAFARQIARSMNVGRHLVTAFDLREVGGSALTSDIEVPKEISPAAIPVTYVPARNTIFLSFALAWAEVLEAENIFIGANAVDYSGYPDCRQEYLTAFENMANLATKASVEGKMKFRINAPLISMRKSEIIRRGIDLGLDYGLTWSCYDPEVTATGGRSERPTGAEKADLFSFDPAEVRAMFRPCGRCDSCRFREKGFIEAGLDDPGRR

SEQ ID NO: 37252 - protein, 223 aa, unidentified
  source 1..223: note = Sulfopaludibacter sp.
  REGION 1..223: note = tr|A0A2U3LWM6|A0A2U3LWM6_9BACT 7-cyano-7-deazaguanine synthase OS=Candidatus Sulfopaludibacter sp. SbA4 OX=2043165 GN=queC PE=3 SV=1
MTKAVCLLSGGLDSSTCLALARRDGYSCYALSFDYGQRHAIELEAAARVAASLGVERHLVARIGLDAFGGSALTDNIAVPKARSAEEMGRGIPVTYVPARNTIFLSFALAWAEVLECSDIFIGVNALDYSGYPDCRPEYLEAYQRMANLATKAGVEGRTHVTIHAPLMHLNKAQIVKLAQELGLEFSLTYSCYDPGADGRPCGQCDACLLRRKGFEEAGIEDR

SEQ ID NO: 37253 - protein, 226 aa, unidentified
  source 1..226: note = Sulfotelmatobacter kueseliae
  REGION 1..226: note = tr|A0A2U3L1D9|A0A2U3L1D9_9BACT 7-cyano-7-deazaguanine synthase OS=Candidatus Sulfotelmatobacter kueseliae OX=2042962 GN=queC PE=3 SV=1
MVDRAKSCAVVLLSGGMDSCVCAALAARDHDAAAVHVSYGQRTEHRERQSFLAICERLNIRDKLVVRNEALGAIGGSALTDGTIAVPRAEAVGHGIPVTYVPFRNAHFLAVAVSWAEVLGAKKVYIGAVEPDSSGYPDCRPAYYSAFNAVVKAGTKEGDIEVVTPLIAMRKVEIVRLGLELGAPFDLTWSCYSREDQACGVCDSCVLRLRAFEAAGVRDPISYAAR

SEQ ID NO: 37254 - protein, 233 aa, unidentified
  source 1..233: note = Sulfotelmatomonas gaucii
  REGION 1..233: note = tr|A0A2N9LC22|A0A2N9LC22_9BACT 7-cyano-7-deazaguanine synthase OS=Candidatus Sulfotelmatomonas gaucii OX=2043161 GN=queC PE=3 SV=1
MTTAVKKAVVLLSGGLDSATVLAVAKSEGYELYALSFSYGQRHAWELEAAKRVAASIGVAEHRIAAIDLRAFGGSALTADIAVPKGRATEEMSRGIPITYVPARNTIFLAFALAWAEVSGANDIFLGVNALDYSGYPDCRPEFIVAFEKMANLATKAGVEGRQSLKIHTPLIALSKAEIIRMGLGLGVDYGFTSSCYDPSPVGVPCGQCDSCLLRQKGFEENGIDDPLLKFSS

SEQ ID NO: 37255 - protein, 220 aa, Sulfuricurvum sp.
  REGION 1..220: note = tr|K7S487|K7S487_9HELI 7-cyano-7-deazaguanine synthase OS=Candidatus Sulfuricurvum sp. RIFRC-1; OX = 1249480 GN=queC PE=3 SV=1
MKKALCIMSGGMDSTLVAYIMRSRGYEIVALHFNYGQRTADKELESFRSICNDLEVREKYEIDLDFFKTIGASALTDHSIDVPTGGIEAGVPITYVPFRNGIFLSIAMAIAEKEGCSAIAIGVVEEDSSGYPDCRESFIEAFTKAANLGTKDSTKVTIEMPLVRLQKSQIVQEALALGAPLHLTWSCYQSEERACGVCDSCRLRLRGFERAGAVDPIEYV

SEQ ID NO: 37256 - protein, 536 aa, unidentified
  source 1..536: note = Sungbacteria bacterium
  REGION 1..536: note = tr|A0A1G2LM03|A0A1G2LM03_9BACT Uncharacterized protein OS=Candidatus Sungbacteria bacterium RIFCSPLOWO2_12_FULL_41_11 OX=1802286 GN=A3G49_00140 PE=4; SV = 1
MNRKINKFHGIVVFGAPGSGKTTVAKSFLKIFPEAKYVEASSSVIYPAISIKEELPPRETDFIRAILKLRHKRKFSRDEAQQMFVYLKNKYSSAVIAKTLIYLHRKKFFHKSLIIAGIRGFRNSMYFKKNGYLVVYLKTPDKYLTGRISRRESFSKKDAEKERQIEERLFSTNKVERIAHLTFNTAVTSKKEIAAQIKALIGAAECKKCVNTSSNLSSVIGKYGLCDVCEKYEKNFSGAVLQKELRFLLSLRGSGKEKHDAMVGISGGKDSTATLYTAKQMGFIPLTFSLDTGYYPKHIFQRAKTVAKKLKVDYEKIDARIYMRSVDRICFRKTSDLYNERDSQELKEKFRKWYVEGRRHYSVKCQHKIPFVRTCQLCRRLVVRAYYGEALKRGVKVVILGINEWAGLSQDSESKKFIFSAIRKLQPFKNKPPVYIVHLPFLLQRKIEDTERILRKLGWKIPRGERLIESNANSCLFARAAESKAKRMLGFHPDTTRLAREVTVGFISKEQASSALAKVHNYPHSVRRVLQKAKVL

SEQ ID NO: 37257 - protein, 233 aa, unidentified
  source 1..233: note = Synechococcus spongiarum
  REGION 1..233: note = tr|A0A1T1D1X5|A0A1T1D1X5_9SYNE 7-cyano-7-deazaguanine synthase OS=Candidatus Synechococcus spongiarum LMB bulk15N OX=1943583 GN=queC; PE = 3 SV=1
MSSNPPVAVALLSGGLDSATAAAMALAEGDRVIGLSMDYGQRHRRELQAASDLATGLGLVEHHQLRVNLAAWGGSALTDLQQHLPRDGVQPHVIPTTYVPGRNTVLIALGLSLAEARGAHRLVLGVNAVDYSGYPDCRGDYLAQYQILADLATKAGRMGQGAKLWAPLLRLDKREIVEQALALDVPIAATWSCYSNEEEPCGRCDSCRIRDRALHDAGVPHLASHWFLTHHDL

SEQ ID NO: 37258 - protein, 225 aa, unidentified
  source 1..225: note = Synechococcus spongiarum
  REGION 1..225: note = tr|A0A170TDE4|A0A170TDE4_9SYNE 7-cyano-7-deazaguanine synthase OS=Candidatus Synechococcus spongiarum OX=431041 GN=queC PE=3 SV=1
MSSRPPVAVALLSGGLDSATAAAMALAEGDQVIGLSMDYGQRHRRELQAASALATALGLVEHHRLTVNLAAWGGSALTDLQQPLPQDGVQTHVIPTTYVPGRNTVFIALGLSLAEARGAHRLVLGVNAVDYSGYPDCRGDYLAQYQTLADLATKAGRLGQGPKLWAPLLRLNKREIVERALALDVPIAATWSCYGGGEEPCGRCDSCRIRDQALHDAGVPHLASH

SEQ ID NO: 37259 - protein, 227 aa, unidentified
  source 1..227: note = Syntrophonatronum acetioxidans
  REGION 1..227: note = tr|A0A424Y9D7|A0A424Y9D7_9FIRM 7-cyano-7-deazaguanine synthase OS=Candidatus Syntrophonatronum acetioxidans OX=1795816 GN=queC PE=3 SV=1
MKKAVVLLSGGLDSTTCMSVAQGEGYLLYALSFDYGQKHRRELGRASQIASYYHCPEHRVIKLDQVGGSSLTREGAEIPVYEEREEIPSTYVPARNILFLSYALGYGETVGAEAIYIGVNAIDYSGYPDCRPEFIEAFQQVIKVGTKSGVEGRPIKIKAPLLNLTKGEIIKLGIKNKAPLHLTTSCYHGGDKACGRCDSCVLRLKGFAEAGVKDPIPYQEGQEEGPG

SEQ ID NO: 37260 - protein, 230 aa, unidentified
  source 1..230: note = Syntrophosphaera thermopropionivorans
  REGION 1..230: note = tr|A0A4R5JNP2|A0A4R5JNP2_9BACT 7-cyano-7-deazaguanine synthase OS=Candidatus Syntrophosphaera thermopropionivorans OX=2593015 GN=queC; PE = 3 SV=1
MEIKYQKAIILLSGGMDSLVTVAIAKEEVQELYFLHCNYGQLTEKREQKSFGAICQYYKPKESKILHWDWFKEIGGSALTDSSLAVPKQEPSRDIPITYVPFRNANLLCAAVSWAEVIGAEAVYIGAVEEDSSGYPDCREVFFQAFQKVIETGTKNEFPIRILTPVLHLSKKQIVQKGMELAAPFELSWSCYLDNEEACGECESCRLRLKAFAEAGFKDPIVYKIKEEIK

SEQ ID NO: 37261 - protein, 241 aa, unidentified
  source 1..241: note = Tachikawaea gelatinosa
  REGION 1..241: note = tr|A0A090BWM7|A0A090BWM7_9ENTR 7-cyano-7-deazaguanine synthase OS=Candidatus Tachikawaea gelatinosa OX=1410383 GN=queC PE=3 SV=1
MKDKKTKKSAVIVFSGGQDSTTCLINALKNYDVIHCITFHYNQKHSQEVKIAIKISKKLNIFFHKIINLSVLDTLTESCLINNNLKIPCHSSTNKKKPPKTFVPGRNILFLTLASIYAYKNKINTVISGVCETDFSGYPDCRNKFIKTLNTAIILGLDKKILFKTPLMFLKKSEIWALSDTLGKLDFIKNKTLSCYNGIKSFGCGNCSACYLRNQGLLDYQNNKEKVINNLLEKKKKYKID

SEQ ID NO: 37262 - protein, 258 aa, unidentified
  source 1..258: note = Tagabacteria bacterium
  REGION 1..258: note = tr|A0A2M8L9E4|A0A2M8L9E4_9BACT 7-cyano-7-deazaguanine synthase OS=Candidatus Tagabacteria bacterium CG10_big_fil_rev_8_21_14_0_10_40_13 OX=1975022; GN = COV00_00865 PE= 3 SV=1
MSQQASDPKNIKTAVEFILESEREYVFQIPRSENVIFLMTGGIDSSIGAELCLLKWGVTLFPIYILRGATAQKQELAAVQSVLTYLKSKYGSRVRDLFTINSTVPPREVKGQLSRERVIKHGHPLRNSIMQSLAVQYGAMLNDKGTPVRTVLVASVASDFFPGSREVDLVINTLYTCSNMGEWDWQINSPMLTGNLLGKEKRLRKIDLIKWGIQNRFPFNITRTCTKHSDNACGICEECKERRDTFAQAGITDPIAYS

SEQ ID NO: 37263 - protein, 514 aa, unidentified
  source 1..514: note = Taylorbacteria bacterium
  REGION 1..514: note = tr|A0A1G2M3W7|A0A1G2M3W7_9BACT GMP synthase (glutamine-hydrolyzing) OS=Candidatus Taylorbacteria bacterium RIFCSPHIGHO2_01_FULL_46_22b OX=1802301; GN = A2664_03135 PE=4SV=1
MKAPQVLIINLGSQYTDLIDRSLRDFGVRSAILPPARANDWLRSNTPKAIILSGSDASVNDPDPPAPPEVILTADIPILGICYGMQWLAKRLGGQVISRTGKGNYGRTEIHLTHDYFDQGLLDGLLANWLVVHASHGDVVTHLPPGFTRIAWPETSTTAGVMAMVSSERKMWGVQFHPEVHETQHGSTILSNFVLRIAGCEKDWNPRNLADEIREETLHVIGDRNAIIGFSGGVDSTTLTALMAPSLGNRLRAVTIDGGQLREGEILQIIETAKSAGVFDRHSMASAPFVRALSDTLDAEEKRKRFRVVYRDAFQTLARGYGASVVMQGSLAPDFIESGATGGANIASHHNVGLTFDGLDQVHPFRGLFKYEVRALGQELGLPADICTRQPFPGPGLFVRIVGAPVTEERLALLRLVDRDVTYILQASGEYQQMSQLVVALLCVNTAGVRGDGRSYKPTIAIRGLVTSDFMTGRGFQIKEETRRKLTRTLLRNPEVGNVGYFEADKPPCRTEFE

SEQ ID NO: 37264 - protein, 222 aa, unidentified
  source 1..222: note = Tectomicrobia bacterium
  REGION 1..222: note = tr|A0A1F7T6D7|A0A1F7T6D7_9BACT 7-cyano-7-deazaguanine synthase OS=Candidatus Tectomicrobia bacterium RIFCSPLOWO2_12_FULL_69_37; OX = 1802343 GN=queC PE=3 SV=1
MDSAVALALARAEGFACHALSFDYGQRHGEEIEAARRVASALGAAAHATIQIDLRAIGGSALTGGLDVPKDRERIGEGIPVTYVPARNTVFLSFALALAEVRGAEDIFIGVNALDYSGYPDCRPEYIEAFERMARLATKAGVEGRPLTIRAPLIGMRKAGIIRRGLELGVDFGLTHSCYDPPGPGRACGRCDACLLRRRGFAEAGAKDPLVYPDRHGDEKDG

SEQ ID NO: 37265 - protein, 225 aa, unidentified
  source 1..225: note = Tenderia electrophaga
  REGION 1..225: note = tr|A0A0S2TFT1|A0A0S2TFT1_9GAMM 7-cyano-7-deazaguanine synthase OS=Candidatus Tenderia electrophaga OX=1748243 GN=queC PE=3 SV=1
MSQAGKALVLVSGGLDSATCLAMAKHQGYECYALSFDYGQRHRAELAAALRVALSQGVREHKVIQLGLSDIGGSALTDSAIDVPTASSEGIPVTYVPARNTVFLSLALAWAEVLRAYDIFIGVNAVDYSGYPDCRPEFIRAFETMANLATKAGVEGGRFHVHTPLIDLSKAEIIQQGTQLGVDYSLTVSCYAADETGSACGECDSCRLRAAGFAAAAIPDPTQYR

SEQ ID NO: 37266 - protein, 235 aa, unidentified
  source 1..235: note = Terasakiella magnetica
  REGION 1..235: note = tr|A0A1C3RM12|A0A1C3RM12_9RHIZ 7-cyano-7-deazaguanine synthase OS=Candidatus Terasakiella magnetica OX=1867952 GN=queC PE=3 SV=1
MKSIVICSGGLDSVTLAYKMAHEHDLKRLISFDYGQRHKKETAYAARCAERLGVPLDIVDITAIGALLTGSALTDDVDVPDGHYAEESMKSTVVPNRNAIMLTIAFGAAAAQNCDCVATAVHGGDHFIYPDCRPDFIDSFNKMQAHALDGYADVELYAPFVHIPKDAIVTQGMKLNVPYEDTWSCYKGGEIHCGRCGTCVERREAFHLAGETDPTKYADPDFWIKARENHQAEKV

SEQ ID NO: 37267 - protein, 465 aa, unidentified
  source 1..465: note = Terasakiella magnetica
  REGION 1..465: note = tr|A0A1C3RHJ4|A0A1C3RHJ4_9RHIZ Uncharacterized protein OS=Candidatus Terasakiella magnetica OX=1867952; GN = MTBPR1_30115 PE=4 SV=1
MKLYKHLDALPMPCHHIFVQSPDERTPDGWEGCVVGENLKFSTENLASYFYKNQDDLLFDVFSLAATVEYCDFSQSRSQKTWARKFNISLPVNNPELWQSPEVSDALCQALRILTGDTWNINFRQRIFAPEWPFQSKLDLKKNPQAILAYSDGMDSLSVAGLTEAELGDKLVRVRLGSAKKEEKKQKKPFISVPYSVSYSTQKKDYSGRSRGLKFSILTSAAAYLSNSSLIILPESGQGALGPALVPVAHAYIDYRNHPYFLSYMRKFLSALFQHKFSFQIPRIWNTKGETLFQYIQVSGDNEKWRETTSCWRRNSQTSFDNKKIRQCGICAACLLRRMSVHAAGQLEDQEEYLWNNLNAQEFELGSAKPTEKMHDFKAHQKYAVAAMSHLRDMAELLNNNDELINLKMHASKLARSLEMDKAEVMKNQTQLLEKHTAEWNSFLGSLDKNSFLRKWANRNMTDAA

SEQ ID NO: 37268 - protein, 207 aa, unidentified
  source 1..207: note = Termititenax aidoneus
  REGION 1..207: note = tr|A0A388TES0|A0A388TES0_9BACT 7-cyano-7-deazaguanine synthase OS=Candidatus Termititenax aidoneus OX=2218524 GN=queC PE=3 SV=1
MWAAQKYGAENIFTVSFNYGQKHAVELDCAKTAAKLLGAAAHWVLNIPALKQIGDSALLTSADVNESKDGLPASFVPARNIIFLSQAAALAYKLDCANLITGVSEADYSGYPDCRGQTLKLLEQTLNAGLEANLEIVMPLLRKNKAEIWEMARQCGGTDGVELIREHTHTCYNGDHTTRHEWGYGCAKCPACQLRRKGYAEFRAKVK

SEQ ID NO: 37269 - protein, 237 aa, unidentified
  source 1..237: note = Termititenax persephonae
  REGION 1..237: note = tr|A0A388TGT0|A0A388TGT0_9BACT 7-cyano-7-deazaguanine synthase OS=Candidatus Termititenax persephonae OX=2218525 GN=queC PE=3 SV=1
MKKLNKAKALVCLSGGQDSATCLMWAAQEYGADKTYAVSFNYGQKHAVELACAQKIAEILNVAGHCVLDIPALKQIGNSALLADDADLNAVRDGLPASFVPGRNIIFLSQAAALAYKLDCGILIVGVGETDYSGYPDCRESTIKSLETALNHGMETNLEISAPLMHKDKAETWAMAYQCGGQDGVELIREQTHTCYHGDHETKQDWGYGCGQCPACQLRRHGYETFLARTPELQPRP

SEQ ID NO: 37270 - protein, 226 aa, unidentified
  source 1..226: note = Thermochlorobacter aerophilum
  REGION 1..226: note = tr|A0A395LW07|A0A395LW07_9BACT 7-cyano-7-deazaguanine synthase OS=Candidatus Thermochlorobacter aerophilum OX=1868324 GN=queC PE=3 SV=1
MRAVVLLSGGMDSLVTTAIAKHLGYELAALHLNYGQRTEQRELKAFHDICDHYRIERRLVIDARHLSQIGGSSLTDFSIPVSRANLHSRDIPTSYVPFRNANILAMATSWAEVIHANKIFIGAVEEDSSGYPDCRQEFYDAFNLVIRLGTKPTTHIEIVTPVIRMKKWEIVIRGMELEAPFELSWSCYQSNDIACGVCDSCALRLRAFEQAGIRDPIEYVTRPSYV

SEQ ID NO: 37271 - protein, 226 aa, unidentified
  source 1..226: note = Thermochlorobacteriaceae bacterium
  REGION 1..226: note = tr|A0A081SJ04|A0A081SJ04_9BACT 7-cyano-7-deazaguanine synthase OS=Candidatus Thermochlorobacteriaceae bacterium GBChlB OX=1519464; GN = queC PE=3 SV=1
MRAIVLLSGGMDSLVSTAIAKDLGYDLAALHLNYGQRTEHRELKSFTSICDHYHIDRRLVVDVKHLSIIGGSSLTDKTIEVSKADLNRDVIPTSYVPFRNANILAIAVSWAEVIGANKIFVGAVEEDSSGYPDCRREFYDAFNLTIRLGTKPSTHIEVLTPVIEMKKWEIVIRGMELGAPFELSWSCYQSNDKACGVCDSCALRLRAFEQAGIRDPIEYVNRPSYI

SEQ ID NO: 37272 - protein, 231 aa, unidentified
  source 1..231: note = Thermokryptus mobilis
  REGION 1..231: note = tr|A0A0S4MP02|A0A0S4MP02_9BACT 7-cyano-7-deazaguanine synthase OS=Candidatus Thermokryptus mobilis OX=1643428 GN=queC PE=3 SV=1
MREIAVVLVSGGMDSCVTAAIANSLGYELAFLHLNYGQRTEKRELKAFNDIADFYNVKRRLIINVEHLKLIGGSSLTDENIPVEKADLKRVGIPTSYVPFRNANMLSIAVSWAEVLGASKIFIGAVEEDSSGYPDCRKEFYNAFNEVIRLGTKAGVEGHPIQIVTPIIDMKKWEIVKKGIELGAPLHLTWSCYQREDIACGVCDSCALRLRGFQLAGVDDPIPYEKKPIYI

SEQ ID NO: 37273 - protein, 225 aa, unidentified
  source 1..225: note = Thiodiazotropha endoloripes
  REGION 1..225: note = tr|A0A1E2US97|A0A1E2US97_9GAMM 7-cyano-7-deazaguanine synthase OS=Candidatus Thiodiazotropha endoloripes OX=1818881 GN=queC PE=3 SV=1
MNKKAVVLLSGGLDSATVLAIARSQGYECYALSMAYGQRHAAELSAAANIASSLGAADHKVMSIGLDSIGGSALTDTSIEVPEQLADGIPVTYVPARNTVFLSLALGWAEVLDAQEIFIGVNAVDYSGYPDCRPEFIRAFEQLANLATKAGVEGKAFIIHTPLIDLTKGEIIQQGIKLGIDYSLTVSCYQANEQGEACGSCDSCRLRARGFEEAGIADPTRYCKS

SEQ ID NO: 37274 - protein, 231 aa, unidentified
  source 1..231: note = Thiodictyon syntrophicum
  REGION 1..231: note = tr|A0A2K8U277|A0A2K8U277_9GAMM 7-cyano-7-deazaguanine synthase OS=Candidatus Thiodictyon syntrophicum OX=1166950 GN=queC PE=3 SV=1
MKNAVILLSGGLDSTTVLAIAKHEGFAPYALSFRYGQRHLVELESAQRVAAALGVAEHVIADIDLRRFGGSALTADLAVPKGRDPTALGEGIPITYVPARNTVFLSFALAWAEVLGAGDIFIGVNALDYSGYPDCRPEYIAAFERMANLATAAGVQGRQRLKIHAPLIDLTKAQIIRRGLALGVDYGLTSSCYDPGADGRPCGQCDSCQLRAKGFAQAGIADPLAARFGGA

SEQ ID NO: 37275 - protein, 90 aa, unidentified
  source 1..90: note = Thioglobus sp.
  REGION 1..90: note = tr|A0A432U793|A0A432U793_9GAMM 7-cyano-7-deazaguanine synthase (Fragment) OS=Candidatus Thioglobus sp. OX=2026721 GN=DSZ19_00725 PE=3 SV=1
MSRAVVLLSGGLDSTTTLAIAKSKGFECYALSFDYGQKQKSELISATKIAKQFDTVEHRIMHISLSDFGGSALTDENIEVPNFKESDEIP

SEQ ID NO: 37276 - protein, 223 aa, unidentified
  source 1..223: note = Thioglobus sp.
  REGION 1..223: note = tr|A0A2D7QW32|A0A2D7QW32_9GAMM 7-cyano-7-deazaguanine synthase OS=Candidatus Thioglobus sp. OX=2026721 GN=queC PE=3 SV=1
  VARIANT 42: note = Xaa can be any naturally occurring amino acid
  VARIANT 44: note = Xaa can be any naturally occurring amino acid
  VARIANT 47: note = Xaa can be any naturally occurring amino acid
  VARIANT 53: note = Xaa can be any naturally occurring amino acid
  VARIANT 164: note = Xaa can be any naturally occurring amino acid
MSKAVILLSGGLDSTTVLAIAKSQGYDCYALSFDYGQKQRSXLXSSXSIAKKXNVIEHRIMKISLSDIGGSALTDQSIDVPKYSESDEIPITYVPARNTIFLSFALAWAEVVDCQTIFIGVNALDYSGYPDCRPEFIEAFENMANLATKQSVEGDRIQIKTPLXSMTKAEIIKKGLGLGVDYSETTSCYDANTLGEACGECDACVLRKIGFENANVQDPTRYQ

SEQ ID NO: 37277 - protein, 126 aa, unidentified
  source 1..126: note = Thiomargarita nelsonii
  REGION 1..126: note = tr|A0A176RZL6|A0A176RZL6_9GAMM 7-cyano-7-deazaguanine synthase (Fragment) OS=Candidatus Thiomargarita nelsonii OX=1003181 GN=THIOM_003122 PE=3 SV=1
MSTQKSVILVSGGLDSATTLALAKSQGYACYALSFDYGQRHRVELQAARQIAESLGVIEHKFIHLNLDNIGGSALTDSQIQVPVSGLSKQIPVTYVPARNSVFLTLALAWAEVLSAYHLFIGVNAV

SEQ ID NO: 37278 - protein, 220 aa, unidentified
  source 1..220: note = Tokpelaia hoelldoblerii
  REGION 1..220: note = tr|A0A1U9JUU2|A0A1U9JUU2_9RHIZ 7-cyano-7-deazaguanine synthase OS=Candidatus Tokpelaia hoelldoblerii OX=1902579 GN=queC PE=3 SV=1
MKVHVICSGGLDSVSLAWRLAHDRQLAGIISFDYGQRHKKELDYAARCAETLNVPFHCINISSIGAELKGSALTDDIDVPEGHYEAETMKLTVVPNRNAIFLTIAFGIAAANKADAVAIAVHGGDHYIYPDCRPDFLAAFAAMENLALEGTVKLLAPYAEKTKADIVMDGAAAGTPFAQTWSCYKGGAHHCGRCSTCIERREAFTAAGVEDPTIYEHHAA

SEQ ID NO: 37279 - protein, 234 aa, unidentified
  source 1..234: note = Uhrbacteria bacterium
  REGION 1..234: note = tr|A0A0G0V986|A0A0G0V986_9BACT 7-cyano-7-deazaguanine synthase OS=Candidatus Uhrbacteria bacterium GW2011_GWF2_41_16 OX=1618997 GN=queC PE=3 SV=1
MATRVIIMSKKAVVLLSGGIDSATTLAIAGTEGYELYALSINYGQRHLLEIECARKIASFYNVKEHKIFNVDLRGIGGSALTSDIEVPKDRDREDITHGIPVTYVPARNTIFLAISLSWAEVIGADTIFFGANILDYSGYPDCRPEFIHAFEIMANLATRAGVEGENRFTIKTPLIAMTKAEIIKKGVELGVDFSMTHSCYDPTKDGIACGRCDSCILRTRGFAEAGLNDPIKY

SEQ ID NO: 37280 - protein, 421 aa, unidentified
  source 1..421: note = Uhrbacteria bacterium
  REGION 1..421: note = tr|A0A2M7XD19|A0A2M7XD19_9BACT Uncharacterized protein OS=Candidatus Uhrbacteria bacterium CG_4_9_14_3_um_filter_50_9 OX=1975035 GN=CO174_01590 PE=4; SV = 1
MAPKHPKLLRSGYIVKGKQFTLTYEVENGLSGDMRITFPFSIAREKDLHPYLAVACTLVVAGMVLPKDVEVDFSVPKLRTFESLLQHLYDIRCYSEGIPFQEARLRSCSAETLTLSHLDWMHNKKHAVHFWSGGVDSTASLLLLKQNGYSVTPVHTNINVNQSLSEKRTTMILEKELHVRALDVSIEFPQLAELGMTYSKKFNAFPDFNAIPFGRDMIHLFIGCYLARKKGAGAITFGHEHELWKNILHVHGRDILRNDAQTEVFSLKLQTVLASIHPDLHLFSPIAPLSKYRIVRDLFEHHEKILLLATYCYFGKRCGNCSNCLLYQMLFGLLYGVHISTQDFESMLKTGNVVEEETFKDIIYFFYYDLIQDQKRKPGYKQKLERKFGSLLNETRTQVERRLMNIHPAQLMPKGFQLNMR

SEQ ID NO: 37281 - protein, 250 aa, unidentified
  source 1..250: note = Vecturithrix granuli
  REGION 1..250: note = tr|A0A081C3Z3|A0A081C3Z3_9BACT 7-cyano-7-deazaguanine synthase OS=Candidatus Vecturithrix granuli OX=1499967 GN=U27_06275 PE=3 SV=1
MNTEMIYEDILMKKRGFVSKWPENKCAVMILSGGLDSVITCAWLLEEKQFILFPLHIQRGQTNAKAELNSVKFFEKFFMDKYPEKFFPVECINVHIPPIEFKTELGWYMKEKGYPLRDPILLQYAVQYAYAIHQRYQKYPKTIFCALGPKDPFPHTKLVSLRSTTISVCQNLDDWDWLITSPNIDVFLREQAFDKPDEIRWAIQHNIPIEKTISCYQAQSYNCGQCANCKRRQEAFKIAGIKDPTHYETL

SEQ ID NO: 37282 - protein, 265 aa, unidentified
  source 1..265: note = Vecturithrix granuli
  REGION 1..265: note = tr|A0A081C3Z6|A0A081C3Z6_9BACT 7-cyano-7-deazaguanine synthase OS=Candidatus Vecturithrix granuli OX=1499967 GN=U27_06278 PE=3 SV=1
MKNYPLKIQKNFDEDPRIIDEIERILQIRRGFIFQLAKHEPIVFIISGGLDSSLILDKILKELQCTIFPVYVERGAKAEAFEKESVIFFTNYYQEKYPGLLKDLMLCKTDIPPKDVKQFIPAERLMTIGHPMRNAILQSIGVQYGVGLSYANQINIHTIFTATSPDDTFPHSSLLALRCLTLAACIDNGDWEWQVTSPLVETYLWGKISKKDMVLYATENKLPLEKTRTCTSGSSIACGICPECLCRLNAFKMAGIKDPINYVQR

SEQ ID NO: 37283 - protein, 272 aa, unidentified
  source 1..272: note = Wallbacteria bacterium
  REGION 1..272: note = tr|A0A352M6Z7|A0A352M6Z7_9BACT 7-cyano-7-deazaguanine synthase OS=Candidatus Wallbacteria bacterium OX=2053640 GN=queC PE=3 SV=1
MAKILKKAIGSSLKKAVATKKTASAKTVKNTGANSKKKAAAEKETAVILLSGGMDSAVSLGVLLEKYEAAALHLNYGQLTENRELECFTRLCDHYGIKRRLIVDVGYLQQIGGSSLTDHKMIVPRANIGSKEVPNTYVPFRNAHILAIATSWAEVIGARKIFIGAVSEDSSGYPDTRPEFYEAFEKVIRTGTKAGGAIRIVTPVIKLSKAEIVRFGNKLKVPFIHTWSCYSGNEKACGVCDSCALRLRGFACAKAKDPIEYAENIFKSEIFV

SEQ ID NO: 37284 - protein, 219 aa, unidentified
  source 1..219: note = Wallbacteria bacterium
  REGION 1..219: note = tr|A0A1F7WNE0|A0A1F7WNE0_9BACT 7-cyano-7-deazaguanine synthase OS=Candidatus Wallbacteria bacterium GWC2_49_35 OX=1817813 GN=queC PE=3 SV=1
MDSAVSLGVLLEKYEAAALHLNYGQLTENRELECFTRLCDHYGIKRRLIVDVGYLQQIGGSSLTDHKMIVPRANIGSKEVPNTYVPFRNAHILAIATSWAEVIGARKIFIGAVSEDSSGYPDTRPEFYEAFEKVIRTGTKAGGAIRIVTPVIKLSKAEIVRFGNKLKVPFIHTWSCYSGNEKACGVCDSCALRLRGFACAKAKDPIEYAENIFKSEIFV

SEQ ID NO: 37285 - protein, 600 aa, unidentified
  source 1..600: note = Wirthbacteria bacterium
  REGION 1..600: note = tr|A0A1J5IKB9|A0A1J5IKB9_9BACT GMP synthase (glutamine-hydrolyzing) OS=Candidatus Wirthbacteria bacterium CG2_30_54_11 OX=1817892 GN=AUK40_03810 PE=4 SV=1
MADDRIGVLDFGGQYAHLIAKRIRDLGVHSQIFSGDCRLEELQGLKGIILSGGPSSVSAGDAPEFDTRILTSGIPVLGLCYGHQLVAYHLGGEVSKGRTREYGKATVQVSDSVLLHGMDAVETVWMSHFDTVTRVPEGFTAVASTDICPIAAMEDPSRKIFSTQFHPEVTHTPHGMMALENFVAVTGALRTWNVESYIPLLFEKIKTDAKGRKVFMLVSGGVDSTVCFVLLNKALGKDRVYGLHVDHGLMRKDESALVTKALNAVGLDNFAVVDASERFLKALEGVLEPEIKRNIIGNLFLEVQKEEFVRLGLNADEWVLGQGTLYPDTIESGGTKHADKIKTHHNRIPEIMAMIEKGLVVEPVADLYKDEVRKVGVELGLPDELVWRHTFPGPGLAVQELCAATVVYPENKQKLESDIGAMVASAGLRPFILPVRSVGVQGDERTYRSVVALQGEADWKTLEDLATTITNTFPAVNRVVWLVKPAAVDLGSMTVKHGTLTRARLDLHREADALANQILRKHKLERELYEFPVVMIPVSFAGGESIALRPLYSENVMTVDFAKLPRAVVQEMADAIGALPGIDAVFYDVTNKPPATVQWE

SEQ ID NO: 37286 - protein, 261 aa, unidentified
  source 1..261: note = Woesebacteria bacterium
  REGION 1..261: note = tr|A0A0G0L046|A0A0G0L046_9BACT 7-cyano-7-deazaguanine synthase OS=Candidatus Woesebacteria bacterium GW2011_GWA1_38_8 OX=1618547; GN = UT06_C0005G0036 PE=3 SV=1
MQTVRLVFFTIYVAFGQKNEKQEIITIKKILGKLKIEPLIVKIDIDKYIDHEWKRWKLGIIPARNYLFAAIAGSVLAKSKSKNPQIWVCAHKEEINPTHTDKSNRFFRSCSKILSDNYRKNISVTTPFKDLTKPEIVSYWHKYWEKKYNISVNETVSCYFGNNCGVCKACINRAVVFVCAGIKIENFQTNPFLDKRKLILNSYIVSFNSLHTERKLDFLYALNKQKNILPKKLKKFLDLNYKKYENKIIKRIDSIRKVDKI

SEQ ID NO: 37287 - protein, 379 aa, unidentified
  source 1..379: note = Woesebacteria bacterium
  REGION 1..379: note = tr|A0A1F8C1S2|A0A1F8C1S2_9BACT 7-cyano-7-deazaguanine synthase OS=Candidatus Woesebacteria bacterium RIFCSPLOWO2_01_FULL_44_14; OX = 1802525 GN=A2975_04415 PE=3 SV=1
MIIGSIDNKEVDSSNLILDTVDNFQLDEVVSNALLLTLAGYLEKDDITVNGKQYFDKKRLEQFFSYVLNDKRAAPRKYNLQLSFSNKNHEVNSAKKNNYKYIISYSGGIDSTAGLLYALDKGYPIQPVWVGFGQKNEKDELEVINKICKKLKTRPIVININLKRYVDEGWNRWKMGIIPGRNYIFASIAASMVNLSSSDKNTIYICAHKEEINPVNTDKSERFYNTCTKIFTKSYNKDIELTTPFFNATKPEIIYYWIKHWKQKYNISPQETVSCYHGTNCGICKACINRAVAFACCGLQTESYKNDPFKDTEHVIQEGYIDRFNILKLERKLDFLFALNFNKNSLPTNLRNFVDTNYKRYSNKIIDRQKMIREGLNIK

SEQ ID NO: 37288 - protein, 260 aa, unidentified
  source 1..260: note = Yonathbacteria bacterium
  REGION 1..260: note = tr|A0A2M8D685|A0A2M8D685_9BACT Uncharacterized protein OS=Candidatus Yonathbacteria bacterium CG_4_9_14_0_8_um_filter_46_47 OX=1975106 GN=CO088_03680; PE = 4 SV=1
MAIFIGHRVSNKVLEKHIRVYLHSYIQAFDASFVRWYSLFMFPSSKIKTALVLYSGGRDSSATALEMARLGYMVKLFTCQWGLSELVGPRGDSAPDIRHAELMGAFPKYIDPDRAIMGNPYLVRKLAIEKTNETHVVYPIALALAVHVDAILYCMKRDIKHIACGYSGYQATRDIYIEQREDFLLLMKEFVGEYGIEYHTPVIKKTKHEVMDILERHGVSSNSLENKSIFGGISFNVEHALSYRNRSLPICKGHIELMRA

SEQ ID NO: 37289 - protein, 227 aa, unidentified
  source 1..227: note = Yonathbacteria bacterium
  REGION 1..227: note = tr|A0A349P0C8|A0A349P0C8_9BACT 7-cyano-7-deazaguanine synthase OS=Candidatus Yonathbacteria bacterium OX=2053650 GN=DCS20_02645 PE=3; SV = 1
MNNSHAALKQQVLVLLSGGIDSAVCATKLCAEGKSVHALSLRYPGNTNEREINNATFLAEKLNISHVVLDFKFIEQMFDGVNTSMSFNVGGAINNCVSRGKIPVPMSVELLHLTALMFARIRGIKHVYWAIHQDDLVGTSQEKILEYLSALEKLPALGSYSPCKFETPFIGYSKKDMVDLGISLDIDFEHTHSCSASSNAPCCVCHQCVLRASAFDSLFPLKQAVGA

SEQ ID NO: 37290 - protein, 223 aa, unidentified
  source 1..223: note = Zambryskibacteria bacterium
  REGION 1..223: note = tr|A0A1G2TPA6|A0A1G2TPA6_9BACT Uncharacterized protein OS=Candidatus Zambryskibacteria bacterium RIFCSPHIGHO2_12_FULL_38_37 OX=1802751 GN=A3E32_01340 PE=4; SV = 1
MQNIFENKSKDVLVLFSGGRDSSSVAALLALAGYKIKLYTYQAGLPELTGPRGDSAPDIRHKELTQAFPEDIDRERIIEGSTYLIRKLAIEKTNIEHVIYPIALALAVHANAVCYCLKNNINTIASGYSGYQAKEDRYIEQSGDFVSLTKEFLEEYDISYLTPVIEKSKLEVMDILERHNISSNSLENKSVFGGISFDKEKAKAFWKSSISLCREFIKNMQTS

SEQ ID NO: 37291 - protein, 223 aa, unidentified; identical to SEQ ID NO: 37290
  source 1..223: note = Zambryskibacteria bacterium
  REGION 1..223: note = tr|A0A1G2URZ3|A0A1G2URZ3_9BACT Uncharacterized protein OS=Candidatus Zambryskibacteria bacterium RIFCSPLOWO2_12_39_8 OX=1802774 GN=A2Y49_03070 PE=4 SV=1

SEQ ID NO: 37292 - protein, 236 aa, unidentified
  source 1..236: note = Candidimonas bauzanensis
  REGION 1..236: note = tr|A0A1M5ZIT2|A0A1M5ZIT2_9BURK 7-cyano-7-deazaguanine synthase OS=Candidimonas bauzanensis OX=658167 GN=queC PE=3 SV=1
MPRALVLFSGGQDSTACLAWALTRYSAVETVGFDYGQRHAVEMECRQTVLKEFRSQFPDWAPRLGEDHVLDLSLLGQLSDCALTAEKEIAFADNGLPNTFVPGRNLIFLTYAAALAYRRGIDALVGGMCETDYSGYPDCRDNTMQALQLALNLGMEQHFRIETPLMWLDKAATWRLAAEIGGPRLIALTQEHTHTCYMGDRSVRHDWGYGCGTCPACELRARGYREFSAGMEASHD

SEQ ID NO: 37293 - protein, 236 aa, Candidimonas nitroreducens
  REGION 1..236: note = tr|A0A225MAG3|A0A225MAG3_9BURK 7-cyano-7-deazaguanine synthase OS=Candidimonas nitroreducens OX=683354 GN=queC PE=3 SV=1
MHNQALVLFSGGQDSTTCLTWALQRYARVETIGFDYGQRHAVELECRKTVREALCAARPDWAERLGEDHMLDLGVLGRLSDTALTSDARIEFERNGLPNTFVPGRNLLFFTFAAALAYRRGLSVLVGGMCETDYSGYPDCRDNTLKSLQVSLSLGMDRPLVVETPLMWLDKAATWRLAEQIGGPALVELVKESTHTCYLGERSKRHPWGYGCGTCPACELRAKGYAAYMRPQKDTY

SEQ ID NO: 37294 - protein, 243 aa, Candidimonas sp.
  REGION 1..243: note = tr|A0A522QMH2|A0A522QMH2_9BURK 7-cyano-7-deazaguanine synthase OS=Candidimonas sp.; OX = 1912597 GN=queC PE=3 SV=1
MPTPSPRRALVLFSGGQDSTTCLAWALSRYGRVETIGFDYGQRHSAELACRAPLRRRLAEMKPDWAARLGEDHLLDARVLRELGASAMTDDIAITLQASGLPNTFVPARNLLFFTLAAAQAYRRGLDVLVGGMSQTDYSGYPDCRDNTIKALQVALSLGLDQPLTLETPLMWLDKADTWELARQLGGAALVELVRVETHTCYLNRRDVLHAWGYGCGECPACVLRARGYAQWKARSRPHSDRP

SEQ ID NO: 37295 - protein, 235 aa, Candidimonas sp.
  REGION 1..235: note = tr|A0A522JY26|A0A522JY26_9BURK 7-cyano-7-deazaguanine synthase OS=Candidimonas sp.; OX = 1912597 GN=queC PE=3 SV=1
MHTRALVLFSGGQDSTTCLAWALKHYAHVETVGFDYGQRHSVELECRRTILSKIRADYPAWASRLADDHMIDLQVLGDISDTALTSEASIAFEKNGLPNTFVPGRNLLFFTFAAAIAYRRDLSVLVGGMCETDYSGYPDCRDTTLKSLQASLNLGMDKALVIETPLMWLDKRQTWLMAKQLGGKEFVELICEHTHTCYLGDRSTRHAWGYGCGICPACELRANGFKVYAAGPCPD

SEQ ID NO: 37296 - protein, 248 aa, unidentified
  source 1..248: note = Caproiciproducens galactitolivorans
  REGION 1..248: note = tr|A0A4Z0XXS0|A0A4Z0XXS0_9FIRM Uncharacterized protein OS=Caproiciproducens galactitolivorans OX=642589; GN = CAGA_15240 PE=4 SV=1
MNLKTFFAENPSAALAFSGGTDSSYLLYAAKYYGCDIHAYFIYSAFQPQFELDDAKRLADELGVPFTVAEIDVLKDTQVAANGPLRCYYCKTALFTRLRELAQKDGYSLLIDGSNASDLADDRPGMRALKELGVRSPLRECGLTKPEIRRFSKEAGLFTHDKPAYACLATRIPTGTEITPELLKKAEQAETALFSMGFTNFRVRYFHGAAKLQLPESQFSMALSKKDELTKELSRWFDGVLLDLTPRG

SEQ ID NO: 37297 - protein, 234 aa, Carboxydocella sporoproducens
  REGION 1..234: note = tr|A0A1T4MRT9|A0A1T4MRT9_9FIRM 7-cyano-7-deazaguanine synthase OS=Carboxydocella sporoproducens DSM 16521 OX=1121270 GN=queC PE=3 SV=1
MDENGGRAKNMKKAVVLLSGGIDSTVCLALAHRDGYELYPISFDYNQRHKRELDSARQIAEYYHCPRHLIITTNMDAIGGSALTGTMEVPEGDIERKDIPPTYVPARNLIFLSYAVGYAEVVGAERIYIGVNALDYAGYPDCRPEFIQRFQATVDYATKATTRDAQRIEIVTPLINLDKAGIIKLGMELKAPLHLTTTCYRGGEKACGRCDACLLRLQGFSRAGFQDPINYVHL

SEQ ID NO: 37298 - protein, 234 aa, Carboxydocella thermautotrophica; identical to SEQ ID NO: 37297
  REGION 1..234: note = tr|A0A2R4N056|A0A2R4N056_9FIRM 7-cyano-7-deazaguanine synthase OS=Carboxydocella thermautotrophica OX=178899 GN=queC PE=3 SV=1

SEQ ID NO: 37299 - protein, 215 aa, Carboxydothermus hydrogenoformans
  REGION 1..215: note = sp|Q3ADI5|QUEC_CARHZ 7-cyano-7-deazaguanine synthase; OS = Carboxydothermus hydrogenoformans (strain ATCC BAA-161 / DSM 6008 / Z-2901) OX=246194 GN=queC PE=3 SV=1
MEKAIVLLSAGLDSTVSLAYGVRNFQVVLGLTFNYGQKASRKEIEHSKKILDYYGIPQEVIELPFLKKITKTSLVAEDQEIPTGIDLESAAAVKTSMEKVWVPNRNGLFINIAAAYAESLGAKYIITGFNAEEAKTFSDNSREFVDAVNHALKYSTLNHVQVVSFTQNLEKSEIYRLGVELGAPLDLIWSCYYGGDEMCGVCESCLRLKRARGGN

SEQ ID NO: 37300 - protein, 215 aa, Carboxydothermus islandicus
  REGION 1..215: note = tr|A0A1L8D4M5|A0A1L8D4M5_9THEO 7-cyano-7-deazaguanine synthase OS=Carboxydothermus islandicus OX=661089 GN=queC PE=3 SV=1
MEKAIVLLSAGLDSTVSLAYGVRKFQVVLGLTFNYGQKAAQKEIEHSKKILDYYGIPQEVIELSFLKKITRTSLVAEDQEIPTDIDLENDDAVKTSMEKVWVPNRNGLFINIAAAYAESMGAKYIITGFNAEEAKTFSDNSREFVEAVNHALKYSTLNHVQVVSFTQNLEKSEIYRLGVELGAPMDLIWSCYYGGNEMCGVCESCLRLKRARGGT

SEQ ID NO: 37301 - protein, 215 aa, unidentified
  source 1..215: note = Carboxydothermus pertinax
  REGION 1..215: note = tr|A0A1L8CUK0|A0A1L8CUK0_9THEO 7-cyano-7-deazaguanine synthase OS=Carboxydothermus pertinax OX=870242 GN=queC PE=3 SV=1
MEKAIVLLSAGLDSTVSLAYGVKTFEVILGLTINYGQKAAKKEIEHSQKILNFYGIPQEIIELPFLQKITKTSLVAECEEIPANVDLESDEATKISMAKVWVPNRNGLFINIAAAYAESLGAKYIITGFNAEEAQTFSDNSREFVEASNLALSYSTLNKVEVVSFTQNLEKAEIYRLGIELKAPLDLVWSCYYGGEEMCGKCESCLRLIRARGGK

SEQ ID NO: 37302 - protein, 221 aa, unidentified
  source 1..221: note = Carboxylicivirga sp.
  REGION 1..221: note = tr|A0A553GN82|A0A553GN82_9BACT 7-cyano-7-deazaguanine synthase OS=Carboxylicivirga sp. M1479 OX=2594476 GN=queC PE=3 SV=1
MKKAVVLLSGGLDSAVALYLAKSEGYECHALSFDYGQRHNRELEAAKAIAIKAGVTNHQLVSLKLDKWGGSSLTDNSIQVEDGDVNRDDIPVTYVPARNMVFLSVAASLAEAIGAQDIFIGVSEVDYSGYVDCRQEFIDSMENAINMGTVMGAEKNQPIKIHAPFVNKTKAEEIKIGKKLNVDFGLTWSCYRGGEKPCGTCDSCLLRAKAFAEAGVVDTAL

SEQ ID NO: 37303 - protein, 64 aa, Cardiobacterium valvarum
  REGION 1..64: note = tr|A0A381EEI2|A0A381EEI2_9GAMM 7-cyano-7-deazaguanine synthase OS=Cardiobacterium valvarum OX=194702 GN=queC PE=4 SV=1
MDENTAITQGDDGLPTTFVDGRNALFLLYAAIYAKGRGIRRIMIGVSEADFSATPIAATFSSNP

SEQ ID NO: 37304 - protein, 139 aa, Cardiobacterium valvarum
  REGION 1..139: note = tr|G9ZGZ9|G9ZGZ9_9GAMM 7-cyano-7-deazaguanine synthase OS=Cardiobacterium valvarum F0432 OX=797473; GN = HMPREF9080_02056 PE=3 SV=1
MDENAAIIQGDDGLPTTFVDGRNALFLLYAAIYAKGHGIRRIMIGVSEADFSGYPDCRDIFIKSMNVSLNLAMAYDFRIETPLMNLKKAEVWALVNQLGRLDYVRKYSHSCYRDVRGGCGACPACELRERGLREYQNLR

SEQ ID NO: 37305 - protein, 217 aa, Caryophanon tenue
  REGION 1..217: note = tr|A0A1C0YCY9|A0A1C0YCY9_9BACL 7-cyano-7-deazaguanine synthase OS=Caryophanon tenue; OX = 33978 GN=queC PE=3 SV=1
MKQQKALIVFSGGQDSTTCLFWAMEQFGEVEAVTFDYGQRHTAEIDCAKRIAAQLGIRHHILDMSLLGQLTVNALTRDDIAITDGDEESLPSTFVPGRNLLFLSFAGVLAQQIGAKHLVTGVCETDFSGYPDCRDTFIKSLNVTLELALDAPVVIHTPLMWLTKAQTWALADTLNAFDFIREQTLTCYNGIIADGCGTCPACQLRQNGLTTYLQEVQ

SEQ ID NO: 37306 - protein, 239 aa, Castellaniella defragrans
  REGION 1..239: note = tr|W8X2Q0|W8X2Q0_CASDE 7-cyano-7-deazaguanine synthase OS=Castellaniella defragrans 65Phen OX=1437824; GN = queC PE=3 SV=1
MNAARKSRRALVLFSGGQDSTTCLAWALARHGHVETLGFDYGQRHRAELDCRIALRHRLVQLRPEWAPRLGEDHLLNVDVLGQLGASAMTDDIAIALQADGLPNTFVPGRNLLFFTLAAALAYRRGLDVLVGGMSQTDYSGYPDCRDNTLKALQVALSLGIDRPLTLETPLMWLDKADTWELAHRLGGDALAELVRTDTHTCYLNRRDTLHAWGYGCGECPACLLRAQGHREWLARRAG

SEQ ID NO: 37307 - protein, 238 aa, Castellaniella sp.
  REGION 1..238: note = tr|A0A522TUZ4|A0A522TUZ4_9BURK 7-cyano-7-deazaguanine synthase OS=Castellaniella sp.; OX = 1955812 GN=queC PE=3 SV=1
MTASRQSRRSALVLFSGGQDSTTCLAWALARYSHVETIGFNYGQRHRVELDCRATLRNRMAELRLDWKPRLSEDHLLDVDVLRQLGTSAMTDDIAITLQADGLPNTFVPGRNLLFFTLAAALAYRRGLDVMVGGMSQTDYSGYPDCRDNTLKALQVALSLGVDRPLTLETPLMWLDKADTWELAQQLGGATLVELVRVETHTCYLNRRDTLHDWGYGCGECPACKLRARGYQEWTARR

SEQ ID NO: 37308 - protein, 243 aa, Catellatospora citrea
  REGION 1..243: note = tr|A0A419XJQ4|A0A419XJQ4_9ACTN 7-cyano-7-deazaguanine synthase OS=Catellatospora citrea; OX = 53366 GN=queC PE=3 SV=1
MTTSALGALSVPADSIPRHVVLVLSGGLDSTVLAYRLRADGAQLTALSFDYGQRHRRELEYASRTAHRLGAEHHVIDLASITGLLTGSALTDRDVTVPDGHYTDLSMRATVVPNRNALMLDIAVAVAVARGAGAVAFGAHSGDHPIYPDCRPAFVSAYRRMAQLANAGFAVDGFTVLAPFIGLAKSDIVTIGEQVNVPFGDSWSCYKGGDVHCGTCGTCVERREAFALARVADPTAYLTREVG

SEQ ID NO: 37309 - protein, 219 aa, Catenovulum agarivorans
  REGION 1..219: note = tr|W7QU33|W7QU33_9ALTE 7-cyano-7-deazaguanine synthase OS=Catenovulum agarivorans DS-2 OX=1328313; GN = queC PE=3 SV=1
MSEKVVVIYSGGMDSFTVLNLAIQQGFDVYALSFNYGQRHIKELEFAKSVCNKLNVPHKIVDISAINQLLAGSSLTDDIEIPEGHYEEENMKSTVVPNRNMILLSLAVGYAVSIKANKVFYGAHAGDHAIYPDCRPEFVEKMKAVCAIADYQPISIETPFLNDSKIDILAQGLKMGLDYSQTWTCYNGREHACGKCGACTERLEAFKLNNAVDPLIYES

SEQ ID NO: 37310 - protein, 195 aa, Catenovulum agarivorans
  REGION 1..195: note = tr|W7QQM7|W7QQM7_9ALTE 7-cyano-7-deazaguanine synthase OS=Catenovulum agarivorans DS-2 OX=1328313; GN = DS2_08837 PE=3 SV=1
MRIVTLVSGGLDSTLVVKLAKDEGVDIYPLFIDYGQIARETELKSCEEALAAVGVHKFEIAELSGFGKLIKSGLTDPTLDIVNDAFTPGRNMLFLLTAAAYAYQNNADAISIGLLHESTSLFPDQSTEFLEKAEELIEVIMGYKIKVLAPLREFMKANVIELAKLKGITKTYSCHTGNLEPCGECIACKEFEMEV

SEQ ID NO: 37311 - protein, 218 aa, unidentified
  source 1..218: note = Catenovulum maritimum
  REGION 1..218: note = tr|A0A0J8GRA2|A0A0J8GRA2_9ALTE 7-cyano-7-deazaguanine synthase OS=Catenovulum maritimum; OX = 1513271 GN=queC PE=3 SV=1
MSEKAVVIYSGGMDSFTVLNLAINQGYEVLALSFNYGQRHVKELDYAKFVCAELNIPHKIVDISAINSLLAGSSLTDDIEIPEGHYEEDSMKSTVVPNRNMILLSMAVAYAISSEATKVFYGAHSGDHAIYPDCRPEFVEKMKAVCAIADYQATDIVTPFLHQSKIEILAKGLELGLDYSKTWTCYNGREKACGKCGACQERLEAFKLNNQTDPLDYE

SEQ ID NO: 37312 - protein, 224 aa, Catenovulum sp.
  REGION 1..224: note = tr|A0A2S0VLB3|A0A2S0VLB3_9ALTE 7-cyano-7-deazaguanine synthase OS=Catenovulum sp. CCB-QB4; OX = 2172099 GN=queC PE=3 SV=1
MAVSENKEKVVVIYSGGMDSYTVLNKAIEQGYQPFALTFDYGQKHNKEITYARRVCQELNIAHKVIDITAINQLLAGSSLTDDIDIPEGHYEEASMKSTVVPNRNMILLSLAVGYAVSLEATKVFYGAHSGDHAIYPDCRPEFVEKMNAVCQIANYDAVDIVTPYLQNSKIDILSDGLRMNLDYSKTWTCYNGRELACGKCGACQERLEAFELNQVKDPLTYES

SEQ ID NO: 37313 - protein, 247 aa, unidentified
  source 1..247: note = Caulobacter flavus
  REGION 1..247: note = tr|A0A2N5CNL1|A0A2N5CNL1_9CAUL 7-cyano-7-deazaguanine synthase OS=Caulobacter flavus; OX = 1679497 GN=queC PE=3 SV=1
MSASLTPSAPSGAALVLFSGGQDSSVCLAWALERYARVETLGFDYGQRHSVEMEARQAVRHQVAARFPHWAQRLGEDHVLDIKSFGAVAQSALTADRAIEMTERGLPSTFVPGRNLVFLIYAAALADRRGIDALVGGMCETDFSGYPDCRRDTLDAMQSAMNLGMDRDFRVETPLMYLTKAETWALAKQLGGEDLVDLIVVESHTCYQGERGQLHPWGHGCGECPACELREKGYAEWDAAGREALVP

SEQ ID NO: 37314 - protein, 238 aa, Caulobacter henricii
  REGION 1..238: note = tr|A0A0P0P1Z2|A0A0P0P1Z2_9CAUL 7-cyano-7-deazaguanine synthase OS=Caulobacter henricii; OX = 69395 GN=queC PE=3 SV=1
MTDAALVLFSGGQDSSVCLAWALERYARVETVGFDYGQRHLIEMEARQAVRHQIAARFPHWGERLGEDHVLDLRGFGAVAQSALTADRAIEMTDRGLPSTFVPGRNLVFLTYAAALADRRGIAALVGGMCETDFSGYPDCRRDTLDAMQNALNLGMDREFRIETPLMALTKAETWALAKALGGEDLVDLIVVESHTCYQGERGELQAWGHGCGDCPACDLRQKGYEAWDAAGRAELEL

SEQ ID NO: 37315 - protein, 244 aa, Caulobacter mirabilis
  REGION 1..244: note = tr|A0A2D2AV99|A0A2D2AV99_9CAUL 7-cyano-7-deazaguanine synthase OS=Caulobacter mirabilis; OX = 69666 GN=queC PE=3 SV=1
MPQSALSTDGALVLFSGGQDSTACLAWALARYDRVETVGFDYGQRHIVEMTARQDVRGAVSARFPDWAARLGEDHVLDIRGFGAVAESALTADRAIEMTERGLPSTFVPGRNLVFLTYAAALADRRGLKALVGGMCETDFSGYPDCRRDTLDALETALNLGMDRDFRIETPLMRLTKAQTWALAKGLGGETLVELTVADSHTCYRGERGARHAWGHGCGECPACDLRAAGWSAWVAEGRPALTA

SEQ ID NO: 37316 - protein, 253 aa, unidentified
  source 1..253: note = Caulobacter radicis
  REGION 1..253: note = tr|A0A2T9JD46|A0A2T9JD46_9CAUL 7-cyano-7-deazaguanine synthase OS=Caulobacter radicis; OX = 2172650 GN=queC PE=3 SV=1
MSASSLSSSPSGPSAPSGAALVLFSGGQDSSVCLAWALERYERVETLGFDYGQRHSIEMEARQAVRHQVAARFPQWADRLGEDHVLDIRSFGAVAQSALTADRAIEMTERGLPSTFVPGRNLVFLIYAAALADRRGIDALVGGMCETDFSGYPDCRRDTLDAMQSAMNLGMDRNFRVETPLMFLTKAQTWALAKQLGGEDLVDLIVVESHTCYQGERGELHPWGHGCGECPACELREKGYAEWDAAGREVLVP

SEQ ID NO: 37317 - protein, 253 aa, unidentified
  source 1..253: note = Caulobacter radicis
  REGION 1..253: note = tr|A0A2T9JRM7|A0A2T9JRM7_9CAUL 7-cyano-7-deazaguanine synthase OS=Caulobacter radicis; OX = 2172650 GN=queC PE=3 SV=1
MSASSLSSSPSGPSAPSGAALVLFSGGQDSSVCLAWALERYERVETLGFDYGQRHSIEMEARQAVRHQVAARFPHWADRLGEDHVLDIRSFGAVAQSALTADRAIEMTERGLPSTFVPGRNLVFLIYAAALADRRGIDALVGGMCETDFSGYPDCRRDTLDAMQSAMNLGMDRSFRVETPLMHLTKAQTWALAKQLGGEDLVDLIVVESHTCYQGERGELHPWGHGCGECPACELREKGYAEWDAAGREALVP

SEQ ID NO: 37318 - protein, 263 aa, unidentified
  source 1..263: note = Caulobacter rhizosphaerae
  REGION 1..263: note = tr|A0A561NXF9|A0A561NXF9_9CAUL 7-cyano-7-deazaguanine synthase OS=Caulobacter rhizosphaerae OX=2010972 GN=queC PE=3 SV=1
MSTPEVSTASGVSRADAALVLFSGGQDSSVCLAWALERYARVETVGFDYGQRHVIEMQARQSVRRQMADRFPHWAERLGEDHVLDLTGFGAVAQSALTADVAIEMTERGLPSTFVPGRNLVFLIYAAALADRRGLGALVGGMCETDFSGYPDCRRDTLDAMQAALNLGMDRDFVIETPLMRLTKAQTWALAKTLGGEDLVDLIVVESHTCYQGDRGELHAWGHGCGECPACELRQRGYEDWDAAGRAPLPSPPAGEGGGEAVG

SEQ ID NO: 37319 - protein, 243 aa, Caulobacter segnis
  REGION 1..243: note = tr|D5VI52|D5VI52_CAUST 7-cyano-7-deazaguanine synthase OS=Caulobacter segnis (strain ATCC 21756 / DSM 7131 / JCM 7823 / NBRC 15250 / LMG 17158 / TK0059); OX = 509190 GN =queC PE=3 SV=1
MSPPERTDAALVLFSGGQDSSVCLAWALERYGRVETVGFDYGQRHVVEMEARQAVRREVAARFPHWADRLGEDHVLDIRSFGAVAQSALTADRAIEMTERGLPSTFVPGRNLVFLIYAAALADRRGVDALVGGMCETDFSGYPDCRRDTLDAMQSALNLGMDRNFRVETPLMWLTKAETWALSKALGGEDLVKLIVEESHTCYQGERGVLHAWGHGCGVCPACELREKGYAEWDAAGREALVQ

SEQ ID NO: 37320 - protein, 458 aa, Caulobacter segnis
  REGION 1..458: note = tr|D5VJ95|D5VJ95_CAUST Uncharacterized protein; OS = Caulobacter segnis (strain ATCC 21756 / DSM 7131 / JCM 7823 / NBRC 15250 / LMG 17158 / TK0059) OX=509190; GN = Cseg_17 00 PE=4 SV=1
MKPLAFSAAAETAILVDALEEGRSPRDGALTAVIGRNLKLSIAGLKSYFYADWQPVLVDLLVVAAAAEYCDVVAHRPAWGWARAFDVRVAVHDPARWNAPIVREALQDALGFLTGDKWAFSFAARVEPVPQVRQMLDLGHPAKTIIPYSNGLDSLAVAALTSEARPSDLVRVRLGAAFADQKSHNKRRQAFASVPYEVRVAKGRRKESSARSRGFKFAVITGIAAVLAKADKIVVTESGQGALGPVLTVSGQAYPDYRVHPAFTMRVERLFATLLGHSAHYDFPRLWSTKGETIAEAARATPQPWAETRSCWQQSRQVGMGGKQRQCGVCAACMLRRMSLHAAGVVEPADAYVWENLGASDFRSGAAPGFKLVTPALEQYAIAGVLHLDHLAALPDSPLHRRLIRRSAREVADALGETLQDTEMKLLSMLERHRNEWRNFLTQLGPDSFVTKLSSVVP

SEQ ID NO: 37321 - protein, 242 aa, Caulobacter sp.
  REGION 1..242: note = tr|A0A3S9VC92|A0A3S9VC92_9CAUL 7-cyano-7-deazaguanine synthase OS=Caulobacter sp. FWC26; OX = 69665 GN=queC PE=3 SV=1
MSPRERQAALVLFSGGQDSSVCLAWALQRYDRVETVGFDYGQRHAIEMEARQAVRREIAAGFPQWAERLGEDHVLDIRSFGQVAQSALTADRAIEMTERGLPSTFVPGRNLVFLIYAAALADRRGVDALVGGMCETDFSGYPDCRRDTLDAMQSALNLGMDRDFRIETPLMWLTKAQTWGLAKQLGGEDLVRLIVEESHTCYQGERGELHAWGHGCGTCPACELREKGYVEWDAAGREALAQ

SEQ ID NO: 37322 - protein, 242 aa, Caulobacter sp.
  REGION 1..242: note = tr|A0A0Q6UQ53|A0A0Q6UQ53_9CAUL 7-cyano-7-deazaguanine synthase OS=Caulobacter sp. Root343; OX = 1736520 GN=queC PE=3 SV=1
MSPPVTGAALVLFSGGQDSSVCLAWALERYARVETVGFDYGQRHVVEMEARQAVRREIAARFPQWADRLGEDHVLDIRSFGQVAQSALTADRAIEMTERGLPSTFVPGRNLVFLIYAAALADRRGIDALVGGMCETDFSGYPDCRRDTLDAMQNALNLGMDRSFRVETPLMWLTKAQTWALSKSLGGEDLVQLIVEESHTCYQGERGQMHSWGHGCGACPACELREKGYAEWDAAGREALPA

SEQ ID NO: 37323 - protein, 242 aa, Caulobacter vibrioides
  REGION 1..242: note = sp|Q9A3P2|QUEC_CAUVC 7-cyano-7-deazaguanine synthase; OS = Caulobacter vibrioides (strain ATCC 19089 / CB15); OX = 190650 GN=queC PE=3 SV=1
MSPRERQAALVLFSGGQDSSVCLAWALERYDRVETVGFDYGQRHAIEMQARQAVRREVAARFPQWAERLGEDHVLDIRSFGAVAQSALTADRAIEMTERGLPSTFVPGRNLVFLTYAAALADRRGIDALVGGMCETDFSGYPDCRRDTLDAMQAALNLGMDRNFRIETPLMWLTKAQTWGLSKQLGGEALVSLIVEESHTCYQGERGQLHAWGHGCGTCPACELREKGYVEWDMAGREALAQ

SEQ ID NO: 37324 - protein, 242 aa, Caulobacter vibrioides
  REGION 1..242: note = tr|A0A258D884|A0A258D884_CAUVI 7-cyano-7-deazaguanine synthase OS=Caulobacter vibrioides; OX = 155892 GN=queC PE=3 SV=1
MSPRERQAALVLFSGGQDSSVCLAWALERYDRVETVGFDYGQRHAIEMQARQAVRREIAARFPDWAGRLGEDHVLDIRSFGAVAQSALTADRAIEMTERGLPSTFVPGRNLVFLTYAAALADRRGIDALVGGMCETDFSGYPDCRRDTLDAMQSALNLGMDRDFRIETPLMWLTKAQTWSLSKQLGGEDLVRLIVEESHTCYQGERGELHAWGHGCGTCPACELREKGYVEWDAAGREALVQ

SEQ ID NO: 37325 - protein, 247 aa, unidentified
  source 1..247: note = Caulobacter zeae
  REGION 1..247: note = tr|A0A2N5D8A8|A0A2N5D8A8_9CAUL 7-cyano-7-deazaguanine synthase OS=Caulobacter zeae; OX = 2055137 GN=queC PE=3 SV=1
MSASLTPSAPSGAALVLFSGGQDSSVCLAWALERYARVETLGFDYGQRHSIEMEARQAVRHQVAARFPHWADRLGEDHVLDIRSFGAVAQSALTADRAIEMTERGLPSTFVPGRNLVFLIYAAALADRRGTDALVGGMCETDFSGYPDCRRDTLDAMQSAMNLGMDRNFRVETPLMYLTKAQTWALAKQLGGEDLVDLIVVESHTCYQGERGELHPWGHGCGECPACELREKGYAEWDAAGREALVP

SEQ ID NO: 37326 - protein, 35 aa, unidentified
  source 1..35: note = Caulobacteraceae bacterium
  REGION 1..35: note = tr|A0A4Q3TBI8|A0A4Q3TBI8_9CAUL 7-cyano-7-deazaguanine synthase (Fragment); OS = Caulobacteraceae bacterium OX=1978230 GN=EON96_18125; PE = 4 SV=1
MSDILQNPTPSALVLFSGGQDSATCLAWALERYAR

SEQ ID NO: 37327 - protein, 230 aa, unidentified
  source 1..230: note = Caulobacteraceae bacterium
  REGION 1..230: note = tr|A0A1B1AGB0|A0A1B1AGB0_9CAUL 7-cyano-7-deazaguanine synthase OS=Caulobacteraceae bacterium OTSz_A_272 OX=1759059 GN=queC PE=3 SV=1
MSAALVLFSAGQDSATCLAWALSKFDRVETIGFAYGQRHAVEMGQRPILRSAIAGIGPEWAARLGGDVVVDLAGYGALAESALTADRAIEMTESGLPSTFVPGRNLVFLSVAAAHAYRRGADTLIGGMCETDFSGYPDCRRDTIDAMQQALSLGLATPVTVATPLMQLTKAQTWGLAHDLGGASLVDAILEHSHTCYEGDRSLRHAWGYGCGVCPACELRANGWREFGAK

SEQ ID NO: 37328 - protein, 243 aa, unidentified
  source 1..243: note = Caulobacterales bacterium
  REGION 1..243: note = tr|A0A258CC00|A0A258CC00_9PROT 7-cyano-7-deazaguanine synthase OS=Caulobacterales bacterium 32-67-6 OX=1970502 GN=queC PE=3 SV=1
MTDTNRDQRALVLFSGGQDSSVCLAWALARYGHVETVGFDYGQRHAVEMSARQVVREAMIARFPAWAERLGPDHLIDLTGFGAIAETAMTAERAFEVTDRGLPSTFVPGRNLVFLTYGAALADRRGIGDLVGGMCETDFSGYPDCRRDTIDALEHALNLGMAQNFRIKTPLMSLTKAETWALSKGLGGEALVELICEESHTCYRGERGVRHDWGHGCGDCPACELRARGWTNWVAQGRPELAA

SEQ ID NO: 37329 - protein, 243 aa, unidentified
  source 1..243: note = Caulobacterales bacterium
  REGION 1..243: note = tr|A0A1F8I9T1|A0A1F8I9T1_9PROT 7-cyano-7-deazaguanine synthase OS=Caulobacterales bacterium RIFCSPHIGHO2_12_FULL_68_13 OX=1797586 GN=queC; PE = 3 SV=1
MSVILEKSPTSALVLFSGGQDSATCLAWALERFERVETVGFDYGQRHRVEMEARQAVRAGMKTALPQWADRLGDDHVVDLTGYGRIAESALTADRKIEMDARGLPTTFVPGRNLIFLVAAAALADRRGLEVLVGGMCETDYSGYPDCRHETMEAMARALSLGLDKPVVVDTPLMWLTKGQTWELADRIGGEALVELIIEDSHTCYLGDRTHRHAWGYGCGECPACELRAAGYEDWVASQGAKA

SEQ ID NO: 37330 - protein, 228 aa, unidentified
  source 1..228: note = Caviibacterium pharyngocola
  REGION 1..228: note = tr|A0A2M8RVZ6|A0A2M8RVZ6_9PAST 7-cyano-7-deazaguanine synthase OS=Caviibacterium pharyngocola OX=28159 GN=queC PE=3 SV=1
MNTINPKGDRKAIVIFSGGQDSTTCLIQAIADYGVENVETITFQYGQRHSIELEKAAQIAQDLGVKQTIIDTSVIKTITSNALMDEGAEIKTAQNGLPNTFVDGRNALFLLYTAIYAKGQGIRDIITGVCETDFSGYPDCRDVFIKSMNVTLNLAMDYAFNLRTPLMYLTKAQTWALADELGALDYIRNRTHTCYQGVEGGCGECPSCVLREKGLNEYLQQKSAVKNV

SEQ ID NO: 37331 - protein, 231 aa, Cedecea davisae
  REGION 1..231: note = tr|S3J1V4|S3J1V4_9ENTR 7-cyano-7-deazaguanine synthase OS=Cedecea davisae DSM 4568 OX=566551 GN=queC; PE = 3 SV=1
MKRTVVVFSGGQDSTTCLIQALQQYDEVHCVTFDYGQRHRAEIDVAQKLALKLGARAHKVLDVTLLNELAVSSLTRDSIPVPGYNPHDDGIPSTFVPGRNILFLTLAAIYAYQVEAESVITGVCETDFSGYPDCRDEFVKALNHAVSLGMARDIRFETPLMWLDKAETWALADYWQHLETIRHETLTCYNGIQGDGCGECAACNLRANGLNHYQANKPAVMAAMKQKTGLK

SEQ ID NO: 37332 - protein, 231 aa, Cedecea lapagei
  REGION 1..231: note = tr|A0A3S4IFW5|A0A3S4IFW5_9ENTR 7-cyano-7-deazaguanine synthase OS=Cedecea lapagei; OX = 158823 GN=queC PE=3 SV=1
MKRTVVVFSGGQDSTTCLIQALQQYDEVHCVTFDYGQRHRAEIDVAQKLSLKLGARAHKVLDVTLLNELAVSSLTRDSIPVPGYNPEDSGLPSTFVPGRNILFLTLAAIYAYQVEAESVITGVCETDFSGYPDCRDEFVKALNHAVSLGMARDIRFETPLMWLDKAETWALADYWKQLETVRHETLTCYNGIQGDGCGECAACHLRANGLNHYLANKPAVMAAMQQKTGLK

SEQ ID NO: 37333 - protein, 231 aa, Cedecea lapagei
  REGION 1..231: note = tr|A0A2N0CM02|A0A2N0CM02_9ENTR 7-cyano-7-deazaguanine synthase OS=Cedecea lapagei; OX = 158823 GN=queC PE=3 SV=1
MKRAVVVFSGGQDSTTCLVQALHQYDEVHCVTFDYGQRHRAEIDVARELALKLGARAHKVLDVTLLNELAVSSLTRDSIPVPDYEPDASGIPNTFVPGRNILFLTLTAIYAYQVKAEAIITGVCETDFSGYPDCRDEFVKALNHAVDLGMAKEIRFETPLMWLDKAETWALADYWGKLDLVRNETLTCYNGIKGDGCGQCAACNLRANGLNHYLADKPAVMALMKKKTGLK

SEQ ID NO: 37334 - protein, 231 aa, Cedecea neteri
  REGION 1..231: note = tr|A0A089Q1T1|A0A089Q1T1_9ENTR 7-cyano-7-deazaguanine synthase OS=Cedecea neteri; OX = 158822 GN=queC PE=3 SV=1
MKRTVVVFSGGQDSTTCLIQALQQYDEVHCVTFDYGQRHRAEIDVAQKLSLKLGARAHKVLDVTLLNELAVSSLTRDSIPVPGYNPEDSGLPSTFVPGRNILFLTLAAIYAYQVEAESVITGVCETDFSGYPDCRDEFVKALNHAVSLGMARDIRFETPLMWLDKAETWALADYWQHLETIRHETLTCYNGIQGDGCGECAACNLRANGLNHYLANKSAVMATMQQKTGLK

SEQ ID NO: 37335 - protein, 231 aa, Cedecea neteri
  REGION 1..231: note = tr|A0A291E1E7|A0A291E1E7_9ENTR 7-cyano-7-deazaguanine synthase OS=Cedecea neteri; OX = 158822 GN=queC_1 PE=3 SV=1
MKRTVVVFSGGQDSTTCLIQALQQYDEVHCVTFDYGQRHRAEIDVAQKLSLKLGARAHKVLDVTLLNELAVSSLTRDSIPVPGYNPEDKGIPSTFVPGRNILFLTLAAIYAYQVEAESVITGVCETDFSGYPDCRDEFVKALNHAVSLGMARDIRFETPLMWLDKAETWALADYWQSLETVRQETLTCYNGIQGDGCGECAACNLRANGLNHYLANKSAVMAAMKQKTGLK

SEQ ID NO: 37336 - protein, 231 aa, Cedecea sp.
  REGION 1..231: note = tr|A0A1X7J3B2|A0A1X7J3B2_9ENTR 7-cyano-7-deazaguanine synthase OS=Cedecea sp. NFIX57; OX = 1566286 GN=queC PE=3 SV=1
MKRTVVVFSGGQDSTTCLIQALQQYDEVHCVTFDYGQRHRAEIDVAQKLSLKLGARAHKVLDVTLLNELAVSSLTRDSIPVPGYNPEDKGIPSTFVPGRNILFLTLAAIYAYQVEAESVITGVCETDFSGYPDCRDEFVKALNHAVSLGMARDIRFETPLMWLDKAETWALADYWQSLETVRQETLTCYNGIQGDGCGECAACNLRANGLNHYLANKPAVMAAMKQKTGLK

SEQ ID NO: 37337 - protein, 178 aa, unidentified
  source 1..178: note = Celeribacter indicus
  REGION 1..178: note = tr|A0A0B5DZL1|A0A0B5DZL1_9RHOB 7-cyano-7-deazaguanine synthase OS=Celeribacter indicus; OX = 1208324 GN=P73_3769 PE=3 SV=1
MLRPDVLFTIDYGQAPAQGELRAATFIARELGLNHETLSVDCSPLGAGDMAGRPIASHSRVSEAWPFRNQLLVTLAAMKFAGEGLKDILIGTVVSDRVHADGSPEFVERLDMLIKCELPQTSVTAPALNMSTLELVKRSQVPMDILGWSFSCHRSTVACGQCRGCNKTIDLWEALERS

SEQ ID NO: 37338 - protein, 231 aa, unidentified
  source 1..231: note = Celeribacter indicus
  REGION 1..231: note = tr|A0A0B5E4X4|A0A0B5E4X4_9RHOB 7-cyano-7-deazaguanine synthase OS=Celeribacter indicus; OX = 1208324 GN=queC PE=3 SV=1
MRTLVICSGGLDSVTLADLVAQEGHLSRLVSFDYGQRHARELDHAARAAARLGVPHHLIDMRAIGAALTGSALTDDIEVPDGHYAEETMRITVVPNRNAILLAVAYGIAAAEGDTAVATAVHGGDHFIYPDCRPAFTAAFAAMQEAALDGYATVTLLTPFVHRSKADIVAEGARLGTPFADTWSCYRGGARHCGRCGTCVERREAFALAGVPDPTVYEDPEFWTDAVAGRR

SEQ ID NO: 37339 - protein, 438 aa, Celeribacter neptunius
  REGION 1..438: note = tr|A0A1I3PG40|A0A1I3PG40_9RHOB 7-cyano-7-deazaguanine synthase (Queuosine biosynthesis); OS = Celeribacter neptunius OX=588602 GN=SAMN04487991_1663; PE = 4 SV=1
MTKCILHFQTEEISPTVTIADNSRIVRLYGTCHNIDKAGYIGKTLPDRVERLGAPTSTTAFDFLTISMAVTAADTFFRREDVSDNGWARDFDLHVPVVQPDKWTAARPLLQRILNFLTGDHWQFTFLQNGPPKPNAIGGRLRKKSNLLSVDSVCLYSGGLDSWLGAKNLIANGNNPILVSHSYPQDSQRQNYLYDRLGQPLQRFAFNASPRQSGSSNDTTMRGRSFNFLAMAAVCADAVAELNGLGNVPLYIPENGFIALNAPLTPRRIGSHSTRTAHPNYLSQMQELFSRVGIKAIIENPFWTMTKGEMMVAASLSASDQRYASQTVSCGKWKRKSEQCGRCIPCLIRRASFLKAGIADNTPYTYSIPQNFAEYDGTKKDDLMAVVRAAQPKSKKQRLKNALKSGPLPIDVAERDQWLAVYERGLKELGDFLKSQGI

SEQ ID NO: 37340 - protein, 236 aa, unidentified
  source 1..236: note = Celeribacter persicus
  REGION 1..236: note = tr|A0A2T5HI61|A0A2T5HI61_9RHOB 7-cyano-7-deazaguanine synthase OS=Celeribacter persicus; OX = 1651082 GN=queC PE=3 SV=1
MKTLVICSGGLDSVSLAHVLAAKGDLSRLVSFDYGQRHAKELDYAARAAQRLNVSHQIIDMRPIGAALTGSALTDDIDVPDGHYAEETMKITVVPNRNAIMLTIAFGVAAAQGDEAVATAVHGGDHFIYPDCRPAFTESFETMQRAALDGYADIRLSTPFVHKTKADIVTAGTAVDTPFADTWSCYKGGTRHCGRCGTCVERREAFHLAGIPDPTDYEDPGFWKAAIAQASRKNDR

SEQ ID NO: 37341 - protein, 219 aa, Celerinatantimonas diazotrophica
  REGION 1..219: note = tr|A0A4R1K398|A0A4R1K398_9GAMM 7-cyano-7-deazaguanine synthase OS=Celerinatantimonas diazotrophica OX=412034 GN=queC PE=3 SV=1
MKEKVVIIYSGGMDSYTVLNKALQEGYDAYPLTFDYGQRHKKEIDVARRVTQKLGLKHKVIDITAINQLLQGSSLTSDIDIPEGHYAEESMKSTVVPNRNMILLSLAIGYAVSIGAHKVYYGAHSGDHAIYPDCRPEFVNKMNAVSQIANYDPVEIVSPYLHQSKIEILKDGLTMGLDYSQTWTCYNGREKACGRCGACQERLEAFAKNGQVDPLEYED

SEQ ID NO: 37342 - protein, 219 aa, unidentified
  source 1..219: note = Cellulomonas carbonis
  REGION 1..219: note = tr|A0A0A0BV72|A0A0A0BV72_9CELL 7-cyano-7-deazaguanine synthase OS=Cellulomonas carbonis T26 OX=947969 GN=N868_05475 PE=3 SV=1
METAVLLSGGPDSAVLVHDLVRRGDDVVAIHLELGVAESPAALRCATAVSAALGIELVRLDLTPGGAREVRAGLVPGRAGRAAEPAFGGALSVAATTAATLGAHVLACGVHHGEAVFRGNQRHAFDALAASVSIDVGRHLVITTPYLGMTKAEVLLRGVALGVDVASTWSCTEGSTVHCGRCPACATRRAAFGDAGLVDTTPYARAAAAGGARSDAHAR

SEQ ID NO: 37343 - protein, 333 aa, Cellulomonas composti
  REGION 1..333: note = tr|A0A511J9H6|A0A511J9H6_9CELL 7-cyano-7-deazaguanine synthase OS=Cellulomonas composti; OX = 266130 GN=CCO02nite_13050 PE=3 SV=1
MAEFRRARFDPAAVRISSENAVVMLSGGLDSTVALWWALEHYGSVRAVSLDYGQPHRAELRAAARLAAVAGVERAVVRLDLPRGYRDASGMFIRGHTSLMGGLGALGVGAAGADVVLGMLATDPYADCGAEYLDALSAGLVNEHDEGPTRVVAPLLALEDKTAVAALGFELGAPWHVSWSCRRPLRGRPCADCSACRSRAVVDRRLDEEYGLPPAVVRSWQAVMGSPSHPVIGRCSDELRGLGQRIASAGGAERGTVGTRYVGPDGARRLAPHVRGARRAELRRPARTRYVRARGHGWQVAVCDDGAVAATDGLPSLDTIQRSLVAAVAAAPR

SEQ ID NO: 37344 - protein, 228 aa, Cellulomonas sp.
  REGION 1..228: note = tr|A0A1I3T318|A0A1I3T318_9CELL 7-cyano-7-deazaguanine synthase OS=Cellulomonas sp. KH9; OX = 1855324 GN=queC PE=3 SV=1
MHKPAIVLLSGGLDSTTVLAIAKSQGYAPYALSFRYGQRHVVELTAAQRVAEAQGVERHVVADIDLRVFGGSALTSDVEVPKHESADELAADIPVTYVPARNTIFLSFALAYAETVGASDVFIGVNALDYSGYPDCRPEYIRAYETMANLATRAGVQGSKLTIHSPLLEMSKADIIRTGLELGIDYGLTSSCYDPNDAGRSCGHCDSCLLRLKGFAEAGAIDPVAYQA

SEQ ID NO: 37345 - protein, 227 aa, Cellulosilyticum sp.
  REGION 1..227: note = tr|A0A5B9YHA9|A0A5B9YHA9_9FIRM 7-cyano-7-deazaguanine synthase OS=Cellulosilyticum sp. WCF-2 OX=2497860 GN=queC PE=3 SV=1
MKAMVLFSGGIDSTTCLALAIEKFGKKNVIPLSITYGQKHSKELAASKSILSYYELEGMDLDLTPMFTYSDCSLLSHSKEEIPLTSYAEQLELTNGKPVSTYVPFRNGLFLSSAASIALAKGCSSIYYGAHSDDAAGNAYPDCSQTFNEAINRAIYEGSGKALQVVAPFVGLTKADVVSEGLRLNVPYHLTWSCYEGHTTPCRECGTCIDREKAFKLNGLIEPLLQE

SEQ ID NO: 37346 - protein, 225 aa, Cellvibrio japonicus
  REGION 1..225: note = sp|B3PC22|QUEC_CELJU 7-cyano-7-deazaguanine synthase; OS = Cellvibrio japonicus (strain Ueda107) OX=498211 GN=queC; PE = 3 SV=1
MSRKKAVILVSGGLDSTTVIAIARSQGYDCYTISFDYGQRHRAELKAAEITAKAHGSLEHKVIRLDLGAIGGSALTDTSIDVPEEETSGIPVTYVPARNTVFLSIALGWAEVLGALDIFIGVNAVDYSGYPDCRPDYIAAYETMANLATKRGIEGERLHIRTPLINLTKAQIIQQGLALGVDYRLTVSCYQANDGGEACGKCDSCRLRKQGFEQAGVADPTRYAF

SEQ ID NO: 37347 - protein, 226 aa, Cellvibrio mixtus
  REGION 1..226: note = tr|A0A266Q344|A0A266Q344_9GAMM 7-cyano-7-deazaguanine synthase OS=Cellvibrio mixtus; OX = 39650 GN=queC PE=3 SV=1
MSQKKAVVLVSGGLDSTTVLAIARSEGYACYSISFDYGQRHRSELLAAERTAKVLGAVEHKVIKLDLRAIGGSALTDDSIAVPEEETGGIPVTYVPARNTVFLSIALGWAEVLGCDDIFIGVNAVDFSGYPDCRPEYIAAYEVMANLATRAGAEGNKLHIRTPLIHLSKADIIKQGVALGVDYGLTVSCYQANDQGEACGKCDSCRLRKQGFVQAGIADPTHYQSA

SEQ ID NO: 37348 - protein, 226 aa, Cellvibrio sp.
  REGION 1..226: note = tr|A0A1U9N570|A0A1U9N570_9GAMM 7-cyano-7-deazaguanine synthase OS=Cellvibrio sp. PSBB023; OX = 1945512 GN=queC PE=3 SV=1
MSQKKAVVLVSGGLDSTTVLAIARSEGYACYSMSFDYGQRHRSELLAAERTAKALGAVEHKVIKLDLRAIGGSALTDDSIAVPEEETGGIPVTYVPARNTVFLSIALGWAEVLGCDDIFIGVNAVDFSGYPDCRPEYIAAYEVMANLATRAGAEGNKLHIRTPLIHLSKADIIKQGVALGVDYGLTVSCYQANDQGEACGKCDSCRLRKQGFVQAGIADPTHYQTA

SEQ ID NO: 37349 - protein, 224 aa, Cellvibrio sp.
  REGION 1..224: note = tr|A0A5J6NVZ5|A0A5J6NVZ5_9GAMM 7-cyano-7-deazaguanine synthase QueC OS=Cellvibrio sp. KY-YJ-3 OX=454662 GN=queC PE=4 SV=1
MSQKKAVVLVSGGLDSTTVLAIARSEGYACYSMSFDYGQRHRSELLAAERTAKALGAVEHKVIKLDLRAIGGSALTDDTIAVPEEETGGIPVTYVPARNTVFLSIALGWAEVLGCDDIFIGVNAVDFSGYPDCRPEYIAAYEVMANLATRAGAEGNKLHIRTPLIHLSKGDIIKQGVALGVDYGLTVSCYQANDEGEACGKCDSCRLRKQGFVQAGIADPTRYQ

SEQ ID NO: 37350 - protein, 224 aa, unidentified
  source 1..224: note = Cellvibrionaceae bacterium
  REGION 1..224: note = tr|A0A545U9H1|A0A545U9H1_9GAMM 7-cyano-7-deazaguanine synthase OS=Cellvibrionaceae bacterium R142 OX=2591008 GN=queC PE=3 SV=1
MSDKKAVVLVSGGLDSSTVLAMAGAEGFACYTLSFDYGQRHRAELAAAARVSAAMGAVEHKVVALDLRCIGGSALTDDSIAVPEEASEGIPVTYVPARNTVFLSIALGWAEVLGAGDIFIGVNAVDYSGYPDCRPEYIDAYEKMANLATKAGVEGHSLRIRSPLLTLTKAEIIRRGLALGVDYGLTVSCYQASEAGEACGRCDSCRLRRAGFVEAGAADPTRYR

SEQ ID NO: 37351 - protein, 223 aa, unidentified
  source 1..223: note = Cellvibrionales bacterium
  REGION 1..223: note = tr|A0A1Z8Z8P2|A0A1Z8Z8P2_9GAMM 7-cyano-7-deazaguanine synthase OS=Cellvibrionales bacterium TMED79 OX=1986768 GN=queC PE=3 SV=1
MTTKAVILTSGGLDSATLLAMAHSQSRECYSLSFDYGQRHRAELNAARAIAASYGDVVHRVISLDLSAIGGSALTDMDIDVPTTPQEGIPVTYVPARNTVFLSLALGWAEVLEATEIYIGVNAVDYSGYPDCRPEFIAAYQNLIGVATKAGVEGASIELKTPLIHLSKSDIIRRGIAHGVDYAMTVSCYQADEQGRACGVCDSCRIRAAGFSDAGVVDPTRYR

SEQ ID NO: 37352 - protein, 235 aa, unidentified
  source 1..235: note = Cellvibrionales bacterium
  REGION 1..235: note = tr|A0A350J1V4|A0A350J1V4_9GAMM 7-cyano-7-deazaguanine synthase OS=Cellvibrionales bacterium OX=2026722 GN=queC PE=3 SV=1
MTAIDPSIIKSSTTKKAIVLVSGGLDSATVLAMAIAQGYECHTLSFDYGQRHRAELQAAEQLSAASAAVEHRVISFDLGVIGGSALTDSAIAVPESPTEGIPITYVPARNTIFLSFALGYAEVVDASAIFVGVNAVDYSGYPDCRPDYIAAYQIMADSATKAGVEGHGAKVHAPLIDMSKSDIVKEGVRLGVNYAMTVSCYQANADGEACGKCDSCRLRAEGFKAAGIADPTRYV

SEQ ID NO: 37353 - protein, 228 aa, Centipeda periodontii
  REGION 1..228: note = tr|F5RP83|F5RP83_9FIRM 7-cyano-7-deazaguanine synthase OS=Centipeda periodontii DSM 2778 OX=888060; GN = exsB PE=3 SV=1
MGEKAVILLSGGLDSCTCMAVACAAGYELYPISFDYHQRHDRELDCAKRIAEHYHAVEHLIIETNMNAVGGSALTDDAIAVPEGDAERTDIPVTYVPARNLIFLSYALGYAERVGAAHLYIGVNSVDYSGYPDCRPEFIAAFQAAADAATAAATERGRRIIVETPLQHLSKGAIVQLGTKLGAPYELTTSCYRGGAEACGVCDSCVLRLRGFAEAGRRDPIPYAAGVR

SEQ ID NO: 37354 - protein, 233 aa, Cesiribacter andamanensis
  REGION 1..233: note = tr|M7NTB6|M7NTB6_9BACT 7-cyano-7-deazaguanine synthase OS=Cesiribacter andamanensis AMV16 OX=1279009; GN = queC PE=3 SV=1
MTTPTGMIPTAPGTAALVLFSGGQDSTTCLFWAKKHFERVEALGFNYGQKHQVELEQALLIAQKADVPFHVMDVGGLLQGSSLTEHHKAMDSPHEQNQNLPASFVPGRNALFLTIAASWGYTRQIHDLVGGMCQTDYSGYPDCRRVFVDSLQTTASLALDQDVRIHTPLMYLTKAETWKLAKDLGVLEIVRDMSHTDYNGNRSTYNEWGYGELDNPASILRARGWEEAAKGWV

SEQ ID NO: 37355 - protein, 222 aa, unidentified
  source 1..222: note = Cetia pacifica
  REGION 1..222: note = tr|A0A3N1YTJ0|A0A3N1YTJ0_9PROT 7-cyano-7-deazaguanine synthase OS=Cetia pacifica; OX = 1424653 GN=queC PE=3 SV=1
MKAVVILSGGMDSTTAAFIAKQEGYEIIPLHFNYGQRTEKRELKAFNDICDYLKIEKNKRYIIDIPFFKQIGASALVDESLEVPTDGLKPGIPITYVPFRNGIFLSISAAVAEKEGAEAIYIGVVEEDSSGYPDCREEFINYMQKAINAGTKPETKVEIKTPLIHLKKEDIVKKAAEVGVPLELTWSCYKNEDEACGVCDSCRLRLKGFEKAGMKDKIPYKE

SEQ ID NO: 37356 - protein, 222 aa, Chamaesiphon minutus
  REGION 1..222: note = tr|K9U8G7|K9U8G7_CHAP6 7-cyano-7-deazaguanine synthase OS=Chamaesiphon minutus (strain ATCC 27169 / PCC 6605) OX=1173020 GN=queC PE=3 SV=1
MKAVILLSGGLDSSTVLYLAKSEGYSCYALSFDYQQRHRRELEAANAIASAAGVVAHQVVSFDLRLWGGSALTDDRIALPQERNLAQMSESIPVTYVPARNTIFLSFALAYAEAIEASRVYIGVNALDYSGYPDCRPDYIDAMRSVFRLGTKQGREGDPIEIVTPLIDLKKTEIIQLGDRLGVPWAQTWSCYSGDRVPCGTCDSCRLRLAAFEELGMVDPGR

SEQ ID NO: 37357 - protein, 435 aa, Chamaesiphon minutus
  REGION 1..435: note = tr|K9URI1|K9URI1_CHAP6 7-cyano-7-deazaguanine synthase OS=Chamaesiphon minutus (strain ATCC 27169 / PCC 6605) OX=1173020 GN=Cha6605_6015 PE=3 SV=1
MQVIVSHIPQKLPESSPNIIPVQIYGLDGRKQRNIATIGNSLINSIKRLGVSISPVEFDLMTLALAVTAADTFVKRSRSDDGWTREIKLQVSLCEPSVCLGQKERLEEALHFLSGDLWNLEILSGGYKPPDPYPINSRHKTIDLEGRDCVCLFSGGLDSAIGAIDLIADGKSPLLISHSYKGDKSYQDYIAGKLEGEFSRFSVNANPISIGGQTELTMRTRSLNFLAFAALGASALATVNQLENIELFVPENGLISLNAPLTSRRIGSLSTRTTHPHFLRSMQEIFDAVGIKVLIHNPYQFKTKGEMLLECKNQITLERVVSHTVSCSKWKRKRQQCGKCVPCIIRRAAIFALGITESTPYEHQNLLATVSDRGNRDDLFAIMIAINKLSSSNIGAWISDSGPLTVDPVIKDLYKQVFQRGMQEVDRFLQQEGLL

SEQ ID NO: 37358 - protein, 226 aa, unidentified
  source 1..226: note = Chamaesiphon polymorphus
  REGION 1..226: note = tr|A0A2T1F5U6|A0A2T1F5U6_9CYAN 7-cyano-7-deazaguanine synthase OS=Chamaesiphon polymorphus CCALA 037 OX=2107692 GN=queC PE=3 SV=1
MKAVILLSGGLDSSTVLYLAKSEGYSCYALSFDYQQRHRRELEAASAIASAVGVVEHQVVSFDLRLWGGSALTDDRIALPQERNLAQMSESIPVTYVPARNTIFLSFALAYAEAIEANRVYIGVNALDYSGYPDCRPDYIEAMQSVFRLGTKQGREGDPIEIVTPLIDLKKTEIIQLGDRLGVPWAQTWSCYSGDRVPCGTCDSCRLRLAAFEELGVVDPGMRDRL

SEQ ID NO: 37359 - protein, 442 aa, unidentified
  source 1..442: note = Chamaesiphon polymorphus
  REGION 1..442: note = tr|A0A2T1GP37|A0A2T1GP37_9CYAN 7-cyano-7-deazaguanine synthase OS=Chamaesiphon polymorphus CCALA 037 OX=2107692 GN=C7B77_00025 PE=3 SV=1
MGELLVTQVIVNHIPHKLPESSPNIIPVQIYGLDGRKQRDIATIGNSSIESIKRLGVSISPVEFDLMTLALAVTAADTFVKRNRADDGWTREIELQVSLYEPSIWLEQKERLEEALHFLSGDLWNLEILSGGYKPPDPYPINSRHKTIDLEGRDCVCLFSGGLDSAIGAIDLITDRKSPLLISHSYKGDKSYQNYIAGKLEGEFSRFSVNANPISIGGQTELTMRTRSLNFLAFAALGASAVATVNHLENTQLFVPENGLISLNAPLTSRRIGSLSTRTTHPHFLRSMQEIFDAVGIKVLIHNPYQFKTKGEMLLECKNQITLDRVVSHTVSCSKWKRKRQQCGKCVPCIIRRSAIFALGITESTAYEHQNLLATMSDRGNRDDLFAIMIAINKLSSSNISAWISDSGPLTVDPVTKDLYKQVFQRGMREVDRFLQKEGLLR

SEQ ID NO: 37360 - protein, 232 aa, unidentified
  source 1..232: note = Chania multitudinisentens
  REGION 1..232: note = tr|W0LCK0|W0LCK0_9GAMM 7-cyano-7-deazaguanine synthase OS=Chania multitudinisentens RB-25 OX=1441930; GN = queC PE=3 SV=1
MKRAVVVFSGGQDSTTCLIQALQQYDEVHCITFDYGQRHRAEIDVAKALAQELGVKAHKVLEAGLLNELAISSLTRDNIPLPIFDSTQQEAIPNTFVPGRNIFFLTLASIYAYQVEAETVIIGVCETDFSGYPDCRDEFVKALNHAIVLGIARDIHFETPLMWLNKAETWALADYYQQLERVRQDTLTCYNGIKGDGCGQCAACHLRTHGLQQYQVNKTEVMASLKQKTGLV

SEQ ID NO: 37361 - protein, 232 aa, Chelativorans sp.
  REGION 1..232: note = sp|Q11B05|QUEC_CHESB 7-cyano-7-deazaguanine synthase; OS = Chelativorans sp. (strain BNC1) OX=266779 GN=queC PE=3; SV = 1
MKTFVICSGGLDSVSLAHKVAVEKTLAGLISFDYGQRHKKELDFARACAQRLDVRHMIIDIRAVGEGLAGSALTDEIDVPNGHYAEDTMRITVVPNRNAIMLAIAFGVAAAQNADAVATAVHGGDHFIYPDCRPGFIEAFQAMQAQALDGYAKIALYAPYVNLSKANIVSDGVRHRTPFEATWSCYKGGKHHCGRCGTCVERREAFDLAGVTDPTTYEDAAFWREAVARKAG

SEQ ID NO: 37362 - protein, 244 aa, Chelatococcus sambhunathii
  REGION 1..244: note = tr|A0A0K6H0S8|A0A0K6H0S8_9RHIZ 7-cyano-7-deazaguanine synthase OS=Chelatococcus sambhunathii OX=363953 GN=queC PE=3 SV=1
MPEIADDKALVLFSGGQDSTVCLGWALERFAHVETIGFDYGQRHAVELTCRGVIRERLARPGAMGEKRLGRDHVVPLAALGAISDTAMTREVAIATGENGLPTTFVPGRNLIFLTFAAALAYRRGTRHIVLGVCETDYSGYPDCRDDTIKAMQVSINLGTDSRFVLHTPLMWRDKAETFALAERLGGADFLALVVEETHTCYLGERSRRHDWGYGCGTCPACELRAAGWAKWRTGRNAEDSDGP

SEQ ID NO: 37363 - protein, 244 aa, Chelatococcus sp.
  REGION 1..244: note = tr|A0A0K2D9J3|A0A0K2D9J3_9RHIZ 7-cyano-7-deazaguanine synthase OS=Chelatococcus sp. CO-6; OX = 1702325 GN=queC PE=3 SV=1
MPGLADDKALVLFSGGQDSTVCLGWALQRFAHVETIGFDYGQRHAVELSCRGVIRERLARPGAMGEGRLGPDHLVPLAALGAISDTAMTREVAIATGENGLPTTFVPGRNLIFLTFAAALAYRRGTRHIVLGVCETDYSGYPDCRDDTIKAMQVAINLGTDSRFVLHTPLMWRDKAETFALAERLGGADFLDLVVEETHTCYLGERSRRHDWGYGCGTCPACELRAAGWAKWRAGRNAEDNDGP

SEQ ID NO: 37364 - protein, 242 aa, Chelatococcus sp.
  REGION 1..242: note = tr|A0A2W6XUX6|A0A2W6XUX6_9RHIZ 7-cyano-7-deazaguanine synthase OS=Chelatococcus sp.; OX = 1953771 GN=queC PE=3 SV=1
MGSSRALVLFSGGQDSTTALAWALDRFDEVETVGFDYGQRHRVELECRLAIREKLPALAPRYAERLGPDHLLDLTTLGTISETALTRDSEIAFAETGLPTTFVPGRNLIFLSFAAALAYRRHARHIVLGVCETDYSGYPDCRDDTIKAMQVALGLGLDRRLVLHTPLMWRDKAQTFALARALGGQALLDLVVEETHSCYLGDRSTRHDWGFGCGHCPACELRANGYAAYLASPDDSGPSYDS

SEQ ID NO: 37365 - protein, 222 aa, Chelonobacter oris
  REGION 1..222: note = tr|A0A0A3BAB6|A0A0A3BAB6_9PAST 7-cyano-7-deazaguanine synthase OS=Chelonobacter oris; OX = 505317 GN=queC PE=3 SV=1
MLQTKKALVIFSGGQDSTTCLLQAIHDYGKENVEVVTFQYGQRHAIELEKARWIAQDLGVKQTLIDTSVIKAITGNALMDQSAVIEQTDNDMPNTFVDGRNALFLLYAAIYAKGQGISDIITGVCETDFSGYPDCRDVFIKSMNVTLNLAMDYPFNIKTPLMYLDKKQTWALADQLGGLDYVMRHTHTCYLGVEGGCHQCPSCKLREKGLNDYLQQKGQPYV

SEQ ID NO: 37366 - protein, 224 aa, Chitinimonas sp.
  REGION 1..224: note = tr|A0A2G3K344|A0A2G3K344_9BURK 7-cyano-7-deazaguanine synthase OS=Chitinimonas sp. BJB300; OX = 1559339 GN=queC PE=3 SV=1
MKKAVILLSGGLDSTTVLAMARAEGYECYCLSFDYGQRHNAELAAARRIARALGAKEHRVATIDLAAFGGSALTDANIEVPVDGIKAGEIPVTYVPARNTIMLSFALGWAEVLQANDIFIGVNAVDYSGYPDCRPDFIAAFETMANLATRIGVEGNQLNVRTPLISLSKAEIVQAGMRLGVDYGLTVSCYKANLEGQACGVCDACRLRKEGFAAAKVADPTRYI

SEQ ID NO: 37367 - protein, 224 aa, Chitinimonas sp.
  REGION 1..224: note = tr|A0A516SFF4|A0A516SFF4_9MICO 7-cyano-7-deazaguanine synthase OS=Chitinimonas sp. R3-44; OX = 2594795 GN=queC PE=3 SV=1
MKKAVILLSGGLDSATVLAMAVSQGYECYCLSFDYGQRHNAELAAARRVSAALGAREHRIATIDLAAFGGSALTDASIEVPVDGVQDGEIPVTYVPARNTIMLSFALGWAEVLEAHDIFIGVNAVDYSGYPDCRPEYISAFELMANLATRISVEGAKLHIRTPLLSLSKARIVETGAKLGVDYALTVSCYKADLEGRACGVCDACRLRRTGFELAGMADPTRYQ

SEQ ID NO: 37368 - protein, 224 aa, Chitinimonas taiwanensis
  REGION 1..224: note = tr|A0A1K2H5W5|A0A1K2H5W5_9BURK 7-cyano-7-deazaguanine synthase OS=Chitinimonas taiwanensis DSM 18899 OX=1121279 GN=queC PE=3 SV=1
MKKAVILLSGGLDSATVLALAQNQGYECYCLSFDYGQRHNAELAAARRVAMALGAKEHRVATIDLAAFGGSALTDAKIEVPVDGVQEGAIPVTYVPARNTIMLSFALGWAEVLGAHEIFIGVNAVDYSGYPDCRPEFIAAFERMANLATKVGVEGAQLHIRTPLINLSKAEIIQTGASLGFDYGLTVSCYKADLQGRACGVCDACRLRRDGFQAAGLADPTHYQ

SEQ ID NO: 37369 - protein, 228 aa, Chitiniphilus sp.
  REGION 1..228: note = tr|A0A4U0Q9F7|A0A4U0Q9F7_9NEIS 7-cyano-7-deazaguanine synthase OS=Chitiniphilus sp. HX-2-15 OX=2571148 GN=queC PE=3 SV=1
MNTTRRPAVVLLSGGLDSATCLAIARDMDLAPYALSFDYGQRHNAELKAAARVAQALGAVEHRVARIDLAAFGGSALTDASIDVPTSGVEDGTIPVTYVPARNTILLSYALAWAEVLKADDIFIGVNAVDYSGYPDCRPEYIAAFQAMARLATKVGVEGSPLTIHTPLIQWSKARIVQTGIRLGVDYGLTVSCYQADDDGRACGACDACRLRKAGFEAAGVVDPTRYR

SEQ ID NO: 37370 - protein, 224 aa, unidentified
  source 1..224: note = Chitinivibrio alkaliphilus
  REGION 1..224: note = tr|U7D4A2|U7D4A2_9BACT 7-cyano-7-deazaguanine synthase OS=Chitinivibrio alkaliphilus ACht1 OX=1313304; GN = queC PE=3 SV=1
MEKAVVLLSGGIDSSTVAAIARDYGYELYGMSFSYSQNHSVELESAKKIVGDIGFAEHRIIHLDLASFGGSSLTTSASIPKNGDHTMEIPSTYVPARNTIFLSYALAWAEVLRAYRIFIGVTAVDYSGYPDCRSDYISAYETMANLATREGVEGRKLKIEAPLITLSKAEIIRRGTELGVDYSLTHSCYDPTIEGLSCGFCDSCLHRKKGFEEAGVPDPTRYIS

SEQ ID NO: 37371 - protein, 177 aa, Chitinophaga pinensis
  REGION 1..177: note = tr|A0A5C6LW54|A0A5C6LW54_9BACT Uncharacterized protein OS=Chitinophaga pinensis OX=79329 GN=FEF09_09020; PE = 4 SV=1
MGSHSTRTTHPHYMEMMRQLSRNIGLGVQIENPYQFKTKGEMLRECGNIPLVQSTNTMSCSHPSGRFAGQGNGHCGYCVPCIIRQSAYLAANVQDRSIYRVPVIGQTVAIDRAEGADILAFKYMIEKTSQNPSYLTTVIRSTGPLGTNIDPYIDIIQGVYVRWTRWLVKFNYDDSIS

SEQ ID NO: 37372 - protein, 389 aa, unidentified
  source 1..389: note = Chitinophagaceae bacterium
  REGION 1..389: note = tr|A0A4Q5W6M7|A0A4Q5W6M7_9BACT N-acetyl sugar amidotransferase OS=Chitinophagaceae bacterium OX=1869212; GN = EOO15_02420 PE=4 SV=1
MFNWSYNEENLKQNPVVNGGRPYQQCTKTVMDTIMDPDITFDADGVSNYYHNYVNSVDSVVFKGEAGEKRIAEMVRTLKANQKGKYDSIIGLSGGVDSTYMVYKAKEWGINPLVVHFDYGWNLELAVQNIEQTLKHAGLELYTYVMNWEDFKHLQRAYFKAGVLDLDVPADHLIFAALNMVAKKFNIKYLLKGYNFQSEAILPRTWNYNRKFDLKNLQDINRKHGERKLKDLPKLGLWQQIYYERVYKLQSFSPLNNFDYHKEECKKELIEKIGWVDYGGKHFENVFTRFYQGYILPTRFAIDKRKAHLSTLICSGQATREQALAELQRPPYDLKVMQEDYVYVSKKLGFSEAEFDQCLNGPIRRHEEFKEEVKLQNFLSKAAKLILRK

SEQ ID NO: 37373 - protein, 380 aa, unidentified
  source 1..380: note = Chitinophagaceae bacterium
  REGION 1..380: note = tr|A0A1Z5SIH0|A0A1Z5SIH0_9BACT ExsB family protein; OS = Chitinophagaceae bacterium IBVUCB1 OX=1985173; GN = CAP35_02550 PE=4 SV=1
MQEDKTYQQCAISVMDTIADPNISFDAKGISNYYYEFQDAFKNNVFTGKEAHDKLTQVVTTIKEAGKGKEYDCIMGLSGGVDSTYIALIAKQYGLRPLAVHFDNGWNSELAVKNIENIVAKLGFDLFTYVINWEEFKDLQIAYLKASVVDIEAITDHAIFASLYRIAGQKNIKYILSGTNVQTENTLPKSWIHAKADHINIKSIHKTYGSIKLKTFPFMDAKVKRYYQQTKGITSVSLLNYVDYNKQAVKDTIQKELSWRDYGGKHYESIWTRFYQGYILPTKFKIDKRKAHLSDLIFSGQITKQQAIDELAKPIYDAEQFNADYEFVLKKLGLSESEFKAIMDTPPRSHYDFDYEMPIDKRYPLLKPIKKIYRTIFPPK

SEQ ID NO: 37374 - protein, 220 aa, Chlamydia sp.
  REGION 1..220: note = tr|A0A1M3B747|A0A1M3B747_9CHLA 7-cyano-7-deazaguanine synthase OS=Chlamydia sp. 32-24; OX = 1895742 GN=BGO10_06380 PE=3 SV=1
MKKCIILLSGGLDSSVLLAKAKEQKLDCLCLSFNYHQTHSIELKFAKQIAKFYEVPHKIITIDQQVFSNSPLILGHEESTIHRGEEEILRGKKSPFYVPSRNTLFLSHAITIAEIEKAAFIYFGPTAMDKAFPDCQIDYIRALQTIIDKSTQIGLEGNAPIICTPLINFTKDQVVAEALRLKVPIHLTWSCYTPDQSDPCQVCDACVLRKAALLRNQVSL

SEQ ID NO: 37375 - protein, 226 aa, Chlamydia sp.
  REGION 1..226: note = tr|A0A1M3BDK0|A0A1M3BDK0_9CHLA 7-cyano-7-deazaguanine synthase OS=Chlamydia sp. 32-24; OX = 1895742 GN=BGO10_04790 PE=3 SV=1
MKKAIIVHSGGMDSTVCLYLASQAYGKENVLSISFDYQQRHGKAELQAAQTICRDWGVDHVVIPIVSLKEISPNALVCHDLEIKHEKGGHANTLVTGRNGLMAMLAGTHANHLGAHCIYMGVIAVDGAKNGYRDCSREYMDLMEQILRLDFNDPTFQIITPLVDKTKAEVVTLAYELGILDYVLENTISCYQGINGKGCQTCPSCLLRNNGIDTFYTKINQLPTFS

SEQ ID NO: 37376 - protein, 241 aa, unidentified
  source 1..241: note = Chloracidobacterium sp.
  REGION 1..241: note = tr|A0A257B4M7|A0A257B4M7_9BACT 7-cyano-7-deazaguanine synthase OS=Chloracidobacterium sp. CP2_5A OX=2012633 GN=queC PE=3 SV=1
MIQIPAAPRRAAVLLSGGLDSATTLAIARAEGFACYALSFDYGQRHRRELDAARRIAAALGAEAHLVVAFDLRAIGGSALTSELPVPKDRPLAALAEGIPVTYVPARNTIFLSFALAWAETLAASDIFIGVNAYDYSGYPDCRPEYLRAYETMANLATRAGVEAGRRLTIHAPLIELTKAQIIRRGLALGVDYRLTHSCYDPTPEGLACGRCDSCLLRLKGFAEAGATDPIPYAPRPDVAP

SEQ ID NO: 37377 - protein, 230 aa, unidentified
  source 1..230: note = Chloracidobacterium thermophilum
  REGION 1..230: note = tr|G2LJL7|G2LJL7_CHLTF 7-cyano-7-deazaguanine synthase OS=Chloracidobacterium thermophilum (strain B); OX = 981222 GN=queC PE=3 SV=1
MSHSSRPAVVLLSGGLDSTTALAIAQAEGFTCHALSFDYGQRHRLELEAARRVAAAFNVARHLVVTFDLRAIGGSALTSDLPVPKDRPLESVGIPPTYVPARNTIFLSFALAWAETLACTDIFLGVNVYDYAGYPDCRPEYLRAYEAMAKLATRAGVEGARPWKIHAPLITLTKAEIIRRGLELGIDYGLTHSCYDPTPEGLACGRCDSCRFRLKGFAEAGATDPLRYAS

SEQ ID NO: 37378 - protein, 227 aa, Chlorobaculum limnaeum
  REGION 1..227: note = tr|A0A1D8D193|A0A1D8D193_CHLLM 7-cyano-7-deazaguanine synthase OS=Chlorobaculum limnaeum; OX = 274537 GN=queC PE=3 SV=1
MRAVLLVSGGMDSLVATALARHEGFELAAMHVNYGQRTSRKELECFRQICDHYGIAHRLEVDAMFLSAIGGSSLTDVAIPVGPADLAGTEIPTSYVPFRNANFLSMAVSWSEVIGANRIYIGAVEEDSSGYPDCRKVFYDAFNQVIDLGTRPETRIEIVTPLIAMSKAEIVRRGLELDAPFNYSWSCYKSEGKACGVCDSCARRLRAFASAGMEDPVEYEVRPNYLQ

SEQ ID NO: 37379 - protein, 227 aa, Chlorobaculum parvum
  REGION 1..227: note = sp|B3QPB3|QUEC_CHLP8 7-cyano-7-deazaguanine synthase; OS = Chlorobaculum parvum (strain NCIB 8327) OX=517417; GN = queC PE=3 SV=1
MKAVLLVSGGMDSLVATALAHHHGFELAAMHVNYGQRTWQKELECFRQICDHYGIEKRLEIDAGFLGAIGGSSLTDAAIPVGPADLAGTDIPTSYVPFRNANFLSMAVSWSEVIGANRIYIGAVEEDSSGYPDCRKVFYDAFNQVIEHGTRPETSIEIVTPLIDMSKAEIVKRGMELDAPFHFSWSCYKSEGKACGVCDSCARRLRAFASVGIADPVEYEVRPDYLQ

SEQ ID NO: 37380 - protein, 227 aa, Chlorobaculum sp.
  REGION 1..227: note = tr|A0A4Q1DF00|A0A4Q1DF00_9CHLB 7-cyano-7-deazaguanine synthase OS=Chlorobaculum sp. 24CR; OX = 2508878 GN=queC PE=3 SV=1
MRAVLLVSGGMDSLVATALARHEGFELAAMHVNYGQRTSRKELECFRQICDHYGISHRLEVDAPFLGAIGGSSLTDAAIPVGPADLAGTDIPTSYVPFRNANFLSMAVSWSEVIGANRIYIGAVEEDSSGYPDCRKVFYDAFNQVIEHGTRPETCIEIVTPLIDMSKAEIVKRGMELDAPFNYSWSCYKSEGKACGVCDSCARRLRAFASAGIDDPVEYEVRPNYLQ

SEQ ID NO: 37381 - protein, 227 aa, Chlorobaculum tepidum
  REGION 1..227: note = sp|Q8KF00|QUEC_CHLTE 7-cyano-7-deazaguanine synthase; OS = Chlorobaculum tepidum (strain ATCC 49652 / DSM 12025 / NBRC 103806 / TLS) OX=194439 GN=queC PE=3 SV=1
MRAVLLVSGGMDSLVATALAHREGLELAAMHVNYGQRTWQKELECFRQICVHYGIVDRLEVDAMFLSAIGGSSLTDATIPVGPADLAGTDIPTSYVPFRNANFLSMAVSWSEVIGANRIYIGAVEEDSSGYPDCRKVFYDAFNQVIEHGTRPETRIEIVTPLIAMSKAEIVRRGMELDAPFHFSWSCYKSEGKACGVCDSCARRLRAFASVGMDDPVEYEVRPNYLQ

SEQ ID NO: 37382 - protein, 227 aa, Chlorobaculum thiosulfatiphilum
  REGION 1..227: note = tr|A0A5C4S826|A0A5C4S826_CHLTI 7-cyano-7-deazaguanine synthase OS=Chlorobaculum thiosulfatiphilum OX=115852 GN=queC PE=3 SV=1
MKAVLLVSGGMDSLVATALAHREGFELAAMHVNYGQRTWTKELECFRQICDHYGIADRLEVDAMFLSTIGGSSLTDAKIPVGPADLAGTEIPTSYVPFRNANFLSMAVSWSEVIGANRIYIGAVEEDSSGYPDCRKIFYDAFNQVIDLGTRPETRIEIVTPLIAMSKAEIVKKGMELDAPFHFSWSCYKSEGKACGVCDSCARRLRAFASAGMDDPVEYEVRPNYLQ

SEQ ID NO: 37383 - protein, 226 aa, unidentified
  source 1..226: note = Chlorobi bacterium
  REGION 1..226: note = tr|A0A3M1LXQ1|A0A3M1LXQ1_9BACT 7-cyano-7-deazaguanine synthase OS=Chlorobi bacterium; OX = 2268192 GN=queC PE=3 SV=1
MIAVVALSGGMDSLVTLAEIRADGYDIAALHFNYGQRTEQRELEAFHAICDYYTIEKRLVVDVAYLAAIGASSLTDPTIEVERANLERKGIPSSYVPFRNANILAIATSWAEALGARAIGIGAVEEDSSGYPDCRREFFRAFERVIELGTKPDTQISILTPVIGYRKADIVRRGVELGVPFELSWSCYIRSDVACGECDSCALRLRGFQQAGIEDPLPYVVRPHYV

SEQ ID NO: 37384 - protein, 228 aa, unidentified
  source 1..228: note = Chlorobi bacterium
  REGION 1..228: note = tr|A0A4P5UPU5|A0A4P5UPU5_9BACT 7-cyano-7-deazaguanine synthase OS=Chlorobi bacterium; OX = 2268192 GN=queC PE=3 SV=1
MKELAVVLMSGGMDSTVCAGIALEKGFEVCALHVHYGQKTEDREAASFQNICDFYGIQKCLDIDISHLSRIGGSSLTDMNIAISKADLGNLEIPTSYVPFRNANLLSIAVSWAEVLGAHSIFIGAVEEDGSGYPDCRRTFFDAFEKMIAKGTKPGTDIRIETPILHMKKSDIVKEGMRLTAPLHFTWSCYADNVVACGVCDSCALRLRGFSQAGIDDPIEYQQRPKYL

SEQ ID NO: 37385 - protein, 228 aa, unidentified
  source 1..228: note = Chlorobium chlorochromatii
  REGION 1..228: note = sp|Q3AR02|QUEC_CHLCH 7-cyano-7-deazaguanine synthase; OS = Chlorobium chlorochromatii (strain CaD3) OX=340177; GN = queC PE=3 SV=2
MKAILLLSGGMDSLVTTAIAQQAGFELAAMHVNYGQRTMQRELNSFRAICSHYSIQQRLEINADFLGKIGGSSLTDLSMPVSVANLESHAIPASYVPFRNAGFLSMAVSWAEVIGAERIFIGAVEEDSSGYPDCRKIFYEAFNRVIELGTKPETHIEVVTPLIALKKWEIVRKGIELHAPFAFSWSCYKNEGQACGVCDSCALRLRAFEQAGMEDPIDYETRPHYIDC

SEQ ID NO: 37386 - protein, 226 aa, unidentified
  source 1..226: note = Chlorobium ferrooxidans
  REGION 1..226: note = tr|Q0YRG0|Q0YRG0_9CHLB 7-cyano-7-deazaguanine synthase OS=Chlorobium ferrooxidans DSM 13031 OX=377431; GN = queC PE=3 SV=1
MRAVVLLSGGMDSLVTTAMAHEHGFELAAMHVNYGQRTWHKELASFRDICNHYNIDRRLEVDADFLARIGGSSLTDLSMPVSGADLQGSEIPTSYVPFRNANFLSMAVSWSEVIGANRIFIGAVEEDSSGYPDCRKIFYEAFNQVIALGTKPETTIEIVTPLIEMQKSDIVHRGMLLDVPFAYSWSCYKSEGRACGVCDSCARRLRAFELVGVRDPIDYEARPRYI

SEQ ID NO: 37387 - protein, 226 aa, Chlorobium limicola
  REGION 1..226: note = tr|A0A101JPG8|A0A101JPG8_CHLLI 7-cyano-7-deazaguanine synthase OS=Chlorobium limicola; OX = 1092 GN=queC PE=3 SV=1
MKAVLLISGGMDSLVTTAIAAEEKFELAAMHVNYGQRTWQKELACFRRICSHYQIRHRLEIDAGYLAQIGGSSLTDPAMPVSGADLQGTDIPTSYVPFRNAGFLSMAVSWSEVIGAGKIFIGAVEEDSSGYPDCRRIFYDAFNRVIELGTRPDTSIEIVTPLIAMQKCDIVLKGMELNAPFAYSWSCYKSEGRACGVCDSCARRLRAFELTGERDPIEYEVRPKYI

SEQ ID NO: 37388 - protein, 226 aa, Chlorobium limicola
  REGION 1..226: note = sp|B3EGF5|QUEC_CHLL2 7-cyano-7-deazaguanine synthase; OS = Chlorobium limicola (strain DSM 245 / NBRC 103803 / 6330) OX=290315 GN=queC PE=3 SV=1
MKAVLLISGGMDSLVTTAIAAEEKLELAAMHVNYGQRTWQKELECFRRICNHYQIRHRLEIEAGYLAQTGGSSLTDPAMPVSGADLQGTDIPTSYVPFRNAGFLSMAVSWSEVIGAGKIFIGAVEEDSSGYPDCRQVFYDAFNRVIELGTRPDTAIEIVTPLISMQKCDIVLKGMELNAPFACSWSCYKSEGRACGVCDSCARRLRAFELTGVRDPIEYEVRPKYI

SEQ ID NO: 37389 - protein, 226 aa, Chlorobium phaeobacteroides
  REGION 1..226: note = sp|B3ENV8|QUEC_CHLPB 7-cyano-7-deazaguanine synthase; OS = Chlorobium phaeobacteroides (strain BS1) OX=331678; GN = queC PE=3 SV=1
MRAVVLISGGMDSLVVAAQARALGYELAAMHVNYGQRTWQKELTAFRRICSHYAIERKLEVDAAYLEHIGGSSLTDSSIPVEQADLQTVAIPSSYVPFRNASFLSMAVSWSEVIGAERIFIGAVEEDSSGYPDCRKIFYDAFNKVIELGTKPETTIEIRTPLIDLQKSEIVRKGVELDVPFFHSWSCYKSEGKACGLCDSCARRLRAFQLVGLDDPIDYEVRPDYI

SEQ ID NO: 37390 - protein, 226 aa, Chlorobium phaeobacteroides
  REGION 1..226: note = sp|A1BHS4|QUEC_CHLPD 7-cyano-7-deazaguanine synthase; OS = Chlorobium phaeobacteroides (strain DSM 266) OX=290317; GN = queC PE=3 SV=1
MKAVVLLSGGMDSLVTTAIANAQGFELAAMHVNYGQRTWHKELEAFRLIADHYAIGERLEINADYLAQIGGSSLTDYSMPISGADLQGLSIPTSYVPFRNAGFLSMAVSWAEVIGAERIFIGAVEEDSSGYPDCRKVFYDAFNAVIALGTKPETSIAIMTPLIEMQKSEIVRKGMELTAPFELSWSCYKSEGKACGVCDSCALRLRAFERAGMRDPIDYEQRPDYI

SEQ ID NO: 37391 - protein, 227 aa, Chlorobium phaeovibrioides
  REGION 1..227: note = sp|A4SDQ0|QUEC_CHLPM 7-cyano-7-deazaguanine synthase; OS = Chlorobium phaeovibrioides (strain DSM 265 / 1930); OX = 290318 GN=queC PE=3 SV=1
MKAVVLLSGGMDSLVTTAIAHNEGLQLAAMHVNYGQRTWQRELESFRSIAGHYGIGELLEVNADFLGTIGGSSLTDHTMAVSGADLQGTAIPTSYVPFRNACFLSMAVSWAEVIGAQKLYIGAVEEDSSGYPDCRKVFYDAFNKVIELGTKPETGIEILTPLIAMQKAGIVEKGMELDAPFHYSWSCYKSEGKACGVCDSCARRLRAFELVGVRDPIDYDVRPQYIH

SEQ ID NO: 37392 - protein, 227 aa, Chlorobium phaeovibrioides
  REGION 1..227: note = tr|A0A3S0MQL0|A0A3S0MQL0_CHLPH 7-cyano-7-deazaguanine synthase OS=Chlorobium phaeovibrioides OX=1094 GN=queC PE=3 SV=1
MKAVVLLSGGMDSLVTTAIAHNEGLQLAAMHVNYGQRTWQRELESFRSIAGHYGIGELLEVNADFLGTIGGSSLTDHTMAVSGADLQGTAIPTSYVPFRNACFLSMAVSWAEVIGAQKLYIGAVEEDSSGYPDCRKVFYDAFNKVIELGTKPETGIEILTPLIAMQKAGIVEKGMELDAPFHYSWSCYKSEGKACGVCDSCARRLRAFELVGVRDPIDYNVRPQYIH

SEQ ID NO: 37393 - protein, 231 aa, Chlorobium sp.
  REGION 1..231: note = tr|A0A4R0QL12|A0A4R0QL12_9CHLB 7-cyano-7-deazaguanine synthase OS=Chlorobium sp. N1; OX = 2491138 GN=queC PE=3 SV=1
MKAVLLLSGGMDSLVTTAVAHREGFDLAAMHVNYGQRTWQKELDCFRRIADHYGIAERLEVDADFLGRIGGSSLTDRDIAVEGADLHGSSIPTSYVPFRNACFLSMATSWSEVIGAERIFIGAVEEDSSGYPDCRRVFYDAFSRVIELGTRPETSIGIVTPLISLQKAGIVELGMELGAPFQHSWSCYKSEGRACGLCDSCARRLRAFELLGLRDPIDYEVRPQYIDGPLP

SEQ ID NO: 37394 - protein, 240 aa, Chlorobium sp.
  REGION 1..240: note = tr|A0A533THV9|A0A533THV9_CHLSQ 7-cyano-7-deazaguanine synthase OS=Chlorobium sp. OX=1095; GN = queC PE=3 SV=1
MQRFVSTPPPKAVLLLSGGMDSLVTTAIAHEQGFVLAAMHVNYGQRTWQKELESFRSICNHYNIEQRLEVNADFLAQIGGSSLTDFSMPVGGADLQGSSIPTSYVPFRNAGFLSMAVSWSEVIGANKIFIGAVEEDSSGYPDCRKVFYDAFNTVIALGTKPETDIEILTPLIEMQKSEIVRKGMELGAPFNLSWSCYKSEGRACGVCDSCARRLRAFEVMGIPDPIDYEERPLYIRESIF

SEQ ID NO: 37395 - protein, 267 aa, unidentified
  source 1..267: note = Chloroflexi bacterium
  REGION 1..267: note = tr|A0A2N2PVA2|A0A2N2PVA2_9CHLR TIGR00268 family protein OS=Chloroflexi bacterium HGW-Chloroflexi-1; OX = 2013723 GN=CVU38_09845 PE=4 SV=1
MVEDKLFQLRNLFRQMGSAIVAYSGGVDSTLLLKIAHDELSAAAVAVTADSPSFPRAELAAAQAIAADLGVRHVCLPTPEGADPRYRANTPDRCYICKTHILDALLAFAESNGYRNVVDGSNADDLGDTRPGQRALSEHGVRSPLQELGLTKAEVRTLARTLGLPNWDKPASACLASRVPYGVPISGEMLAQIERAEDYLHERGFRQLRVRHHGAVARLELEPADFPAALAARETIVAALRGFGFTYVALDLGGFRSGSMNEALPHG

SEQ ID NO: 37396 - protein, 226 aa, unidentified
  source 1..226: note = Chloroflexi bacterium
  REGION 1..226: note = tr|A0A2E5IWH6|A0A2E5IWH6_9CHLR 7-cyano-7-deazaguanine synthase OS=Chloroflexi bacterium; OX = 2026724 GN=CL790_02380 PE=3 SV=1
MSESPSVEMRVAALVSGLDSCVMVGLLAREYSEITPIYVRAGLRWEDAEIRALNNFFGALAEDVVQPVVEVHLGVGAFYGTHWSIGGVDVPDTNEPDDAWYLPGRNLALLSAAAIYGGTHAIKFLAIGILGSNPFPDATEEFFHSLEHTAGLAMNTTFHVLRPLQGMHKADVIRAGGAFPIELSLSCASPVEGKHCGVCGKCGERRGGFIQAGILDPTDYVESIPV

SEQ ID NO: 37397 - protein, 223 aa, Chlorogloea sp.
  REGION 1..223: note = tr|A0A2T1EMA1|A0A2T1EMA1_9CHRO 7-cyano-7-deazaguanine synthase OS=Chlorogloea sp. CCALA 695 OX=2107693 GN=queC PE=3 SV=1
MKVVVLLSGGLDSATVLYSAKSSGYECYALSFDYNQRQVRELDSAIALCKAAGVVGKVISFDLRSWGGSALTDDKIDLPVERSLSQMGENIPVTYVPARNTIFLSFALAYAETIGAERVYIGVNALDYSGYPDCRPDYIQAMQEVFRLGTKQGREGESIKIVAPLIDLKKTEIIQLGNKLGVPWDKTWSCYAGNEKACGACDSCKLRLEAFAELGLIDPIAYK

SEQ ID NO: 37398 - protein, 225 aa, Chlorogloeopsis fritschii
  REGION 1..225: note = tr|A0A3S1AHN8|A0A3S1AHN8_CHLFR 7-cyano-7-deazaguanine synthase OS=Chlorogloeopsis fritschii PCC 6912 OX=211165 GN=queC PE=3 SV=1
MKAVILLSGGLDSSTVLYQALADGCECYTISFDYQQRHRRELQSALAIAQAAGVLQHQVVTFDLRQWGGSALTDNAIDLPTGRSLEEMSQNIPVTYVPARNTIFLSFALAYAETLGAERIYIGVNALDYSGYPDCRPDYIQAMQEVFRLGTKQGREGKPINIFTPLLHLKKTEIIQLGNRLGVPWELTWSCYAGKEIACGVCDACRLRLAAFAELGLKDPLVYAQ

SEQ ID NO: 37399 - protein, 229 aa, Chlorogloeopsis fritschii
  REGION 1..229: note = tr|A0A433N6D6|A0A433N6D6_CHLFR 7-cyano-7-deazaguanine synthase OS=Chlorogloeopsis fritschii PCC 6912 OX=211165 GN=queC PE=3 SV=1
MPKCLVILSGGQDSTTCLAIASQQFDEVHAVTFEYGQRHAIELESADAVARTLSVTSHEVIKLGAILKGTSPLVSKYPVSTYTTPDEVPDGVAATFVPSRNALFLTIASNRAIALECSTIFTGVSQTDYSGYPDCRRDFIDSLEETLSLANWGTIGHLKIETPLMYLSKAESVLLAKAVLGDRFEEVMELTHTCYQGVKGGCGKCAACLLRDQGFKEANVVDPIWKFRG

SEQ ID NO: 37400 - protein, 226 aa, Chloroherpeton thalassium
  REGION 1..226: note = sp|B3QS09|QUEC_CHLT3 7-cyano-7-deazaguanine synthase; OS = Chloroherpeton thalassium (strain ATCC 35110 / GB-78); OX = 517418 GN=queC PE=3 SV=1
MRAVVLLSGGMDSLVTTAIAAHLGYELAALHINYGQRTEKRELVAFQKICDFYRIERRLEINFEHLSLIGGSSLTDLAMPVTTAKLHSKEIPTSYVAFRNANMLSVAVSWAEVIGANKIFIGAVDEDSSGYPDCRVNFFQAFNELIKHGTKPDTRIEIQTPVISLKKWEIVIKGMELEVPFEHSWSCYKSEHVACGVCDSCALRLRAFEQAGIRDPIEYKIRPSYI

SEQ ID NO: 37401 - protein, 221 aa, Chondrocystis sp.
  REGION 1..221: note = tr|A0A1Z4RQE8|A0A1Z4RQE8_9CHRO 7-cyano-7-deazaguanine synthase OS=Chondrocystis sp. NIES-4102 OX=2005460 GN=queC PE=3 SV=1
MNKAVVLLSGGLDSATTTAIAIDAGYEVIALSFRYGQRHYKELEAAKKIAQAFNIQDHFIIDVNLSQWGGSSLTDQSLTIPQSGVKTDIIPSTYVPGRNTVFIAIALSLAEAKGAQAIYLGINAIDYSGYPDCRPEYLQAFQQLANLASKAGIEGNTPQLIAPLVNDSKADIVRRALKLNVPIADTWSCYQGGENPCGLCDSCRIRDQALIAVGRADLCSN

SEQ ID NO: 37402 - protein, 225 aa, unidentified
  source 1..225: note = Chromatiaceae bacterium
  REGION 1..225: note = tr|A0A3D4RWU2|A0A3D4RWU2_9GAMM 7-cyano-7-deazaguanine synthase OS=Chromatiaceae bacterium; OX = 2049432 GN=queC PE=3 SV=1
MHEQTKAVVLLSGGLDSATALAIAREQGLACHALSIDYGQRHRSELDAACRVASSVGAASHRIIKMDLGTIGGSALTDAHIAVPEVPTTGIPVTYVPARNTLLLALALGQAEVIGAARIVIGVNALDYSGYPDCRPEFIAAFQQLADLATKAGVEGHGPQINAPLIDLSKADIIRRGNQLGVDYSLTVSCYQADAQGRACGLCDSCRIRAAGFNAAGLPDPTRYR

SEQ ID NO: 37403 - protein, 208 aa, unidentified
  source 1..208: note = Chromatiales bacterium
  REGION 1..208: note = tr|A0A257SXF0|A0A257SXF0_9GAMM 7-cyano-7-deazaguanine synthase OS=Chromatiales bacterium 21-64-14 OX=1970504 GN=B7Z66_02235 PE=3 SV=1
MTDWSIILVSGGVESMTLLHREARRASVVPLFVDYGQRALEAERRTVRNQCRILDLEPVELDLSRVGRRFHGTALMRAHVPLPHRNMVLLSLGFSYGARIGARRIYLALNRADAHAYASAGTPFLDAFRHMIDILEPDLALCTPFIELHKAQVIQIGQSLGLDFARTYSCLLGHARHCGVCPQCCKRRDAFQAAGLAEPERFYRRTPG

SEQ ID NO: 37404 - protein, 228 aa, unidentified
  source 1..228: note = Chromatiales bacterium
  REGION 1..228: note = tr|A0A524KGZ6|A0A524KGZ6_9GAMM 7-cyano-7-deazaguanine synthase OS=Chromatiales bacterium; OX = 2026725 GN=queC PE=3 SV=1
MVTPESSLRAVVLLSGGMDSATCLALARRDGCTCHALSFDYGQRHRAELAAAVRVAGQLGAAEHRTVRIGLGDIGGSALTDPESAVPTSPGSGIPVTYVPARNTVFLSFALGFAEVLDADRIYAGMNAVDYSGYPDCRPAYLEAFQRLANLATRRGVEGRPITIHTPLLLMSKAQIVRTGTELGVDFGATVSCYQASPEGEACGKCDACRLRKSGFAAAGVADPTRYR

SEQ ID NO: 37405 - protein, 247 aa, Chromatium okenii
  REGION 1..247: note = tr|A0A2S7XPD6|A0A2S7XPD6_9GAMM 7-cyano-7-deazaguanine synthase OS=Chromatium okenii; OX = 61644 GN=queC PE=3 SV=1
MNNLVRKDLIVAQTPRGKQTSAVVLLSGGLDSATTLAIAKTEGFTPYALSFRYGQRHVIELAAASRVAAAQGVAEHVIAEIDLRRFGGSALTADLTVPKGRDTAAMSSGIPITYVPARNTVFLSFALAWAEVLGAEAIFIGVNALDYSGYPDCRPAYLAAFEQMANLATAAAVEGRAHFRVHAPLLELSKADIIRRGMALGVDYGLTCSCYDPDPAGRPCGQCDSCLLRARGFAEAGVSDPLLTAAF

SEQ ID NO: 37406 - protein, 229 aa, Chromatocurvus halotolerans
  REGION 1..229: note = tr|A0A4R2L400|A0A4R2L400_9GAMM 7-cyano-7-deazaguanine synthase OS=Chromatocurvus halotolerans OX=1132028 GN=queC PE=3 SV=1
MSDDARRAVILSSGGLDSTTVLAMARSEGYRCYTLSFDYGQRHRAELLAAKRVSEAFSDVEHKVVTLDLGSIGGSALTDTAIDVPEEETQGIPVTYVPARNTVFLAIALGWAEVLGAGDIFIGVNAVDYSGYPDCRPAFINAFERLANVATRAGVEGGGIRIHAPLLDLGKDAIIQRGLALHVDYALTVSCYQATDAGEACGRCESCRLRRQGFEAAGMPDPTRYRTND

SEQ ID NO: 37407 - protein, 233 aa, Chromatocurvus sp.
  REGION 1..233: note = tr|A0A2N5Y6N4|A0A2N5Y6N4_9GAMM 7-cyano-7-deazaguanine synthase OS=Chromatocurvus sp. F02; OX = 1905677 GN=queC PE=3 SV=1
MHLDTEHNNAGKRAVILVSGGLDSTTVLAMARARGYRCYALSFDYGQRHRAELFAAERVCAALGDVEHKVVKLNLDSIGGSALTDTAIAVPEEETAGIPVTYVPARNTVFLSIALGWAEVLAADDIFIGVNAVDYSGYPDCRPEYVAAFQTMANLATRAGVEGQTLTIHTPLMHMGKGDIIRAGLALGVDYALTVSCYQATDDGLACGKCDACRLRREGFREAGVPDTTRYLS

SEQ ID NO: 37408 - protein, 233 aa, unidentified
  source 1..233: note = Chromobacterium amazonense
  REGION 1..233: note = tr|A0A2S9X326|A0A2S9X326_9NEIS 7-cyano-7-deazaguanine synthase OS=Chromobacterium amazonense OX=1382803 GN=queC PE=3 SV=1
MNQASEKALVVLSGGQDSTTCLYWALRRFGAGNVEAVTFDYGQRHRVELDCARKIAQLAGVRQTVLPIDTFAAIGGNALTDDAIAPEEGVRDDDALPNTFVPGRNLIFLTFAAAFAYTRGARHLVTGVAQTDYSGYPDCRENTLKALELALRLGMDSRVELHTPLMYLSKAETVTLAQQVGAMEALAWSHTCYNGKVPPCGHCASCELRAKGFAEAGVADPLVERCQAEVERL

SEQ ID NO: 37409 - protein, 232 aa, Chromobacterium haemolyticum
  REGION 1..232: note = tr|A0A1W0D3I2|A0A1W0D3I2_9NEIS 7-cyano-7-deazaguanine synthase OS=Chromobacterium haemolyticum OX=394935 GN=queC PE=3 SV=1
MNQTPEKALVVLSGGQDSTTCLYWALQTFGHGNVEAVTFDYGQRHRVELDCARKIAALAGVRQTVLPIDTFAAIGGNALTDADIAPEDGARDDDALPNTFVPGRNLIFLTFAAALAYTRGARHLVAGVAQTDYSGYPDCRENTLKALEVALRLGMDSRVELHAPLMYLSKAETVALAQQVGAMDALSWSHTCYNGQVPPCGHCASCELRAKGFAEAGVPDPLIVRCQTRRED

SEQ ID NO: 37410 - protein, 232 aa, Chromobacterium haemolyticum
  REGION 1..232: note = tr|A0A2T5NUC6|A0A2T5NUC6_9NEIS 7-cyano-7-deazaguanine synthase OS=Chromobacterium haemolyticum OX=394935 GN=queC PE=3 SV=1
MNQTPEKALVVLSGGQDSTTCLYWALQTFGHGNVETVTFDYGQRHRVELDCARKIAALAGVRQTVLPIDTFAAIGGNALTDADIAPEDGARDDDALPNTFVPGRNLIFLTFAAALAYTRGARHLVAGVAQTDYSGYPDCRENTLKALEVALRLGMDSRVELHVPLMYLSKAETVALAQQVGAMDALSWSHTCYNGQVPPCGHCASCELRAKGFAEAGVPDPLIVRCQTRRED

SEQ ID NO: 37411 - protein, 233 aa, Chromobacterium sp.
  REGION 1..233: note = tr|A0A2K4MPR0|A0A2K4MPR0_9NEIS 7-cyano-7-deazaguanine synthase OS=Chromobacterium sp. MWU13-2610 OX=2077146 GN=queC PE=3 SV=1
MNQASEKALVVLSGGQDSTTCLYWALRRFGAGNVEAVTFDYGQRHRVELDCARKIAQLAGVRQTVLPIDTFAAIGGNALTDDAIAPEDGVRDDDALPNTFVPGRNLIFLTFAAAFAYTRGARHLVTGVAQTDYSGYPDCRENTLKALELSLRLGMDSRVELHTPLMYLSKAETVTLAQQVGAMEALAWSHTCYNGEVPPCGHCASCELRAKGFAEAGVADPLVERCQAEAEGL

SEQ ID NO: 37412 - protein, 234 aa, Chromobacterium sp.
  REGION 1..234: note = tr|A0A344UG39|A0A344UG39_9NEIS 7-cyano-7-deazaguanine synthase OS=Chromobacterium sp. IIBBL 274-1 OX=2202142 GN=queC PE=3 SV=1
MNQETKEKALVVLSGGQDSTTCLYWALRRFGAGNVEAVTFDYGQRHRVELDCARKIAALAGVRQTILPIDTFAAIGGNALTDAGIAPEDGVREGDALPNTFVPGRNLVFLTFAAAFAYTLGSRHLVTGVAQTDYSGYPDCRENTLKALEVALRLGMDSRVELHAPLMYLSKAETVTLAQQVGALDALAWSHTCYNGEVPPCGRCASCELRAKGFAEAGVPDPLVERCRTEARGH

SEQ ID NO: 37413 - protein, 233 aa, unidentified
  source 1..233: note = Chromobacterium sphagni
  REGION 1..233: note = tr|A0A1S1X0S6|A0A1S1X0S6_9NEIS 7-cyano-7-deazaguanine synthase OS=Chromobacterium sphagni; OX = 1903179 GN=queC PE=3 SV=1
MNQASEKALVVLSGGQDSTTCLYWALRRFGAGNVEAVTFDYGQRHRVELECARKIAALAGVRQTVLPIDTFAAIGGNALTDDSIAPESGARDDDALPNTFVPGRNLVFLTFAAAFGYTRGARHLVAGVAQTDYSGYPDCRENTLKALEVALRLGMDSRVELHAPLMYLSKAETVTLAQQVGAMDALAWSHTCYNGEVPPCGRCASCELRAKGFAEVGVADPLVARCQAEAQGN

SEQ ID NO: 37414 - protein, 234 aa, unidentified
  source 1..234: note = Chromobacterium vaccinii
  REGION 1..234: note = tr|A0A1D9LFD3|A0A1D9LFD3_9NEIS 7-cyano-7-deazaguanine synthase OS=Chromobacterium vaccinii OX=1108595 GN=queC PE=3 SV=1
MNQASDEKALVVLSGGQDSTTCLYWALRRFGAGNVEAVTFDYGQRHRVELDCARKIAALACVRQTVLPIDTFAAIGGNALTDAGIAPEEGVRDDDALPNTFVPGRNLVFLTFAAAFAYTRGARHLVTGVAQTDYSGYPDCRENTLKALEVALRLGMDSRVELHTPLMYLSKAETVTLAQQVGALEALAWSHTCYNGEVPPCGHCASCELRARGFAEAGMPDPLVERCQAEAQGH

SEQ ID NO: 37415 - protein, 234 aa, unidentified
  source 1..234: note = Chromobacterium vaccinii
  REGION 1..234: note = tr|A0A2L2BFT0|A0A2L2BFT0_9NEIS 7-cyano-7-deazaguanine synthase OS=Chromobacterium vaccinii OX=1108595 GN=queC PE=3 SV=1
MNQASDEKALVVLSGGQDSTTCLYWALRRFGAGNVEAVTFDYGQRHRVELDCARKIAALAGVRQTVLPIDTFAAIGGNALTDAGIAPEEGVRDDDALPNTFVPGRNLVFLTFAAAFAYTRGARHLVTGVAQTDYSGYPDCRENTLKALEVALRLGMDSRVELHTPLMYLSKAETVTLAQQVGALEALAWSHTCYNGEVPPCGHCASCELRARGFAEAGMPDPLVERCQAEAQGH

SEQ ID NO: 37416 - protein, 234 aa, Chromobacterium violaceum
  REGION 1..234: note = sp|Q7NSB9|QUEC_CHRVO 7-cyano-7-deazaguanine synthase; OS = Chromobacterium violaceum (strain ATCC 12472 / DSM 30191 / JCM 1249 / NBRC 12614 / NCIMB 9131 / NCTC 9757) OX =243365 GN=queC PE=3 SV=1
MNQASDEKALVVLSGGQDSTTCLYWALRRFGAGKVEAVTFDYGQRHRVELDCARKIAALAGVRQTVLPIDTFAAIGGNALTDASIAPEEGVRDDDALPNTFVPGRNLVFLTFAAAFAYTRGARHLVTGVAQTDYSGYPDCRENTLKALEVALRLGMDSRVELHTPLMYLSKAETVTLAQQVGALEALAWSHTCYNGEVPPCGHCASCELRAKGFAEAGVPDPLVERCQAEAQGL

SEQ ID NO: 37417 - protein, 234 aa, Chromobacterium violaceum
  REGION 1..234: note = tr|A0A381FWF3|A0A381FWF3_CHRVL 7-cyano-7-deazaguanine synthase OS=Chromobacterium violaceum OX=536 GN=queC PE=3 SV=1
MNQASDEKALVVLSGGQDSTTCLYWALRRFGAGNVEAVTFDYGQRHRVELDCARKIAALAGVRQTVLPIDTFAAIGGNALTDAGIAPEEGVRDDDALPNTFVPGRNLVFLTFAAAFAYTRGARHLVTGVAQTDYSGYPDCRENTLKALEVALRLGMDSRVELHTPLMYLSKAKTVTLAQQVGALEALAWSHTCYNGEVPPCGHCASCELRARGFAEAGMPDPLVERCQAEAQGH

SEQ ID NO: 37418 - protein, 206 aa, Chromohalobacter canadensis
  REGION 1..206: note = tr|A0A285VKX6|A0A285VKX6_9GAMM 7-cyano-7-deazaguanine synthase OS=Chromohalobacter canadensis OX=141389 GN=SAMN05421509_10438 PE=3 SV=1
MKKVLLLASGGLDSTTVGYQLAAAGVEVTPIFFDYGQHCVEIEWERVNEVLSPNMERPERFNISDIFRSSQSRLIREADLWTEEVKDDDLYIPYRTMLFFATAAARAQTVGVLDVYTGFINSNHAKEIDCSAAFMNGLDELTSSVGPVRFHSPFRYWSKAEVAVAAAELGVPIGRTYSCQAAAQFPCGACPNCVERLNALKETKLI

SEQ ID NO: 37419 - protein, 251 aa, Chromohalobacter canadensis
  REGION 1..251: note = tr|A0A285VVJ6|A0A285VVJ6_9GAMM 7-cyano-7-deazaguanine synthase OS=Chromohalobacter canadensis OX=141389 GN=queC PE=3 SV=1
MTDTPHHVPQPSSAEANAITALTTPDDTAKAVVIYSGGMDSYTVLHRALRAGFEVHALSFHYGQRHSRELETASRVCQQLGVAHQVVDIRAIHGLIGNSALTDATQTMPDGDYDADNMAATVVPNRNMILLSLAIGHAINIGANVCFYGAHGGDHVLYPDCRPEFVERVNDVAAIADFNPVRIAAPYLHASKHTILADGLSMGLDYAQTWTCYLGGEYACGQCGSCRERLAAFATQGIDDPLAYAAPEKMS

SEQ ID NO: 37420 - protein, 251 aa, Chromohalobacter japonicus
  REGION 1..251: note = tr|A0A1Q8TB05|A0A1Q8TB05_9GAMM 7-cyano-7-deazaguanine synthase OS=Chromohalobacter japonicus OX=223900 GN=queC PE=3 SV=1
MTDISRHAPHPSGAESNAITALTTPDDTAKAVVIYSGGMDSYTVLHRALRAGFEVHALSFHYGQRHSRELETASQVCQQLGIAHQVVDIRAIHGLIGNSALTDADRDMPGGDYDADNMAATVVPNRNMILLSLAIGHAINIGANVCFYGAHGGDHVLYPDCRPEFVERVNDVAAIADFNPVRVAAPYLYVSKHAILADGLAMGLDYAQTWTCYLGGENACGQCGSCRERLAAFAAQGVDDPLTYSAAEKMS

SEQ ID NO: 37421 - protein, 251 aa, Chromohalobacter marismortui
  REGION 1..251: note = tr|A0A4V3F3U7|A0A4V3F3U7_9GAMM 7-cyano-7-deazaguanine synthase OS=Chromohalobacter marismortui OX=42055 GN=queC PE=3 SV=1
MTDVTRHALRPPEAGAPAITALTTPDDTAKAVVIYSGGMDSYTVLHRALSAGFEVHALSFHYGQRHSRELEAARRVCQQLEVTHQVVDIRAIHGLIGNSALTDTQRDMPGGDYDADNMAATVVPNRNMILLSLAIGHAINIGANVCFYGAHGGDHVLYPDCRPEFVTGVNAVAALADFNPVRIAAPYLYASKHEILADGVSMGLDYAQTWTCYLGGQRACGQCGSCRERLAAFAAQEMADPLDYAEPEVTS

SEQ ID NO: 37422 - protein, 251 aa, Chromohalobacter salexigens
  REGION 1..251: note = sp|Q1QVW9|QUEC_CHRSD 7-cyano-7-deazaguanine synthase; OS = Chromohalobacter salexigens (strain DSM 3043 / ATCC BAA-138 / NCIMB 13768) OX=290398 GN=queC PE=3 SV=1
MSDLPRHSPRRQHAGESAVTAITSPEDTTKAVVIYSGGMDSYTVLHRALRAGFEVHALSFHYGQRHSRELETAHDVCQRLGIAHQVVDIRAIHGLIGNSALTDATQTMPDGDYDADNMAATVVPNRNMILLSLAIGHAVNIGANVCFYGAHGGDHVLYPDCRPEFVERMNDVAAIADFTPVRIAAPYLHASKEEILADGLAMGLDYAQTWTCYLGAERSCGHCGSCRERLAAFAAQGVTDPLVYAGAGASD

SEQ ID NO: 37423 - protein, 251 aa, Chromohalobacter salexigens
  REGION 1..251: note = tr|A0A317QY25|A0A317QY25_CHRSL 7-cyano-7-deazaguanine synthase OS=Chromohalobacter salexigens OX=158080 GN=queC PE=3 SV=1
MSDLPRHSPRRQHAGESAVTAITSPEDTTKAVVIYSGGMDSYTVLHRALRAGFEVHALSFHYGQRHSRELETAHDVCQRLGIAHQVVDIRAIHGLIGNSALTDATQTMPDGDYDADNMAATVVPNRNMILLSLAIGHAVNIGANVCFYGAHGGDHVLYPDCRPEFVERMNDVAAIADFTPVRIAAPYLHASKEEILADGLAMGLDYAQTWTCYLGAERSCGHCGSCRERLAAFAAQGVTDPLVYADAGASD

SEQ ID NO: 37424 - protein, 84 aa, unidentified
  source 1..84: note = Chroococcidiopsis cubana
  REGION 1..84: note = tr|A0A433VC89|A0A433VC89_9CYAN 7-cyano-7-deazaguanine synthase OS=Chroococcidiopsis cubana SAG 39.79 OX=388085 GN=DSM107010_60050 PE=3 SV=1
MQEVFRLGTKQGREGNAIAIVAPLIQLKKTEIIQLGDRLGVPWEKTWSCYAGDELACGVCDSCRLRLAAFAALGLEDPLPYRRE

SEQ ID NO: 37425 - protein, 229 aa, unidentified
  source 1..229: note = Chroococcidiopsis sp.
  REGION 1..229: note = tr|A0A2P8QTE9|A0A2P8QTE9_9CYAN 7-cyano-7-deazaguanine synthase OS=Chroococcidiopsis sp. CCALA 051 OX=869949 GN=queC PE=3 SV=1
MTNDKAVILLSGGLDSSTVLYQARADGYDCYAISFDYQQRHRRELEAAKTIARSAEVADHKLISFDLRQWGGSALTDSSINLPQARSLDEMAQNIPVTYVPARNTIFLSFALAYAETLNASRVYIGVNALDYSGYPDCRPDYIQAMQEVFRLGTKQGREGNAIAIVAPLIQLKKTEIIQLGDRLGVPWEKTWSCYAGDELACGVCDSCRLRLAAFAALGLEDPLPYRRE

SEQ ID NO: 37426 - protein, 228 aa, unidentified
  source 1..228: note = Chroococcidiopsis sp.
  REGION 1..228: note = tr|A0A2S6V4G9|A0A2S6V4G9_9CYAN 7-cyano-7-deazaguanine synthase OS=Chroococcidiopsis sp. TS-821 OX=1378066 GN=queC PE=3 SV=1
MKAVILLSGGLDSSTVLYQAVADGYKCYAISFDYQQRHQRELKAAIAIAQSTQVLVHKVIDFDLRSWGGSALTDTSIELPSNRAVSEMAQNVPVTYVPARNTIFLSFALAYAETIAAQRVYIGVNALDYSGYPDCRPDYIQAMQEVFRLGTKQGREGQPITIETPLINLKKTEIIQLGNQLGVPWEKTWSCYAGGAIACGVCDACRLRLAAFAELGLEDPMPYRTRTS

SEQ ID NO: 37427 - protein, 229 aa, unidentified; identical to SEQ ID NO: 37425
  source 1..229: note = Chroococcidiopsis thermalis
  REGION 1..229: note = tr|K9TWR1|K9TWR1_CHRTP 7-cyano-7-deazaguanine synthase OS=Chroococcidiopsis thermalis (strain PCC 7203); OX = 251229 GN=queC PE=3 SV=1

SEQ ID NO: 37428 - protein, 227 aa, unidentified
  source 1..227: note = Chroogloeocystis siderophila
  REGION 1..227: note = tr|A0A1U7HFU3|A0A1U7HFU3_9CHRO 7-cyano-7-deazaguanine synthase OS=Chroogloeocystis siderophila 5.2 s.c.1 OX=247279 GN=queC PE=3 SV=1
MKAVILLSGGLDSSTVLYQAVADGYKCYAISFDYQQRHQRELKAAIAIAQSTQVLVHKVVNFDLRSWGGSALTDTSIELPSDRAVSEMSQNVPVTYVPARNTIFLSFALAYAETIAAQRVYIGVNALDYSGYPDCRPDYIQAMQEVFRLGTKLGREGQPITIETPLINLKKTEIIQLGNQLGVPWEKTWSCYAGGAIACGVCDACRLRLAAFAELGLEDPIPYRTRM

SEQ ID NO: 37429 - protein, 210 aa, unidentified
  source 1..210: note = Chryseobacterium lactis
  REGION 1..210: note = tr|A0A3G6RVY7|A0A3G6RVY7_9FLAO 7-cyano-7-deazaguanine synthase OS=Chryseobacterium lactis; OX = 1241981 GN=EG341_12540 PE=3 SV=1
MNLNEGVILVSGGLDSTTLCYLFIKNNINFTPLIINYGQHCFDKELQSLKVVLPEKHLNDLEIIDISDIYKFSNSKFINPANLWEDNITADDLYIPYRNVLLLTAAASFARTLNYNSVYSAFINSNHAKEIDCSNEFFNNLESLLSEYGSVKIEMPFRNLSKFEVAKLGIELNAPIGKTFSCQASPIIPCGACPNCVDRLDALKRIKDEL

SEQ ID NO: 37430 - protein, 208 aa, unidentified
  source 1..208: note = Chryseobacterium shandongense
  REGION 1..208: note = tr|A0A3G6R1U2|A0A3G6R1U2_9FLAO 7-cyano-7-deazaguanine synthase OS=Chryseobacterium shandongense OX=1493872 GN=EG353_17645 PE=3 SV=1
MNLKKGVILVSGGLDSTTLCYLFIKEKIEFVPLIINYGQHCFETELERLKDVLPSQYLDKLEIIDISEVYKYSTSKFIQPVNLWEEKISADDLYIPYRNVLILTVAASFARTLDFNYVYSAFINSNHAKEIDCSNDFFNNLENLLSDYGSVKIEMPFRNFSKFDVAKLGVELGAPIGRTFSCQASPVIPCGACPNCVDRLDALKKLVE

SEQ ID NO: 37431 - protein, 199 aa, unidentified
  source 1..199: note = Chryseobacterium shandongense
  REGION 1..199: note = tr|A0A3G6MU98|A0A3G6MU98_9FLAO 7-cyano-7-deazaguanine synthase OS=Chryseobacterium shandongense OX=1493872 GN=EG350_11160 PE=3 SV=1
MEFVKKAVLLSGGIDSICLTYGIRPSIAYTVDYGQVVAEREIYVSTYICKSLNIEHKVIKVDCKNLGSGDLANQQSLDLSPSAEWWPYRNQLIITLSLMQAIKDNVSELHLATVKSDGFHTDGTHEFYKLINELSTYQEGNIKVLCETIDFYSHELAEKYNVPLNLLTLAHSCHKSNIACGTCSGCIKQQRVRYELKIE

SEQ ID NO: 37432 - protein, 241 aa, Chryseobacterium sp.
  REGION 1..241: note = tr|A0A2R7NLW5|A0A2R7NLW5_9FLAO 7-cyano-7-deazaguanine synthase OS=Chryseobacterium sp. HMWF028 OX=2056862 GN=DBR28_12665 PE=3 SV=1
MKRETILVLSGGIDSVTMAHMLVNAGNNCRAVYLDYGKSISQRELAAAKHFSYHLDIPLEIIDAHGMTKLQLGYLPWTRILADEADIKDFEISTSKLSKEQEERLSKYPVVSSNWSRVTGIHHLISVASYFAQITNATQIALGLTKEQFVAFPGLKLALEKWCELLELLNPEKGSFKVLTPLIDMTKSEIIKLALDLEIPIEATWSCFYSTDYHCGKCTRCNERKSAFKTLGIDDPTEYGA

SEQ ID NO: 37433 - protein, 252 aa, Chryseobacterium sp.
  REGION 1..252: note = tr|A0A2G7T9M4|A0A2G7T9M4_9FLAO 7-cyano-7-deazaguanine synthase OS=Chryseobacterium sp. B5; OX = 2050562 GN=queC PE=3 SV=1
MRAMQNDSSSPQAPAARHTAALVLFSGGQDSTTCLAQALSLYERVETLGFDYGQRHSVEMQVRQQVRERLSRDFPQWAPRLGDDHVLSLDVLQQIGGSSLTEDVAFAMQADGLPNTFVPGRNLLFLTLAGALAYRRGLSVIVTGVCETDYSGYPDCRDDTMKAMQLALNLGLERRLRIETPLMWIDKAQTWQMAHDLGGDTLVDLIQRDTHTCYQGTRETLHDWGYGCGTCPACDLRARGWHQWQAQRETAN

SEQ ID NO: 37434 - protein, 762 aa, unidentified
  source 1..762: note = Chryseolinea flava
  REGION 1..762: note = tr|A0A364Y6X5|A0A364Y6X5_9BACT Glycos_transf_1 domain-containing protein OS=Chryseolinea flava OX=2059302; GN = DQQ10_00655 PE=4 SV=1
MKKILYFSRVFESTSFIGSQVTEVSDTHTCYYACFDIDRPKALEISNVKVIKLSEQKQGRWQRLKTKLELSDLYLNLYDARTASEIERVVLDVNPDIIHCQYGYDALIMLDNFYRDDRKYVITFRGFDASLLLILSKYRDKLNYYLSKPNVYPVFVCHALMYNLQEKSIALNPVRAVVYSNTNTEFYTRKTYKATREKIVFTQISNFREKKGHRYTLEAFEKFAEQYPEVNFEVNFAGGIDAQAQVFIDRAKKGPIADRINFPGKVSPGEILALLEQTDVFVHNSITSDHNDQEGIPNAIMEAMSMELPIVATYHSGIRELIGGNEEVFLSPEKNIAAYVEAIHKASTVGYSKRNRDRIVTAFSKETFERNILGFYQRVLNDGERVYQQCVNCVLNTNDDPAIIFDITGICNHCQAYRIVEFKYVRRDAVAEKYLTELVDTIKEKGKDKPYDCILGLSGGVDSTYLAYIAKKLGLRPLAVHFDNGWNSELAVGNIERIVTKLNIPLQTFVVDWEEFRDIQLAVLKASVVDIEMVTDHAIITKLYDLALEHSIDYVLSGTNIVTEAILPSTWIHSKKDHVNIRNIHRQFGKVPMKTYPLFTSARKLRVVWAGIQSVALLDSLPYEKKAVKKLITEELGWRDYGGKHYESIFTRFYQGYILPKKFGIDKRRAHLSNLICSRQLTRDEALEELKAAPYPEALFKSDYDFVLKKLNLSEKEFTEIMNLPVKPHSFYGVEPSFYDRFPVIKFVRPMWLLLKRLRGVS

SEQ ID NO: 37435 - protein, 154 aa, unidentified
  source 1..154: note = Chrysiogenales bacterium
  REGION 1..154: note = tr|A0A524JUL3|A0A524JUL3_9BACT 7-cyano-7-deazaguanine synthase (Fragment); OS = Chrysiogenales bacterium OX=2528039 GN=E4H23_08145 PE=3; SV = 1
SIPESLAASRKEPGVPSTYVPFRNGIFLALAAACAESHASRNLVTGFNAIDSPDYPDTTVQFSRKMAAAINQGTAAGKSGRGFKVHTPLIALSKKEIIAMGIELGADYAYSISCYRGAELPCGRCPACDIRARAFAELGRQDPLLARLQKEGKT

SEQ ID NO: 37436 - protein, 126 aa, unidentified
  source 1..126: note = Chrysiogenales bacterium
  REGION 1..126: note = tr|A0A524Q3H2|A0A524Q3H2_9BACT 7-cyano-7-deazaguanine synthase (Fragment); OS = Chrysiogenales bacterium OX=2528039 GN=E4G96_03530 PE=3; SV = 1
MADKAVILLSGGIDSATTAAIAAARGLDLTAIIFSYGQKHSIEIRSAKRLTQSFAIRDYIVIDIPVGIFNSALTDRKRAVPKRRDDGKEIPDTYVPARNILFLSYALAFAESIGARRIFIGANAVD

SEQ ID NO: 37437 - protein, 232 aa, unidentified
  source 1..232: note = Chthoniobacter flavus
  REGION 1..232: note = tr|B4D1V5|B4D1V5_9BACT 7-cyano-7-deazaguanine synthase OS=Chthoniobacter flavus Ellin428 OX=497964; GN = queC PE=3 SV=1
MSRSKVVVLVSGGMDSVAALYHTQAEHPVVGALSFDYGSKHNHKEIPLAAYHCERLGVPHRVIPLSFINELFASDLLQSGGAIPDGHYEELTMKQTVVPFRNGIMLSIAGGYAESVGAQGLIIAAHAGDHAIYPDCREAFMQAMGEAIRLGTYAEIQLLRPFIHFSKAQIAARGHELGVDFAKTWSCYKGQEIHCGTCGTCVERREAFAVAGIPDPTVYASVAPLPAKPVTS

SEQ ID NO: 37438 - protein, 230 aa, unidentified
  source 1..230: note = Chthoniobacterales bacterium
  REGION 1..230: note = tr|A0A2W6AFR6|A0A2W6AFR6_9BACT 7-cyano-7-deazaguanine synthase OS=Chthoniobacterales bacterium OX=2201154 GN=queC PE=3 SV=1
MQRAIVLLSGGLDSATTLALARQQAYAVHALSFEYGQRHGVEIAAAKKIAQQLGAIEHRILKIDLRSFGGSALTDTIAVPKNRSAGEIEREIAITYVPARNTIFLSYALAWAEVTGARDIFIGVNAIDYSGYPDCRPEFIAQFERLANVATKAGVSCDRIRIHAPLIEMTKAQIIGKGAELGVDFSLTHSCYDPAANGDACGECDSCLLRKKGFADAGACDPTRYADQLS

SEQ ID NO: 37439 - protein, 225 aa, unidentified
  source 1..225: note = Chthoniobacterales bacterium
  REGION 1..225: note = tr|A0A2W5YE73|A0A2W5YE73_9BACT 7-cyano-7-deazaguanine synthase OS=Chthoniobacterales bacterium OX=2201154 GN=queC PE=3 SV=1
MKRAVVLLSGGLDSATTLALCLREGFESYALSFDYGQRHDVEILAARRVASSLGAREHRVAKIDLRVFGGSALTDEIPVPKNRTDQPGIPVTYVPARNTIFLSYALAWCEVLGAADIFIGVNAIDYSGYPDCRPAFISAFEELSTVATKAGVEGTRFRIHAPLLEMSKAKIIQKGSELGVDFSLTHSCYDPTPDLLACGECDSCRLRLEGFRAAGLVDPIRYAAK

SEQ ID NO: 37440 - protein, 229 aa, Chthonomonas calidirosea
  REGION 1..229: note = tr|S0EWZ4|S0EWZ4_CHTCT 7-cyano-7-deazaguanine synthase OS=Chthonomonas calidirosea (strain DSM 23976 / ICMP 18418 / T49) OX=1303518 GN=queC PE=3 SV=1
MKAVVLVSGGMDSCVTAAIARKEHEAEELHFLHVNYGQRTEKRELKAFHDIADFYGVPAERRLVCSIAHLSQIGGSSLTDPSIPVSEADLDNPGIPTSYVPFRNAHFLSIAVSWAEVCGAKRIYIGAVYEDSSGYPDCRPEYYAAFNELIRLGTACGDIRVETPIIGLTKAQIVQRGLELGAPFHLTWSCYRNEEVACGTCDSCALRLRGFEVAGVPDPLPYVVRPHYG

SEQ ID NO: 37441 - protein, 236 aa, unidentified
  source 1..236: note = Ciceribacter sp.
  REGION 1..236: note = tr|A0A4Q2TG97|A0A4Q2TG97_9RHIZ 7-cyano-7-deazaguanine synthase OS=Ciceribacter sp. F8825; OX = 2509717 GN=queC PE=3 SV=1
MKTIVVCSGGLDSVSLAHRIAAEHELLALISFDYGQRHKKELDYAADCAARLGVPHEIIDISAVGRHLSGFALTDTIDVPDGHYAEDTMKVTVVPNRNAIMLAIAFGVAAARNADAVAVAVHGGDHFIYPDCRPGFIDAFQVMQDAALDGYAAVRLFAPYVNASKADIVADGARHGTPFERTWSCYKGGERHCGRCGTCVERREAFHLAGVSDPTGYEDPDFWAAATGAFSAEEVR

SEQ ID NO: 37442 - protein, 195 aa, Citreicella sp.
  REGION 1..195: note = tr|I1B2T7|I1B2T7_9RHOB 7-cyano-7-deazaguanine synthase OS=Citreicella sp. 357 OX=766499 GN=C357_00349; PE = 3 SV=1
MRVLLFSGGVESTALAYMLRPDVLFTIDYGQAPAQGELRAATFIAKELGLNHETLSVDCSPLGAGDMAGRPIAGHSRVSEAWPFRNQLLVTLAAMKFAGEGLKDILIGTVVSDRVHADGSPEFVERLDMLIKCELPKTSVTAPALNMSTLELVKRSQVPMDILGWSFSCHRSTVACGQCRGCNKTIDLWEALERS

SEQ ID NO: 37443 - protein, 233 aa, Citreicella sp.
  REGION 1..233: note = tr|D0DDU0|D0DDU0_9RHOB 7-cyano-7-deazaguanine synthase OS=Citreicella sp. SE45 OX=501479 GN=queC PE=3; SV = 1
MKTLVICSGGLDSVSLAHIIADQHRLTRLVSFDYGQRHRKELDFAAAAARRLNVPHHLIDMRGIGASLSGSALTDDIDVPDGHYAEETMRITVVPNRNAIMLAIGFGVAAANGDEAVATAVHGGDHFIYPDCRPAFTQAFDAMQQAALDGYASVRLHTPFVERSKADIVRAGAAHGTPFAETWSCYKGGEVHCGRCGTCVERREAFHLAGVGDPTAYADPDYWAQAVAARGTA

SEQ ID NO: 37444 - protein, 231 aa, Citrobacter amalonaticus
  REGION 1..231: note = tr|A0A2S4S0E8|A0A2S4S0E8_CITAM 7-cyano-7-deazaguanine synthase OS=Citrobacter amalonaticus OX=35703 GN=queC PE=3 SV=1
MKRAVVVFSGGQDSTTCLVQALHQYDEVHCVTFDYGQRHRAEIDVARDLALQLGARAHKVLDVTLLNELAVSSLTRDSIPVPDYEPNADGIPNTFVPGRNILFLTLAAIYAYQVKAGAVITGVCETDFSGYPDCRDEFVKALNHAVNLGMAKEIRFETPLMWIDKAETWALADYWGKLELVRQETLTCYNGIKGDGCGHCAACNLRANGLNHYLADKPAVMAAMKQKTGLQ

SEQ ID NO: 37445 - protein, 231 aa, Citrobacter amalonaticus
  REGION 1..231: note = tr|A0A109YZY8|A0A109YZY8_CITAM 7-cyano-7-deazaguanine synthase OS=Citrobacter amalonaticus OX=35703 GN=queC PE=3 SV=1
MKRAVVVFSGGQDSTTCLVQALHQYDEVHCVTFDYGQRHRAEIDVARDLALKLGARAHKVLDVTLLSELAVSSLTRDNIPVPDYEPDADGIPNTFVPGRNILFLTLAAIYAYQVKAEAVITGVCETDFSGYPDCRNDFVEALNHAIKLGMAKDIRFETPLMWIDKAETWALADYWGKLDLVREETLTCYNGIKGDGCGHCAACNLRANGLNHYLADKPVIMAAMKQKTGLK

SEQ ID NO: 37446 - protein, 231 aa, Citrobacter braakii
  REGION 1..231: note = tr|A0A1R0G0I1|A0A1R0G0I1_CITBR 7-cyano-7-deazaguanine synthase OS=Citrobacter braakii; OX = 57706 GN=queC PE=3 SV=1
MKRAVVVFSGGQDSTTCLAQALHQYDEVHCVTFDYGQRHRAEIDVARDLALKLGARAHKVLDVTLLSELAVSSLTRDNIPVPDYEPDANGIPNTFVPGRNILFLTLAAIYAYQVQAEAVITGVCETDFSGYPDCRDEFVKALNHAVSLGMAKDIRFETPLMWIDKAETWALADYWGKLDLVREETLTCYNGIKGDGCGHCAACNLRANGLNHYLADKPAVMAAMKQKTGLK

SEQ ID NO: 37447 - protein, 434 aa, Citrobacter braakii
  REGION 1..434: note = tr|A0A4R0MCC9|A0A4R0MCC9_CITBR DNA-binding protein; OS = Citrobacter braakii OX=57706 GN=EY915_05440 PE=4 SV=1
MTQLVFHHEHRLLPRASENLLPVQLYGLSGQGRGDISIIGNPAIDRIKRLGVKIPAQVMDFLSIALAVTAADTFVQRESSEDGWTRQLSLRLPLHEPSRWIALKKELESALHFLSGDIWDFEFCNGGYAPPEPYSQHSRFHLIKLKELDCVSLFSGGLDSAIGAIDLLTLGRAPLLVSHAYKGDKSRQDQIAERLNGRYSRFEINADPHLYQGVTDITMRTRSLNFLAFAAVGACAVQEVSQQKKVDLFVPENGFISLNAPLTPRRIGTLSTRTTHPYFISSIQQLFDAVGIPCQVINPYQFKTKGQMVSQCLNKQLLSDVVESTVSCSHWKRTDQQCGVCVPCIIRRASLHAGGISRDADYTFQSLAKVMKEIDRRDDLIALRIAIAQRSTSRIGTWIAKSGPLPVAAFNDFKQVFLDGLNEVENYLMSEGIV

SEQ ID NO: 37448 - protein, 231 aa, Citrobacter farmeri
  REGION 1..231: note = tr|A0A223JNI8|A0A223JNI8_9ENTR 7-cyano-7-deazaguanine synthase OS=Citrobacter farmeri; OX = 67824 GN=queC PE=3 SV=1
MKRAVVVFSGGQDSTTCLVQALHQYDEVHCVTFDYGQRHRAEIDIARDLALKLGARAHKVLDVTLLSELAVSSLTRDNIPVPDYEPDADGIPNTFVPGRNILFLTLAAIYAYQVKAEAVITGVCETDFSGYPDCRNDFVEALNHAIKLGMAKDICFETPLMWIDKAETWALADYWGKLDLVREETLTCYNGIKGDGCGHCAACNLRANGLNHYLADKSSVMAAMKQKTGLK

SEQ ID NO: 37449 - protein, 200 aa, Citrobacter freundii
  REGION 1..200: note = tr|A0A256DUA7|A0A256DUA7_CITFR 7-cyano-7-deazaguanine synthase OS=Citrobacter freundii; OX = 546 GN=B9P90_20085 PE=3 SV=1
MSIVTLVSGGLDSTLVAKLAQEEGLQIFPLFIDYGQRARNRELAACKLSMSTLGLPEPEIANLAGFGQLIHSGLTDKSLHVINDAFTPGRNLLFLLTAAAYAYQKNADAISIGLLHESTSLFPDQTSEFLSRAEIMISLCMGRKIKVLAPLSIFTKPDVVMLANEKGISNTYSCHIGNEKPCGNCISCNEFKFEDMNNGR

SEQ ID NO: 37450 - protein, 231 aa, Citrobacter freundii
  REGION 1..231: note = tr|A0A0D7LP22|A0A0D7LP22_CITFR 7-cyano-7-deazaguanine synthase OS=Citrobacter freundii; OX = 546 GN=queC PE=3 SV=1
MKRAVVVFSGGQDSTTCLAQALHQYDEVHCVTFDYGQRHRAEIDVARDLALKLGARAHKVLDVTLLSELAVSSLTRDNIPVPDYEPDANGIPNTFVPGRNILFLTLAAIYAYQVQAEAVITGVCETDFSGYPDCRDEFVKALNHAVSLGMAKDIRFETPLMWIDKAETWALADYWGKLDLVREETLTCYNGIKGDGCGHCAACNLRANGLNHYLADKPGVMAAMKQKTGLK

SEQ ID NO: 37451 - protein, 231 aa, Citrobacter gillenii
  REGION 1..231: note = tr|A0A3E2KX10|A0A3E2KX10_9ENTR 7-cyano-7-deazaguanine synthase OS=Citrobacter gillenii; OX = 67828 GN=queC PE=3 SV=1
MKRAVVVFSGGQDSTTCLAQALHQYDEVHCVTFDYGQRHRAEIDVARDLALKLGARAHKVLDVTLLSELAVSSLTRDNIPVPDYEPEANGIPNTFVPGRNILFLTLTAIYAYQVQAEAVITGVCETDFSGYPDCRDEFVKALNHAVSLGMAKDIRFETPLMWLDKAETWALADYWGKLDLVREETLTCYNGVKGDGCGQCAACNLRANGLKHYLADKPAVMAAMKQKTGLK

SEQ ID NO: 37452 - protein, 231 aa, Citrobacter koseri
  REGION 1..231: note = tr|A0A427PHY5|A0A427PHY5_CITKO 7-cyano-7-deazaguanine synthase OS=Citrobacter koseri; OX = 545 GN=queC PE=3 SV=1
MKRAVVVFSGGQDSTTCLAQALRQYDEVHCVTFDYGQRHRAEIDVARNLALKLGARAHKVLDVTLLSELAVSSLTRDNIPVPDYEPDADGIPNTFVPGRNILFLTLAAIYAYQVKAEAVITGVCETDFSGYPDCRDEFVKALNHAVTLGMAKDIRFETPLMWIDKAETWALADYWGKLDLVREETLTCYNGIKGDGCGQCAACNLRANGLNHYLTDKPAVMAAMKQKTGLK

SEQ ID NO: 37453 - protein, 231 aa, Citrobacter koseri
  REGION 1..231: note = sp|A8AK09|QUEC_CITK8 7-cyano-7-deazaguanine synthase; OS = Citrobacter koseri (strain ATCC BAA-895 / CDC 4225-83 / SGSC4696) OX=290338 GN=queC PE=3 SV=1
MKRAVVVFSGGQDSTTCLAQALHQYDEVHCVTFDYGQRHRAEIDVARDLALKLGARAHKVLDVTLLSELAVSSLTRDNIPVPDYEPDADGIPNTFVPGRNILFLTLAAIYAYQVKAEAVITGVCETDFSGYPDCRDEFVKALNHAVTLGMAKDIRFETPLMWIDKAETWALADYWGKLDLVREETLTCYNGIKGDGCGQCAACNLRANGLNHYLADKPAVMAAMKQKTGLK

SEQ ID NO: 37454 - protein, 231 aa, Citrobacter murliniae
  REGION 1..231: note = tr|A0A4S3RWH5|A0A4S3RWH5_9ENTR 7-cyano-7-deazaguanine synthase OS=Citrobacter murliniae; OX = 67829 GN=queC PE=3 SV=1
MKRAVVVFSGGQDSTTCLAQALHQYDEVHCVTFDYGQRHRAEIDVARDLALKLGARAHKVLDVTLLSELAVSSLTRDNIPVPDYEPDADGIPNTFVPGRNILFLTLAAIYAYQVKAEAVITGVCETDFSGYPDCRDEFVKALNHAVSLGMAKDIRFETPLMWIDKAETWALADYWGKLDLVRNETLTCYNGIKGDGCGHCAACNLRANGLNHYLADKSEIMAAMKRKTGLK

SEQ ID NO: 37455 - protein, 201 aa, Citrobacter murliniae
  REGION 1..201: note = tr|A0A4S3RCR1|A0A4S3RCR1_9ENTR 7-cyano-7-deazaguanine synthase OS=Citrobacter murliniae; OX = 67829 GN=DJ535_21845 PE=3 SV=1
MKTALLLSGGMDSIAIAWWKRPDIALTLDYGQQAANAEIKAATATCETLGIEHHIIRIDCRSLGSGDMAGTATDPNAPSSDWWPYRNQMLISLAAMKAITLGVTHLWIGTVKSDETHLDGTIGFISRISELMSFQEGGMVVEAPAITLSTSELIRISDVTPGGLAWAHSCHKANIPCGNCRGCNKYFQVLDDVGYDLDRSR

SEQ ID NO: 37456 - protein, 231 aa, unidentified; identical to SEQ ID NO: 37446
  source 1..231: note = Citrobacter pasteurii
  REGION 1..231: note = tr|A0A0A1RYH8|A0A0A1RYH8_9ENTR 7-cyano-7-deazaguanine synthase OS=Citrobacter pasteurii; OX = 1563222 GN=queC PE=3 SV=1

SEQ ID NO: 37457 - protein, 231 aa, unidentified; identical to SEQ ID NO: 37446
  source 1..231: note = Citrobacter portucalensis
  REGION 1..231: note = tr|A0A4P7UN10|A0A4P7UN10_9ENTR 7-cyano-7-deazaguanine synthase OS=Citrobacter portucalensis OX=1639133 GN=queC PE=3 SV=1

SEQ ID NO: 37458 - protein, 231 aa, unidentified
  source 1..231: note = Citrobacter portucalensis
  REGION 1..231: note = tr|A0A5A9EH07|A0A5A9EH07_9ENTR 7-cyano-7-deazaguanine synthase OS=Citrobacter portucalensis OX=1639133 GN=queC PE=3 SV=1
MKRAVVVFSGGQDSTTCLAQALHQYDEVHCVTFDYGQRHRAEIDVARDLALKLGARAHKVLDVTLLSELAVSSLTRDNIPVPDYEPDANGIPNTFVPGRNILFLTLAAIYAYQVQAEAVITGVCETDFSGYPDCRDKFVKALNHAVSLGMAKDIRFETPLMWIDKAETWALADYWGKLDLVREETLTCYNGIKGDGCGHCAACNLRANGLNHYLADKPAVMAAMKQKTGLK

SEQ ID NO: 37459 - protein, 231 aa, Citrobacter rodentium
  REGION 1..231: note = tr|A0A482PV69|A0A482PV69_CITRO 7-cyano-7-deazaguanine synthase OS=Citrobacter rodentium; OX = 67825 GN=queC PE=3 SV=1
MKRAVVVFSGGQDSTTCLVQALHQYDEVHCVTFDYGQRHRAEIDVARELALKLGARAHKVLDVTLLSELAVSSLTRDNIPVPDYEPDADGIPNTFVPGRNILFLTLAAIYAYQVKAQAVITGVCETDFSGYPDCRDEFVKALNHAVTLGMAKEIRFETPLMWLDKAETWALADYWGELERVREETLTCYNGIKGDGCGQCAACNLRANGLNHYLADKPAVMAAMKQKTGLQ

SEQ ID NO: 37460 - protein, 231 aa, Citrobacter sp.; identical to SEQ ID NO: 37445
  REGION 1..231: note = tr|A0A3Q8D7G6|A0A3Q8D7G6_9ENTR 7-cyano-7-deazaguanine synthase OS=Citrobacter sp. CFNIH10; OX = 1920110 GN=queC PE=3 SV=1

SEQ ID NO: 37461 - protein, 231 aa, Citrobacter sp.
  REGION 1..231: note = tr|A0A4P6WKQ7|A0A4P6WKQ7_9ENTR 7-cyano-7-deazaguanine synthase OS=Citrobacter sp. LY-1; OX = 2546350 GN=queC PE=3 SV=1
MKRAVVVFSGGQDSTTCLTQALHQYDEVHCVTFDYGQRHRAEIDVARDLALKLGARAHKVLDVTLLSELAVSSLTRDNIPVPDYEPDANGIPNTFVPGRNILFLTLAAIYAYQVQAEAVITGVCETDFSGYPDCRDEFVKALNHAVSLGMAKDIRFETPLMWIDKAETWALADYWGKLDLVRKETLTCYNGIKGDGCGHCAACNLRANGLNHYLADKPAVMAAMKQKTGLK

SEQ ID NO: 37462 - protein, 231 aa, Citrobacter werkmanii; identical to SEQ ID NO: 37446
  REGION 1..231: note = tr|A0A090TY87|A0A090TY87_9ENTR 7-cyano-7-deazaguanine synthase OS=Citrobacter werkmanii NBRC 105721 OX=1114921 GN=queC PE=3 SV=1

SEQ ID NO: 37463 - protein, 231 aa, Citrobacter werkmanii
  REGION 1..231: note = tr|A0A422V5V1|A0A422V5V1_9ENTR 7-cyano-7-deazaguanine synthase OS=Citrobacter werkmanii; OX = 67827 GN=queC PE=3 SV=1
MKRAVVVFSGGQDSTTCLAQALHQYDEVHCVTFDYGQRHRAEIDVARDLALKLGARAHKVLDVTLLSELAVSSLTRDNIPVPDYEPDANGIPNTFVPGRNILFLTLAAIYAYQVQAEAVITGVCETDFSGYPDCRDEFVKALNHAVSLGMAKDIRFETPLMWIDKAETWALADYWGKLDLVREETLTCYNGIKGDGCGHCAACNLRANGLNHYLADKPAVMTAMKQKTGLK

SEQ ID NO: 37464 - protein, 231 aa, Citrobacter youngae
  REGION 1..231: note = tr|D4BD14|D4BD14_9ENTR 7-cyano-7-deazaguanine synthase OS=Citrobacter youngae ATCC 29220 OX=500640; GN = queC PE=3 SV=1
MKRAVVVFSGGQDSTTCLAQALHQYDEVHCVTFDYGQRHRAEIDVARDLALKLGARAHKVLDVTLLSELAVSSLTRDNIPVPDYEPDANGIPNTFVPGRNILFLTLAAIYAYQVQAEAVITGVCETDFSGYPDCRDEFVKALNHAVSLGMAKDIRFETPLMWIDKAETWALADYWGKLDLVRAETLTCYNGIKGDGCGHCAACNLRANGLNHYLADKPAVMAAMKQKTGLK

SEQ ID NO: 37465 - protein, 231 aa, Citrobacter youngae
  REGION 1..231: note = tr|A0A549VAM4|A0A549VAM4_9ENTR 7-cyano-7-deazaguanine synthase OS=Citrobacter youngae; OX = 133448 GN=queC PE=3 SV=1
MKRAVVVFSGGQDSTTCLAQALHQYDEVHCVTFDYGQRHRAEIDVARDLALKLDARAHKVLDVTLLSELAVSSLTRDNIPVPDYEPDANGIPNTFVPGRNILFLTLAAIYAYQVQAEAVITGVCETDFSGYPDCRDEFVKALNHAVSLGMAKDIRFETPLMWIDKAETWALADYWGKLDLVREETLTCYNGIKGDGCGHCAACNLRANGLNHYLADKPAVMAAMKQKTGLK

SEQ ID NO: 37466 - protein, 231 aa, unidentified
  source 1..231: note = Citromicrobium sp.
  REGION 1..231: note = tr|A0A2P0AX22|A0A2P0AX22_9SPHN 7-cyano-7-deazaguanine synthase OS=Citromicrobium sp. RCC1897 OX=1812182 GN=queC PE=3 SV=1
MTGTNPDNVAAALLSGGLDSMVAAALARERGHEVHALTIDYGQRHVREIEAARKIAKALGLASHREITLDLRKFGGSALTADIDVPKDGVDGTIPVTYVPARNLVFLALTTAFAESIGAGRIVIGVNALDYSGYPDCRPEFIASFAETARQGTKAGIEGGGFAIDAPLQFLGKAEIASEANRLGLDTALSWSCYDPRGDGLPCGLCDSCRLRRKGFADAGLTDGLTYPADT

SEQ ID NO: 37467 - protein, 230 aa, unidentified
  source 1..230: note = Citromicrobium sp.
  REGION 1..230: note = tr|A0A2E7UC94|A0A2E7UC94_9SPHN 7-cyano-7-deazaguanine synthase OS=Citromicrobium sp.; OX = 2024827 GN=queC PE=3 SV=1
MPATARENIAAVLLSGGLDSMVAAGLAQEAGHQVHALTIDYGQRHRREIEAARNIAKALGLASHSEIALDLRKFGGSALTADIDVPKDGVGEDIPVTYVPARNLVFLSLTAAFAESRGAGRIVIGVNALDYSGYPDCRPEFIAAFAEAARLGTKAGIEGGGFAIDAPLQFMSKADIASEADRLGLDTGLSWSCYDPRGDGLPCGLCDSCRLRLGGFAAAGLEDGLTYPAR

SEQ ID NO: 37468 - protein, 425 aa, Clavibacter michiganensis
  REGION 1..425: note = tr|A0A251YB71|A0A251YB71_9MICO 7-cyano-7-deazaguanine synthase OS=Clavibacter michiganensis OX=28447 GN=queC PE=4 SV=1
MTRLALVVDKRRIPNNVDEVFLWDDDAADSFKSSLGPSLSALGQVPALNADFVRIALAVYASDHTVKRQGGGSNWNTRDLVILVPVSDTALWGSAAAALAEAVGFLTGDHWVFEFSDLTEVEESDLLFRDASARVVLVSGGADSGVGAIRSGSTLGAEETHTLVSHASSGAARAPQKHVYDQLEARFPGKQAAHHRLFLSRAQKRLNGTRFPNEPSSRSRSFLFLALGLAIASQSGSRLWIPENGFASVNPPLGPERLGALSTRTTQPWFLWKIQAVLESIGAHGSIENPYQLMTKGEMFAQAKEVLGDDDAAIYLSGTNSCSHTDQNYQGVASGTHCGVCFGCIVRRASFKAGGVVDATRYLSDEPRYFGYAASHSVVDAAKDFTANKISEATIMMMPSTPSLSARQAMDLCLRGQAEIGAYLA

SEQ ID NO: 37469 - protein, 430 aa, Clavibacter michiganensis
  REGION 1..430: note = tr|A0A251YG41|A0A251YG41_CLAMM 7-cyano-7-deazaguanine synthase OS=Clavibacter michiganensis subsp. michiganensis OX=33013 GN=queC PE=4; SV = 1
MFEYRLSVLPPVEPFPADVANTFFWHSKRSMPYFHANVGPQLAEYGPVKIRNIDLVRIAAAVLAADRSASRSGSLSRWNQREISLTIDVLAVKPWDTVKKDLEQLLGFLTGDAWSLTFLRERGAAEQIGRLGIDAQRVVLLSGGADSATGALLSALELVPLSQKHILVSHWSSTNLSPLQTRVANEIERLAPGAKADHVKVNIARGKHAPDGTAYGRENSTRSRSFLFIALGLAIASVDELPLWLPENGYASINPPLSKSRRGSLSTKTTHPKFLAGLRRILKAVGAHYDVHNPYADLTKGEMFSKVADAVGVDEASTYLTLTSSCSHTGARTYGTAPNVACGVCFGCVLRRASFTASGLNDGSQYFLPKDDGQQNWVATKSVVPAMRDFLSESFSVAQLAHLQIPSDIPLARVESLVERGREELRQLAL

SEQ ID NO: 37470 - protein, 236 aa, Cloacibacillus sp.
  REGION 1..236: note = tr|A0A1Y4GNB8|A0A1Y4GNB8_9BACT 7-cyano-7-deazaguanine synthase OS=Cloacibacillus sp. An23; OX = 1965591 GN=queC PE=3 SV=1
MACKAMVLFSGGVDSATCLALAVEKYGKENVIPLSIRYGQKHEKEIRAAERILARYGVKGIELDLSAVFAYSGCSLLARSEAAVPEAPYAEQIAASGGAPVSTYVPFRNGLFLSCAASVALSLGCRSVWYGAHRDDAAGAAYPDCGEEFFRSMNSAVYEGSGKALRLEAPFIDKNKAQVVAEGLRLGVPYELTWSCYQGGEKPCGVCGTCIDRRRAFEANGVEDPALKLDRPGADK

SEQ ID NO: 37471 - protein, 222 aa, unidentified
  source 1..222: note = Cloacimonas acidaminovorans
  REGION 1..222: note = tr|B0VHI0|B0VHI0_CLOAI 7-cyano-7-deazaguanine synthase OS=Cloacimonas acidaminovorans (strain Evry); OX = 459349 GN=queC PE=3 SV=1
MTRAIVLLSGGMDSLVTAACAVSECDEVCFLHFNYGQLTEKKELSSFEALVNYYQPIQAKVINYSWLSEIGGSALTDRNIPVQKGILSSSKIPVTYVPFRNAIFLCSAVAWAEVIQATRIYIGAVEEDSSGYPDCREVFFQAFNKVIATGTKGEIPIEISTPVLHKSKAEIVQLGIELKAPFELSWSCYTENDVACGVCESCLLRKKAFKTAGVEDPLPYRN

SEQ ID NO: 37472 - protein, 248 aa, unidentified
  source 1..248: note = Clostridia bacterium
  REGION 1..248: note = tr|A0A2V2CDX8|A0A2V2CDX8_9FIRM ATP-dependent sacrificial sulfur transferase LarE OS=Clostridia bacterium OX=2044939 GN=larE PE=4 SV=1
MELQDFFHEHPKAVLGFSGGVDSSYLLWAARQCGADVRPYYIKTSFQPEFEFEDAKRLCREIGAELTVLELDALSDPAVAANPADRCYHCKRNLFGTLAARALADGYTLLLDGTNASDDAGDRPGMRALRELSVRSPLRECGLTKARIRALSREAGLFTWDKPAYACLATRVPTGETITAEKLQKTERAEALLFSLGFRDFRVRYFAGAARIQLPEAQLPLALERRTELLSELKKIYPAVLLDLEVRG

SEQ ID NO: 37473 - protein, 216 aa, unidentified
  source 1..216: note = Clostridia bacterium
  REGION 1..216: note = tr|A0A523C2D5|A0A523C2D5_9FIRM 7-cyano-7-deazaguanine synthase OS=Clostridia bacterium; OX = 2044939 GN=queC PE=3 SV=1
MRAVVLLSGGLDSAVNLGKAVSSGQVILGLTFAYGQRAAAREANASAQLAAHFGVPHRVIALPFLGDITRTSLVNVEANIPEAGLEELEQDRLASTARVWVPNRNGLFINIAASFAEALEGDTVVAGFNREEGAAFPDNSPDFVAAANVALGYSTLSRVRVKCFTQEMDKADIVRLGRELGVPLTLTWSCYYGGEVPCGRCESCRRVKRAWEMVAG

SEQ ID NO: 37474 - protein, 227 aa, unidentified
  source 1..227: note = Clostridiaceae bacterium
  REGION 1..227: note = tr|A0A316N2P1|A0A316N2P1_9CLOT 7-cyano-7-deazaguanine synthase OS=Clostridiaceae bacterium OX=1898204 GN=queC PE=3 SV=1
MKAVVLFSGGVDSTTCLGMAIDKYGKENVIALSISYGQKHLKEIEASDKIAAYYGVEHLRMDLEKIFAYSDCSLLQHSDQEIPEESYAEQLEKTDGKPVSTYVPFRNGLFLSCAASIALSKECNVIYYGAHADDAAGNAYPDCSSSFNKAISDAIYIGSGNQLIVEAPFVNLTKAEVVKIGLDLKVPYELTWSCYEGKDKPCGVCGTCIDRQEAFLKNGVTDPLLLQ

SEQ ID NO: 37475 - protein, 251 aa, unidentified
  source 1..251: note = Clostridiales bacterium
  REGION 1..251: note = tr|A0A137SWV6|A0A137SWV6_9FIRM TIGR00268 family protein OS=Clostridiales bacterium KA00134 OX=1588750; GN = HMPREF3189_00390 PE=4 SV=1
MYRLNLEKFFEEYKSVALAFSGGVDSAYLLYMAIKAKIRVRAYYVKSDFQPDFELKDAKRLSKELGADMKIIEMDVLENADIARNPKDRCYYCKHEIFGTILKVAKEDGFKVLIDGTNASDSEADRPGMKAKSELKVLSPLRMAGLSKHDIRELSKEAGLFTWDKPSYSCLATRMEIDKKIDRDDLKRTESAEDFMRDLGFSDFRIRNLNKGAKIQLRDGDFQRFFSKRAQIYKRLIRDYEFVVLDLEVRS

SEQ ID NO: 37476 - protein, 247 aa, unidentified
  source 1..247: note = Clostridiales bacterium
  REGION 1..247: note = tr|A0A176UB27|A0A176UB27_9FIRM TIGR00268 family protein OS=Clostridiales bacterium KLE1615 OX=1715004; GN = HMPREF2738_00545 PE=4 SV=1
MDLNEFFKEHNKVALAFSGGVDSSYLLYAAIKSGAQVRAYYVNAAFQPQFELDDAMRLAKQLNADMKVLTADVLSNETVVKNPSDRCYHCKNVIFNMILAEAKKDGFTVLMDGTNASDAEDDRPGMRALRELCVYSPLRICGLTKTEIRRRSKEAGLFTWDKPAYACLATRIPTNERITAEKLEKTEEAENYLFSLGFTDFRVRYLNDSAKIQMPAAQMTKLLEMREEILIELKKYYKEVLLDLQAR

SEQ ID NO: 37477 - protein, 219 aa, Clostridium aceticum
  REGION 1..219: note = tr|A0A0D8ICN0|A0A0D8ICN0_9CLOT 7-cyano-7-deazaguanine synthase OS=Clostridium aceticum; OX = 84022 GN=queC PE=3 SV=1
MKKAVVLLSGGLDSTTCMAVAKNEGYELYPISFDYNQRHKRELALAKKIADYYGAEGHKIISMENVGGSALTDMSIDVPAYKGDHQIPITYVPARNILFLSYALGYAEVIGAEAIVIGVSAVDYSGYPDCRPEFIEAFQKVVDVGTAAGVEGKSIKIITPLIHLSKAETIELGHQLGAPYHLTTSCYNGEEEACRVCDSCVLRLKGFEEAKLEDPIVYK

SEQ ID NO: 37478 - protein, 218 aa, Clostridium acetireducens
  REGION 1..218: note = tr|A0A1E8EYG7|A0A1E8EYG7_9CLOT 7-cyano-7-deazaguanine synthase OS=Clostridium acetireducens DSM 10703 OX=1121290 GN=queC PE=3 SV=1
MNKEKAVVVFSGGQDSTTCLFWAKKRFKEVIAVSFDYNQKHKLELQCAKDICKKYNVEHHILDLNLLNQLAPNSLTRQDIKVDKSSPENGVPNSFVDGRNMLFLSFVAVFAKQRGINTIITGVSQSDFSGYPDCRDVFIKSLNVTLNLAMDYEFEVLTPLMWIDKAETWKMAYDLGVLDIVKNETLTCYNGIKGNGCGDCPSCKLRKNGYLKFKKTYL

SEQ ID NO: 37479 - protein, 222 aa, Clostridium acetobutylicum
  REGION 1..222: note = sp|Q97D53|QUEC_CLOAB 7-cyano-7-deazaguanine synthase; OS = Clostridium acetobutylicum (strain ATCC 824 / DSM 792 / JCM 1419 / LMG 5710 / VKM B-1787) OX=272562 GN=queC P E=3; SV = 1
MEISINKEKALVVFSGGQDSTTCLFWAKKRYKEVVAVSFDYNQKHKLELECAKDICKKHGVEHHILDMKLLNQLAPNSLTRADMKVDEDAPKDGPPNTFVDGRNLLFLSFAAVFAKQRGINNIITGVSQSDFSGYPDCRDVFIKSLNVTLNLAMDYQFVLITPLMWIDKAETWKLADDLGVLDIVKNETLTCYNGIKGNGCGECPACKLRKNGYVEFKRLYK

SEQ ID NO: 37480 - protein, 225 aa, Clostridium acidisoli
  REGION 1..225: note = tr|A0A1W1XQG3|A0A1W1XQG3_9CLOT 7-cyano-7-deazaguanine synthase OS=Clostridium acidisoli DSM 12555 OX=1121291 GN=queC PE=3 SV=1
MMKKAVVLLSGGLDSSTAMYLAKSEGYEVHAMSFNYGQRHKKEIEFAKKIAEKAGVKEHIIVKTNMNAWGGSALTDSNIDVPKGDLENEEIPVTYVPARNMIFLSYAASYAEAIGAQDIFIGVSQVDYSGYVDCRKEFIDAMENSINLGTVCAVKDNRKIKIHAPFMYMTKSEEIQLGMKLGVDYSLTWTCYNGYEKACGECDSCKLRLNAFKEAGYKDPVEYFN

SEQ ID NO: 37481 - protein, 225 aa, unidentified
  source 1..225: note = [Clostridium] algidixylanolyticum
  REGION 1..225: note = tr|A0A419T7H4|A0A419T7H4_9FIRM 7-cyano-7-deazaguanine synthase OS=[Clostridium] algidixylanolyticum OX=94868 GN=queC PE=3 SV=1
MKALVLFSGGVDSTTCLGLAIDKYGKENVIALSISYGQKHSKEVEASRKIAAHYQVEYIYLDLATIFEYSECCLLDHSKQEIPKGDYAKQLKTANGNPVSTYVPFRNGLFLSSAASIALSKGCSIIYYGAHSDDAAGNAYPDCSSSFHNAMNEAIYEGSGKQLRIEAPFVSWTKADVVKKGIELKVPYELTWSCYVGGEKSCGTCGTCIDRAKAFEKNGISDPAI

SEQ ID NO: 37482 - protein, 211 aa, Clostridium amylolyticum
  REGION 1..211: note = tr|A0A1M6KDC3|A0A1M6KDC3_9CLOT 7-cyano-7-deazaguanine synthase OS=Clostridium amylolyticum OX=1121298 GN=SAMN05444401_3319 PE=3 SV=1
MYNNKVVLLFSGGIDSTVLLFYLIRKKYDIFPLYINYGQTSYEGEIAAIEKIIEGLINNKLMIINIQDVSKIGCGSLVGEYPNDVTSREDWYKDEFFPNRNLILLSLAAAYAYKINATNIAIGVVGDSYSDTSKEFLDEMKKTLEISLGKYNIIAPYANMDRKKVIEDAIRYNVPIELTFSCNSVGNRHCMLCTSCLDRENALLLKKLAIQ

SEQ ID NO: 37483 - protein, 216 aa, Clostridium argentinense
  REGION 1..216: note = tr|A0A0C1QZ64|A0A0C1QZ64_9CLOT 7-cyano-7-deazaguanine synthase OS=Clostridium argentinense CDC 2741 OX=1418104 GN=queC PE=3 SV=1
MNKEKAVVVFSGGQDSTTCLFWAKKKFKEVIAVSFDYNQKHILELECAKNICKKYNVEHHILDLNLLNQLAPNSLTRVDMEVDKEAPEEGVPNSFVDGRNMLFLSFVAVFAKQRGINTIITGVSQSDFSGYPDCRDVFIKSLNVTLNLAMDYQFEILTPLMWINKAEVWKMAKDLDVLNIIKEETLTCYNGIKGDGCGECPACKLRKNGYLEFLRS

SEQ ID NO: 37484 - protein, 224 aa, Clostridium bartlettii
  REGION 1..224: note = tr|R5Y4E9|R5Y4E9_9CLOT 7-cyano-7-deazaguanine synthase OS=Clostridium bartlettii CAG:1329 OX=1263063; GN = queC PE=3 SV=1
MNNNSNNNAVVVFSGGQDSTTCLFWALERFDKVIAVTFNYNQKHKLEIECAKNIAKELGVEHHILDMDLLNQLAPNALTRDDIKIEEGKDGELPSTFVEGRNMVFLTFAAILAKTKNARHIVTGVCETDFSGYPDCRDVFVKSLNVTANLAMDYDFVMHTPLMWLDKAQTWELADKYGKLEYVREKTLTCYNGIIGDGCGECPSCKLRQHGLETYLKQKEELNK

SEQ ID NO: 37485 - protein, 217 aa, Clostridium beijerinckii
  REGION 1..217: note = sp|A6LWG7|QUEC_CLOB8 7-cyano-7-deazaguanine synthase; OS = Clostridium beijerinckii (strain ATCC 51743 / NCIMB 8052) OX=290402 GN=queC PE=3 SV=1
MSNKAVVVFSGGQDSTTCLFWALKEFDEVIAVTFDYNQKHRKEIECATSIAKELGIEHHILDMGLLNQLAPNALTRNDIEIKAGENGSLPSTFVEGRNMLFLTFAGVLAKVKGAKHIVTGVCETDFSGYPDCRDIFIKSLNVTLNLAMDYNFVVHTPLMWIDKAETWKMADDFGKLDYIREKTLTCYKGIVGDGCGECPACKLRKNGLDKYLESKKN

SEQ ID NO: 37486 - protein, 217 aa, Clostridium beijerinckii; identical to SEQ ID NO: 37485
  REGION 1..217: note = tr|A0A0K2MDU6|A0A0K2MDU6_CLOBE 7-cyano-7-deazaguanine synthase OS=Clostridium beijerinckii NRRL B-598 OX=1428454 GN=queC PE=3 SV=1

SEQ ID NO: 37487 - protein, 218 aa, unidentified
  source 1..218: note = Clostridium bornimense
  REGION 1..218: note = tr|W6SCU2|W6SCU2_9CLOT 7-cyano-7-deazaguanine synthase OS=Clostridium bornimense OX=1216932 GN=queC PE=3; SV = 1
MNKKAVVVFSGGQDSTTCLFWALKEFDEVIAVTFNYNQRHSLEIECAKNIAKELGVEHHILDMALLNQLAPNALTRNDIEVKAGENGSLPSTFVEGRNMLFLTFAAVLAKVKGAKHIVTGVCETDFSGYPDCRDVFIKSLNVTLNLAMDYEFVVHTPLMWIDKAQTWEMADSFGKLDYVREKTLTCYNGIIGDGCGECPACKLRKHGLEKYLESKKEK

SEQ ID NO: 37488 - protein, 219 aa, Clostridium botulinum
  REGION 1..219: note = sp|A5I232|QUEC_CLOBH 7-cyano-7-deazaguanine synthase; OS = Clostridium botulinum (strain Hall / ATCC 3502 / NCTC 13319 / Type A) OX=441771 GN=queC PE=3 SV=1
MNKEKAIVVFSGGQDSTTCLFWAKKKYKEVIAVSFDYNQKHKLELDCAKDICKKYNIEHHILDLNLLNQLAPNSLTRQDITVDKSAPKEGVPNSFVDGRNLLFLSFVAVFAKQKGINTIITGVSQSDFSGYPDCRDVFIKSLNVTLNLAMDYEFEIITPLMWINKAETWKMAYDLGVLDIVKEETLTCYNGIKADGCGECPACKLRKKGYWEFEKEYLK

SEQ ID NO: 37489 - protein, 38 aa, Clostridium botulinum
  REGION 1..38: note = tr|B1BAD4|B1BAD4_CLOBO Queuosine biosynthesis protein QueC OS=Clostridium botulinum C str. Eklund; OX = 445337 GN=CBC_A0900 PE=4 SV=1
MAYDFGVLDIIKNETLTCYNGVVENILPVNLEKRILKI

SEQ ID NO: 37490 - protein, 218 aa, Clostridium butyricum
  REGION 1..218: note = tr|A0A427STJ9|A0A427STJ9_CLOBU 7-cyano-7-deazaguanine synthase OS=Clostridium butyricum; OX = 1492 GN=queC PE=3 SV=1
MNKKAVVVFSGGQDSTTCLFWALEQFDEVIAVTFNYNQKHKLEIECAKSIAKELGVEHHILDMGLLNQLAPNALTRDDIEIKMGENGEPPSTFVEGRNMLFLTFAGVLAKVKGAKHIVTGVCETDFSGYPDCRDVFVKSLNVTMNLAMDYEFVVHTPLMWIDKAETWKMADDFGKLEYVREKTLTCYNGIIGDGCGKCPACILRKRGLDNYLEAKKKR

SEQ ID NO: 37491 - protein, 218 aa, Clostridium butyricum
  REGION 1..218: note = tr|A0A2S7FA16|A0A2S7FA16_CLOBU 7-cyano-7-deazaguanine synthase OS=Clostridium butyricum; OX = 1492 GN=queC PE=3 SV=1
MNKKAVVVFSGGQDSTTCLFWALEQFDEVIAVTFNYNQKHKLEIECAKSIAKELGVEHHILDMGLLNQLAPNALTRDDIEIKMGENGEPPSTFVEGRNMLFLTFAGVLAKVKGAKHIVTGVCETDFSGYPDCRDVFVKSLNVTMNLAMDYEFVVHTPLMWIDKAETWKMADDFGKLEYVREKTLTCYNGIIGDGCGKCPACILRKRGLDNYLESKKKR

SEQ ID NO: 37492 - protein, 222 aa, Clostridium carboxidivorans
  REGION 1..222: note = tr|C6PUT2|C6PUT2_9CLOT 7-cyano-7-deazaguanine synthase OS=Clostridium carboxidivorans P7 OX=536227; GN = queC PE=3 SV=1
MNKEKAVVVFSGGQDSTTCLFWAKKKFKEVIAVSFDYNQKHKLELECAKSICKKYNVEHHILDLNLLNQLAPNSLTRQDIKVDKEVPSGGLPNSFVDGRNMLFLTFVAVFAKQRDINNIITGVSQSDFSGYPDCRDVFIKSLNVTLNLAMDYQFDIYTPLMWINKAETWKMAYDLSVLDIVKNETLTCYNGIKGNGCGECPACRLRKNGYLEFKNKYLQSQQ

SEQ ID NO: 37493 - protein, 219 aa, Clostridium carnis
  REGION 1..219: note = tr|A0A3P6KUB0|A0A3P6KUB0_9CLOT 7-cyano-7-deazaguanine synthase OS=Clostridium carnis; OX = 1530 GN=queC PE=3 SV=1
MNKKAVVVFSGGQDSTTCLFWALKNFDEVIAVTFNYNQRHKLEIECAKNIAKELNVEHHVLDMELLNQLAPNALTRNDIEITKGEDGELPSTFVEGRNLLFLSFAGVLAKVKCAKHIITGVCETDFSGYPDCRDVFIKSLNVTLNLAMNYDFVIHTPLMWIDKAETWKMADEFGKLDFIRKKTLTCYNGIIGDGCGECPSCILRKNGLNKYLKSKDAFK

SEQ ID NO: 37494 - protein, 222 aa, Clostridium cellulovorans
  REGION 1..222: note = tr|D9SUQ8|D9SUQ8_CLOC7 7-cyano-7-deazaguanine synthase OS=Clostridium cellulovorans (strain ATCC 35296 / DSM 3052 / OCM 3 / 743B) OX=573061 GN=queC PE=3 SV=1
MSSSLKEQDILVVLSGGQDSTTCLFWAIKNFRNVKAIGFNYGQRHELELQCARKICEENNVSYEVLDMGLLNQLTTNSLTRKDIEVQAAKEGESTPNSLVEGRNMIFLTFAAVYAKTHNIKHIVTGVSQSDFSGYPDCRDTFIKSLNVTLNLSMDYEYVIHTPLMWLDKCDTWKLSDDLGVLDTIKDRTLTCYNGIIGAGCGICPSCLLRARGLEEFYKKYR

SEQ ID NO: 37495 - protein, 220 aa, Clostridium chromiireducens
  REGION 1..220: note = tr|A0A1V4IBV8|A0A1V4IBV8_9CLOT 7-cyano-7-deazaguanine synthase OS=Clostridium chromiireducens OX=225345 GN=queC PE=3 SV=1
MNKKAVVVFSGGQDSTTCLFWALKEFDEVIAVTFNYNQKHKLEIECAENIAKELGVEHHILDMALLNQLAPNALTRDDIEIKAGENGSLPSTFVEGRNMLFLTFAGVLAKVKGAKHIITGVCETDFSGYPDCRDVFIKSLNVTLNLAMDYDFVVHTPLMWIDKAETWKMADSFGKLDYIREKTLTCYNGVIGDGCGECPACELRRKGLENYLYSKKNDNK

SEQ ID NO: 37496 - protein, 271 aa, unidentified
  source 1..271: note = [Clostridium] citroniae
  REGION 1..271: note = tr|G5HTS5|G5HTS5_9FIRM Uncharacterized protein; OS = [Clostridium] citroniae WAL-17108 OX=742733; GN = HMPREF9469_05987 PE=4 SV=1
MNNELLKKYEQLKQYIYSFGSVAIAFSGGVDSTLLLYAAKEALGDRCIAVTASSYSFPDRELEEAKEYCKSVGVRHFVVMSEELEIEGFSHNPKNRCYLCKHELFEKMRILANEQNIFEIAEGSNLDDMGDYRPGLKAVAELGIKSPLRYIGFTKQNIRDISKYLSIPTWNKQSFACLSSRFPYGDLISKEKLMMVDRAEQLLLDLGFHQVRVRIHGSIARIELNPEEYGLLLEENIRSIVYQKYKEYGFSYVTLDLMGYRTGSMNEVMIV

SEQ ID NO: 37497 - protein, 271 aa, unidentified
  source 1..271: note = [Clostridium] clostridioforme
  REGION 1..271: note = tr|R0CV23|R0CV23_9FIRM TIGR00268 family protein; OS = [Clostridium] clostridioforme 90A6 OX=999406; GN = HMPREF1083_03965 PE=4 SV=1
MNNELLKKYEQLKQYISSFGSVAIAFSGGVDSTFLLYAAKEALGARCIAVTASSYSFPERELEEAKEYCASVGVRHFVVSSEELEIEGFSHNPKNRCYLCKHELFEKIRILANEQNIFEIAEGSNLDDMGDYRPGLQAVAELGIKSPLRYIGFTKKNIRDISKYLNIPTWNKQSFACLSSRFPYGDLISKEKLMMVDRAEQLLLDLGFHQVRVRIHGSIARIELNPEEFGLLLKENIRSIVYQKYKEYGFSYVTLDLMGYRTGSMNEVMIV

SEQ ID NO: 37498 - protein, 271 aa, Clostridium clostridioforme; identical to SEQ ID NO: 37497
  REGION 1..271: note = tr|R7PJZ8|R7PJZ8_9CLOT Uncharacterized protein; OS = Clostridium clostridioforme CAG:511 OX=1263066; GN = BN688_03076 PE=4 SV=1

SEQ ID NO: 37499 - protein, 227 aa, unidentified
  source 1..227: note = [Clostridium] cocleatum
  REGION 1..227: note = tr|A0A1I0EX75|A0A1I0EX75_9FIRM 7-cyano-7-deazaguanine synthase OS=[Clostridium] cocleatum; OX = 69824 GN=queC PE=3 SV=1
MKALVLFSGGIDSTTALALAIDQYKNENVIALSISYGQKHTKEIEAAKKIAQYYQVEHLYLDLAKIFTYSNCSLLQHSDNEIPHESYDKQLTKTEGTPVSTYVPFRNGLFLSSAASIALSKNCNVIYYGAHGDDAAGCAYPDCSEIFNNAMNQAIYEGSGHQLEIKAPFVEMTKADIIKIGLSLNVPYELTWSCYEGNEHPCGSCGTCIDRQKAFLKNGIKDPLLGE

SEQ ID NO: 37500 - protein, 225 aa, Clostridium colicanis
  REGION 1..225: note = tr|A0A151AQW1|A0A151AQW1_9CLOT 7-cyano-7-deazaguanine synthase OS=Clostridium colicanis DSM 13634 OX=1121305 GN=queC PE=3 SV=1
MKALVLFSGGVDSTTCLALAIYKYGKENVIALSIFYGQKHVKELEASKKIAEYYEVEHISLDVAKIFEHSECCLLDHSKQEIPKGDYFSQLKEASGNPVLTYVPFRNGLFLSCAASIALSKGCNVIYYGAHRDDAAGNAYPDCSTSFYNAMNEAIYEGSGKQLHIEAPFISLTKADIVKKGIELKVPYQMTWSCYEGGEKSCGVCGTCIDRAKAFEKNGIKDLTI

SEQ ID NO: 37501 - protein, 219 aa, unidentified
  source 1..219: note = Clostridium combesii
  REGION 1..219: note = tr|A0A2G7HEC8|A0A2G7HEC8_9CLOT 7-cyano-7-deazaguanine synthase OS=Clostridium combesii; OX = 39481 GN=queC PE=3 SV=1
MNKEKAIVVFSGGQDSTTCLFWAKKKYKEVIAVSFDYNQKHKLELDCAKDICKKYNIEHHILDLNLLNQLAPNSLTRQDITVDKSAPKEGVPNSFVDGRNLLFLSFVAVFAKQKGINTIITGVSQSDFSGYPDCRDVFIKSLNVTLNLAMDYEFEIITPLMWINKAETWKMAYDLGVLDIVKEETLTCYNGIKADGCGECPACKLRKKGYLEFEKYLMN

SEQ ID NO: 37502 - protein, 238 aa, Clostridium cylindrosporum
  REGION 1..238: note = tr|A0A0J8DCQ2|A0A0J8DCQ2_CLOCY 7-cyano-7-deazaguanine synthase OS=Clostridium cylindrosporum DSM 605 OX=1121307 GN=queC PE=3 SV=1
MILRDCYPGTSSYRIERIGDMNKKAVVVFSGGQDSTTCLFWALKEFDEVIAVTFNYNQKHSLEIDCAKDIAKELGVEHHILDMELLNQLAPNALTRDDIKIEKGEDGELPSTFVEGRNMLFLTFAGVLAKVKGAKHIVTGVCETDFSGYPDCRDVFIKSLNVTLNLAMDYDFVVHTPLMWLDKAQTWEMADKFGKLDYVREKTLTCYNGIIGDGCKECPSCILRNNGLNKYLEDKKEK

SEQ ID NO: 37503 - protein, 217 aa, Clostridium diolis; identical to SEQ ID NO: 37485
  REGION 1..217: note = tr|A0A2P8RLY6|A0A2P8RLY6_9CLOT 7-cyano-7-deazaguanine synthase OS=Clostridium diolis; OX = 223919 GN=queC PE=3 SV=1

SEQ ID NO: 37504 - protein, 224 aa, Clostridium diolis
  REGION 1..224: note = tr|A0A5A5UKF7|A0A5A5UKF7_9CLOT 7-cyano-7-deazaguanine synthase OS=Clostridium diolis; OX = 223919 GN=queC PE=3 SV=1
MSNKAVVVFSGGQDSTTCLFWALKEFDEVIAVTFDYNQKHRKEIECATSIAKELGIEHHILDMGLLNQLAPNALTRNDIEIKAGENGSLPSTFVEGRNMLFLTFAGVLAKVKGAKHIVTGVCETDFSGYPDCRDIFIKSLNVTLNLAMDYNFVVHTPLMWIDKAETWKMADDFGKLDYIREKTLTCYKGIVGDGCGECPACKLRKNGLDKYLESKKNKNIKYKI

SEQ ID NO: 37505 - protein, 222 aa, Clostridium disporicum
  REGION 1..222: note = tr|A0A174EPU1|A0A174EPU1_9CLOT 7-cyano-7-deazaguanine synthase OS=Clostridium disporicum; OX = 84024 GN=queC_2 PE=3 SV=1
MKKNKAIVVLSGGQDSTTCLFWAKKNFDEVIAVSFNYNQRNLDELDCAKVTCEKNNIEHHILDLSLLNQLTSNALTRDEISVQAKKDDGRVPNTFVDGRNLLFLSFVAVFAKQRGIQNIITGVSQSDYSGYPDCRDIFIKSLNTTLNLAMDYEFDIITPLMWIDKADTWKMADDLGIIDIIKNETITCYNGVKGNGCGNCPSCSLRKNGYKLYKEKYINNIK

SEQ ID NO: 37506 - protein, 218 aa, Clostridium disporicum
  REGION 1..218: note = tr|A0A174BDU0|A0A174BDU0_9CLOT 7-cyano-7-deazaguanine synthase OS=Clostridium disporicum; OX = 84024 GN=queC_1 PE=3 SV=1
MNKKAVVVFSGGQDSTTCLFWALKEFDEVIAVTFNYNQRHSLEIECAKNIAKELGVEHHILDMDLLNQLAPNALTRNNIEIKEGQGKEPPSTFVEGRNMLFLTFAAVLAKVKGAKHIVTGVCETDFSGYPDCRDVFIKSLNVTLNLAMDYDFVVHTPLMWIDKAQTWELADSFGKLDYIREKTLTCYNGIIGDGCGECPACKLRRNGLEKYLKIKDNK

SEQ ID NO: 37507 - protein, 222 aa, Clostridium estertheticum
  REGION 1..222: note = tr|A0A1J0GDY4|A0A1J0GDY4_9CLOT 7-cyano-7-deazaguanine synthase OS=Clostridium estertheticum subsp. estertheticum OX=1552 GN=queC PE=3; SV = 1
MNREKAVVVFSGGQDSTTCLFWALKKYKEVIAVSFDYGQKHILELDCAKTICSEHDVEFHVLDLNLLNQLAPNSLTRKDMKVDTSAPKDSVPNSFVDGRNLLFLTFVAVFAKQRGISNIITGVSQSDFSGYPDCRDVFIKSLNVTLNLAMGYDFVIETPLMWINKAETWKMAYDLGVLDVVKKQTLTCYNGIKGNGCGDCPSCKLRKKGYIEFKEKYLIQKK

SEQ ID NO: 37508 - protein, 222 aa, Clostridium felsineum
  REGION 1..222: note = tr|A0A1S8L3R0|A0A1S8L3R0_9CLOT 7-cyano-7-deazaguanine synthase OS=Clostridium felsineum DSM 794 OX=1121310 GN=queC PE=3 SV=1
MEISINKEKALVVFSGGQDSTTCLFLAKKKYKEVIAVSFDYNQKHKLELECAKDICKKYGVEHHILDMKLLNQLAPNSLTRTDIKVDENAPKEGTPNTFVDGRNLLFLTFAAVFAKQRGINNIITGVSQSDFSGYPDCRDVFIKSLNVTLNLAMDYQFVLITPLMWIDKAETWKLADDLGVLDIVKNETLTCYNGIKGNGCGNCPACKLRKHGYVEFKKLYK

SEQ ID NO: 37509 - protein, 225 aa, unidentified
  source 1..225: note = [Clostridium] fimetarium
  REGION 1..225: note = tr|A0A1I0RJ48|A0A1I0RJ48_9FIRM 7-cyano-7-deazaguanine synthase OS=[Clostridium] fimetarium OX=99656 GN=queC PE=3 SV=1
MKALVLFSGGVDSTTCLGLAIDQYGKENVIALSISYGQKHSKEIDASRKIAQYYQVEHIYLDLAKIFEYSECSLLDHSTEAIPKSDYAEQIKHTNGKPVSTYVPFRNGLFLSSAASIALSKDCSVIYYGSHSDDAAGDAYPDCSSSFNNAMNEAIYLGSGKQLRIEAPFVTWTKPDVVKKGIELKVPYELTWSCYEGGEKPCGTCGTCIDRAKAFEKNGISDPAL

SEQ ID NO: 37510 - protein, 219 aa, Clostridium formicaceticum
  REGION 1..219: note = tr|A0A1D9FGH1|A0A1D9FGH1_9CLOT 7-cyano-7-deazaguanine synthase OS=Clostridium formicaceticum OX=1497 GN=queC PE=3 SV=1
MKKAVVLLSGGLDSTTCMAVVKNEGYELYPISFNYNQRHKRELALAKKIAAYYGAEEHEIISMENVGGSALTDMSIDVPVYKGDHHIPITYVPARNILFLSYALGYAEVIGAEAIVIGVSAVDYSGYPDCRPEFIEAFQKIVDVGTAAGVEGKSIKIITPLIHLSKAETIKLGHQLQVPYHLTTSCYNGEEKACGVCDSCVLRLKGFEEAKLEDPIAYK

SEQ ID NO: 37511 - protein, 219 aa, Clostridium gasigenes
  REGION 1..219: note = tr|A0A1H0NUS8|A0A1H0NUS8_9CLOT 7-cyano-7-deazaguanine synthase OS=Clostridium gasigenes; OX = 94869 GN=queC PE=3 SV=1
MNKEKAVVVFSGGQDSTTCLFWAKERFKEVIAVSFDYNQKHKLELECAKAICKKHNVEHHILDLALLNQLAPNSLTRQDIEVDKDAPKEGTPNSFVDGRNLLFLTFVAIFAKQREINTIITGVSQSDFSGYPDCRDVFIKSLNVTLTLAMGYEFDILTPLMWINKAETWKMANDLGVLDIVKKETLTCYNGIISNGCGECPACQLRKNGYLEFKKEYLK

SEQ ID NO: 37512 - protein, 218 aa, Clostridium homopropionicum
  REGION 1..218: note = tr|A0A0L6Z6T5|A0A0L6Z6T5_9CLOT 7-cyano-7-deazaguanine synthase OS=Clostridium homopropionicum DSM 5847 OX=1121318 GN=queC PE=3 SV=1
MNKEKAVVVFSGGQDSTTCLFWAKKKFKEVIAVSFDYNQKHKLELECAKDICKKHKIEHHILDLSLLNQLAPNSLTRQDIKVDTSAPVNGVPNSFVDGRNMLFLTFVAVFAKQRRINTIITGVSQSDFSGYPDCRDVFIKSLNVTLNLAMDYQFEILTPLMWINKAETWKMSEDLGVLDIIKEETLTCYNGIKGNGCGECPACKLRKQGYLEFKKYKK

SEQ ID NO: 37513 - protein, 223 aa, unidentified
  source 1..223: note = [Clostridium] indolis
  REGION 1..223: note = tr|A0A3P6JX96|A0A3P6JX96_9FIRM 7-cyano-7-deazaguanine synthase OS=[Clostridium] indolis; OX = 69825 GN=queC PE=3 SV=1
MTQRTLNNNKAIVVFSGGQDSTTCLFWAKAHFEEVALVTFEYGQRHDTEIQVAKQIAKEQQVEHHVLDMSLLSQLTPNALTQHDMDIEEGEDGVPNTFVPARNLLFLSFAGALAYQTNAKHIITGVCETDFSGYPDCRDSFIKSMNVTLSLSMDKDFVIHTPLMWLDKKQTWALSDELGVLDYIRYQTLTCYNGIVGEGCGECPACKLRARGLNAYLEEKGAK

SEQ ID NO: 37514 - protein, 226 aa, Clostridium kluyveri
  REGION 1..226: note = sp|A5N597|QUEC_CLOK5 7-cyano-7-deazaguanine synthase; OS = Clostridium kluyveri (strain ATCC 8527 / DSM 555 / NCIMB 10680) OX=431943 GN=queC PE=3 SV=1
MKKAVVLLSGGLDSTTVLYLAKSQGYEVYAMSFDYGQRHKKEIQCARDVASGTGAADFVLVTTNMNAWGGSALTDNSIKVPEFNEESEKIPVTYVPARNMIFLSYAASYAETIGAYDIFIGVSEVDYSGYVDCRHEFIDSMEKTINLGTVCAVEHKKYIKIHAPFLYKTKSEEIKIGMDLGVKYEKTWTCYNGEEFACGICDSCRLRLEAFKEAGYKDPIKYKGEK

SEQ ID NO: 37515 - protein, 226 aa, Clostridium kluyveri
  REGION 1..226: note = tr|A0A1L5F439|A0A1L5F439_CLOKL 7-cyano-7-deazaguanine synthase OS=Clostridium kluyveri; OX = 1534 GN=queC PE=3 SV=1
MKKAVVLLSGGLDSTTVLYLAKSQGYEVYAMSFDYGQRHKKEIQCAKDIASGAGAAEFVLVTTNMNVWGGSALTDDSIKVPEFNEESEKIPVTYVPARNMIFLSYAASYAEAIGAYDIFIGVSEVDYSGYVDCRHEFIDSMEKTINLGTVCAVEHKKYIKIHAPFLHKTKSEEIKIGMNLGVKYEKTWTCYNGEKFACGICDSCRLRLKAFKEAGYKDPIKYKGEK

SEQ ID NO: 37516 - protein, 218 aa, Clostridium magnum
  REGION 1..218: note = tr|A0A162T3C3|A0A162T3C3_9CLOT 7-cyano-7-deazaguanine synthase OS=Clostridium magnum DSM 2767 OX=1121326 GN=queC PE=3 SV=1
MNKEKAIVVFSGGQDSTTCLFWAKKRYKEVIAVSFDYNQKHKLELECAKDICKKYNVEHHILDLNLLNQLAPNSLTRQDITVDKEAPKEGVPNSFVDGRNMLFLTFVAVFAKQRGINNIITGVSQSDFSGYPDCRDVFIKSLNVTLNLAMDFQFQIHTPLMWIDKAETWKMAYDLGVLDIVKNETLTCYNGVIGNGCGECPACKLRKNGYLEFKKVYL

SEQ ID NO: 37517 - protein, 219 aa, unidentified
  source 1..219: note = Clostridium neonatale
  REGION 1..219: note = tr|A0A2A7MI78|A0A2A7MI78_9CLOT 7-cyano-7-deazaguanine synthase OS=Clostridium neonatale; OX = 137838 GN=queC PE=3 SV=1
MNKKAVVVFSGGQDSTTCLFWALKNFDEVIAVTFNYNQRHKLEIECAKNIAKELNVEHHVLDMELLNQLAPNALTRNDIEITKGEDGELPSTFVEGRNLLFLSFAGVLAKVKGAKHIITGVCETDFSGYPDCRDVFIKSLNVTLNLAMNYDFVIHTPLMWIDKAETWKMADEFGKLDFIRKKTLTCYNGIIGDGCGECPSCILRKNGLNKYLKSKDAFK

SEQ ID NO: 37518 - protein, 221 aa, Clostridium novyi
  REGION 1..221: note = sp|A0Q1F7|QUEC_CLONN 7-cyano-7-deazaguanine synthase; OS = Clostridium novyi (strain NT) OX=386415 GN=queC PE=3; SV = 1
MSINNEKAIVVFSGGQDSTTCLFWTKKRFKEVIAVSFDYNQKHKLELECAKEICSKYNIEHHILDLGLLNQLAPNSLTRTDIKVDKNAPEDGVPNSFVDGRNMLFLTFVAVFAKQRGISHIITGVSQSDFSGYPDCRDVFIKSLNVTLNLAMDYEFVLHTPLMWIDKAETWKMAYDFGVLDIIKNETLTCYNGIKGNGCGECPSCKLRKKGYLKFKELYMK

SEQ ID NO: 37519 - protein, 219 aa, Clostridium novyi
  REGION 1..219: note = tr|A0A0A0ILE9|A0A0A0ILE9_CLONO 7-cyano-7-deazaguanine synthase OS=Clostridium novyi A str. 4570 OX=1444290 GN=queC PE=3 SV=1
MNNQKAIVVFSGGQDSTTCLFWAKKKFTEVIAVSFDYNQKHKLELECAKEICSKYNIEHHILDLGLLNQLAPNSLTRTDIKVDKNAPEDGVPNSFVDGRNMLFLTFVAVFAKQRGISHIITGVSQSDFSGYPDCRDVFIKSLNVTLNLAMDYEFVLHTPLMWIDKAETWKMAYDFGVLDIIKNETLTCYNGIKGNGCGECPSCKLRKKGYLKFKELYMK

SEQ ID NO: 37520 - protein, 225 aa, Clostridium pasteurianum
  REGION 1..225: note = tr|A0A1D9N298|A0A1D9N298_CLOPA 7-cyano-7-deazaguanine synthase OS=Clostridium pasteurianum OX=1501 GN=queC PE=3 SV=1
MKKAVVLLSGGLDSTTALYLAKSQGFEVYAISFNYGQRHKKEIEAAKKVAEKAEIKEHIIVNTNMNAWGGSALTDSNIQVPEGKEDREEIPVTYVPARNMIFLSYAASYAEAVGAQDIFIGVSQVDYSGYVDCRKEFIDAMELAINKGTVCAVEDNKPIKIHAPFMNMTKTEEIKLGISLGVDYSLTWTCYNGYEKACGHCDSCLLRLKAFEEAGYKDPVEYMDK

SEQ ID NO: 37521 - protein, 225 aa, Clostridium pasteurianum; identical to SEQ ID NO: 37520
  REGION 1..225: note = tr|A0A0H3J462|A0A0H3J462_CLOPA 7-cyano-7-deazaguanine synthase OS=Clostridium pasteurianum DSM 525 = ATCC 6013 OX=1262449 GN=queC PE=3; SV = 1

SEQ ID NO: 37522 - protein, 429 aa, Clostridium perfringens
  REGION 1..429: note = tr|A0A127EH07|A0A127EH07_CLOPF ATPase OS=Clostridium perfringens OX=1502 GN=JFP838_05550 PE=4 SV=1
MKIYCSLDEKEKSSLEDIGISLNINDNKIFSYTFWDNIKSLPKFISNEGLDFLYISLFVFGIDRLVYRESANDSWSRDFQVYIPVLNLEVWNENKKLVEEMLSFLSGDNWNIEFRKRDYTDKEVDLKNNIIQENCILENCNKFCMFSGGMDSFIGAIDLLSSEEGKNIIFISHYGGGKGTKEYQDILRDKFIEKYDLSKENFYSFYAVAKSGVEDTTRTRSLMFFANAIALSTVIDKEVELIIPENGVISLNIPLTNSRLGTSSTRTTHPYYFELLQNLLNNLGINIKIKNPYQFMTKGEMAQNCKDKEFFNDNIWNTMSCSHPDSGRMNGEKESCHCGNCLPCTIRRAAFKKANIIDNTRYRDTLYDSGPTARLNLNSYKLGLAKFNEKFAFLTIQKSGPITKNIDKYTKLYVRGIYELKEFLEGLNE

SEQ ID NO: 37523 - protein, 429 aa, Clostridium perfringens
  REGION 1..429: note = tr|A0A2X3BR91|A0A2X3BR91_CLOPF Putative PP-loop superfamily ATPase OS=Clostridium perfringens OX=1502; GN = NCTC8081_00612 PE=4 SV=1
MKIYCSLDEKEKSSLEDIGISLNINDNKIFSYTFWDNIKSLPKFISNEGLDFLYISLFVFGIDRLVYRESANDSWSRDFQVYIPVLNLEVWNENKKLVEEMLSFLSGDNWNIEFRKRDYTDKEVDLKNNIIQENCILENCNKFCMFSGGMDSFIGAIDLLSSEEGKNIIFISHYGGGKGTKEYQDILRDKFIEKYDLSKENFYSFYAVAKSGVEDTTRTRSLMFFANAIALSTVIDKEVELIIPENGVISLNIPLTNSRLGTSSTRTTHPYYFELLQNLLNNLGINIKIKNPYQFMTKGEMAQNCKDKEFFNDNIWNTMSCSHPDSGRMNGEKESCHCGNCLPCTIRRAAFKKANIIDNTRYRDTLYNSGPTARLNLNSYKLGLAKFNEKFAFLTIQKSGPITKNIDKYTKLYVRGIYELKEFLEGLNE

SEQ ID NO: 37524 - protein, 229 aa, unidentified
  source 1..229: note = [Clostridium] polysaccharolyticum
  REGION 1..229: note = tr|A0A1I0BGI8|A0A1I0BGI8_9FIRM 7-cyano-7-deazaguanine synthase OS=[Clostridium] polysaccharolyticum OX=29364 GN=queC PE=3 SV=1
MSSKKKAMVLFSGGVDSATALGMAIEKYGKEHVIALSVSYGQKHTKEIEAARKIAEYYGIEHLFLDLAKIFAYSDCSLLQHSDKEIPKESYAKQIAKTEGEPVSTYVPFRNGLFLASAASIALSKECSVIYYGAHADDAAGSAYPDCSMAFQEAMEQAIYVGSGQQLHVEAPFINWTKEAVVKEGIRLQVPYELTWSCYEGADKPCGVCGTCIDRANAFARNGIKDPAL

SEQ ID NO: 37525 - protein, 229 aa, unidentified
  source 1..229: note = [Clostridium] populeti
  REGION 1..229: note = tr|A0A1I6JM03|A0A1I6JM03_9FIRM 7-cyano-7-deazaguanine synthase OS=[Clostridium] populeti; OX = 37658 GN=queC PE=3 SV=1
MKAMVLFSGGLDSTTCLALAIQRFGADHVIPLSIYYGQKHTKELEAARQVLTHYKIEGLEIDLTKMFSFSNCSLLQHSDEQIPEQSYEEQLKNSNGSPVTTYVPFRNGLFLSAAACIALSKDCSYIYYGAHRDDAAGNAYPDCSSSFHDAMSTAIYEGSGKALQLIAPFVGMTKADVVQIGLSLHVPYELTWSCYEGNEKACGKCGTCRDRIQAFLKNNYTDPILYDAQ

SEQ ID NO: 37526 - protein, 218 aa, Clostridium puniceum
  REGION 1..218: note = tr|A0A1S8TII8|A0A1S8TII8_9CLOT 7-cyano-7-deazaguanine synthase OS=Clostridium puniceum; OX = 29367 GN=queC PE=3 SV=1
MNKKAVVVFSGGQDSTTCLFWALKEFEEVIAVTFDYNQKHRKEIECATSIAKELGLEHHILDMALLNQLAPNALTRDDIEIKVSKDGSLPSTFVEGRNMLFLTFAGVLAKVKGAKHIVTGVCETDFSGYPDCRDIFIKSLNVTLNLAMDYDFVVHTPLMWIDKAETWALADSFGKLDYIREKTLTCYNGVIGDGCRTCPACILRKKGLDNYLLSRNNK

SEQ ID NO: 37527 - protein, 222 aa, Clostridium roseum
  REGION 1..222: note = tr|A0A1S8L5Z8|A0A1S8L5Z8_9CLOT 7-cyano-7-deazaguanine synthase OS=Clostridium roseum; OX = 84029 GN=queC PE=3 SV=1
MEISINKDKALVVFSGGQDSTTCLFLAKKKYKEVIAVSFDYNQKHKLELECAKDICKKYGVEHHILDMKLLNQLAPNSLTRADMKVDENAPKEGTPNTFVDGRNLLFLTFAAVFAKQRGINNIITGVSQSDFSGYPDCRDVFIKSLNVTLNLAMDYQFVLITPLMWIDKAETWKLADDLGVLDIVKNETLTCYNGIKGNGCGNCPACKLRKHGYVEFKKLYK

SEQ ID NO: 37528 - protein, 218 aa, Clostridium saccharobutylicum
  REGION 1..218: note = tr|U5MSD6|U5MSD6_CLOSA 7-cyano-7-deazaguanine synthase OS=Clostridium saccharobutylicum DSM 13864; OX = 1345695 GN=queC PE=3 SV=1
MDKKKAVVVFSGGQDSTTCLFWALEKFDEVIAVTFDYNQKHKKEIECATSIAKELGVEHHILNMDLLNQLAPNALTRDDIEIKAGENGELPSTFVEGRNMLFLTFAGVLAKVKGANHIVTGVCETDFSGYPDCRDVFIKSLNVTLNLAMDYNFVVHTPLMWIDKAETWKMADSFGKLDYIREKTLTCYNGIIGDGCGECPACKLRKRGLENYLASKAK

SEQ ID NO: 37529 - protein, 218 aa, Clostridium saccharobutylicum
  REGION 1..218: note = tr|A0A1S8NBT5|A0A1S8NBT5_CLOSA 7-cyano-7-deazaguanine synthase OS=Clostridium saccharobutylicum OX=169679 GN=queC PE=3 SV=1
MDKKKAVVVFSGGQDSTTCLFWALEKFDEVIAVTFDYNQKHKKEIECATSIAKELGVEHHILNMDLLNQLAPNALTRDDIEIKAGENGELPSTFVEGRNMLFLTFAGVLAKVKGANHIVTGVCETDFSGYPDCRDVFIKSLNVTLNLAMDYNFVVHTPLMWIDKAETWKMADSFGKLDYIREKTLTCYNGIIGDGCGECPACKLRKRGLENYLASKGK

SEQ ID NO: 37530 - protein, 217 aa, Clostridium saccharoperbutylacetonicum
  REGION 1..217: note = tr|M1N0G3|M1N0G3_9CLOT 7-cyano-7-deazaguanine synthase OS=Clostridium saccharoperbutylacetonicum N1-4(HMT) OX=931276 GN=queC PE=3 SV=1
MNRKAVVVFSGGQDSTTCLFWALKEFEEVIAVTFNYNQKHKKEIECATAIAKELGIEHHILDMELLNQLAPNALTRDDIEIKAGENGGLPSTFVEGRNMLFLTFAGVLAKVKGANHIVTGVCETDFSGYPDCRDVFIKSLNVTLNLAMDYNFVVHTPLMWIDKAATWKMADDFGKLDYVREKTLTCYNGIIGDGCGECPACKLRRRGLEQYLESKTK

SEQ ID NO: 37531 - protein, 119 aa, Clostridium scindens
  REGION 1..119: note = tr|B0NH10|B0NH10_CLOS5 Uncharacterized protein; OS = Clostridium scindens (strain ATCC 35704 / DSM 5676 / VPI 13733 / 19) OX=411468 GN=CLOSCI_02765 PE=4 SV=1
MGGSVLFADPPICLTEVSMNLHEFFTDHPRVAIAFSGGVDSAYLLYAAKQYAKDVCAYYVKSAFQPQFELNDALHIATDLGVKMEIIELNILACKLRLNGISVPHARNGYSIFSGTKYY

SEQ ID NO: 37532 - protein, 101 aa, Clostridium scindens
  REGION 1..101: note = tr|A0A494WME1|A0A494WME1_CLOS5 tRNA(Ile)-lysidine synthase OS=Clostridium scindens (strain ATCC 35704 / DSM 5676 / VPI 13733 / 19) OX=411468 GN=tilS_2 PE=4 SV=1
MNLHEFFTDHPRVAIAFSGGVDSAYLLYAAKQYAKDVCAYYVKSAFQPQFELNDALHIATDLGVKMEIIELNILACKLRLNGISVPHARNGYSIFSGTKYY

SEQ ID NO: 37533 - protein, 218 aa, Clostridium sp.
  REGION 1..218: note = tr|A0A099RWQ7|A0A099RWQ7_9CLOT 7-cyano-7-deazaguanine synthase OS=Clostridium sp. HMP27; OX = 1487921 GN=queC PE=3 SV=1
MNKKKAIVVFSGGQDSTTCLFWAKEKFEEVIAVSFDYNQKHKVELECAKDICKKYNVEHHILDLNLLNQLAPNSLTRQDIIVDKNAPSEGVPNSFVDGRNMLFLTFVAVFAKQRGINTIITGVSQSDFSGYPDCRNVFIKSLNVTLNLAMDYEFEIITPLMWINKAETWKMASDLGVLNIVKEETLTCYNGIKGNGCGECPACKLRKNGYVEFKKEYL

SEQ ID NO: 37534 - protein, 226 aa, Clostridium sp.
  REGION 1..226: note = tr|R5JY29|R5JY29_9CLOT 7-cyano-7-deazaguanine synthase OS=Clostridium sp. CAG:632 OX=1262830 GN=queC; PE = 3 SV=1
MQNLKNKKQAVVIFSGGQDSTTCLFWAKARYEEVIAISFDYGQKHKKELECAKAIAQEYGVEHHIFDMSLLNQLAPNSLTRSDIKVDTDAPESGTPNSFVDGRNMVFLTYAAIFAKQRGITDLITGVSQSDFSGYPDCRDIFIKSLNTTLNLAMDYEFDIQTPLMWIDKEETWALADELGVLDVIHDKTLTCYNGIIGDGCGNCPSCKLRKKGYDLYMEHKNKKQK

SEQ ID NO: 37535 - protein, 228 aa, unidentified
  source 1..228: note = [Clostridium] spiroforme
  REGION 1..228: note = tr|A0A1Y4QPS6|A0A1Y4QPS6_9FIRM 7-cyano-7-deazaguanine synthase OS=[Clostridium] spiroforme OX=29348 GN=queC PE=3 SV=1
MKALVLFSGGIDSTTALALAIDKHGKDNVIALSISYGQKHSKEIEAANKIAKYYQIEHIYLDLEKIFSYSNCALLEHSSDKIPHESYAKQLEKTNVVTTYVPFRNGLFLSTAASIALSKDCQIIYYGAHRDDYANNAYPDCSDVFNEAMNQAIYEGSGHQLKIEAPFVKMTKADIVKIGLDLHVPYELTWSCYEGNDKPCTVCGTCIDRQEAFLKNGVIDPLLGGNNE

SEQ ID NO: 37536 - protein, 219 aa, Clostridium sporogenes
  REGION 1..219: note = tr|A0A1V9IV64|A0A1V9IV64_CLOSG 7-cyano-7-deazaguanine synthase OS=Clostridium sporogenes; OX = 1509 GN=queC PE=3 SV=1
MNKEKAIVVFSGGQDSTTCLFWAKKKYKEVIAVSFDYNQKHKLELDCAKDICKKYNIEHHILDLNLLNQLAPNSLTRQDITVDKSAPKEGVPNSFVDGRNLLFLSFVAVFAKQKGINTIITGVSQSDFSGYPDCRDVFIKSLNVTLNLAMDYEFEIITPLMWINKAETWKMAYDLGVLDIVKEETLTCYNGIKADGCGECPACKLRKKGYLEFEKEYLK

SEQ ID NO: 37537 - protein, 219 aa, Clostridium sporogenes
  REGION 1..219: note = tr|J7SG57|J7SG57_CLOS1 7-cyano-7-deazaguanine synthase OS=Clostridium sporogenes (strain ATCC 15579); OX = 471871 GN=queC PE=3 SV=1
MNKEKAIVVFSGGQDSTTCLFWAKKKYKEVIAVSFDYNQKHKLELEFAKDICKKHNIEHKILDLNLLNQLAPNSLTRQDITVDKSAPKEGVPNSFVDGRNLLFLSFVAVFAKQRGINAIITGVSQSDFSGYPDCRDVFIKSLNVTLNLAMDYEFEILTPLMWINKAETWKMAYDLGVLDIVKEETLTCYNGIKADGCGECPACKLRKKGYLEFEKEYLK

SEQ ID NO: 37538 - protein, 215 aa, unidentified
  source 1..215: note = Clostridium taeniosporum
  REGION 1..215: note = tr|A0A1D7XK70|A0A1D7XK70_9CLOT 7-cyano-7-deazaguanine synthase OS=Clostridium taeniosporum OX=394958 GN=queC PE=3 SV=1
MNKEKAIVVFSGGQDSTTCLFWAKKRFKEVIAVSFNYNQKHKLELECAKNICKKYNVEHHILDLNLLNQLAPNSLTRQDINVDKDAPKEGVPNSFVDGRNMLFLTFVAVFAKQREINTIITGVSQSDFSGYPDCRDVFIKSLNVTLNLAMDYQFEILTPLMWIDKAETWKMADDLGVLNIVKEETLTCYNGIIGNGCGECPACKLRKNGYLEFKR

SEQ ID NO: 37539 - protein, 218 aa, Clostridium tagluense
  REGION 1..218: note = tr|A0A401UUN0|A0A401UUN0_9CLOT 7-cyano-7-deazaguanine synthase OS=Clostridium tagluense; OX = 360422 GN=queC PE=3 SV=1
MNSEKAVVVFSGGQDSTTCLFWALKKYKEVIAISFDYSQKHILELDCAKDICKKHGVEYHSLDLNLLNQLAPNSLTRKDMIVDTDAPSDGVPNSFVDGRNLLFLTFVAVFAKQRGINNIITGVSQSDFSGYPDCRDVFIKSLNVTLNLAMGYDFVIETPLMWINKAETWKMAYDLGVLPVVKEDTLTCYNGIKGNGCGDCPSCKLRKKGYLEFKEKYL

SEQ ID NO: 37540 - protein, 219 aa, Clostridium tepidiprofundi
  REGION 1..219: note = tr|A0A151B397|A0A151B397_9CLOT 7-cyano-7-deazaguanine synthase OS=Clostridium tepidiprofundi DSM 19306 OX=1121338 GN=queC PE=3 SV=1
MNKEKAVVVFSGGQDSTTCLFWAKKRFKEVIAVSFDYNQRHKLELECAKNICNKYGVEHHILDLTLLNQLAPNSLTRTDIDVDKDAPKDGVPNSFVDGRNLLFLSFVAVFAKQRGVNHIITGVSQSDFSGYPDCRDVFIKSLNVTLNLAMDYEFVIHTPLMWINKEETWKMAYDLGVLDIIKNETLTCYNGIIGDGCGECPSCKLRMKGYLDFKEKYLK

SEQ ID NO: 37541 - protein, 219 aa, unidentified
  source 1..219: note = Clostridium tepidum
  REGION 1..219: note = tr|A0A1S9I1C7|A0A1S9I1C7_9CLOT 7-cyano-7-deazaguanine synthase OS=Clostridium tepidum; OX = 1962263 GN=queC PE=3 SV=1
MNKEKAIVVFSGGQDSTTCLFWAKKKYKEVIAVSFDYNQKHKLELECAKDICKKYNIEHKILDLNLLNQLAPNSLTRQDITVDKSAPKEGVPNSFVDGRNLLFLSFVAVFAKQRGINTIITGVSQSDFSGYPDCRDVFIKSLNVTLNLAMDYEFEILTPLMWINKAETWKMAHDLGVLNIVKEETLTCYNGIKADGCGECPACKLRKKGYLEFEKDLMK

SEQ ID NO: 37542 - protein, 218 aa, Clostridium tetanomorphum
  REGION 1..218: note = tr|A0A037Z8M2|A0A037Z8M2_CLOTT 7-cyano-7-deazaguanine synthase OS=Clostridium tetanomorphum DSM 665 OX=1230342 GN=queC PE=3 SV=1
MNKEKAVVVFSGGQDSTTCLFWAKKKYKEVLAVSFDYNQKHKLELQCAKDICKKYTVEHHILDLNLLNQLAPNSLTRQDIKVDKDAPLDGVPNSFVDGRNMLFLTFVAVFAKQRGINTIITGVSQSDFSGYPDCRDVFIKSLNVTLNLAMDYKFQIITPLMWINKAETWKMAYDLGVLPIVKEETLTCYNGIKGNGCGECPACKLRKNGYLEFKKTYL

SEQ ID NO: 37543 - protein, 221 aa, unidentified
  source 1..221: note = [Clostridium] thermoalcaliphilum
  REGION 1..221: note = tr|A0A1V4IBS0|A0A1V4IBS0_9FIRM 7-cyano-7-deazaguanine synthase OS=[Clostridium] thermoalcaliphilum OX=29349 GN=queC PE=3 SV=1
MNNEKAVVVFSGGQDSTTCLFWAKKKFKEVIAVSFDYNQKHKLELECAKKICKEYGFEHHILDLSLLNQLAPNSLTRVDIKVDKKQEDDKLPNSFVDGRNLLFLSFVAIFAKQRNIRNIVTGVSESDFSGYPDCRDVFIKSTNVTLNLAMDYQFEIYTPLMWINKAQTWKMAYDLGVLDIIKNETLTCYNGIKGEGCNDCPACKLRSRGYLEFENLYLNKN

SEQ ID NO: 37544 - protein, 219 aa, Clostridium thermobutyricum
  REGION 1..219: note = tr|A0A1V4SZ04|A0A1V4SZ04_9CLOT 7-cyano-7-deazaguanine synthase OS=Clostridium thermobutyricum DSM 4928 OX=1121339 GN=queC PE=3 SV=1
MVNDKAVVVFSGGQDSTTCLFWAKKRFKEVIAVSFDYGQKHKAELDCAREICKKYSVEHYILDLGLLNQLAQNSLTRVDIEVDKDKPKDSLPNSFVDGRNLLFLSFVAVLAKQKGTGNIITGVSQSDFSGYPDCRDVFIKSLNVTLNLSMDYEFNIITPLMWIDKADTWKMADDLGVLDLVKNETLTCYNGIKGDGCGDCPSCKLRSHGFEEFKRRYNK

SEQ ID NO: 37545 - protein, 219 aa, Clostridium thermobutyricum
  REGION 1..219: note = tr|N9WAR6|N9WAR6_9CLOT 7-cyano-7-deazaguanine synthase OS=Clostridium thermobutyricum OX=29372 GN=queC; PE = 3 SV=1
MVNDKAVVVFSGGQDSTTCLFWAKKRFKEVIAVSFDYGQKHKAELDCAREICKKYSVEHYILDLGLLNQLAPNSLTRVDIEVDKDKPKDSLPNSFVDGRNLLFLSFVAVLAKQKGTGNIITGVSQSDFSGYPDCRDVFIKSLNVTLNLSMDYEFNIITPLMWIDKADTWKMADDLGVLDLVKNETLTCYNGIKGEGCGDCPSCKLRSHGFEEFKRRYNK

SEQ ID NO: 37546 - protein, 225 aa, Clostridium thermopalmarium
  REGION 1..225: note = tr|A0A2T0AQI7|A0A2T0AQI7_9CLOT 7-cyano-7-deazaguanine synthase OS=Clostridium thermopalmarium DSM 5974 OX=1121340 GN=queC PE=3 SV=1
MKALVLFSGGVDSTTCLALAIYKYGKENVIALSIFYGQKHVKELEASKKIAEYYEVEHISLDVAKIFEHSECCLLDHSKQEIPKGDYFSQLKEASGNPVLTYVPFRNGLFLSCAASIALSKGCNVIYYGAHRDDAAGNAYPDCSTSFYNAMNEAIYEGSGKQLHIEAPFISLTKADIVKKGIELKVPYQMTWSCYEGGEKPCGVCGTCIDRAKAFEKNGIKDLTI

SEQ ID NO: 37547 - protein, 228 aa, Clostridium uliginosum
  REGION 1..228: note = tr|A0A1I1GXQ3|A0A1I1GXQ3_9CLOT 7-cyano-7-deazaguanine synthase OS=Clostridium uliginosum; OX = 119641 GN=queC PE=3 SV=1
MNKEKAIVVFSGGQDSTTCLFWAKKRFKEVIAVSFDYNQKHKLELECARDICKKYNVEHHILDLNLLNQLAPNSLTRQDINVDKDTPKEGPPNSFVDGRNMLFLTFVAVFAKQRGINNIITGVSQSDFSGYPDCRDVFIKSLNVTLNLAMDYQFEILTPLMWINKAETWKMANDLGVLNIVKEETLTCYNGIIGNGCGECPACKLRRNGYLEFKKEYLKYVEEKIKNE

SEQ ID NO: 37548 - protein, 219 aa, unidentified
  source 1..219: note = Clostridium ventriculi
  REGION 1..219: note = tr|A0A173WTD2|A0A173WTD2_CLOVE 7-cyano-7-deazaguanine synthase OS=Clostridium ventriculi; OX = 1267 GN=queC PE=3 SV=1
MNKEKAVVVFSGGQDSTTCLFWAKKRYKEVIAVSFDYGQKHSLELECAKDICKKYDVEHHIMDLNLLNQLAPNSLTRVDIKVDKKKEEDKLPNSFVDGRNMLFLTFVAVFAKQRGINTIITGVSQSDFSGYPDCRDVFIKSLNVTLNLAMDYQFEVLTPLMWIDKAETWKLADDLGVLDIVKNETLTCYNGIKGNGCGECPACTLRKNGYLKFKEQFKK

SEQ ID NO: 37549 - protein, 219 aa, Clostridium vincentii
  REGION 1..219: note = tr|A0A2T0BE35|A0A2T0BE35_9CLOT 7-cyano-7-deazaguanine synthase OS=Clostridium vincentii; OX = 52704 GN=queC PE=3 SV=1
MINGKAVVVFSGGQDSTTCLFWAKKNFKEVITVSFDYNQKHVAELDCAKKIAKELGCENHVLDMKLLGQLAPNALTRNDIDIKLGEEGELPSTFVDGRNMLFLTFAAVFAKQVGARHLITGVCETDFSGYPDCRDVFIKSLNVTLNLAMDFQFVIHTPIMWIDKEETWKMADEMGALEFIREKTLTCYNGIIGDGCGECPSCKLRKRGLDNYLNSKKIK

SEQ ID NO: 37550 - protein, 232 aa, Cobetia crustatorum
  REGION 1..232: note = tr|A0A558HNZ3|A0A558HNZ3_9GAMM 7-cyano-7-deazaguanine synthase OS=Cobetia crustatorum; OX = 553385 GN=queC PE=3 SV=1
MVSAPRAVVIYSGGMDSYTVLHQALKEGFEVHALSFHYGQRHSRELDVARAVCESLGVAHEIVDIRAIHGLISNSALTNADQAMPKADYDEASMTSTVVPNRNMILLSLAIAKAVNIDADVCFYGAHGGDHVLYPDCRPEFVDKMNAVAAIANFSPIEIRAPFLHSRKDEILAAGIAMQLDYSQTWTCYEGRELACGECGSCRERLEAFASHGLSDPLGYEMPATAKGTDTL

SEQ ID NO: 37551 - protein, 247 aa, Cobetia marina
  REGION 1..247: note = tr|A0A4U1LY37|A0A4U1LY37_COBMA 7-cyano-7-deazaguanine synthase OS=Cobetia marina OX=28258; GN = queC PE=3 SV=1
MTLNVPNSAVSAPACSAERPRAVVIYSGGMDSYTVLHQALKEGFEVHALSFHYGQRHSRELDVARQVCESLGVAHEVVDIRAIHGLIDNSALTNSDQAMPKADYDEDSMTSTVVPNRNMILLSLAIAKAVNIEAGVCFYGAHGGDHVLYPDCRPEFVEKMNAVAAIANFSPVEIRAPFLHASKDEILAAGIAMQLDYAQTWTCYEGRELACGECGSCRERLAAFAAHGLSDPLGYDTTDSAKGAGTL

SEQ ID NO: 37552 - protein, 247 aa, Cobetia marina
  REGION 1..247: note = tr|A0A4Y4GPF7|A0A4Y4GPF7_COBMA 7-cyano-7-deazaguanine synthase OS=Cobetia marina OX=28258; GN = queC PE=3 SV=1
MTLNVPNSAVSAPASSAERPRAVVIYSGGMDSYTVLHQALKEGFEVHALSFHYGQRHSRELDVARQVCESLGVAHEVVDIRAIHGLIDNSALTNSDQAMPKADYDEDSMTSTVVPNRNMILLSLAIAKAVNIEAGVCFYGAHGGDHVLYPDCRPEFVEKMNAVAAIANFSPVEIRAPFLHASKDEILAAGIAMQLDYAQTWTCYEGRELACGECGSCRERLAAFAAHGLSDPLGYDTTDSAKGAGTL

SEQ ID NO: 37553 - protein, 247 aa, Cobetia sp.
  REGION 1..247: note = tr|A0A2S4K6B3|A0A2S4K6B3_9GAMM 7-cyano-7-deazaguanine synthase OS=Cobetia sp. MM1IDA2H-1; OX = 1268241 GN=queC PE=3 SV=1
MTLNVPNSAVSAPASSAERPRAVVIYSGGMDSYTVLHQALKEGFEVHALSFHYGQRHSRELDVARQVCESLGVAHEVVDIRAIHGLIDNSALTNSDQAMPKADYDEDSMTSTVVPNRNMILLSLAIAKAVNIEAGVCFYGAHGGDHVLYPDCRPEFVEKMNAVAAIANFSPVEIRAPFLHASKDEILAAGIAMQLDYAQTWTCYEGRELACGECGSCRERLAAFAAHGLSDPLGYDTADSAKGAGTL

SEQ ID NO: 37554 - protein, 247 aa, Cobetia sp.
  REGION 1..247: note = tr|A0A2E4Q197|A0A2E4Q197_9GAMM 7-cyano-7-deazaguanine synthase OS=Cobetia sp. OX=1873876; GN = queC PE=3 SV=1
MTLNVQNSAVPASASSAERPRAVVIYSGGMDSYTVLHQALKEGFEVHALSFHYGQRHSRELDVARQVCESLGVAHEVVDIRAIHGLIDNSALTNSDQAMPKADYDEASMTSTVVPNRNMILLSLAIAKAVNIEAEVCFYGAHGGDHVLYPDCRPEFVDKMNAVAAIANFSPVEIRAPFLHASKDEILAAGIAMQLDYAQTWTCYEGRELACGECGSCRERLEAFAAHGLSDPLGYETTDSAKGAGTL

SEQ ID NO: 37555 - protein, 226 aa, Cocleimonas flava
  REGION 1..226: note = tr|A0A4R1F466|A0A4R1F466_9GAMM 7-cyano-7-deazaguanine synthase OS=Cocleimonas flava; OX = 634765 GN=queC PE=3 SV=1
MKALVVCSGGLDSVTLSYKVASEGTLSSLLSFDYGQRHRKELDFAAHCAKQLGVKHTIIDLSQVGKQLTSALTDDIDVPDGHYAEESMKTTVVPNRNAIMMTIAFGLASSQNADTVAMAVHGGDHFIYPDCRPDFIESFAAMQKMALDGMSEIELYTPYLHLDKTEIARDSAKYSVPVVDTWSCYKGQEKHCGRCGTCVERREAFHLAGIEDPTEYADADYWQSVT

SEQ ID NO: 37556 - protein, 234 aa, unidentified
  source 1..234: note = Cognatishimia maritima
  REGION 1..234: note = tr|A0A1M5L5Z3|A0A1M5L5Z3_9RHOB 7-cyano-7-deazaguanine synthase OS=Cognatishimia maritima; OX = 870908 GN=queC PE=3 SV=1
MKTLVICSGGLDSVSLAYKVAAEHELVGLISFDYGQRHKKEVGYAARAAERLGVPHDLIDMTAIGAFLSGSALTDDLDVPDGHYAEDNMKVTVVPNRNAIMLAVAFGVAAAKGADAVAAAVHGGDHFIYPDCRPGFIDAFQKMQDAALEGYAEVKLYTPFVHIPKSDIVLEGAKVNTPFADTWSCYKGGETHCGRCGTCVERREAFHIAGVEDPTVYADPDYWKSVTIDAEGGA

SEQ ID NO: 37557 - protein, 206 aa, unidentified
  source 1..206: note = Cognatiyoonia koreensis
  REGION 1..206: note = tr|A0A1I0RTN9|A0A1I0RTN9_9RHOB 7-cyano-7-deazaguanine synthase OS=Cognatiyoonia koreensis; OX = 364200 GN=SAMN04488515_3239 PE=3 SV=1
MKRALVMVSGGLDSTTVCHLLVKAGTEVHPIFFDYGQHCAETEWAKVNEVLPTEVLPPERINLSDIFKGSTSRMIVEADLWTEAVVDDDLYIPYRTMLFFASAAARAQTVGILDVYSGFINSNHAKEIDCSTEFMNGLDELSVGVGAVRFHAPFGTWLKSDVVREAVKLGVPVGRTFSCQASSSFPCGACPNCVERLNALTEAGIA

SEQ ID NO: 37558 - protein, 237 aa, Cohaesibacter gelatinilyticus
  REGION 1..237: note = tr|A0A285N8B4|A0A285N8B4_9RHIZ 7-cyano-7-deazaguanine synthase OS=Cohaesibacter gelatinilyticus OX=372072 GN=queC PE=3 SV=1
MKVLVVCSGGLDSVSLAHKVAAEQELVGLISFDYGQRHKCELDYAEQCAKRLGVPFDLIDMSAMGKHLSGSALTDDIDVPEGHYEEGSMKTTVVPNRNAIMLSIAFGIAAAKGADAVATAVHGGDHFIYPDCRPDFVQAFEDMQKKALDGYASVSLYSPFVHKPKSAIVTEGAKYETPFELTWSCYKGGDAHCGRCGTCVERREAFFVAGIEDPTEYLDADFWKSALDAAPKQETSA

SEQ ID NO: 37559 - protein, 213 aa, Cohaesibacter sp.
  REGION 1..213: note = tr|A0A2N5XMP0|A0A2N5XMP0_9RHIZ 7-cyano-7-deazaguanine synthase OS=Cohaesibacter sp. H1304; OX = 2067669 GN=C0081_16740 PE=3 SV=1
MKKAVLLASGGLDSTTVAYGLFADGIDVFPLFFDYGQHCVETEWGRVNEVLPRDMRSPERCDISDIFKGSTSRLIKEANLWQDNVADDDLYVPYRTLLFFAAAAARAQTLGIFDVYTGFVNSNHAKEIDCTAEFMNQMDGLIDNIGPVRFTSPFRFSSKTTVVEEALRRGVPIGRTFSCQAASDFPCGACPNCVERLHALKDAAVVISKAQVD

SEQ ID NO: 37560 - protein, 221 aa, Cohnella luojiensis
  REGION 1..221: note = tr|A0A4Y8LVJ4|A0A4Y8LVJ4_9BACL 7-cyano-7-deazaguanine synthase OS=Cohnella luojiensis; OX = 652876 GN=queC PE=3 SV=1
MKSGKAVVVFSGGQDSTTCLFWALQRFEEVEAVTFDYGQRHKLELECAARIASDLKIRHHVLDMSLLGQLTPNALTRHDMAIEQKEGELPSTFVDGRNLLFLSFAAVLAKQVGARNIVTGVCQTDFSGYPDCRDVFIKSLNVTLNLSMDYEFVIDTPLMWLNKAQTWQLADELGAFQYVRDNTLTCYEGIMADGCGECPACLLRARGLREFEAASKEGRRV

SEQ ID NO: 37561 - protein, 214 aa, unidentified
  source 1..214: note = Cohnella lupini
  REGION 1..214: note = tr|A0A3D9IA67|A0A3D9IA67_9BACL 7-cyano-7-deazaguanine synthase OS=Cohnella lupini; OX = 1294267 GN=queC PE=3 SV=1
MVFSGGQDSTTCLFWALQRFEEVEAVTFDYGQRHKLELECAARIAAELKVRHHVLDMSLLGQLTPNALTRHDRAIEHNEGELPSTFVDGRNLLFMSFAGVLAKQVGARNIVTGVCQTDFSGYPDCRDIFVKSLNVTLNLSMDYEFVIDTPLMWLTKAQTWQLADDLGAYEYVRDNTLTCYEGIMADGCGECPACLLRSRGLREFEAASKEGRRL

SEQ ID NO: 37562 - protein, 221 aa, Cohnella sp.
  REGION 1..221: note = tr|A0A1I0ZMS2|A0A1I0ZMS2_9BACL 7-cyano-7-deazaguanine synthase OS=Cohnella sp. OV330; OX = 1855288 GN=queC PE=3 SV=1
MKQEKAVVVFSGGQDSTTCLFWAKENFAEVETVTFKYGQRHALETEIAAAISEELGVRHHLLDMSLLGQLAPNALTRGDIEIKQDEGALPTTFVDGRNLLFLSFAAVLAKQLGAKHIVTGVCETDFSGYPDCRDVFVKSLNVTLNLAMDYPFVIDTPLMWLNKAQTWELADRLGAFEFVRDRTLTCYNGIPASGCGECPACKLRANGLSTYLREAGKEGAR

SEQ ID NO: 37563 - protein, 235 aa, Cohnella sp.
  REGION 1..235: note = tr|A0A3G3JZT9|A0A3G3JZT9_9BACL 7-cyano-7-deazaguanine synthase OS=Cohnella sp. 18JY8-7; OX = 2480923 GN=queC PE=3 SV=1
MKQHKAVVVFSGGQDSTTCLFWAMQRFGEVEAVTFDYGQRHRLELDCAAQIAKEQKVRHHVLDMALLNQLAPNALTRQDISIEHDEGALPTTFVDGRNLLFLTFAAILAKQIGARHIVTGVCETDFSGYPDCRDVFIKSLNVTLNLAMEYPFVIETPLMWLTKADTWRMADELGVLEYVRERTLTCYNGIVAEGCGECPSCLLRKKGLEEYLLKKKEGLSDDSTNLSIRRPSFLL

SEQ ID NO: 37564 - protein, 232 aa, unidentified
  source 1..232: note = Coleofasciculus chthonoplastes
  REGION 1..232: note = tr|B4VXJ0|B4VXJ0_9CYAN 7-cyano-7-deazaguanine synthase OS=Coleofasciculus chthonoplastes PCC 7420; OX = 118168 GN=queC PE=3 SV=1
MTGVKMSKAVVLLSGGLDSSTVLYQAKAEGYECYAISFDYQQRHQRELESAIAIAKGAGVKYHQVVRFDLSQWGGSALTDDTLDLPQTRSLQQMSQSIPITYVPARNTIFLSFGLSYAEAIGATALYLGVNALDYSGYPDCRPDYIQAMQEVFRLGTKQGREGEPIQIITPLIQLKKTEIIELGNKLGVPWHETWSCYAGDEVACGVCDSCRLRLAAFAELGLNDPLSYKPL

SEQ ID NO: 37565 - protein, 478 aa, unidentified
  source 1..478: note = Coleofasciculus chthonoplastes
  REGION 1..478: note = tr|B4VPR7|B4VPR7_9CYAN Uncharacterized protein; OS = Coleofasciculus chthonoplastes PCC 7420 OX=118168; GN = MC7420_5373 PE=4 SV=1
MNWGLDMMKKHYTHDSDYTLRFSPVLNSNGCVHFIDHSRNKENTFGLTVDDQEFGYRVQPRFPSVIADLIDLAVAIHASDRLAVQHLRQEQSRIRVVLPVRHPELLNTKSFQAKLENLLRWATGSRWAFDFQKRTASGRIVEQEERIFPNDPEECEVALWSGGLDALAGLYSRLQTNHAASFMLFGTGSNNNVYARQEHVFKALQPSFRDRLNLCRVPIRFSDSSRHQKNKIPRARGIVFTLLGAAYAYLMGQRVLYVYENGIGAINLPYRASAVGLDHSRSVHPLTLLMVSDVVSELFGEEFRVRNPFLFWTKAEMCRALAEDGRSDLPPLTKSCDSPHRQPQQPIQCGYCSSCILRKQALAASKIEDRTRYVVPHGNRPAKDPSLHLRNMLVQVCTFRRLLSASDQWEALTREFLQLDDIVDRSAAAENLLPADMQSRLIKLYQTYVAEWDTVESRIAAEILDQDSNQQASSALAL

SEQ ID NO: 37566 - protein, 236 aa, Collimonas arenae
  REGION 1..236: note = tr|A0A0A1FG63|A0A0A1FG63_9BURK 7-cyano-7-deazaguanine synthase OS=Collimonas arenae; OX = 279058 GN=queC PE=3 SV=1
MATPHGAIVLFSGGQDSTTCLAWALERYERVETIGFDYGQRHAVELTVRPVLLQKIRAQFPQWADKLGEDHMIDLSLISKISSTAMTEDVEIVMQENGLPNTFVPGRNLLFMTVAATVAYRRGLNVLVGGMCETDFSGYPDCRDDTMKALQVALNLGMATQLKLETPLMWIDKSETWKLAQDLGGDSLVDLIRADTHTCYLGERGALHDWGYGCGTCPACALRARGYQQFKQTAGS

SEQ ID NO: 37567 - protein, 236 aa, Collimonas arenae
  REGION 1..236: note = tr|A0A561GIK1|A0A561GIK1_9BURK 7-cyano-7-deazaguanine synthase OS=Collimonas arenae; OX = 279058 GN=queC PE=3 SV=1
MTTPNGAIVLFSGGQDSTTCLAWALSRYERVETIGFDYGQRHAVELTVRPVLLQKIRAQFPQWAGKLGEDHLIDLSLISKISSTAMTEDVEIVMQENGLPNTFVPGRNLLFMTVAATVAYRRGLNVLVGGMCETDFSGYPDCRDDTMKALQVALNLGMATQLKLETPLMWIDKSETWKLAQDLGGDALVDLIRAETHTCYLGQRGALHDWGYGCGTCPACALRARGYQQFRQAAGA

SEQ ID NO: 37568 - protein, 236 aa, Collimonas fungivorans
  REGION 1..236: note = tr|A0A127PI32|A0A127PI32_9BURK 7-cyano-7-deazaguanine synthase OS=Collimonas fungivorans; OX = 158899 GN=queC PE=3 SV=1
MTTPNGAIVLFSGGQDSTTCLAWALSRYERVETIGFDYGQRHAVELTVRPVLLQKIRAQFPQWAGKLGEDHLIDLSLISKISSTAMTEDVEIVMQENGLPNTFVPGRNLLFMTVAATVAYRRGLNVLVGGMCETDFSGYPDCRDDTMKALQVALNLGMATQLKVETPLMWIDKSETWKLAQDLGGDTLVDLIRADTHTCYLGQRGALHDWGYGCGTCPACALRARGYQQFRSTEGV

SEQ ID NO: 37569 - protein, 236 aa, Collimonas fungivorans
  REGION 1..236: note = tr|Q6J6B1|Q6J6B1_9BURK 7-cyano-7-deazaguanine synthase OS=Collimonas fungivorans OX=158899 GN=queC PE=3; SV = 1
MTTPNGAIVLFSGGQDSTTCLAWALSRYERVETIGFDYGQRHAVELTVRPVLLQKIRAQFPQWAGKLGEDHLIDLSLISKISSTAMTEDVEIVMQENGLPNTFVPGRNLLFMTVAATVAYRRGLNVLVGGMCETDFSGYPDCRDDTMKALQVALNLGMATQIKLETPLMWIDKSETWKLAQDLGGDALVDLIRADTHTCYLGQRGALHDWGYGCGTCPACALRARGYQQFRSTGGV

SEQ ID NO: 37570 - protein, 322 aa, Collimonas pratensis
  REGION 1..322: note = tr|A0A127QAK9|A0A127QAK9_9BURK ExsB family protein; OS = Collimonas pratensis OX=279113 GN=CPter91_4751 PE=4 SV=1
MDSLSIAWWKRPDLAITINYGQLAAKAEILASQTVCAELNIEHIVIDLDCRALGSGDMARNNANVNAPASDWWPYHNQLLITLAAMKAISLNVTHLWIETVKSDGIHLDGTPNFVASICKLLIEQDGAMQVEAPAIEMSTGELVRIADRALLSDGFPPSFWSGSPAEIGAEMKAVGAHQADFIVAQTSDRDAGCMEVASPPAECAGRTGSFYWDENNIATPNFHQSQSAISDYRAVLSNGLPILWWQTPMSVPSATTGCTNQHYRYNRVDYMLRNPQEYGDIHTFAIVFRAGGAFQTTINTDGGQFARLLSQYFTQGGATLR

SEQ ID NO: 37571 - protein, 236 aa, Collimonas pratensis
  REGION 1..236: note = tr|A0A127QBA8|A0A127QBA8_9BURK 7-cyano-7-deazaguanine synthase OS=Collimonas pratensis; OX = 279113 GN=queC PE=3 SV=1
MTTPNGAIVLFSGGQDSTTCLAWALARYDRVETIGFDYGQRHAVELTVRPILLQKIRAQFPHWADKLGEDHMIDLSLISKISSTAMTEDVEIVMQENGLPNTFVPGRNLLFMTVAATVAYRRGLNVLVGGMCETDFSGYPDCRDDTMKALQVALNLGMATQLKLETPLMWIDKSETWKLAQDLGGDALVDLIRADTHTCYLGERGALHDWGYGCGTCPACALRARGYQQFRQGPAA

SEQ ID NO: 37572 - protein, 236 aa, Collimonas sp.
  REGION 1..236: note = tr|A0A1H3J287|A0A1H3J287_9BURK 7-cyano-7-deazaguanine synthase OS=Collimonas sp. OK242; OX = 1798195 GN=queC PE=3 SV=1
MTTPNGAIVLFSGGQDSTTCLAWALARYERVETIGFDYGQRHAVELTVRPVLLQKIRAQFPQWAGKLGEDHMIDLSLISKISSTAMTEDVEIVMQENGLPNTFVPGRNLLFMTVAATVAYRRGLNVLVGGMCETDFSGYPDCRDDTMKALQVALNLGMATRLKLETPLMWIDKSETWKLAQDLGGDALVDLIRADTHTCYLGERGTLHDWGYGCGTCPACALRARGYQQFKQNPTA

SEQ ID NO: 37573 - protein, 236 aa, Collimonas sp.
  REGION 1..236: note = tr|A0A1I1H062|A0A1I1H062_9BURK 7-cyano-7-deazaguanine synthase OS=Collimonas sp. OK412; OX = 1801619 GN=queC PE=3 SV=1
MTTPNGAIVLFSGGQDSTTCLAWALSRYERVETIGFDYGQRHAVELTVRPVLLQKIRAQFPQWAGKLGEDHLIDLSLISKISSTAMTEDVEIVMQENGLPNTFVPGRNLLFMTVAATVAYRRGLNVLVGGMCETDFSGYPDCRDDTMKALQVALNLGMATQLKLETPLMWIDKSETWKLAQDLGGDTLVDLIRADTHTCYLGQRGALHDWGYGCGTCPACALRARGYQQFRQAAGA

SEQ ID NO: 37574 - protein, 218 aa, unidentified
  source 1..218: note = Colwellia beringensis
  REGION 1..218: note = tr|A0A222GCE7|A0A222GCE7_9GAMM 7-cyano-7-deazaguanine synthase OS=Colwellia beringensis; OX = 1967665 GN=queC PE=3 SV=1
MSNKVVVIFSGGMDSFTVLHRALKDGKEVYALTFDYGQKHVKEIACASKVCQQLGVAHKVIDISAINQLLAGSSLTDDIDIPEGHYEAESMKSTVVPNRNMILLSLAVGYAVSVKASQVYYGAHSGDHAIYPDCRPEFVMKMNDVCKIANYEAVEIFSPYLTNSKSDILTDGLNMGLSYDDTWTCYNGREKACGKCGACQERLEAFADNNVTDPLAYE

SEQ ID NO: 37575 - protein, 218 aa, Colwellia chukchiensis
  REGION 1..218: note = tr|A0A1H7M9Z5|A0A1H7M9Z5_9GAMM 7-cyano-7-deazaguanine synthase OS=Colwellia chukchiensis; OX = 641665 GN=queC PE=3 SV=1
MSNKVVVIFSGGMDSFTVLNRALKDGKEVYALTFDYGQKHVKEIACASKVCQQLGVSHKVIDISAINQLLAGSSLTDDIEIPEGHYQADNMKSTVVPNRNMILLSLAVGYAVSVEAEQVYYGAHSGDHDIYPDCRPEFVMKMNEVCQIANYQAVEIFSPYLTNNKSEILTDGLKMGLDYQDTWTCYNGRKKACGKCGACQERLEAFADNNVTDPIAYE

SEQ ID NO: 37576 - protein, 218 aa, Colwellia demingiae
  REGION 1..218: note = tr|A0A5C6QA93|A0A5C6QA93_9GAMM 7-cyano-7-deazaguanine synthase OS=Colwellia demingiae; OX = 89401 GN=queC PE=3 SV=1
MAEKVVVIYSGGMDSFTVLNRARKDGKEVFALSFNYGQRHVKELECASTVCNELAINHKVIDISAINQLLAGSSLTDDIDIPEGHYEADSMKSTVVPNRNMILLSLAVAYAVSVGADQVYYGAHSGDHAIYPDCRPEFVEKMNDVCKIANYESVEIFSPYLSVDKTAILADGIAMGLDYSNTWTCYNGRDKACGKCGACEERLQAFEENDVTDPITYE

SEQ ID NO: 37577 - protein, 218 aa, Colwellia hornerae
  REGION 1..218: note = tr|A0A5C6QM67|A0A5C6QM67_9GAMM 7-cyano-7-deazaguanine synthase OS=Colwellia hornerae; OX = 89402 GN=queC PE=3 SV=1
MTNKVVVIYSGGMDSFTVLNRALHDGKEVFALTFDYGQRHVKEIKFASTVCQSLDVNHKIIDISAINQLLAGSSLTDNIDIPEGHYEAESMKSTVVPNRNMILLSLAVGYAVSVGASQVYYGAHSGDHAIYPDCRPEFVMKMNEVCKIANYESVEIFSPYLTVTKSDILTDGLKMGLSYDNTWTCYNGREKACGKCGACQERLEAFSDNNVSDPLSYE

SEQ ID NO: 37578 - protein, 218 aa, unidentified
  source 1..218: note = Colwellia marinimaniae
  REGION 1..218: note = tr|A0A1Z5I5Z5|A0A1Z5I5Z5_9GAMM 7-cyano-7-deazaguanine synthase OS=Colwellia marinimaniae; OX = 1513592 GN=queC PE=3 SV=1
MTEKVVVIYSGGMDSFTVLNRAQKDGKQVFALSFNYGQRHVKELQCASTVCNGLGINHKVIDISAINQLFAGSSLTDDIDIPEGHYEADSMKSTLVPNRNMILLSLAVAYAVSVGAEQVYYGAHSGDHAIYPDCRPEFVEKMNDVCKIANYESVEIFSPYLTVNKTAILADGIAMGLDYSNTWTCYNGRDKACGKCGACQERLEAFFENNITDPIPYE

SEQ ID NO: 37579 - protein, 218 aa, Colwellia psychrerythraea
  REGION 1..218: note = sp|Q480C9|QUEC1_COLP3 7-cyano-7-deazaguanine synthase 1 OS=Colwellia psychrerythraea (strain 34H / ATCC BAA-681) OX=167879 GN=queC1 PE=3 SV=1
MAEKVVVIYSGGMDSFTVLNRAKKDGKEVFALSFDYGQRHVKELECASIVCKELAVNHKVIDISAINQLLAGSSLTDDIDIPEGHYEAESMKSTVVPNRNMILLSLAVAYAVSVGAEQVYYGAHSGDHAIYPDCRPEFVEKMNDVCKIANYESVEIFSPYLSVDKTAILADGIKMGLDYSNTWTCYNGREKACGKCGSCQERLEAFEENNATDPIPYE

SEQ ID NO: 37580 - protein, 219 aa, Colwellia psychrerythraea
  REGION 1..219: note = sp|Q47ZY2|QUEC2_COLP3 7-cyano-7-deazaguanine synthase 2 OS=Colwellia psychrerythraea (strain 34H / ATCC BAA-681) OX=167879 GN=queC2 PE=3 SV=1
MKKLVVIYSGGMDSFTALNKAVKEGFDVYALSFDYGQKHNKELIYAQNVCNELNVPHKILDIKSISTLFTSSSLVSDDINVPDGHYEADNMKSTVVPNRNMILISLAIGYAVDIEAEGVWYGAHSGDHLIYPDCRPEFVKVMDQASKVANFEPVYVHAPYLNTDKIGILKDGIKMGLDYSKTWTCYQGKEKACGTCGSCVERLEAFQANNIDDPVQYSI

SEQ ID NO: 37581 - protein, 219 aa, Colwellia sp.
  REGION 1..219: note = tr|A0A1D8S0B8|A0A1D8S0B8_9GAMM 7-cyano-7-deazaguanine synthase OS=Colwellia sp. PAMC 20917 OX=1816218 GN=queC PE=3 SV=1
MTNKVVVIYSGGMDSFTVLNRALHDGKEVFALTFDYGQRHVKEIEFASTVCQSLDVNHKIIDISSINQLLAGSSLTDNIDIPEGHYEAESMKSTVVPNRNMILLSLAVGYAVSVGASQVYYGAHSGDHAIYPDCRPEFVMKMNEVCKIANYESVEIFSPYLTVTKSDILTDGLKMGLSYDNTWTCYNGREKACGKCGACQERLEAFSDNNVTDPLSYES

SEQ ID NO: 37582 - protein, 218 aa, Colwellia sp.
  REGION 1..218: note = tr|A0A2G2FHD8|A0A2G2FHD8_COLSX 7-cyano-7-deazaguanine synthase OS=Colwellia sp. OX=56799; GN = queC PE=3 SV=1
MTQKVVVIYSGGMDSFTVLNKALQQGHDVYALSFDYGQRHVKELKVAANVCEKLNVPHKIVDISAINQLIGGSSLTDNIDVPEGHYEEESMKSTIVPNRNMILLSLAVGYAVSLKASQVYYGAHSGDHAIYPDCRPEFVKKMDDVCRIANYDAVEIFSPYLNNTKIDILTDGIKMGLDYSQTWTCYNGREKACGKCGACQERLEAFALNNITDPLEYE

SEQ ID NO: 37583 - protein, 250 aa, unidentified
  source 1..250: note = Comamonadaceae bacterium
  REGION 1..250: note = tr|A0A3M6QVG1|A0A3M6QVG1_9BURK 7-cyano-7-deazaguanine synthase OS=Comamonadaceae bacterium NML180581 OX=2478745 GN=queC PE=3 SV=1
MHSSALVLFSGGQDSATCLADALTRYPRVETIGFDYGQRHHVELQQRQAVLDALRQRFPQWSQRLGPDHMIGLNALGQISDTALTRECAITLEQSGLPNTFVPGRNLVFLTFAAALAYRRGLQAIVTGVCEADYSGYPDCRDDTMKAMQVALSLGMAWRLLIETPLMWLDKAQTWQLAHRLGQQADPAGGGDALVQLIVEHSHTCYLGQRQQRHDWGYGCGQCPACQLRASGWARWRGEQGGAAPLLTTA

SEQ ID NO: 37584 - protein, 239 aa, unidentified
  source 1..239: note = Comamonadaceae bacterium
  REGION 1..239: note = tr|A0A257EA44|A0A257EA44_9BURK 7-cyano-7-deazaguanine synthase OS=Comamonadaceae bacterium PBBC1 OX=2015580 GN=queC PE=3 SV=1
MHTSALVLFSGGQDSTTCLAHALTRYERVETLAFDYGQRHKVELDARMNVLAAIRARFPQWAPKMGEDHLLDAGILGQISETSLTRDTAIAMESSGLPNTFVPGRNLLFLTLAAALAYRRGLQVIVTGVCETDFSGYPDCRDDTMKAMQVALSLGMDRKLLIETPLMWIDKAQTWQLAHDLGQKADPAQGGQALVDLIVEHTHTCYLGDRSQRHDWGYGCGQCPACQLRAAGFGRYPKP

SEQ ID NO: 37585 - protein, 227 aa, Comamonas aquatica
  REGION 1..227: note = tr|A0A014QAM9|A0A014QAM9_9BURK 7-cyano-7-deazaguanine synthase OS=Comamonas aquatica DA1877 OX=1457173 GN=queC PE=3 SV=1
MFSGGQDSTTCLAHALSKYDRVETLGFDYGQRHSVELQARLTVLQQLRAQFPQWAHKLGEDHVLSLDVLKQIGGSSLTEDVAFAMQADGLPNTFVPGRNLLFLTLAGALAYRRGLQVIVTGVCETDFSGYPDCRDDTMKAMQLALNLGLERRLRIETPLMWIDKAATWQMAQDLGGDALVQLIVQDTHTCYEGTRDVLHAWGHGCGHCPACDLRAKGWQRWHAAQAA

SEQ ID NO: 37586 - protein, 234 aa, Comamonas aquatica
  REGION 1..234: note = tr|A0A1B2D182|A0A1B2D182_9BURK 7-cyano-7-deazaguanine synthase OS=Comamonas aquatica; OX = 225991 GN=queC PE=3 SV=1
MHTSALVMFSGGQDSTTCLAHALSKYDRVETLGFDYGQRHSVELQARLTVLQQLRAQFPQWAPKLGEDHVLSLDVLKQIGGSSLTEDVAFAMQADGLPNTFVPGRNLLFLTLAGALAYRRGLQVLVTGVCETDFSGYPDCRDDTMKAMQLALNLGLERRLCIETPLMWIDKAATWQMAQDLGGDALVQLIVQDTHTCYEGTRDVLHAWGHGCGHCPACDLRAKGWQRWRAAQAA

SEQ ID NO: 37587 - protein, 234 aa, Comamonas kerstersii
  REGION 1..234: note = tr|A0A0W7Z8P6|A0A0W7Z8P6_9BURK 7-cyano-7-deazaguanine synthase OS=Comamonas kerstersii; OX = 225992 GN=queC PE=3 SV=1
MHTSALVMFSGGQDSTTCLAHALSKYERVETLGFHYGQRHSVEMDVRLDVREKLRAGFPQWASRLGEDHVLSLDVLQEIGGSSLTDDMAFALQADGLPNTFVPGRNLLFLTVAGALAYRRGIQVIVTGVCETDFSGYPDCRDDTMKAMQLALNLGLERRLRIETPLMWIDKAQTWQMAQDLGGEQLVELIVKDTHTCYQGTRDVLHDWGYGCGSCPACDLRAKGWQRWKATQAS

SEQ ID NO: 37588 - protein, 234 aa, Comamonas kerstersii
  REGION 1..234: note = tr|A0A1V3TMG5|A0A1V3TMG5_9BURK 7-cyano-7-deazaguanine synthase OS=Comamonas kerstersii; OX = 225992 GN=queC PE=3 SV=1
MHTSALVMFSGGQDSTTCLAHALSKYERVETLGFHYGQRHSVEMDVRLDVREKLRAGFPQWASRLGEDHVLSLDVLQEIGGSSLTDDMAFALQADGLPNTFVPGRNLLFLTVAGALAYRRGIQVIVTGVCETDFSGYPDCRDDTMKAMQLALNLGLERRLRIETPLMWIDKAQTWQMAQDLGGDKLVELIVKDTHTCYQGTRDVLHDWGYGCGSCPACDLRAKGWQRWKATQAS

SEQ ID NO: 37589 - protein, 233 aa, unidentified
  source 1..233: note = Comamonas serinivorans
  REGION 1..233: note = tr|A0A1Y0EI88|A0A1Y0EI88_9BURK 7-cyano-7-deazaguanine synthase OS=Comamonas serinivorans; OX = 1082851 GN=queC PE=3 SV=1
MPRGALVLFSGGQDSATCLAWALARFPHVETLAFDYGQRHRVELDCRLRLRAGLRDLAAPWASRLGDDHLLKVDVLGQLGGSAMTDDVAIAMQADGLPNTFVPGRNLLFFTLAAALAYRRGLQVLVGGMSQTDYSGYPDCRDNTLKALQVALSLGVDRPLTLATPLMWRDKADTWALAHTLGGDALVELIRRESHTCYLGQRGDLHDWGHGCGTCPACALRANGWAQWRGQRA

SEQ ID NO: 37590 - protein, 232 aa, Comamonas sp.
  REGION 1..232: note = tr|A0A363RV52|A0A363RV52_9BURK 7-cyano-7-deazaguanine synthase OS=Comamonas sp. JNW; OX = 2170731 GN=queC PE=3 SV=1
MQDAKALVLFSGGQDSTVCLAWALSRYAQVETIGFDYGQNHRVELECRSTVLAHLRAQFPQWAAKLGEDHLLNIDVLGQISDTALTRDAALAYQADGLPNTFVPARNLVFLTLASAVAYRRQCTVLVGGMCETDFSGYPDCRDNTMKAMQVALSLGLGRQLVVETPLMWIDKAATWQLAQDLGGDALTALVQEDTHTCYQGDRSERHDWGYGCGECPACALRAQGFARWKRG

SEQ ID NO: 37591 - protein, 235 aa, Comamonas sp.
  REGION 1..235: note = tr|A0A1D2U974|A0A1D2U974_9BURK 7-cyano-7-deazaguanine synthase OS=Comamonas sp. SCN 67-35; OX = 1660096 GN=queC PE=3 SV=1
MPDTRHALVLLSGGQDSATCLAWALAHFARVETVGFDYGQRHHVELDCRERLRTGMQAMPWPGTLGADHLLHVDVLRELGSSAMIDEVAITLQADGLPNTFVPGRNLLFFTLAAALAYRRGLTVLVGGMSETDYSGYPDCRDNTLKALQVALSLGVDRPLVVETPLMWRDKAATWALAHALGGDALVELIRRDSHTCYLGQRGVLHDWGYGCGQCPACELRARGWRAWAQGNASV

SEQ ID NO: 37592 - protein, 234 aa, Comamonas terrigena
  REGION 1..234: note = tr|A0A2A7UQ14|A0A2A7UQ14_COMTR 7-cyano-7-deazaguanine synthase OS=Comamonas terrigena; OX = 32013 GN=queC PE=3 SV=1
MHTSALVMFSGGQDSTTCLAHALSKYDRVETLGFDYGQRHRVELQARHTVRDRLRAQFPQWAPRLGEDHVLTLDVLQQIGGSSLTEDVAFAMQADGLPNTFVPGRNLLFLTLAGALAYRRGLQVIVTGVCETDFSGYPDCRDDTMKAMQLALNLGLERRLRIETPLMWIDKAQTWQMAQDLGGDALVELVVRDTHTCYQGTRDALHDWGYGCGSCPACELRAKGWQRWRAAATD

SEQ ID NO: 37593 - protein, 253 aa, Comamonas testosteroni
  REGION 1..253: note = tr|A0A076PZ92|A0A076PZ92_COMTE 7-cyano-7-deazaguanine synthase OS=Comamonas testosteroni TK102 OX=1392005 GN=queC PE=3 SV=1
MANTSTSSANLAAPVAGAGHHKGALVLFSGGQDSTTCLAQALAMFERVETLGFDYGQRHSVEMQVRAGVREQLAQRFPQWAPRLGEDHVLSLDVLKQIGGSSLTEDVAFAMQADGLPNTFVPGRNLLFLTLAGALAYRRGLTVIVTGVCETDYSGYPDCRDDTMKAQQLALNLGLERRLRIDTPLMWLDKAQTWQLAHDLGGSDLVELIRTETHTCYQGTRDVLHDWGYGCGSCPACELRASGWHNWRASQSA

SEQ ID NO: 37594 - protein, 253 aa, Comamonas testosteroni
  REGION 1..253: note = tr|A0A0L7MIT7|A0A0L7MIT7_COMTE 7-cyano-7-deazaguanine synthase OS=Comamonas testosteroni; OX = 285 GN=queC PE=3 SV=1
MANTSTSSANLAAHVAGAGHHKGALVLFSGGQDSTTCLAQALAMFERVETLGFDYGQRHSVEMQVRAGVREQLAERFAHWAPRLGEDHVLSLDVLKQIGGSSLTEDVAFAMQADGLPNTFVPGRNLLFLTLAGALAYRRGLTVIVTGVCETDYSGYPDCRDDTMKAQQLALNLGLERRMRIDTPLMWLDKAQTWQLAHDLGGDALVELIRTETHTCYQGTRDVLHDWGYGCGSCPACELRASGWKNWRASQGA

SEQ ID NO: 37595 - protein, 254 aa, Comamonas thiooxydans
  REGION 1..254: note = tr|A0A096E5U0|A0A096E5U0_9BURK 7-cyano-7-deazaguanine synthase OS=Comamonas thiooxydans; OX = 363952 GN=queC PE=3 SV=1
MANTSTSSASPAAQVAGAGHHKGALVLFSGGQDSTTCLAQALAMFERVETLGFDYGQRHSVEMQVRAGVREQLVERFPLWAPRLGEDHVLSLDVLKQIGGSSLTEDVAFAMQADGLPNTFVPGRNLLFLTLAGALAYRRGLTVIVTGVCETDYSGYPDCRDDTMKAQQLALNLGLERRLRIDTPLMWLDKAQTWQLAHDLGGSDLVELIRTETHTCYQGTRDALHEWGYGCGSCPACELRASGWRNWRASQSAA

SEQ ID NO: 37596 - protein, 254 aa, Comamonas thiooxydans
  REGION 1..254: note = tr|A0A0E3BTJ6|A0A0E3BTJ6_9BURK 7-cyano-7-deazaguanine synthase OS=Comamonas thiooxydans; OX = 363952 GN=queC PE=3 SV=1
MANTSTSSASPAAQVAGAGHHKGALVLFSGGQDSTTCLAQALAMFERVETLGFDYGQRHSVEMQVRAGVREQLAERFPLWAPRLGEDHVLSLDVLKQIGGSSLTEDVAFAMQADGLPNTFVPGRNLLFLTLAGALAYRRGLTVIVTGVCETDYSGYPDCRDDTMKAQQLALNLGLERRLRIDTPLMWLDKAQTWQLAHDLGGSDLVELIRTETHTCYQGTRDALHEWGYGCGSCPACELRASGWRNWRASQSAA

SEQ ID NO: 37597 - protein, 242 aa, unidentified
  source 1..242: note = Commensalibacter intestini
  REGION 1..242: note = tr|G6F1Y2|G6F1Y2_9PROT 7-cyano-7-deazaguanine synthase OS=Commensalibacter intestini A911 OX=1088868; GN = queC PE=3 SV=1
MTDHPSDSFSNSALVLFSGGQDSTTCLAWALQRFQKVETLGFHYGQRHHIEMKCRHGIREKIKDIHPLWSDRLGEDHVLNLSDLGAISDTALTRKTAIEWDKQGLPSTFVPGRNLLFLTYAAIIADRRHLRHIIGGMCETDYSGYPDCRDDTIKALQVAINLGISNRFVLHTPLMWLDKAQEWQMAEQLGGNSLVNLINEETHSCYLGDRSHHHEWGYGCGTCPACELRRSGWESYIQQKEQ

SEQ ID NO: 37598 - protein, 242 aa, unidentified
  source 1..242: note = Commensalibacter intestini
  REGION 1..242: note = tr|A0A251ZVS6|A0A251ZVS6_9PROT 7-cyano-7-deazaguanine synthase OS=Commensalibacter intestini OX=479936 GN=queC PE=3 SV=1
MTDHPSDSFSNSALVLFSGGQDSTTCLAWALQRFQKVETLGFHYGQRHHIEMKCRHGIREKIKDIHPLWSDRLGEDHVLNLSDLGAISDTALTRETAIEWDKQGLPSTFVPGRNLLFLTYAAIIADRRHLRHIIGGMCETDYSGYPDCRDDTIKALQVAINLGISNRFVLHTPLMWLDKAQEWQMAEQLGGNSLVNLINEETHSCYLGDRSHHHEWGYGCGTCPACELRRSGWESYIQQKEQ

SEQ ID NO: 37599 - protein, 242 aa, unidentified
  source 1..242: note = Commensalibacter sp.
  REGION 1..242: note = tr|W7DUJ1|W7DUJ1_9PROT 7-cyano-7-deazaguanine synthase OS=Commensalibacter sp. MX01 OX=1208583 GN=queC; PE = 3 SV=1
MTEIVNPLFSNSALVLFSGGQDSTTCLAWALQRFQKVETLGFNYGQRHSIEMECRHEIRKKIQRINPLWQRRLGEDHVMNLSDLGAISDTALTRETAIEWDKQGLPSTFVPGRNLLFLTYAAIIADRRHLKHIVGGMCETDYSGYPDCRDDTIKALQVAINLGMSNRFVLQTPLMWLDKAQEWQMAEQLGGMSLIELINKDTHSCYLGDRSHYHEWGYGCGECPACELRRAGWNNYVQQKEQ

SEQ ID NO: 37600 - protein, 243 aa, unidentified
  source 1..243: note = Commensalibacter sp.
  REGION 1..243: note = tr|A0A318NBX7|A0A318NBX7_9PROT 7-cyano-7-deazaguanine synthase OS=Commensalibacter sp. ESL0284 OX=2070537 GN=queC PE=3 SV=1
MKKTADFSEGALVLFSGGQDSTTCLAWALTHFSIVETLGFDYGQRHFVEMECRSVIREKILNIQPEWKERLGEDHILKLSDLGAISDTSLTRETEIEWNRQGLPSTFVPGRNLLFLTYAAIIANRRNLRHLVGGMCETDFSGYPDCRDDTLKALQVALNLGMNTRFVLHTPLMWLDKAAEWKLAAILGNDSLIELINKETHSCYLGDRTHYHEWGYGCGHCPACELRQAGWETYLRQKEMFGV

SEQ ID NO: 37601 - protein, 226 aa, Conchiformibius steedae
  REGION 1..226: note = tr|A0A3P2A109|A0A3P2A109_9NEIS 7-cyano-7-deazaguanine synthase OS=Conchiformibius steedae; OX = 153493 GN=queC PE=3 SV=1
MSQALVVFSGGQDSTTCLFLALREHGAGKVRAIAFRYGQRHAVELDKAAAIARDLNVPLTVLDLSVMQSVTHNALMDDHAAISSNSQGMPNTFVDGRNALFLLYAAIFAKSHAIHDIYIGVCETDFSGYPDCRAEFIRSMQQTLQLAMDYPFQLHTPLMYLTKKQTWALADELGAFDFVRTRTHTCYLGVEGGCGECPSCILRERGLREYLAERAHTESTQQGTQP

SEQ ID NO: 37602 - protein, 467 aa, Conexibacter sp.
  REGION 1..467: note = tr|A0A2T4UH85|A0A2T4UH85_9ACTN Uncharacterized protein OS=Conexibacter sp. Seoho-28 OX=2133960; GN = C7Y72_02475 PE=4 SV=1
MQRYEPLNFDGGDGPRVDWESGFRLDDQQIAFGLGRALSPRLSDLLDIAMSAYVTDRLRPRRPPGSRGSEDWSRELPVRIAVRDEAFWRQADVAEALRDLLEWLTDDVWGFEFLGGRRQHRFAESQDPLFGMDPIPNARFGLYSGGLDSYAGAASDAAEADRELVLVSATTSKPMGAMQQRTLAALKASSPASIRALQVPVALRGEAIARLAGRRDAPEASQRTRGLVFLVLGAVSAATAGGRELRVYENGVGAMNLPLTEAQYGSHNTRAMRPETLVKASGLMSLVLEDAFDIVNPSFTKTKAQMCALLQGVVRNGIRTTVSCDTGLTHRASKVHLCGTCTSCLLRRQALRAGGLADEDDAEASLYRTDVREVAAGSDKRALRLHYMLNQAAQMDRALREPTPVDALVRAFPDLRRIHDALLAQGYHDPVGLTQGLLTTYVEEWARFEHPLTVRYLPQGERTGVAA

SEQ ID NO: 37603 - protein, 1381 aa, unidentified
  source 1..1381: note = Confluentibacter sp.
  REGION 1..1381: note = tr|A0A2N3HGU3|A0A2N3HGU3_9FLAO Carrier domain-containing protein OS=Confluentibacter sp. 3B; OX = 1909700 GN=CSW08_15240 PE=4 SV=1
MIDQSKSKLYALTQSQLSLWLGQKLHPNVPLYNVPYAYHIHEEIDEGVFAKAFSDMIKQIDVLRTVFIENQNTPYQQIMDDYDYAFEMLDFTSESNVFPVEEWLQKRSEITFDFSKPLFDSVLIKVDSQHYIWFLNVHHLITDASSSVILFDTMSKIYGQIKNHKKPSDLNELFNYSDYVAYEIDQAKNNTEEKKYWERKVDLFTKAPSLYGVKQPLNPTTKSNRVVLNLDFEQSQKLRDLAKQSDIKSWTQELTLFNIFATVIFSYLYRISGQNNIAIGAPIHNRTTNKFKKTAGLFIEVFPLTVDLDEDDTFYTLLQRVKIESNAFLKHAVTGATSAKVSRSFNVIFNYITSSFSNFDGLETNVDWIHPNHNDAAHQMRCHIYDFEATGKIKVVFDLNEGILSSLVMHHFSNILDAFIQDIDQEISKPNLITQQETDAFLLPKLNFDSPYSSILELFETMVKSNPNSVALQCGPETLTYNGLNKKANQFATYLKKEGVVSENKIALYTYRSIEYIVGLLAIMKLRATFILIAADQPKDRVHFMLSNSGASMVLTELPLKTNVLNIELPVLDLKTVIAESSNLSVDNLNIKLTANSIAYILYTSGSTGNPKGVIISHSALSNYLLWAKGYYGIDSKSILPLFTSIGFDLTITSTILPLLNGGRLIVYKENAFGPDISLLQLLGDNLVNTIKLTPSHLSFFKGRDLTNSTIKTMIVGGEDFKVQLGKSITTAFGNNIRIFNEYGPTEATVGCIVSEFNAALHTGASIPIGIPIKNMHAYILDSHKNLVPHGVVGELYLSGASLANGYLDLDELTKAKFVDNPFVTGAKMYHTGDLARINEDGDYEYLGRVDEQIKLRGYRIELTDIESNLMDFKGIDTCAVVLVDNKKRTEEVEKVINCTNCGLPSNYPEIDFDDQGVCHLCNAFKNYEDKVQKYFRTEAELKSILTKNKTNNPSYDCLTLLSGGKDSTYILAQLVGMGLKVLAFTLDNGYISQQAKNNINRIVEKLGVDHIYDSTNHMNQIFVDSLKRHKNVCNGCFKTIYTLSTKIAMEKQIPFIVTGLSRGQFFETRLTEELFWEENLDVTKIDDTILEVRKLYHREEDAVKELLDVSLFENDAVFDKVQFVDFYRYSDVSLEEMLRYLEDTVGWIRPTDTGRSTNCLINQVGIYVHKKEKGYSNYSFPYSWDVRLGHKTRDESLEEINEYIDETEVKRIMNEIGYEDSDNLFENDEKLVAYYTAKDAVSTKDLKAHLLKKVPAYMIPSAFKHLDEMPLTKNGKVDKKVLKEIKYAANKTNDIQTSYVSPRNDIEELVYNVWRDVLRLDKISVHDNFIVLGGHSLAAIRVTSRINDELGMEIPLNKIFNLPTIEAYASHIEQRILESL

SEQ ID NO: 37604 - protein, 232 aa, unidentified
  source 1..232: note = Confluentimicrobium lipolyticum
  REGION 1..232: note = tr|A0A238KQT8|A0A238KQT8_9RHOB 7-cyano-7-deazaguanine synthase OS=Confluentimicrobium lipolyticum OX=1524263 GN=queC PE=3 SV=1
MKTLVVCSGGLDSVSLAHKVAAENQLVGLISFNYGQRHAKELASAEACAKRLGVPFDLIDISHLGAALSGSALTDEIDVPDGHYAEDTMKVTVVPNRNAIMLAIAFGIAAARDADAVATAVHGGDHFIYPDCRPEFIDAFQAMQDKALDGYANVRLYTPFVHQPKSAIVTAGAAHGTPFAETWSCYKGGEVHCGRCGTCVERREAFDLAGVEDPTTYADPDFWKAAVAKGGA

SEQ ID NO: 37605 - protein, 226 aa, Congregibacter litoralis
  REGION 1..226: note = tr|A4A9S0|A4A9S0_9GAMM 7-cyano-7-deazaguanine synthase OS=Congregibacter litoralis KT71 OX=314285; GN = queC PE=3 SV=1
MNSSKKAVVLVSGGLDSTTVLALAREQGYECYSLSFDYGQRHRAELFAAERVSKTLGDVEHKVVRLNLDSIGGSALTDENIAVPEEASEGIPVTYVPARNTVFLSIALGWAEVLGAQDIFIGVNAVDYSGYPDCRPAFIDAFQQLANVATQVGVEGGRYEIHTPLMDLGKDDIVKLGARLGVDYSQTVSCYQATDDGLACGVCDACRLRREGFVNAGLEDVTRYAN

SEQ ID NO: 37606 - protein, 224 aa, unidentified
  source 1..224: note = Conservatibacter flavescens
  REGION 1..224: note = tr|A0A2M8S1Z6|A0A2M8S1Z6_9PAST 7-cyano-7-deazaguanine synthase OS=Conservatibacter flavescens OX=28161 GN=queC PE=3 SV=1
MQLNNPNQNRKAVVIFSGGQDSTTCLLQAIQQYGKQHVEAITFHYGQRHAIELEKAQWIAQDLEIKQTLIDISLIKSITQNALMDSQASIQQQGTIPNTFVDGRNALFLLYTAIYAKGQGIHDIITGVCETDFSGYPDCRDVFIKSMNVTLNLAMDYSFNLITPLMYLTKAQTWALADELGYLDYIRQHTHTCYLGVEQGCGTCPSCELREKGLQTYLASQMPS

SEQ ID NO: 37607 - protein, 438 aa, unidentified
  source 1..438: note = Conservatibacter flavescens
  REGION 1..438: note = tr|A0A2M8S3S1|A0A2M8S3S1_9PAST 7-cyano-7-deazaguanine synthase OS=Conservatibacter flavescens OX=28161 GN=CVP05_04440 PE=3 SV=1
MTQLVFHHDIEQLKHLSNGVLPIRLYGMGDKNLQIAHIGNMVLDRVRRLGVELNNQVMDFLTIAMAVTAADTFVLRKDTANGWCRSFSITLPLCQPDIWHANKAHLEQILHFLSGDIWQFNFQEDGQLPPKPYKLNGRTKLVDLRNKDSVCLFSGGLDSAIGAIDLLEQGYSPVLVSHSYKGDKSHQQMIVEKFNQSRYANQFSQFNAIAQPHLNNGRTAEITMRTRSLNFLAFAIVSACALQEVVQKEIDIFVPENGVISINAPLTPRRLGTLSTRTTHPYFIQELQKLLTAVNIPFSLKNPYQFKTKGQMIAECKNLPLLQQIIPDTVSCSHWKRKNQQCGVCVPCLIRRASLYYAGITNDAEYEFNDIRKVLTNQDRKDDLFALISAIRRKNHSNMHQWVLQSGSLPIQQLNQFADVFMNGLNEVEQLLIAKEIL

SEQ ID NO: 37608 - protein, 227 aa, Coprobacillus sp.
  REGION 1..227: note = tr|H1AM49|H1AM49_9FIRM 7-cyano-7-deazaguanine synthase OS=Coprobacillus sp. 8_2_54BFAA OX=469597 GN=queC; PE = 3 SV=1
MKALVLFSGGVDSTTALALAIQEHGKDNVVALSISYGQKHTKEIEAANKIAQFYQVEHLYLDLAKIFTYSNCSLLQHSDNEIPHESYNEQLNKTDGNPVSTYVPFRNGLFLSSAASIALSKCCNIIYYGAHSDDAAGSAYPDCSKVFNNAMNQAIYEGSGHQLEIKAPFVEMTKADIVKIGLSLGVPYQLTWSCYEGNDTPCGTCGTCIDRQNAFLKNGIKDPLLGE

SEQ ID NO: 37609 - protein, 227 aa, Coprobacillus sp.
  REGION 1..227: note = tr|G9QXV5|G9QXV5_9FIRM 7-cyano-7-deazaguanine synthase OS=Coprobacillus sp. 3_3_56FAA OX=665941 GN=queC; PE = 3 SV=1
MKALVLFSGGVDSTTALALAIQEHGKDNVVALSISYGQKHTKEIEAANKIAQFYQVEHLYLDLAKIFTYSNCSLLQHSDNEIPHESYNEQLNKTDGNPVSTYVPFRNGLFLSSAASIALSKGCNIIYYGAHSDDAAGSAYPDCSKVFNNAMNQAIYEGSGHQLEIKAPFVEMTKADIVKIGLSLGVPYQLTWSCYEGNDTPCGTCGTCIDRQNAFLKNGIKDPLLGE

SEQ ID NO: 37610 - protein, 220 aa, unidentified
  source 1..220: note = Coprobacter fastidiosus
  REGION 1..220: note = tr|A0A495WB83|A0A495WB83_9BACT 7-cyano-7-deazaguanine synthase OS=Coprobacter fastidiosus NSB1 OX=1349822 GN=queC PE=3 SV=1
MKQKETALVCFSGGQDSTTCLFWALSHFESVEAVCFIYGQKHVKEVDVARKIAAEAGVPFEVLDVSLIGQLTHNSLTDSSMVMDKEKPEDSYPNTFVPGRNMVFLTFAAIKAFQKGIRHLVTGVSQADFSGYPDCRDTFVRSLNVSLNLAMDAHFEIHTPLMWRDKESVWRLSDELGVFDLVRNETLTCYNGIPADGCGECPACKLRKHGLDLYLKHRNG

SEQ ID NO: 37611 - protein, 220 aa, unidentified; identical to SEQ ID NO: 37610
  source 1..220: note = Coprobacter fastidiosus
  REGION 1..220: note = tr|A0A316R469|A0A316R469_9BACT 7-cyano-7-deazaguanine synthase OS=Coprobacter fastidiosus; OX = 1099853 GN=queC PE=3 SV=1

SEQ ID NO: 37612 - protein, 223 aa, unidentified
  source 1..223: note = Coprobacter secundus
  REGION 1..223: note = tr|A0A0B2JMI6|A0A0B2JMI6_9BACT 7-cyano-7-deazaguanine synthase OS=Coprobacter secundus; OX = 1501392 GN=queC PE=3 SV=1
MKQKETVLVCFSGGQDSTTCLFWALAHFESVQAISFVYGQKHSLEVEMARKIAEKAGVPFEVLDVSLMAQLTDNSLTNPELKMDEEKPENSYPNTFVPGRNMVFLTFAAIVGFQRGIRHLVTGVSQADFSGYPDCRDTFIRSLNVSLNLAMDAQFEIHTPLMWRDKEAVWALSDELGVFDLVRQETLTCYNGIPGDGCGHCPACKLRRNGLEKYLSHRHKKTE

SEQ ID NO: 37613 - protein, 219 aa, unidentified
  source 1..219: note = Coprobacter sp.
  REGION 1..219: note = tr|A0A316SMC7|A0A316SMC7_9BACT 7-cyano-7-deazaguanine synthase OS=Coprobacter sp.; OX = 1941478 GN=queC PE=3 SV=1
MEREESALVCFSGGQDSTTCLYWALSKFKSVQAVSFFYGQKHNREVEVARTIAGKAGVPWEALDMSLLGQLAHCSLTDDAIKMDEDKPANSFPNTFVPGRNMIFLSFAAVIAYNRGIKHLVTGVSEADFSGYPDCRDTFIRSLNVSLNLAMDTQFVIHTPLMWRDKEQVWQLSDELGVFDLIRNETLTCYNGIPGDGCGHCPACKLRRKGLESYLDRRK

SEQ ID NO: 37614 - protein, 226 aa, Coprococcus catus; identical to SEQ ID NO: 36677
  REGION 1..226: note = tr|A0A3E2TP11|A0A3E2TP11_9FIRM 7-cyano-7-deazaguanine synthase OS=Coprococcus catus; OX = 116085 GN=queC PE=3 SV=1

SEQ ID NO: 37615 - protein, 225 aa, Coprococcus catus
  REGION 1..225: note = tr|A0A3E2TRV4|A0A3E2TRV4_9FIRM 7-cyano-7-deazaguanine synthase OS=Coprococcus catus; OX = 116085 GN=queC PE=3 SV=1
MKALVLSSGGVDSTTCLGLAVDKYGSDNVIALAITYGQRHTKEIEAAKAVAAYYHVEMLHLDLTPIFQYSDCSLLSHSDQAIPEESYAEQLQHSDGKPVSTYVPFRNGLFLSSAASIALSKGCDVIYYGAHSDDAAGNAYPDCSEVFKNAMNQAIYEGSGHQLKVEAPFVNLTKADVVKKGLELNVPYELTWSCYEGGEKPCGKCGTCIDRAKAFAANGVADPAL

SEQ ID NO: 37616 - protein, 226 aa, Coprococcus comes; identical to SEQ ID NO: 36677
  REGION 1..226: note = tr|A0A3R6A5W4|A0A3R6A5W4_9FIRM 7-cyano-7-deazaguanine synthase OS=Coprococcus comes; OX = 410072 GN=queC PE=3 SV=1

SEQ ID NO: 37617 - protein, 227 aa, Coprococcus comes
  REGION 1..227: note = tr|A0A3R6AKN3|A0A3R6AKN3_9FIRM 7-cyano-7-deazaguanine synthase OS=Coprococcus comes; OX = 410072 GN=queC PE=3 SV=1
MKALVLFSGGIDSTTALALAINKYGKDRVIALSVSYGQKHDKEIQAAIAVAEYYGVEHLFLDLRKIFTYSNCSLLKQSTEKIPEESYAKQISKTNGETPVSTYVPFRNGLFLSSAASIALSKDCEVIYYGAHADDSAGFAYPDCSPVFNRAMNEAIWEGSGHQLKIEAPFVNVSKAEVVRIGLELNVPYELTWSCYEGGEKPCGKCGTCIDRAAAFQANHVEDPALQ

SEQ ID NO: 37618 - protein, 225 aa, Coprococcus eutactus
  REGION 1..225: note = tr|R5VQR7|R5VQR7_9FIRM 7-cyano-7-deazaguanine synthase OS=Coprococcus eutactus CAG:665 OX=1263071; GN = queC PE=3 SV=1
MQNLKNKDEAVVVFSGGQDSTTCLLWALKKYKKVYAVSFDYGQRHALELECAREIADKFGVEHHILDMSLLNQLAPNSLTRTDMKVDENAPDEGTPNSFVDGRNMVFLTFVAIFAKQRGISDIITGVSQSDFSGYPDCRDIFIKSLNTTLNLAMDYEFDIITPLMWIDKMETWKMADELGGLDVIRDMTLTCYNGIKGEGCGHCPSCKLRKKGYDLYMKYKEEHK

SEQ ID NO: 37619 - protein, 230 aa, Coprococcus eutactus
  REGION 1..230: note = tr|A8STP5|A8STP5_9FIRM 7-cyano-7-deazaguanine synthase OS=Coprococcus eutactus ATCC 27759 OX=411474; GN = queC PE=3 SV=1
MEDEIMQNLKNKDEAVVVFSGGQDSTTCLLWALKKYKKVYAVSFDYGQRHALELECAREIADKFGVEHHILDMSLLNQLAPNSLTRTDMKVDENAPDEGTPNSFVDGRNMVFLTFVAIFAKQRGISDIITGVSQSDFSGYPDCRDIFIKSLNTTLNLAMDYEFDIITPLMWIDKMETWKMADELGGLDVIRDMTLTCYNGIKGEGCGHCPSCKLRKKGYDLYMKYKEEHK

SEQ ID NO: 37620 - protein, 221 aa, Coprococcus sp.
  REGION 1..221: note = tr|A0A417SYV9|A0A417SYV9_9FIRM 7-cyano-7-deazaguanine synthase OS=Coprococcus sp. OM04-5BH OX=2293093 GN=queC PE=3 SV=1
MRNKEEAVVVFSGGQDSTTCLLWALSRYKKVYAISFDYGQRHVAELDCAKEIAEKLGVEHYILDMTLLNQLAPNSLTRSDIKVDENAPEVGTPNSFVDGRNHLFLSFVAVFAKQKGISDIITGVSQSDFSGYPDCRDAFVKSLNVTLNLAMDYEFNIITPLMWIDKMETWKMADELGGLELVHDMTLTCYNGIKGDGCGHCPACKLRKRGYDLYMKYKKNK

SEQ ID NO: 37621 - protein, 225 aa, Coprococcus sp.
  REGION 1..225: note = tr|D5HHB9|D5HHB9_9FIRM 7-cyano-7-deazaguanine synthase OS=Coprococcus sp. ART55/1 OX=751585 GN=queC PE=3; SV = 1
MQNLKNKDEAVVVFSGGQDSTTCLLWALKKYKKVYAVSFDYGQRHALELECAKEIADKFGVEHHILDMGLLNQLAPNSLTRTDMKVDENAPDEGTPNSFVDGRNMVFLTFVAIFAKQRGISDIITGVSQSDFSGYPDCRDIFIKSLNTTLNLAMDYEFDIITPLMWIDKMETWKMADELGGLDVIRDMTLTCYNGIKGEGCGHCPSCKLRKKGYDLYMKYKEDHK

SEQ ID NO: 37622 - protein, 240 aa, Coraliomargarita akajimensis
  REGION 1..240: note = tr|D5EK69|D5EK69_CORAD 7-cyano-7-deazaguanine synthase OS=Coraliomargarita akajimensis (strain DSM 45221 / IAM 15411 / JCM 23193 / KCTC 12865 / 04OKA010-24); OX = 58335 5 GN=queC PE=3 SV=1
MKTVIIYSGGLDSTVLLYHLRAVGAELFALSVNYGQRHCCELERAAQICAVVDVPHQIADLSSVQSLLAGSSLTSPEIDVAEGHYTEETMKTTVVPNRNMILLALATGHALSVKAESVAYAAHSGDHAIYPDCRNEFADAMAAAMALCDWNQVKLDRPFVDWTKADIVRRGAELKVPFEMTWSCYKGGEVHCGKCGTCIERREAFDIAGVEDPTIYAKDAPSVDSLRANNWRLESSGAKS

SEQ ID NO: 37623 - protein, 217 aa, Coraliomargarita sp.
  REGION 1..217: note = tr|R7L2V3|R7L2V3_9BACT 7-cyano-7-deazaguanine synthase OS=Coraliomargarita sp. CAG:312 OX=1262865; GN = queC PE=3 SV=1
MALVIYSGGLDSTVLLYKLFSEGKADGALSVNYGQRHVKEIECARQNCARLGVPFEVADISSLRPLFGASSLTDYSVGVPDGNYADENMKSTVVPNRNMIMLSIAAARAIAIGADSVAYAAHSGDHAIYPDCRPEFAEAVESALKICHYTPITLMRPFIGMSKSEIVRMGADLGVDFSLTWSCYKGGEKHCGTCGTCTERREAFRLAGVDDPTEYLE

SEQ ID NO: 37624 - protein, 237 aa, Coraliomargarita sp.
  REGION 1..237: note = tr|A0A424QUW9|A0A424QUW9_9BACT 7-cyano-7-deazaguanine synthase OS=Coraliomargarita sp. TMED73 OX=1986604 GN=queC PE=3 SV=1
  VARIANT 53: note = Xaa can be any naturally occurring amino acid
  VARIANT 63..64: note = Xaa can be any naturally occurring amino acid
MKTVVIYSGGLDSTVLLYKLKAEGRDLHALSVNYGQRHRRELDCAAAICQRIXIPHRTADLSXXRELLAGSSLTSPQIEVAEGHYTEESMKSTVVPNRNMILLSLAAGHALSIGATEVAYAAHSGDHAIYPDCRNEFADAVATAMQLCDWQPVHLIRPFIDQTKAEIVALGAKLSVPFADTWSCYKGGELHCGRCGTCIERREAFHLAGVPDPTPYAPDAPSTDSLIDNQWHLPATA

SEQ ID NO: 37625 - protein, 219 aa, unidentified
  source 1..219: note = Corallincola sp.
  REGION 1..219: note = tr|A0A368NQX5|A0A368NQX5_9GAMM 7-cyano-7-deazaguanine synthase OS=Corallincola sp. C4; OX = 2282215 GN=queC PE=3 SV=1
MNEKVVVIYSGGMDSYTVLNKAIKQGYDVYALSFDYGQRHVKELEVAASVCKELAIHHKVVDISAINSLIGGSSLTDDIAVAEGHYEEESMKSTVVPNRNMILLSLAVGYAVSLKAGKVFYGAHSGDHAIYPDCRPEFVLKMNEVAKIANYEVVEICSPYLNDSKIDILTDGLKMGLDYSKTWTCYNGRERACGKCGACVERLEAFEKNALKDPLSYEA

SEQ ID NO: 37626 - protein, 231 aa, Corallococcus coralloides
  REGION 1..231: note = tr|A0A410S2F6|A0A410S2F6_CORCK 7-cyano-7-deazaguanine synthase OS=Corallococcus coralloides OX=184914 GN=exsB PE=3 SV=1
MAKRAVVLLSGGLDSTTCLAMAKADGFEPVCLSIAYGQRHSVELERARKVAATMGVRDVRVVTVDLRQVGGSALTDDIPVPKDRTEDAMSHDVPVTYVPARNALFLSMALGLAEVVGATDLYIGVNAVDYSGYPDCRPEFIRSFETMAQLATKAGVEGATFKVHAPLSGLTKAQIIQAGVKLGVDYGMTHSCYDPDAQGRACGRCDSCLLRAKGFQEAGVPDPTVYTDGVR

SEQ ID NO: 37627 - protein, 231 aa, Corallococcus coralloides
  REGION 1..231: note = tr|H8MFS8|H8MFS8_CORCM 7-cyano-7-deazaguanine synthase OS=Corallococcus coralloides (strain ATCC 25202 / DSM 2259 / NBRC 100086 / M2) OX=1144275 GN=exsB PE=3 SV=1
MAKRAVVLLSGGLDSTTCLAMAKADGFEPVCLSIAYGQRHSVELERAKKVAATMGVRDVRVVTVDLRQVGGSALTDDIPVPKDRTEDAMSHDVPVTYVPARNALFLSMALGLAEVVGATDLYIGVNAVDYSGYPDCRPEFIRSFEAMAQLATKAGVEGATFKVHAPLSGLTKAQIIQAGVKLGVDYGMTHSCYDPDAQGRACGRCDSCLLRAKGFQEAGVPDPTVYTDGGR

SEQ ID NO: 37628 - protein, 231 aa, Corallococcus exiguus
  REGION 1..231: note = tr|A0A5C5E1J8|A0A5C5E1J8_9DELT 7-cyano-7-deazaguanine synthase OS=Corallococcus exiguus; OX = 83462 GN=queC PE=3 SV=1
MAKRAVVLLSGGLDSTTCLAMAKADGFEPVCLSIAYGQRHSVELERAKKVAAIMGVRDVRVVTVDLRQVGGSALTDDIPVPKDRSEDDMSHDVPVTYVPARNALFLSMALGLAEVVGATDLYIGVNAVDYSGYPDCRPEFIRSFETMAQLATKAGVEGATFKVHAPLSGLTKAQIIQAGVKLGVDYGMTHSCYDPDAQGRACGRCDSCLLRAKGFQEAGVPDPTVYTDGVR

SEQ ID NO: 37629 - protein, 231 aa, Corallococcus sp.
  REGION 1..231: note = tr|A0A554GCM2|A0A554GCM2_9DELT 7-cyano-7-deazaguanine synthase OS=Corallococcus sp. Z5C101001 OX=2596829 GN=queC PE=3 SV=1
MAKRAVVLLSGGLDSTTCLAMAKADGFEPVCLCIAYGQRHAVELDRARKVAAAMGVRDVRVVSVDLRQVGGSALTDDIPVPKDRSEDAMSHDVPVTYVPARNALFLSLALGLAEVVDATDLYIGVNAVDYSGYPDCRPEFIRSFEAMAQLATKAGVEGARFQVHAPLSGLTKAQIIQAGVKLGVDYGMTHSCYDPDAQGRACGRCDSCVLRAKGFQEAGVPDPTPYTDGVR

SEQ ID NO: 37630 - protein, 231 aa, Corallococcus sp.
  REGION 1..231: note = tr|A0A3A8KG82|A0A3A8KG82_9DELT 7-cyano-7-deazaguanine synthase OS=Corallococcus sp. CA053C OX=2316732 GN=queC PE=3 SV=1
MAKRAVVLLSGGLDSTTCVAMAKADGFEPVCLSIAYGQRHTVELERARKVAQAMGVRDVRVVNVDLRQIGGSALTDDIPVPKDRTEDAMSHDVPITYVPARNALFLSLALGLAEVVGATDLYIGVNAVDYSGYPDCRPEFIRSFEAMAQLATKAGVEGARFQVHAPLSGLTKAQIIQAGVKLGVDYGMTLSCYDPDPQGRACGHCDSCLLRAKGFQEAGVADPTTYVEGVR

SEQ ID NO: 37631 - protein, 238 aa, unidentified
  source 1..238: note = Coriobacteriaceae bacterium
  REGION 1..238: note = tr|A0A0A8BBS6|A0A0A8BBS6_9ACTN 7-cyano-7-deazaguanine synthase OS=Coriobacteriaceae bacterium 68-1-3 OX=1531429 GN=queC PE=3 SV=1
MDGSVSAASCAVVLSSGGIDSTTCLALAVDRFGAENVTALGVSYGQKHVRELQSARAVAKYYQVAQRTLDLSNVLAASTNALMAHSSRAIEHESYGRQIEERGEGPVSTYVPFRNGLMLSAAAAFALSVYPDRPVLLYLGAHADDAAGSAYPDCSPEFVAAMGRAVELGTYGLVSLEAPFANVNKAAVVKCGLDMAVPYHLTWSCYEGNEKPCGTCGTCIDRIAAFRANGMDDPLEYA

SEQ ID NO: 37632 - protein, 243 aa, unidentified
  source 1..243: note = Coriobacteriia bacterium
  REGION 1..243: note = tr|A0A2V2EAA8|A0A2V2EAA8_9ACTN 7-cyano-7-deazaguanine synthase OS=Coriobacteriia bacterium OX=2052159 GN=queC PE=3 SV=1
MEEKALVLCSGGVDSTTLLAMAVSRYGAKNVYALSISYGQRHNKEIESAKAVAAHYGVEQRFLDLGAIFADSDCSLLSHSSQDIPEESYADQLAESDGKPVSTYVPFRNGLFLSAAASMALSLGCGAIYYGAHHDDWAGNAYPDCSREFVDAMNRAIVEGTGGELHLCAPFVEMSKADIVARGIELGVPYELTWSCYEGGDYPCGACGTCIDRNRAFGANGMRDPLLDRLDAERAAANAEGEE

SEQ ID NO: 37633 - protein, 249 aa, unidentified
  source 1..249: note = Corticibacter populi
  REGION 1..249: note = tr|A0A3M6QVF5|A0A3M6QVF5_9BURK 7-cyano-7-deazaguanine synthase OS=Corticibacter populi; OX = 1550736 GN=queC PE=3 SV=1
MRMDALQPRRALVLLSGGQDSATCLAWALARYAHVETIGFDYGQRHRVELDCRTRLREGMAALQPSWTERLGEDHLLTVDVLGQLGGTAMTENVAIAMQADGLPNTFVPGRNLLFFTLAAALAYRRDLEVLVGGMSQTDYSGYPDCRDNTLKALQVALSLGVERPLTLETPLMWLDKARTWELAWQLGGTALVELVRTDSHTCYLGLRGPGHLHAWGHGCGSCPACELRAQGHARWLAAQAAHQGMPQA

SEQ ID NO: 37634 - protein, 232 aa, Cosenzaea myxofaciens
  REGION 1..232: note = tr|A0A198FKW9|A0A198FKW9_9GAMM 7-cyano-7-deazaguanine synthase OS=Cosenzaea myxofaciens ATCC 19692 OX=1354337 GN=queC PE=3 SV=1
MKKTVVVFSGGQDSTTCLIQAIEQYDEVHCITFNYGQRHKEEIEVAQKISHLLGVAAHKVLDVSLLNELAISSLTRDNIPVPDFKESEESDIPSTFVPGRNILFLTLAAIYAYQIGAESVITGVCETDFSGYPDCRDEFVKALNHAVNLGIARDIKFITPLMWLDKAQTWALADYYNKLEFIRNETLTCYNGVQGDGCGECAACHLRARGLAMYLQDKSRIMTSMKKSVGLK

SEQ ID NO: 37635 - protein, 226 aa, Coxiella burnetii
  REGION 1..226: note = sp|Q83A28|QUEC_COXBU 7-cyano-7-deazaguanine synthase; OS = Coxiella burnetii (strain RSA 493 / Nine Mile phase I); OX = 227377 GN=queC PE=3 SV=2
MKKAVILISGGLDSTTCLAVAKSKGFSCYALSFDYGQKHHSELVAAEKIAAHFNVVRYEVVTLSIGKLGGSALTDNSLDVPDYGGNESIPITYVPARNTIFLSIALGWAEILDAESILIGASAIDYSGYPDCRPEYIAAFQNLANLATKRGIEGHSIKIEAPLIHLSKAETIKLGYSLGVDYSMTVSCYRANEEGLACGYCDSCELRKKGFKEAEIKDPTQYITKV

SEQ ID NO: 37636 - protein, 226 aa, Coxiella burnetii
  REGION 1..226: note = sp|A9NBS5|QUEC_COXBR 7-cyano-7-deazaguanine synthase; OS = Coxiella burnetii (strain RSA 331 / Henzerling II); OX = 360115 GN=queC PE=3 SV=1
MKKAVILISGGLDSTTCLAVAKSKGFSCYALSFDYGQKHHSELVAAEKIAAHFNVVRHEVVTLSIGKLGGSALTDNSLDVPDYGGNESIPITYVPARNTIFLSIALGWAEILDAESILIGASAIDYSGYPDCRPEYIAAFQNLANLATKRGIEGHSIKIEAPLIHLSKAETIKLGYSLGVDYSMTVSCYRANEEGLACGYCDSCELRKKGFKEAEIKDPTQYITKV

SEQ ID NO: 37637 - protein, 213 aa, Coxiella sp.
  REGION 1..213: note = tr|A0A2G1ZXH9|A0A2G1ZXH9_9COXI 7-cyano-7-deazaguanine synthase OS=Coxiella sp. (in: Bacteria) OX=59288 GN=queC PE=3 SV=1
MMKKAVVFLSGGVDSTTCLAIAQSQGYACYALTFDYGQRNHHEIVCATAIAKEMEVAEHRIFKVDLQQWKGSALTDATLDVPHERSDVIPITYVPARNTIFLSLALAWAETLGAHDIFFGANADDQLNYPDCRPEYIDAFVKMANLATRERQYQIHTPLLDWDKADIIRKGLSLDVHYSLTLSCYDPDSNGIACGQCDACHFRQQGFDAVKED

SEQ ID NO: 37638 - protein, 228 aa, Coxiella sp.
  REGION 1..228: note = tr|A0A0S7XXR2|A0A0S7XXR2_9COXI 7-cyano-7-deazaguanine synthase OS=Coxiella sp. DG_40; OX = 1703354 GN=queC PE=3 SV=1
MKNKTPKAVILLSGGIDSMTCLGIAKSQNFECYTLSFDYGQRHNFELEAAKKIAAYFNVKEHRVVKINIGELGGSALTDKNIAVPRYQNSNEIPVTYVPARNTIFLSIALGWAEILGANDIFIGVSAIDYSGYPDCRPEFIKAFQNLADLATKVGVKGNSIRINAPLINLSKAETIKLGQKLGIDYSMTVTCYQVDEKGCACGKCDSCVLRIKGFKEAGMVDPTQYKS

SEQ ID NO: 37639 - protein, 219 aa, unidentified
  source 1..219: note = Crassaminicella sp.
  REGION 1..219: note = tr|A0A5C0SHI9|A0A5C0SHI9_9CLOT 7-cyano-7-deazaguanine synthase OS=Crassaminicella sp. SY095 OX=2599308 GN=queC PE=3 SV=1
MNKEKAVVIFSGGQDSTTCLFWAKKRFKEVIAISFDYNQKHKLELECAKDICKKHNIEHYILDMALLNQLAPNSLTRTDIEVDKEAPKEGLPNSFVDGRNMLFLTFGAIFAKQRGINHIITGVSQSDFSGYPDCRDVFIKSINVTLNLAMDYQFVIHTPLMWINKEETWKLAYDLGVLDIIKEETLTCYNGIKGNGCGECPACHLRKKGYLDFKKSNNL

SEQ ID NO: 37640 - protein, 234 aa, unidentified
  source 1..234: note = Crenobacter cavernae
  REGION 1..234: note = tr|A0A345Y7D0|A0A345Y7D0_9NEIS 7-cyano-7-deazaguanine synthase OS=Crenobacter cavernae; OX = 2290923 GN=queC PE=3 SV=1
MSIPNQAGRALVVLSGGQDSTTCLFWAIQRFGRDAVEAVTFDYGQRHRVELDAARRIAQMAGVRQTVLPIDTFGVMGGNALTAQDIEPEQGARDDADKTLPNTFVPGRNLVFLTFAAALAWQKGMDHVVTGVAQTDYSGYPDCRENTLKALELAIRLGMDSRVQLHAPLMFMSKAETVHLAEEVGAMEALAYSHTCYNGAVPPCGVCASCELRAKGFAEAGVADPLVVRTRTGA

SEQ ID NO: 37641 - protein, 234 aa, unidentified
  source 1..234: note = Crenobacter cavernae
  REGION 1..234: note = tr|A0A4Q2J9I4|A0A4Q2J9I4_9NEIS 7-cyano-7-deazaguanine synthase OS=Crenobacter cavernae; OX = 2290923 GN=queC PE=3 SV=1
MSIPNQAGRALVVLSGGQDSTTCLFWAIQRFGRDAVEAVTFDYGQRHRVELTAARRIAKMAGVRQTVLPIDTFGVMGGNALTAQDIAPEEGARDDADKTLPNTFVPGRNLVFLTFAAALAWQKGMEHVVTGVAQTDYSGYPDCRENTLKALELAIRLGMDSRVQLHAPLMFMSKAETVHLAEEVGAMEALAYSHTCYNGAVPPCGVCASCELRAKGFAEAGVEDPLVVRTRTGA

SEQ ID NO: 37642 - protein, 234 aa, unidentified
  source 1..234: note = Crenobacter luteus
  REGION 1..234: note = tr|A0A161SIS7|A0A161SIS7_9NEIS 7-cyano-7-deazaguanine synthase OS=Crenobacter luteus; OX = 1452487 GN=queC PE=3 SV=1
MSTPNKTERALVVLSGGQDSTTCLYWAIQRFGRDAVEAVTFDYGQRHRVELTAARHIAQMAGVRQTVLPIDTFGAMGGNALTAADIEPEQGARDDADTALPNTFVPGRNLVFLTFAAALAWQKGMEHVVTGVAQTDYSGYPDCRENTLKALELAIRLGMDSRVQLHAPLMFMSKAETVKLAQQVGAMEALAYSHTCYNGAVPPCGVCASCELRAKGFLEAGVADPLVVRTGAGA

SEQ ID NO: 37643 - protein, 228 aa, unidentified
  source 1..228: note = Crenobacter sp.
  REGION 1..228: note = tr|A0A4V4N957|A0A4V4N957_9NEIS 7-cyano-7-deazaguanine synthase OS=Crenobacter sp. GY 70310 OX=2563443 GN=queC PE=3 SV=1
MNHALPDPACALVVLSGGQDSTTCLYWALARYRRVEAVTFDYGQRHRVELDAARTIARMAGVSQTVLPIDTFAALGGNALTDSGIAPAAVEAGALPNTFVPGRNLVFLTFAAALAYQRGLGEIVTGVAEADYSGYPDCRAHTLAALEGAINLGMDTRIRLVAPLMALSKAETVALAAEVGALDALAYSHTCYEGEVPPCGRCVSCELRAKGFAEAGVADPLISRTRGR

SEQ ID NO: 37644 - protein, 224 aa, Crenothrix polyspora
  REGION 1..224: note = tr|A0A1R4HF53|A0A1R4HF53_9GAMM 7-cyano-7-deazaguanine synthase OS=Crenothrix polyspora; OX = 360316 GN=queC PE=3 SV=1
MPKKAIVLLSGGLDSVTLLALAQQQGYVCHALSFDYGQRHNAELVAAAQIADEYQVASHKIITLGLGTITGSALTDANIDVPNTPQTGIPVTYVPARNTIFLSFALGWAEVLKVRDIFIGVNAVDYSGYPDCRPAFITAFTALANLATKAGVEGEPFTIHTPLIALSKADIITHGVALGVNYQRTVSCYAADEQGRACGECDACRLRKMGFEQTGIADPTRYQH

SEQ ID NO: 37645 - protein, 224 aa, Crenothrix polyspora
  REGION 1..224: note = tr|A0A1R4HAY0|A0A1R4HAY0_9GAMM 7-cyano-7-deazaguanine synthase OS=Crenothrix polyspora; OX = 360316 GN=queC PE=3 SV=1
MQKKAIVLLSGGLDSVTLLALAQQQGYQCYALSFDYGQRHNAELIAAAQIAVDYGVESHKIITLGLGSISGSALTDSDIDVPNTPQTGIPVTYVPARNTIFLSFALGWAEVLKVHDIFIGVNAVDYSGYPDCRPEFIKAFTTLANLATKAGVEGEPFTIHTPLISLSKADIIKQGVALGVDYQRTVSCYAADEQGRACGVCDACRLRAIGFTHAGITDPTRYQR

SEQ ID NO: 37646 - protein, 224 aa, Crenothrix sp.
  REGION 1..224: note = tr|A0A1Y2ZXC3|A0A1Y2ZXC3_9GAMM 7-cyano-7-deazaguanine synthase OS=Crenothrix sp. D3; OX = 1880899 GN=queC PE=3 SV=1
MQKKAIVLLSGGLDSITVLALAQQQGFKCYALSFDYGQRHNAELIAAAQIAADYQVADHKIIKLGLGSIGGSALTDEHIAVPHTLQTGIPVTYVPARNTIFLSFALGWAEVLHLHDIFIGVNAVDYSGYPDCRPEFIESFQKLANLATKAGVEGTHFSIHTPLIHLSKAEIIKTGIALDVDYQRTVSCYSADEQGHACGECDACRLRKAGFIEAGIPDCTRYQK

SEQ ID NO: 37647 - protein, 233 aa, unidentified
  source 1..233: note = Criblamydia sequanensis
  REGION 1..233: note = tr|A0A090D1S4|A0A090D1S4_9BACT 7-cyano-7-deazaguanine synthase OS=Criblamydia sequanensis CRIB-18 OX=1437425 GN=quec1 PE=3 SV=1
MAPKMKKKAVVIHSGGMDSSICLALAIEKHGRENVLSLSFFYNQRHTEEVNQAALISKDWKVDHIELPIDCLQEITESALIGKSQAIQHDKGKEANTLVVGRNGLMIRLASIHAHFLGAKEVYTGVIELDGKANGYRDCTREYVDLLEKILRMDFDDDSFEIKTPLVFLTKKETLEVAHQMGLLDYLLQNTITCYEGVKWAGCKKCPSCLLRNQGLKEFKKDHPEFQLPFSLD

SEQ ID NO: 37648 - protein, 223 aa, unidentified
  source 1..223: note = Criblamydia sequanensis
  REGION 1..223: note = tr|A0A090D353|A0A090D353_9BACT 7-cyano-7-deazaguanine synthase OS=Criblamydia sequanensis CRIB-18 OX=1437425 GN=quec3 PE=3 SV=1
MKAIILFSGGLDSTVLLAKALEEKKQVFLLSFDYGQRHIVELSSAQKIASHYGLTIKTLKLPNDCFRGSSLIGDGEVSREIKELKVNDIPTTYVPARNTLFFAFAMGFAETIDANEIHYGANKLDYNAYPDCRPEFISAFQKVLDIGSKNANLGKPIKLCTPLVHLDKSEIIQLGKKLKAPIELSFSCYSPSQEGLSCEECLSCRLRNEGFKNVDQSARARYL

SEQ ID NO: 37649 - protein, 438 aa, unidentified
  source 1..438: note = Cricetibacter osteomyelitidis
  REGION 1..438: note = tr|A0A4R2TJ12|A0A4R2TJ12_9PAST 7-cyano-7-deazaguanine synthase OS=Cricetibacter osteomyelitidis OX=1521931 GN=EDC44_10262 PE=3 SV=1
MTQLVFHHDIEQLKNLPNNVVPVQLYGTGDKNLQIANIGNKVLDSVRRLGAGLNDQVMDFLTIAMAVTAADTFVLRKDTANGWCRSFSITLPLCQPDIWQASKAHLEQILHFLSGDIWQFDFQENGQFPPRPYSQNGRAKLVDLRNKDCVCLFSGGLDSAIGAIDLLELGYSPVLVSHSYKGDRSRQQAIIQQLNQNGYINQFSQFNAIAQPHLNNGRTTEITMRTRSLNFLAFAIASAYALQEVVQEEIDVFVPENGVISINAPLTARRVGTLSTRTTHPYFIQEIQKLFTAINIPFTLKNPYQFKTKGQMIEKCRNLPLLQEIIPSTVSCSHWKRKNQQCGVCVPCLIRRASLHYAGMTNDAEYEFNDIRQILTNQDRKDDLFALISAIRQKNHRNMNQWVLQSGSLPIQQLNQFADVFMNGLNEVEQLLIANRIL

SEQ ID NO: 37650 - protein, 223 aa, unidentified
  source 1..223: note = Cricetibacter osteomyelitidis
  REGION 1..223: note = tr|A0A4R2T2Z6|A0A4R2T2Z6_9PAST 7-cyano-7-deazaguanine synthase OS=Cricetibacter osteomyelitidis OX=1521931 GN=queC PE=3 SV=1
MKNTNPTHRKAVVIFSGGQDSTTCLVKAIRDYGVENVETVTFQYGQRHSIELEKARWIAQDLGVKQTLVDMSVIKAITQNALMDTQAKIEQQGDMPNTFVDGRNALFLLYTAIYAKGQGITDIITGVCETDFSGYPDCRDVFIKSMNVTINLAMDYNFNIITPLMYLTKAQTWRLADELGYLDYIQRHTHTCYLGVEQGCGECPSCILREKGLQEYLGSKNKN

SEQ ID NO: 37651 - protein, 232 aa, unidentified
  source 1..232: note = Crinalium epipsammum
  REGION 1..232: note = tr|K9W4C8|K9W4C8_9CYAN 7-cyano-7-deazaguanine synthase OS=Crinalium epipsammum PCC 9333 OX=1173022; GN = queC PE=3 SV=1
MKAVVLLSGGLDSSTVLYQAKMDGCVVHAISFDYQQRHQLELQAATKIASAAGVIEHQIIAFDLRRWGGSALTDDAIAVPTNRILTDISEYIPVTYVPARNTIFLSFALAFAEAKGAERVYIGVNAVDYSGYPDCRPDYIQAMQEVFRLGTKQGREGEPISIVAPLIKLKKTEIIQLGNNLGVPWELTWSCYSGGNIACGVCDSCRLRLAAFSELGLEDPLPYAVRGEQGNQ

SEQ ID NO: 37652 - protein, 232 aa, Croceicoccus marinus
  REGION 1..232: note = tr|A0A1Z1F7Z2|A0A1Z1F7Z2_9SPHN 7-cyano-7-deazaguanine synthase OS=Croceicoccus marinus; OX = 450378 GN=queC PE=3 SV=1
MTKDDLNEKPAVVLLSGGLDSMVTAGIAKTQGYSVNALTVDYNQRHRRELDSATVIANAIDVDRHLVLPLDLRKIGGSALTSEMAVPKDGVGSDIPITYVPARNLVFLSLTLAWCEAIGAQDIFIGVNALDYSGYPDCRPEFIKSFEKTAELATKAGSEGAKFSIHAPLQFMSKAEIVDKAYELGLDPSMSWSCYDPGEDGRPCGLCDSCRLRQQGFAQTGRQDPVDYSKRI

SEQ ID NO: 37653 - protein, 228 aa, unidentified
  source 1..228: note = Croceicoccus naphthovorans
  REGION 1..228: note = tr|A0A0G3XCJ6|A0A0G3XCJ6_9SPHN 7-cyano-7-deazaguanine synthase OS=Croceicoccus naphthovorans OX=1348774 GN=queC PE=3 SV=1
MEKSQKKAVVLLSGGLDSMVTAGIAREKGYALNALTIDYNQRHAREIQSAKTIAVALEVDRHLLLPLDLRAFGGSALTDSIDVPKGGVGNDIPVTYVPARNLVFLSLTLSWAEAIGARDIFIGVNALDYSGYPDCRPEFIEAFQELARLATKAGAEGHQFTIHAPLQHLGKAEIVKEAYRLDLDPGMSWSCYDPELDGSACGLCDSCRLRLAGFAAAQHTDPVSYRQT

SEQ ID NO: 37654 - protein, 227 aa, unidentified
  source 1..227: note = Croceicoccus ponticola
  REGION 1..227: note = tr|A0A437H2J1|A0A437H2J1_9SPHN 7-cyano-7-deazaguanine synthase OS=Croceicoccus ponticola; OX = 2217664 GN=queC PE=3 SV=1
MSEHTNRSAVVLLSGGLDSMVTAAIAHEQGYRLNALTIDYNQRHRRELESATTIAKSLGAERHVVLPLDLRAFGGSALTDDIPVPKTGVGSDIPVTYVPARNLVFLSLTLAWAEALGARDIFIGVNALDYSGYPDCRPEFIEGFQNLARLATKVGSDGGNFTVHAPLQFLGKAAIVDEAYRLGLDPAASWSCYDPTPDGFACGLCDSCRLRLEGFERAGREDPLHYA

SEQ ID NO: 37655 - protein, 232 aa, Croceicoccus sp.
  REGION 1..232: note = tr|A0A2D8D3U8|A0A2D8D3U8_9SPHN 7-cyano-7-deazaguanine synthase OS=Croceicoccus sp.; OX = 1927144 GN=queC PE=3 SV=1
MTGTEPNEKHAVVLLSGGLDSMVTAAIARSQGYTINALTIDYNQRHRRELESASRIAKSLGAARHLVLPLDLRKIGGSALTSDIEVPKDGLGSDIPVTYVPARNLVFLSLTLAWCEAIEAQDIFIGVNALDYSGYPDCRPEFISSFEETAKLATKAGSEGAAFKVHAPLQYLSKADIVEKAYELELDPGLSWSCYDPGADDRACGLCDSCRLRQQGFDQTGRKDPLPYRVRI

SEQ ID NO: 37656 - protein, 231 aa, unidentified
  source 1..231: note = Crocosphaera chwakensis
  REGION 1..231: note = tr|A3IPJ5|A3IPJ5_9CHRO 7-cyano-7-deazaguanine synthase OS=Crocosphaera chwakensis CCY0110 OX=391612; GN = queC PE=3 SV=1
MIHKPLAVVLLSGGLDSATSAAIAIDQGYEVIALSLRYGQRHQRELNAAQTIAQALNISKHYIIDVNIAQWGGSSLTDSSLSLPQSGVDTTVIPSTYVPGRNTVFIALALSLAEAKGAQAIYLGINAVDYSGYPDCRPDYLQAYQTLANLSSKAGLEGKAPLLTAPLITKTKVDIIKDAIKLGVPIAKTWSCYQGKPEPCGLCDSCRIRDRALIEAGYPELATVKGREFYE

SEQ ID NO: 37657 - protein, 233 aa, unidentified
  source 1..233: note = Crocosphaera subtropica
  REGION 1..233: note = tr|B1WWK5|B1WWK5_CROS5 7-cyano-7-deazaguanine synthase OS=Crocosphaera subtropica (strain ATCC 51142 / BH68) OX=43989 GN=exsB PE=3 SV=1
MTNKPVAVVLLSGGLDSATSAAIAIDQGYEVIALSLRYGQRHQRELDAAKIIAQTLNITQHYTIDVNIAQWGGSSLTDTSLSLPQSGVDATIIPSTYVPGRNTVFIALALSLAEAKGAQAIYLGINAVDYSGYPDCRPDYLQAYQTLANLSSKAGLVGKAPQLLAPLITKTKVDIIKDAIKLGVPITKTWSCYQGEQEPCGLCDSCRIRDQALIEAGYPELATPKGREFKDLS

SEQ ID NO: 37658 - protein, 230 aa, unidentified
  source 1..230: note = Crocosphaera watsonii
  REGION 1..230: note = tr|T2IAF5|T2IAF5_CROWT 7-cyano-7-deazaguanine synthase OS=Crocosphaera watsonii WH 8502 OX=423474; GN = queC PE=3 SV=1
MTHKPIAVVLLSGGLDSATSAAIAIDQGYEVIALSLEYGQRHQRELEAAKTIAEALNITQHYIIDVNIAQWGGSSLTDSSLSLPQGGVDPNEIPSTYVPGRNTVFIGLALSLGEAKGATAIYLGINAVDYSGYPDCRPEYLQAYQNLANLSSKAGIEGKAPQLVAPLISKTKVDIVKDAIRLGVPISKTWSCYQGEQEPCGLCDSCRIRDRALIEAGYPQLATTQGRAFL

SEQ ID NO: 37659 - protein, 230 aa, unidentified; identical to SEQ ID NO: 37658
  source 1..230: note = Crocosphaera watsonii
  REGION 1..230: note = tr|T2JZP3|T2JZP3_CROWT 7-cyano-7-deazaguanine synthase OS=Crocosphaera watsonii WH 0402 OX=1284629; GN = queC PE=3 SV=1

SEQ ID NO: 37660 - protein, 231 aa, Cronobacter condimenti
  REGION 1..231: note = tr|K8A0R0|K8A0R0_9ENTR 7-cyano-7-deazaguanine synthase OS=Cronobacter condimenti 1330 OX=1073999 GN=queC; PE = 3 SV=1
MKRAVVVFSGGQDSTTCLIQALHQYDEVHCVTFDYGQRHRAEIDVASALAASLGARAHKVLDVTLLNELAVSSLTRDSIPVPDYDPDAEGLPSTFVPGRNILFLTLASIYAYQVQAEAVITGVCETDFSGYPDCRDEFVKALNHAVMLGMARDVRFETPLMWLNKAETWALADYWDKLEVIRHQTLTCYNGIQGDGCGECAACHLRANGLSQYQADRPAIMAAMKQKTGLK

SEQ ID NO: 37661 - protein, 231 aa, Cronobacter dublinensis
  REGION 1..231: note = tr|K8B4A1|K8B4A1_9ENTR 7-cyano-7-deazaguanine synthase OS=Cronobacter dublinensis 1210 OX=1208656; GN = queC PE=3 SV=1
MKRAVVVFSGGQDSTTCLIQALHQYDEVHCVTFDYGQRHRAEIDVASALAASLGARAHKVLDVTLLNELAVSSLTRDSIPVPDYDPDAEGLPSTFVPGRNILFLTLASVYAYQVQAEAVITGVCETDFSGYPDCRDEFVKALNHAVTLGMARDVRFETPLMWLNKAETWALADYWGKLDVIRQQTLTCYNGIQGDGCGECAACHLRANGLSEYQADRPAVMAAMKQKTGLK

SEQ ID NO: 37662 - protein, 231 aa, Cronobacter dublinensis; identical to SEQ ID NO: 37661
  REGION 1..231: note = tr|A0A0K2NZH4|A0A0K2NZH4_9ENTR 7-cyano-7-deazaguanine synthase OS=Cronobacter dublinensis subsp. dublinensis LMG 23823 OX=1159554 GN=queC PE=3 SV=1

SEQ ID NO: 37663 - protein, 231 aa, Cronobacter malonaticus
  REGION 1..231: note = tr|V5U305|V5U305_9ENTR 7-cyano-7-deazaguanine synthase OS=Cronobacter malonaticus OX=413503 GN=queC PE=3; SV = 1
MKRAVVVFSGGQDSTTCLIQALHQYDEVHCVTFDYGQRHRAEIDVASTLAASLGARAHKVLDVTLLNELAVSSLTRDSIPVPDYDPDAEGLPSTFVPGRNILFLTLASIYAYQVQAEAVITGVCETDFSGYPDCRDEFVKALNHAVALGMARDVRFETPLMWLNKAETWALADYWGKLDVIRQQTLTCYNGIQGDGCGECAACHLRANGLSQYQDDKPAIMAAMKQKTGLK

SEQ ID NO: 37664 - protein, 231 aa, Cronobacter malonaticus
  REGION 1..231: note = tr|A0A423Y4H8|A0A423Y4H8_9ENTR 7-cyano-7-deazaguanine synthase OS=Cronobacter malonaticus; OX = 413503 GN=queC PE=3 SV=1
MKRAVVVFSGGQDSTTCLIQALHQYDEVHCVTFDYGQRHRAEIDVASTLAASLGARAHKVLDVTLLNELAVSSLTRDSIPVPDYDPDAEGLPSTFVPGRNILFLTLASIYAYQVQAEAVITGVCETDFSGYPDCRDEFVKALNHAVALGMARDVRFETPLMWLNKAETWALADYWGKLDVIRQQTLTCYNGIQGDGCGECAACHLRANGLNQYQADKPAIMTAMKQKTGLK

SEQ ID NO: 37665 - protein, 231 aa, Cronobacter muytjensii
  REGION 1..231: note = tr|A0A2T7AQC7|A0A2T7AQC7_9ENTR 7-cyano-7-deazaguanine synthase OS=Cronobacter muytjensii; OX = 413501 GN=queC PE=3 SV=1
MKRAVVVFSGGQDSTTCLIQALHQYDEVHCVTFDYGQRHRAEIDVASALAASLGARAHKVLDVTLLNELAVSSLTRDSIPVPDYDPDAGGLPSTFVPGRNILFLTLASVYAYQVQAEAVITGVCETDFSGYPDCRDEFVKALNHAVTLGMARDVRFETPLMWLNKAETWALADYWGKLDVIRQQTLTCYNGIQGDGCGECAACHLRANGLSQYQANQPAVMAAMKQKTGLK

SEQ ID NO: 37666 - protein, 231 aa, Cronobacter sakazakii
  REGION 1..231: note = sp|A7MFJ8|QUEC_CROS8 7-cyano-7-deazaguanine synthase; OS = Cronobacter sakazakii (strain ATCC BAA-894) OX=290339; GN = queC PE=3 SV=1
MKRAVVVFSGGQDSTTCLIQALHQYDEVHCVTFDYGQRHRAEIDVASALAASLGARAHKVLDVTLLNELAVSSLTRDSIPVPDYDPDAEGLPSTFVPGRNILFLTLASIYAYQVQAEAVITGVCETDFSGYPDCRDEFVKALNHAVALGMARDVRFETPLMWLNKAETWALADYWGKLDVIRHQTLTCYNGIQGDGCGECAACHLRANGLSQYEADKPAIMAAMKQKTGLK

SEQ ID NO: 37667 - protein, 231 aa, Cronobacter sakazakii
  REGION 1..231: note = tr|A0A5D1BHC7|A0A5D1BHC7_CROSK 7-cyano-7-deazaguanine synthase OS=Cronobacter sakazakii; OX = 28141 GN=queC PE=3 SV=1
MKRAVVVFSGGQDSTTCLIQALHQYDEVHCVTFDYGQRHRAEIDVASVLAASLGARAHKVLDVTLLNELAVSSLTRDSIPVPDYDPDAEGLPSTFVPGRNILFLTLASIYAYQVQAEAVITGVCETDFSGYPDCRDEFVKALNHAVALGMARDVRFETPLMWLNKAETWALADYWGKLDVIRHQTLTCYNGIQGDGCGECAACHLRANGLSQYKADKPAIMAAMKQKTGLK

SEQ ID NO: 37668 - protein, 231 aa, Cronobacter sp.
  REGION 1..231: note = tr|A0A5J6XC20|A0A5J6XC20_9ENTR 7-cyano-7-deazaguanine synthase QueC OS=Cronobacter sp. JZ38 OX=1906275 GN=BJP61_16070 PE=4 SV=1
MKRAVVVFSGGQDSTTCLIQALHQYDEVHCVTFDYGQRHRAEIDVASALAASLGARAHKVLDVTLLNELAVSSLTRDSIPVPDYDPDADGLPSTFVPGRNILFLTLASVYAYQVQAEAVITGVCETDFSGYPDCRDEFVKALNHAVTLGMARDVRFETPLMWLNKAETWALADYWGKLDVIRQQTLTCYNGIQGDGCGECAACHLRANGLSQYQANQPAVMAAMKQKTGLK

SEQ ID NO: 37669 - protein, 231 aa, Cronobacter turicensis
  REGION 1..231: note = tr|C9XXP5|C9XXP5_CROTZ 7-cyano-7-deazaguanine synthase OS=Cronobacter turicensis (strain DSM 18703 / LMG 23827 / z3032) OX=693216 GN=queC PE=3 SV=1
MKRAVVVFSGGQDSTTCLIQALHQYDEVHCVTFDYGQRHRAEIDVASALAASLGARAHKVLDVTLLNELAVSSLTRDSIPVPDYDPNAEGLPSTFVPGRNILFLTLASIYAYQVQAEAVITGVCETDFSGYPDCRDEFVKALNHAVALGMARDVRFETPLMWLNKAETWALADYWGKLDVIRQQTLTCYNGIQGDGCGECAACHLRANGLSQYQAAKPAIMAAMKQKTGLK

SEQ ID NO: 37670 - protein, 231 aa, Cronobacter turicensis
  REGION 1..231: note = tr|A0A2T7B6L7|A0A2T7B6L7_9ENTR 7-cyano-7-deazaguanine synthase OS=Cronobacter turicensis; OX = 413502 GN=queC PE=3 SV=1
MKRAVVVFSGGQDSTTCLIQALHQYDEVHCVTFDYGQRHRAEIDVASALAASLGARAHKVLDVTLLNELAVSSLTRDSIPVPDYDPDAEGLPSTFVPGRNILFLTLASIYAYQVQAEAVITGVCETDFSGYPDCRDEFVKALNHAVALGMARDVRFETPLMWLNKAETWALADYWGKLDVIRQQTLTCYNGIQGDGCGECAACHLRANGLSQYQAAKPAVMAAMKQKTGLK

SEQ ID NO: 37671 - protein, 231 aa, Cronobacter universalis
  REGION 1..231: note = tr|A0A376E3R4|A0A376E3R4_9ENTR 7-cyano-7-deazaguanine synthase OS=Cronobacter universalis NCTC 9529 OX=1074000 GN=queC PE=3 SV=1
MKRAVVVFSGGQDSTTCLIQALHQYDEVHCVTFDYGQRHRAEIDVASALAASLGARAHKVLDVTLLNELAVSSLTRDSIPVPDYDPDAEGLPSTFVPGRNILFLTLASIYAYQVQAEAVITGVCETDFSGYPDCRDEFVKALNHAVALGMARDVRFETPLMWLNKAETWALADYWGKLDVIRQQTLTCYNGIQGDGCGECAACHLRANGLSQYQADKPAIMAAMKQKTGLK

SEQ ID NO: 37672 - protein, 221 aa, unidentified
  source 1..221: note = Cruoricaptor ignavus
  REGION 1..221: note = tr|A0A1M6G662|A0A1M6G662_9FLAO 7-cyano-7-deazaguanine synthase OS=Cruoricaptor ignavus; OX = 1118202 GN=queC PE=3 SV=1
MKAVVLLSGGQDSTTCLYWAKERFEDVHAVSFDYGQTNIEEVERARKIAKEAKSQHRVFDISGILRTGSLVTGENHNSKSSINSDLPASFVGGRNLLFLTITASYCAEFGINDIVIGACQSDFNGYPDCRRNTITAMELSLSLGMGMGDIRIHSPLMYLSKAEIWKLSKELGCIDVIVNDTLTDYNGNTSKMNEWGVGDEDNNGSKLRAEGYREAKMKGWI

SEQ ID NO: 37673 - protein, 220 aa, unidentified
  source 1..220: note = Cryomorphaceae bacterium
  REGION 1..220: note = tr|A0A2D4QW29|A0A2D4QW29_9FLAO 7-cyano-7-deazaguanine synthase OS=Cryomorphaceae bacterium OX=1898111 GN=queC PE=3 SV=1
MTNKVVVIYSGGMDSFTLMNQAIAQGKRVYALSFNYGQKHSKELHYAQKVCDDLGLPHKIVDITPIHQLLMGSSLTDDIEIPEGHYEEESMKSTVVPNRNMIMLSLAIAYAVSIKAEAVYYGAHGGDHAIYPDCRPEFIEKMDAVSKVANYEPVEIIAPFQNINKTEILSKGLAMGLDYSKTWTCYNGRERACGKCGACQERLEAFRDNGQIDPLKYESA

SEQ ID NO: 37674 - protein, 240 aa, Cryptobacterium curtum
  REGION 1..240: note = tr|C7ML00|C7ML00_CRYCD 7-cyano-7-deazaguanine synthase OS=Cryptobacterium curtum (strain ATCC 700683 / DSM 15641 / 12-3) OX=469378 GN=queC PE=3 SV=1
MTRTNETAPASTAHALVLSSGGVDSTTCLALAVDRFGQANVSTVSFFYGQRHSRELDAAAAVAEHYGVHHYVLDLASVMHYSNNALMATSTQHVPHGSYAQQMEDDGHPNTYVPFRNGLMLSAAAALAASLFPDTSCALYLGAHADDAAGNAYPDCSPAFTAHMGRAISFGTYGNVRLETPFVNQNKAQVVAEGLRLGVPYEMTWSCYEGGEKPCGTCATCLDRIAAFEANGVKDPVSYR

SEQ ID NO: 37675 - protein, 229 aa, Cryptobacterium sp.
  REGION 1..229: note = tr|R7CEM2|R7CEM2_9ACTN 7-cyano-7-deazaguanine synthase OS=Cryptobacterium sp. CAG:338 OX=1262868 GN=queC; PE = 3 SV=1
MRALVLCSGGVDSTTLLAMAVEKYGSDEVCALSISYGQRHEKELKAAHAVAAHYGVTQRFLNLEEIFADSSCSLLAHSGVDIPKESYAEQLKDSDTALVSTYVPFRNGLFLSSAASIALSLGCSVLYYGAHHDDWAGNAYPDCSLAFVEAMNEAIVQGTGGELHMEAPFVQWSKADIVKKGLELNVPYELTWSCYEGGDKPCGTCATCIDRARAFELNGTVDPLLTDNL

SEQ ID NO: 37676 - protein, 222 aa, unidentified
  source 1..222: note = Culturomica sp.
  REGION 1..222: note = tr|A0A356DIL1|A0A356DIL1_9BACT 7-cyano-7-deazaguanine synthase OS=Culturomica sp.; OX = 1926652 GN=queC PE=3 SV=1
MKKAIVLLSGGLDSSTALYVAKKEGFDELYALTFEYGQKHDREIRSASAIAKAVGVREHKIVRLMLNAWKGSSLTDPDVVIQDGDADRTDIPDTYVPARNMVFLSVAASYADALDITDIFIGVSEMDYSGYVDCREEFIRSMEQTINLGTVLGAEKKQKITIHAPFLRMTKADEVKLGTKLGVDFSLTWSCYRGGEKPCGTCDSCLLRARAFAEAGIVDPLV

SEQ ID NO: 37677 - protein, 239 aa, unidentified
  source 1..239: note = Cupriavidus alkaliphilus
  REGION 1..239: note = tr|A0A2W7PB81|A0A2W7PB81_9BURK 7-cyano-7-deazaguanine synthase OS=Cupriavidus alkaliphilus OX=942866 GN=queC PE=3 SV=1
MFLRAAPGATRTMTQRAIVLLSGGLDSATVLAMARAQGFETYALSMRYGQRHSSELEAAKRVAAALGAVRHEIVDLDLRRFGGSALTDDALEVPTDGASGGIPVTYVPARNTIMLSLALGWAEAVGGRDLFFGANAVDYSGYPDCRPEYVAAYETLANLATKAGVEGDRFRVHAPIIDMTKGEIIRAGMALGVDYSLTVSCYQADDDGRACGVCDSCRIRRAGFEAAGVPDPTRYQAAA

SEQ ID NO: 37678 - protein, 239 aa, unidentified
  source 1..239: note = Cupriavidus alkaliphilus
  REGION 1..239: note = tr|A0A329AYH5|A0A329AYH5_9BURK 7-cyano-7-deazaguanine synthase OS=Cupriavidus alkaliphilus OX=942866 GN=queC PE=3 SV=1
MFLRAAPGATRTMTQRAIVLLSGGLDSATVLAMARAQGFETYALSMRYGQRHSSELEAAKRVAAALGAVRHEIVDLDLRRFGGSALTDDALEVPTDGASGGIPVTYVPARNTIMLSLALGWAEAVGGRDLFFGANAVDYSGYPDCRPEYVAAYETLANLATKAGVEGDRFRVHAPIIDMTKGEIIRAGIALGVDYSLTVSCYQADDDGRACGVCDSCRIRRAGFEAAGVPDPTRYQAAA

SEQ ID NO: 37679 - protein, 227 aa, Cupriavidus basilensis
  REGION 1..227: note = tr|H1SFB5|H1SFB5_9BURK 7-cyano-7-deazaguanine synthase OS=Cupriavidus basilensis OR16 OX=1127483 GN=queC; PE = 3 SV=1
MKKRAIVLLSGGLDSATVLAMANAQGFETYALSMRYGQRHSSELEAAKRVAAAQGAVRHEIIDLDLRRFGGSALTDDSLDVPTDGAVGGIPVTYVPARNTIMLSLALGWAEAVGGRDLFFGANAVDYSGYPDCRPEYVSAYEALANLATKAGVEGERIRVHAPIIDMTKGEIIRAGVRLGVDYGMTVSCYKADDDGRACGVCDSCRIRRAGFEAAGVPDPTRYQGAA

SEQ ID NO: 37680 - protein, 227 aa, Cupriavidus basilensis
  REGION 1..227: note = tr|A0A0C4YC63|A0A0C4YC63_9BURK 7-cyano-7-deazaguanine synthase OS=Cupriavidus basilensis; OX = 68895 GN=queC PE=3 SV=1
MKKRAIVLLSGGLDSATVLAMANAQGFETYALSMRYGQRHSSELEAAKRVAAALGAVRHEIIDLDLRRFGGSALTDDSLEVPTDGAVGGIPVTYVPARNTIMLSLALGWAEAVGGRDLFFGANAVDYSGYPDCRPEYVSAYEALANLATKAGVEGERIRVHAPIIDMTKGEIIRAGVKLGVDYGMTVSCYKADDDGRACGVCDSCRIRRAGFEAAGVPDPTRYQGAA

SEQ ID NO: 37681 - protein, 227 aa, Cupriavidus campinensis
  REGION 1..227: note = tr|A0A556UQW0|A0A556UQW0_9BURK 7-cyano-7-deazaguanine synthase OS=Cupriavidus campinensis; OX = 151783 GN=queC PE=3 SV=1
MTKRAIVLLSGGLDSATVLAMANAAGFETYALSMRYGQRHSSELEAAKLVAAALGAKRHEIIDLDLRRFGGSALTDDTLDVPTDGATGGIPITYVPARNTIMLSLALGWAEAIGGRDLFFGANAVDYSGYPDCRPEYVSAYEALANLATKAGVEGDRFRVHAPIIDMTKAEIIRAGVKLGVDYGLTVSCYKADDAGRACGVCDSCRIRRAGFETAGVPDPTRYQAAA

SEQ ID NO: 37682 - protein, 229 aa, Cupriavidus gilardii
  REGION 1..229: note = tr|A0A0M4KQF6|A0A0M4KQF6_9BURK 7-cyano-7-deazaguanine synthase OS=Cupriavidus gilardii CR3 OX=1267562 GN=queC PE=3 SV=1
MTQRAIVLLSGGLDSATVLAMAKAQGFETYALSMRYGQRHSSELEAAKRVAAALGARRHEIVDLDLRRFGGSALTDDALEVPTDGAAGGIPVTYVPARNTIMLSLALGWAEAIGGRDLFFGANAVDYSGYPDCRPEYVQAYEALANLATKAGVEGERIRVHAPIIDMTKAEIIQAGVRLGVDYGMTVSCYQADEQGRACGVCDSCRIRRAGFEAAGVPDPTRYQNAAAS

SEQ ID NO: 37683 - protein, 227 aa, Cupriavidus gilardii
  REGION 1..227: note = tr|A0A5A8ETL9|A0A5A8ETL9_9BURK 7-cyano-7-deazaguanine synthase OS=Cupriavidus gilardii; OX = 82541 GN=queC PE=3 SV=1
MTQRAIVLLSGGLDSATVLAMANAQGFETYALSMRYGQRHSSELEAAKRVAAALGAKRHEIVDLDLRRFGGSALTDDALDVPTDGAAGGIPVTYVPARNTIMLSLALGWAEAIGGRDLFFGANAVDYSGYPDCRPEYVQAYEALANLATKAGVEGERIRVHAPIIDMTKAEIIQAGVRLGVDYGMTVSCYQADEQGRACGVCDSCRIRRAGFEAAGVPDPTRYQNAA

SEQ ID NO: 37684 - protein, 227 aa, Cupriavidus metallidurans
  REGION 1..227: note = sp|Q1LJY1|QUEC_CUPMC 7-cyano-7-deazaguanine synthase; OS = Cupriavidus metallidurans (strain ATCC 43123 / DSM 2839 / NBRC 102507 / CH34) OX=266264 GN=queC PE=3 SV=1
MTKRAIVLLSGGLDSATVLAMANAAGFETYALSMRYGQRHSSELEAAKRVAAELGAKRHEIIDLDLRRFGGSALTDDALDVPTDGAAGGIPITYVPARNTIMLSLALGWAEAIGGRDLFFGANAVDYSGYPDCRPEYVAAYETLANLATKAGVEGDRFHVHAPIIDMTKAEIILAGVKLGVDYGLTVSCYKADDDGRACGVCDSCRIRRAGFEAAGVPDPTRYQTPN

SEQ ID NO: 37685 - protein, 227 aa, Cupriavidus metallidurans
  REGION 1..227: note = tr|A0A132HKD7|A0A132HKD7_9BURK 7-cyano-7-deazaguanine synthase OS=Cupriavidus metallidurans OX=119219 GN=queC PE=3 SV=1
MTKRAIVLLSGGLDSATVLAMANAAGFETYALSMRYGQRHSSELEAAKRVAAELGAKRHEIIDLDLRRFGGSALTDDALDVPTDGTAGGIPITYVPARNTIMLSLALGWAEAIGGRDLFFGANAVDYSGYPDCRPEYVAAYEALANLATKAGVEGDRFHVHAPIIDMTKAEIILAGVKLGVDYGLTVSCYKADDDGRACGVCDSCRIRRAGFEAAGVPDPTRYQTPN

SEQ ID NO: 37686 - protein, 227 aa, unidentified
  source 1..227: note = Cupriavidus nantongensis
  REGION 1..227: note = tr|A0A142JQL7|A0A142JQL7_9BURK 7-cyano-7-deazaguanine synthase OS=Cupriavidus nantongensis OX=1796606 GN=queC PE=3 SV=1
MTQRAIVLLSGGLDSATVLAMARAQGFETYALSMRYGQRHSSELEAARRVAAALGAVRHEIVDLDLRRFGGSALTDDALEVPTDGASGGIPVTYVPARNTIMLSLALGWAEAVGGRDLFFGANAVDYSGYPDCRPEYVAAYETLANLATKAGVEGDRFRVHAPIIDMTKGEIIRAGIALGVDYSLTVSCYQADDDGRACGVCDSCRIRRAGFEAAGVPDPTRYQAAA

SEQ ID NO: 37687 - protein, 227 aa, Cupriavidus necator
  REGION 1..227: note = sp|Q0K7W8|QUEC_CUPNH 7-cyano-7-deazaguanine synthase; OS = Cupriavidus necator (strain ATCC 17699 / H16 / DSM 428 / Stanier 337) OX=381666 GN=queC PE=3 SV=1
MTKRAIVLLSGGLDSATVLAMARAQGFETYALSMRYGQRHSSELEAARRVAAALGATRHEIIDLDLRRFGGSALTDDALAVPTDGASDGIPVTYVPARNTIMLSLALGWAEAVGGRDLFFGANAVDYSGYPDCRPEYVAAYETLANLATKAGVEGDRFRVHAPIIDMTKGEIIRAGIALGVDYSLTVSCYQADDDGRACGVCDSCRIRRAGFEAAGVPDPTRYQAAA

SEQ ID NO: 37688 - protein, 227 aa, Cupriavidus necator
  REGION 1..227: note = tr|G0ET38|G0ET38_CUPNN 7-cyano-7-deazaguanine synthase OS=Cupriavidus necator (strain ATCC 43291 / DSM 13513 / N-1) OX=1042878 GN=queC PE=3 SV=1
MTQRAIVLLSGGLDSATVLAMARAQGFETYALSMRYGQRHSSELEAAKRVAAALGATRHEIIDLDLRRFGGSALTDDTLAVPTDGASGGIPVTYVPARNTIMLSLALGWAEAVGGRDLFFGANAVDYSGYPDCRPEYVAAYETLANLATKAGVEGDRFRVHAPIIDMTKGEIIRAGIALGVDYSLTVSCYQADDDGRACGVCDSCRIRRAGFEAAGVPDPTRYQAAA

SEQ ID NO: 37689 - protein, 227 aa, Cupriavidus oxalaticus
  REGION 1..227: note = tr|A0A375G3D6|A0A375G3D6_9BURK 7-cyano-7-deazaguanine synthase OS=Cupriavidus oxalaticus; OX = 96344 GN=queC PE=3 SV=1
MTKRAIVLLSGGLDSATVLAMARAQGFETYALSMRYGQRHSSELEAAKRVAAALGATRHEIVGLDLRRFGGSALTDDALEVPTDGATGGIPVTYVPARNTIMLSLALGWAEAVGGRDLFFGANAVDYSGYPDCRPEYVAAYETLANLATKAGVEGDRFRVHAPIIDMTKAEIIRAGIGLGVDYGLTVSCYQADDDGRACGVCDSCRIRRAGFEAAGVPDPTRYQGAA

SEQ ID NO: 37690 - protein, 227 aa, Cupriavidus oxalaticus
  REGION 1..227: note = tr|A0A4P7LE99|A0A4P7LE99_9BURK 7-cyano-7-deazaguanine synthase OS=Cupriavidus oxalaticus; OX = 96344 GN=queC PE=3 SV=1
MTKRAIVLLSGGLDSATVLAMARAQGFETYALSMRYGQRHSSELEAAKRVAAALGATRHEIVDLDLRRFGGSALTDDALEVPTDGATGGIPVTYVPARNTIMLSLALGWAEAVGGRDLFFGANAVDYSGYPDCRPEYVAAYETLANLATKAGVEGDRFRVHAPIIDMTKAEIIRAGIGLGVDYSLTVSCYQADDDGRACGVCDSCRIRRAGFEAAGVPDPTRYQGAT

SEQ ID NO: 37691 - protein, 227 aa, Cupriavidus pauculus
  REGION 1..227: note = tr|A0A3G8GZJ9|A0A3G8GZJ9_9BURK 7-cyano-7-deazaguanine synthase OS=Cupriavidus pauculus; OX = 82633 GN=queC PE=3 SV=1
MTQRAIVLLSGGLDSATVLAMANAAGFETYALSMRYGQRHSSELDAARKVAAALGAKRHEIIDLDLRRFGGSALTDDALDVPTAGETGGIPITYVPARNTIMLSLALGWAEAIGGRDLFFGANAVDYSGYPDCRPEYVSAYETLANLATKAGVEGDRFRVHAPIIDMTKADIIRAGVKLGVDYGLTVSCYKADDEGRACGVCDSCRIRRAGFEQAGVADPTRYQPAA

SEQ ID NO: 37692 - protein, 227 aa, Cupriavidus pauculus
  REGION 1..227: note = tr|A0A2N5CHP5|A0A2N5CHP5_9BURK 7-cyano-7-deazaguanine synthase OS=Cupriavidus pauculus; OX = 82633 GN=queC PE=3 SV=1
MTKRAIVLLSGGLDSATVLAMANAAGFETYALSMRYGQRHSSELDAAKKVASALGAKRHEIIDLDLRRFGGSALTDDTMDVPVDGATGGIPVTYVPARNTIMLSLALGWAEAIGGRDLFFGANAVDYSGYPDCRPEYVSAYETLANLATKAGVEGDRFRVHAPIIDMTKAEIIRAGVKLGVDYGLTVSCYKADDEGRACGVCDSCRIRKAGFEQAGVADPTHYQPAA

SEQ ID NO: 37693 - protein, 226 aa, Cupriavidus pinatubonensis
  REGION 1..226: note = sp|Q474K5|QUEC_CUPPJ 7-cyano-7-deazaguanine synthase; OS = Cupriavidus pinatubonensis (strain JMP 134 / LMG 1197); OX = 264198 GN=queC PE=3 SV=1
MTKRAIVLLSGGLDSATVLAMAKAQGFETYALSMRYGQRHSSELDAAKQVASALGAVRHEIVDLDLRRFGGSALTDDKLDVPTGGASSGIPITYVPARNTIMLSLALGWAEAVGGRDLFFGANAVDYSGYPDCRPEYVAAYETLANLATKAGVEGDRFHVHAPIIDMTKAEIIRAGIRLGVDYSMTVSCYKADDDGRACGVCDSCRIRRAGFEAAGVPDPTRYQNA

SEQ ID NO: 37694 - protein, 228 aa, unidentified
  source 1..228: note = Cupriavidus plantarum
  REGION 1..228: note = tr|A0A316F3Z8|A0A316F3Z8_9BURK 7-cyano-7-deazaguanine synthase OS=Cupriavidus plantarum; OX = 942865 GN=queC PE=3 SV=1
MTKRAIVLLSGGLDSATVLAMANAQGFETYALSMRYGQRHSSELEAAKRVAAALGAVRHEIIDLDLRRFGGSALTDDAFDVPTDGAVGGIPITYVPARNTIMLSLALGWAEAVGGRDLFFGANAVDYSGYPDCRPEYVSAYETLANLATKAGVEGDRFHVHAPIIDMTKGEIIRAGTRLGVDYSLTVSCYQADDDGRACGVCDSCRIRRAGFEAAGVPDPTRYQDAAS

SEQ ID NO: 37695 - protein, 227 aa, Cupriavidus sp.
  REGION 1..227: note = tr|A0A370P2I4|A0A370P2I4_9BURK 7-cyano-7-deazaguanine synthase OS=Cupriavidus sp. S23; OX = 2219262 GN=queC PE=3 SV=1
MTKRAIVLLSGGLDSATVLAMAHAQGFETYALSMRYGQRHSSELEAAKRVAAALGATRHEIVDLDLRRFGGSALTDDTLEVPTDGASGGIPVTYVPARNTIMLSLALGWAEAVGGRDLFFGANAVDYSGYPDCRPEYVAAYETLANLATKAGVEGDRFRVHAPIIDMTKGEIIRAGIALGVDYSLTVSCYQADDDGRACGVCDSCRIRRAGFEAAGVPDPTRYQSAA

SEQ ID NO: 37696 - protein, 227 aa, Cupriavidus sp.
  REGION 1..227: note = tr|L2EMI3|L2EMI3_9BURK 7-cyano-7-deazaguanine synthase OS=Cupriavidus sp. HMR-1 OX=1249621 GN=queC PE=3; SV = 1
MTKRAIVLLSGGLDSATVLAMANAAGFETYALSMRYGQRHSSELEAAKRVAAELGAKRHEIIDLDLRRFGGSALTDDALDVPTDGTAGGIPITYVPARNTIMLSLALGWAEAIGGRDLFFGANAVDYSGYPDCRPEYVAAYEALANLATKAGVEGDRFHVHAPIIDMTKAEIILAGVKLGVDYGLTVSCYKADDDGRACGVCDSCRIRRAGFEAAGVPDPTRYQTSN

SEQ ID NO: 37697 - protein, 227 aa, Cupriavidus taiwanensis
  REGION 1..227: note = sp|B3R5T4|QUEC_CUPTR 7-cyano-7-deazaguanine synthase; OS = Cupriavidus taiwanensis (strain DSM 17343 / BCRC 17206 / CIP 107171 / LMG 19424 / R1) OX=977880 GN=queC PE=3SV=1
MTQRAIVLLSGGLDSATVLAMARAQGFETYALSMRYGQRHSSELEAAKRVAAALGAVRHEIVDLDLRRFGGSALTDDALEVPTDGASGGIPVTYVPARNTIMLSLALGWAEAVGGRDLFFGANAVDYSGYPDCRPEYVAAYETLANLATKAGVEGDRFRVHAPIIDMTKGEIIRAGIALGVDYSLTVSCYQADDDGRACGVCDSCRIRRAGFEAAGVPDPTRYQAAA

SEQ ID NO: 37698 - protein, 239 aa, Cupriavidus taiwanensis
  REGION 1..239: note = tr|A0A375I9D9|A0A375I9D9_9BURK 7-cyano-7-deazaguanine synthase OS=Cupriavidus taiwanensis; OX = 164546 GN=queC PE=3 SV=1
MFLRAAAGATRTMTQRAIVLLSGGLDSATVLAMARAQGFETYALSMRYGQRHSSELEAATRVAAALGAARHEIVDLDLRRFGGSALTDDALAVPTDGASGGIPVTYVPARNTIMLSLALGWAEAVGGRDLFFGANAVDYSGYPDCRPEYVAAYETLANLATKAGVEGDRFRVHAPIIDMTKGEIIRAGIALGVDYSLTVSCYQADDDGRACGVCDSCRIRRAGFEAAGVPDPTRYQAAA

SEQ ID NO: 37699 - protein, 231 aa, unidentified
  source 1..231: note = [Curtobacterium] plantarum
  REGION 1..231: note = tr|A0A3M7UKJ5|A0A3M7UKJ5_9GAMM 7-cyano-7-deazaguanine synthase OS=[Curtobacterium] plantarum OX=221276 GN=queC PE=3 SV=1
MKRAVVVFSGGQDSTTCLIQALEQYDDVHCVTFDYGQRHREEIDVARDLAIKLGARAHKVLDVTMLNELAVSSLTRDNIPVPAYNPEASGLPSTFVPGRNILFLTLASVYAYQVEAEAVITGVCETDFSGYPDCRDEFVKALNHAVSLGMARDVRFETPLMWLNKAETWALADYWQQLALVREQTLTCYNGVKGDGCGECAACHLRANGLQGYLNDRAGVMAAMKAKSGLN

SEQ ID NO: 37700 - protein, 422 aa, Curtobacterium sp.
  REGION 1..422: note = tr|A0A2W1UX25|A0A2W1UX25_9MICO Uncharacterized protein OS=Curtobacterium sp. MCLR17_007 OX=2175648; GN = DEJ13_17775 PE=4 SV=1
MRFQSGPATSLQNLGDAIPISLFAVPDLDAGATAGKAIRESVQHRGLAPDPAAWDFLAIALSVITADGISRRGDSPDGWTREIAIDIAVREPEAWASQLLGLNRALGFLTTDRWSLSVRDGGDAIDVPLEPYRYDVDAVALLSGGLDSLIGAIDLTDLGSKLLATSHVVRGDAEKQERFARELGIEHLPLNHNASTERSVKETSQRARSLIFLAYAIVAATCTDRYRAGETVPIYMCENGFIAINPPLTTSRISSLSTRTARPEFLNAIERILRNVGLNLQIINPYLLKTKGEMMQECSDQSRLEALAHVSTSCGRFQRFNYTHCGRCVPCQIRRASFLTWGHDDPTRYYFHEIGKLDSEHAGFDDVRSVAIARLEIEEAGFDRWVGPTLSSSAFADPAPVAAMLKRGMLELGALHDAYRIR

SEQ ID NO: 37701 - protein, 208 aa, Curtobacterium sp.
  REGION 1..208: note = tr|A0A4P8SWS1|A0A4P8SWS1_9MICO 7-cyano-7-deazaguanine synthase OS=Curtobacterium sp. SGAir0471 OX=2070337 GN=C1N91_12605 PE=3 SV=1
MDSQPNTLLLLSGGLDSSALAALLRPQHALYLDYGQRPAHTEQRAAERIATEYGIRLHVATLGIRDFGSGILHDDADAVKDAPSPEWWPYRNQFLATAASALALKTGSEAIALGTVRGDGDRHLDGTEEFYRLLDALVAYQEGGIRISAPAINYTTEELLVAAGLGANIIAETASCHRSNFPCGACPGCWKRQRVLASMNLPGYSWNS

SEQ ID NO: 37702 - protein, 143 aa, unidentified
  source 1..143: note = Curvibacter putative
  REGION 1..143: note = tr|C9YE01|C9YE01_9BURK 7-cyano-7-deazaguanine synthase OS=Curvibacter putative symbiont of Hydra magnipapillata OX=667019 GN=Csp_D28070 PE=3 SV=1
  VARIANT 85..131: note = Xaa can be any naturally occurring amino acid
MHTSALVLFSGGQDSTTCLAHALARYERVETIAFDYRQRHNVELEARLNVLREIKTRFPQWAAKLGEDHLLDLAVLGEVSETSLXXXXXXXXXXXXXXXXXXXXXXXXXXXXXXXXXXXXXXXXXXXXXXXVDQQGPDLGARP

SEQ ID NO: 37703 - protein, 82 aa, unidentified
  source 1..82: note = Curvibacter putative
  REGION 1..82: note = tr|C9YE00|C9YE00_9BURK Uncharacterized protein (Fragment) OS=Curvibacter putative symbiont of Hydra magnipapillata OX=667019 GN=Csp_D28060 PE=4 SV=1
  VARIANT 1..4: note = Xaa can be any naturally occurring amino acid
XXXXWINKAQTWELAHELGERSGVPEGGQALVDLVVEHTHTCYLGDRTHRHAWGYGCGTCPACELRAKGYAGFVDKVNKAAA

SEQ ID NO: 37704 - protein, 234 aa, Curvibacter sp.
  REGION 1..234: note = tr|A0A1F8W443|A0A1F8W443_9BURK 7-cyano-7-deazaguanine synthase OS=Curvibacter sp. GWA2_64_110 OX=1797747 GN=queC PE=3 SV=1
MHKTALVLFSGGQDSTTCLAHALKAYERVETIAFDYRQRHHIELESRIKVLSEIRRQFPQWADKLGEDHLLDLEVLGRVSETSLTRETAFKMEASGLPNTFVPGRNLLFLTLAAAVAYRRGLEVIVTGVCETDFSGYPDCRDDTMKAMQLALSLGMDKRFLIETPLMWIDKADTWRLAESLGGPALVDLIIEHTHTCYLGDREHRHAWGYGCGTCPACELRARGWERYKAQVPN

SEQ ID NO: 37705 - protein, 235 aa, Curvibacter sp.
  REGION 1..235: note = tr|A0A0R0MMJ5|A0A0R0MMJ5_9BURK 7-cyano-7-deazaguanine synthase OS=Curvibacter sp. PAE-UM; OX = 1714344 GN=queC PE=3 SV=1
MHKTALVLFSGGQDSTTCLAHALKTYERVETIAFDYRQRHHVELEARVQVLAEIRRQFPHWAPKLGQDHMLDLAVLGAVSETSLTRETAFKMESSGLPNTFVPGRNLLFLTLAAAVAYRRDLQVIVTGVCETDFSGYPDCRDDTMKAMQLALSLGMDKRYLIETPLMWIDKADTWRLAEALGGKALVDLIVEHTHTCYLGDRAHRHAWGYGCGTCPACELRARGWERYRAGGATT

SEQ ID NO: 37706 - protein, 224 aa, unidentified
  source 1..224: note = Cuspidothrix issatschenkoi
  REGION 1..224: note = tr|A0A2S6CZC1|A0A2S6CZC1_9CYAN 7-cyano-7-deazaguanine synthase OS=Cuspidothrix issatschenkoi CHARLIE-1 OX=2052836 GN=queC PE=3 SV=1
MKAVILLSGGLDSSTVLYQAKEDGCECYAISFDYQQRHRKELSSALMVGKRAGIIQHQVVNFDLRQWGGSALTDDKIDLPQQRSLDEMADHIPVTYVPARNTIFLSFALGYAEAIAAERVYIGVNALDYSGYPDCRLDYIQAMQEVFRLGTKQGREGEGIKIVAPLIELKKTEIIQLGNQLGVPWNLTWSCYAGGDAACGVCDSCQLRLAAFAELGLEDPINYV

SEQ ID NO: 37707 - protein, 223 aa, unidentified
  source 1..223: note = Cyanobacteria bacterium
  REGION 1..223: note = tr|A0A3M1L3B6|A0A3M1L3B6_9CYAN 7-cyano-7-deazaguanine synthase (Fragment); OS = Cyanobacteria bacterium J083 OX=2420336 GN=queC PE=3; SV = 1
AIVLLSGGLDSATTTAIALQQGYEVIALSFRYGQRHVKELDAAKKVAQYFQIKQHYIVDINLAQWGGSALTDSQLSLPQTGVDPNIIPLTYVPGRNTVFIATALSLAEAEGAEAIFLGINAVDYSGYPDCRPEYLEAYQKLAKLASKAGIEGKAPQLIAPLITLAKTDIVRLALKLQVPIELTWSCYQGETNPCGLCDSCRIRDQALIAVGREDLASQINMGD

SEQ ID NO: 37708 - protein, 225 aa, unidentified
  source 1..225: note = Cyanobacteria bacterium
  REGION 1..225: note = tr|A0A353QWI6|A0A353QWI6_9CYAN 7-cyano-7-deazaguanine synthase OS=Cyanobacteria bacterium UBA9971 OX=2055776 GN=queC PE=3 SV=1
MNKSIVLLSGGLDSLISLAYAKDEYNIQLALTFDYGQRAAKKEIEAAKIIAEYFNIEHKVIKTQWLQEITETSLVNTSQDLPLLDSNELDNPELTLNSAKKVWVPNRNGVFLNIAACFADSIEFSHIIFGANKEEGSTFPDNTQEFIDKINEAFEFSTLVKPKVFAPLINLNKTEIIKLALEIEAPLNLMRSCYTEEEKHCGKCESCLRLKRALEANGKTFEFIQ

SEQ ID NO: 37709 - protein, 217 aa, unidentified
  source 1..217: note = Cyanobacterium aponinum
  REGION 1..217: note = tr|K9Z9R1|K9Z9R1_CYAAP 7-cyano-7-deazaguanine synthase OS=Cyanobacterium aponinum (strain PCC 10605); OX = 755178 GN=queC PE=3 SV=1
MKKAIVLLSGGLDSATSAAIAVSQGYDTIALSFRYGQKHAKELEIAQNLAPKLGIKEHFVIDVNLSLWGGSSLTDNNLAIPQEGVNPQIIPSTYVPGRNTVFIAIALSLAEAASAEAIYLGINAVDYSGYPDCRPEYLQAFQNLANLSSKVGIEGKTPQLIAPLINLSKVDIIKKALSLNVPIDETWSCYQGGEIPCGVCDSCRIRNEALKQLGISN

SEQ ID NO: 37710 - protein, 218 aa, unidentified
  source 1..218: note = Cyanobacterium aponinum
  REGION 1..218: note = tr|A0A2G3PAQ4|A0A2G3PAQ4_9CHRO 7-cyano-7-deazaguanine synthase OS=Cyanobacterium aponinum IPPAS B-1201 OX=2047986 GN=queC PE=3 SV=1
MVKKAIVLLSGGLDSATSAAIAVSQGYDTIALSFRYGQKHAKELEIAQNLAPKLGIKEHFVIDVNLSLWGGSSLTDNNLAIPQEGVNPQIIPSTYVPGRNTVFIAIALSLAEATSAEAIYLGINAVDYSGYPDCRPEYLQAFQNLANLSSKVGIEGKTPQLIAPLINLSKVDIIKKALSLNVPIDETWSCYQGGDIPCGVCDSCRIRNEALKQLGISN

SEQ ID NO: 37711 - protein, 218 aa, unidentified
  source 1..218: note = Unknown
  REGION 1..218: note = tr|A0A0R2U4F4|A0A0R2U4F4_9CYAN 7-cyano-7-deazaguanine synthase OS=cyanobacterium BACL30 MAG-120619-bin27 OX=1655601 GN=queC PE=3 SV=1
MPGPPLAIALLSGGLDSATAAALAIEAGYQVIGLSLDYGQRHRRELQAAAELAPLLGLAEHHTIAVNLAAWGGSALTDSAIAVPSAGVEAGVIPSTYVPGRNTVFIAVALSLAEARGAQKLVLGVNAVDYSGYPDCRPDYLEAFQSLAELASKAGREGHATQLWAPLVTWSKARIVQEARRLGVPIERTWSCYEGGEQPCGLCDSCRIRDAALLAAGA

SEQ ID NO: 37712 - protein, 234 aa, Epithemia turgida
  REGION 1..234: note = tr|A0A077JJ00|A0A077JJ00_9CYAN 7-cyano-7-deazaguanine synthase OS=cyanobacterium endosymbiont of Epithemia turgida isolate EtSB Lake Yunoko; OX = 1228987 GN=exsB PE=3 S V=1
MNQPRAVVLLSGGLDSATSAAIALFKGYNLIALSLRYGQRNEKELAAAKKIAQDLGISEHYITDVNIAQWGGSSLTDKSLTIPQKGIQSDIIPSTYVPGRNTVFIALALSLAETKEAKAIFIGINAVDYSGYPDCRLDYLKAYQMLANLSSKAGIEGNAPQLIAPLLRNSKVDIVHRAIALGVTIEDTWSCYQGGETPCGLCDSCRIRDFALIEAGYPELATPKGRRRLTNFES

SEQ ID NO: 37713 - protein, 227 aa, Rhopalodia gibberula
  REGION 1..227: note = tr|A0A2Z5TAC9|A0A2Z5TAC9_9CYAN 7-cyano-7-deazaguanine synthase OS=cyanobacterium endosymbiont of Rhopalodia gibberula OX=1763363 GN=exsB; PE = 3 SV=1
MNQPRAVVLLSGGLDSATSAAIALFEGYNLIALSLRYGQRNEKELAAAKKIAQDLGITEHYIIDVNIAQWGGSSLTDKSLSIPQKGIKSDTIPSTYVPGRNTIFIALALSLAETKGAKAIFIGINAVDYSGYPDCRLDYLEAYQRLASLSSKVGIEGNAPQLIAPLLGNSKVDIVHRAIALGVTIEDTWSCYQGGERPCGLCDSCRIRDFALIEAGYPELATPEGRR

SEQ ID NO: 37714 - protein, 221 aa, unidentified
  source 1..221: note = Cyanobacterium sp.
  REGION 1..221: note = tr|A0A2K8WQR4|A0A2K8WQR4_9CHRO 7-cyano-7-deazaguanine synthase OS=Cyanobacterium sp. HL-69 OX=2054282 GN=queC PE=3 SV=1
MTKKAIVLLSGGLDSATSGAIALKEGYEVIALSFRYGQKHFKELEASGNVAKSLGIKEHHIIDVNLSMWGGSSLTDATMNIPEDGIKADEIPSTYVPGRNTVFISIALSLAEAKGAQAIYLGINAVDYSGYPDCRPEYLDAFQNLANLSSKVGIEGKAPQLIAPLVMLSKVEIVQRAIALNVPIEKTWSCYQGGEKPCGVCDSCRIRNKALIDAGYPELVG

SEQ ID NO: 37715 - protein, 221 aa, unidentified
  source 1..221: note = Cyanobacterium sp.
  REGION 1..221: note = tr|A0A1E5QRM0|A0A1E5QRM0_9CHRO 7-cyano-7-deazaguanine synthase OS=Cyanobacterium sp. IPPAS B-1200 OX=1562720 GN=queC PE=3 SV=1
MTKKAIVLLSGGLDSATSGAIALKEGYEVIALSFRYGQKHFKELEASGNVAKSLGIKEHHIIDVNLSMWGGSSLTDASMNIPEDGVKADEIPSTYVPGRNTVFIAIALSLAEAKGAQAIYLGINAVDYSGYPDCRPEYLSAFQNLANLSSKVGIEGKAPQLIAPLVTLSKVEIVQRAIALNVPIEKTWSCYQGGEKPCGVCDSCRIRNKALIEAGYPELVG

SEQ ID NO: 37716 - protein, 223 aa, unidentified
  source 1..223: note = Cyanobacterium stanieri
  REGION 1..223: note = tr|K9YPD8|K9YPD8_CYASC 7-cyano-7-deazaguanine synthase OS=Cyanobacterium stanieri (strain ATCC 29140 / PCC 7202) OX=292563 GN=queC PE=3 SV=1
MNKKAIVLLSGGLDSATSGAIALKEGYDVIALSFRYGQRHLKELEASRNVAEALGIKEHYIIDVNLSLWGGSSLTDATMNIPKDGVKADEIPSTYVPGRNTVFIAIALSLAEAKGAEAIYLGINAVDYSGYPDCRPEYLTAFQNLANLSSKVGIEGKSPQLIAPLVTLSKVEIVQRAIALNVPIEKTWSCYQGGETPCGVCDSCRIRNKALIDAGYPELAVVK

SEQ ID NO: 37717 - protein, 226 aa, Ornithocercus magnificus
  REGION 1..226: note = tr|A0A4Y3G6Y8|A0A4Y3G6Y8_9CYAN 7-cyano-7-deazaguanine synthase OS=cyanobiont of Ornithocercus magnificus OX=2496102 GN=queC PE=3 SV=1
MTYTTAVALLSGGLDSATAAALAREAKARVIGLSLDYGQRQQRELKAASELAKLLDLEDHITIQVNLATWGGSALTDLKQTIPDSAVQAGIIPSTYVPGRNTVFIALGLSLAEARGANCLVLGVNAVDYSGYPDCRPDYLEAFQKLANLASRVGREGHGTRIWAPLLVWSKRKIVEEALRLKVPIERTWSCYSNGVQPCSVCDSCRIRDDALRAVGRDDLCSSSVQ

SEQ ID NO: 37718 - protein, 279 aa, unidentified
  source 1..279: note = Cyanobium gracile
  REGION 1..279: note = tr|K9P933|K9P933_CYAGP 7-cyano-7-deazaguanine synthase OS=Cyanobium gracile (strain ATCC 27147 / PCC 6307) OX=292564 GN=queC PE=3 SV=1
MASSVASDRSAPRDRFHNGWAVATARPITRSPATSSPFPPLAIALLSGGLDSATAAALAIEAGHRVIGLSFDYGQRHRRELDAAAAVAGALALEEHHVIAVNLAAWGGSALTDPAIPVPDGGVVEGVIPSTYVPGRNTVFIALGLSLAEARGATSLVLGVNAVDYSGYPDCRPDYLAAFQNLADLATKAGREGQGARLWAPLVAWDKATIVREALRLGVPIAATWSCYSGEDLPCGRCDSCRIRDAALVAAGRADLTSAAVRAGADLPAGAALRTGADC

SEQ ID NO: 37719 - protein, 227 aa, unidentified
  source 1..227: note = Cyanobium sp.
  REGION 1..227: note = tr|A0A081GLM4|A0A081GLM4_9CYAN 7-cyano-7-deazaguanine synthase OS=Cyanobium sp. CACIAM 14; OX = 1496688 GN=queC PE=3 SV=1
MTPPLAIALLSGGLDSATAAALAIEAGHRVIGLSFDYGQRHRRELTAAAAVAEALGLEEHHVIEVNLAAWGGSALTDPAIPVPKGGVREGIIPATYVPGRNTVFIALGLSLAEARGAGSLVLGVNAVDYSGYPDCRPDYLAAFQALADLATRSGREGHGPRLWAPLVTLSKTEIVREALRLRVPIAATWSCYGGGEVPCGVCDSCRIRDAALVAAGRGDLAGAGVDP

SEQ ID NO: 37720 - protein, 225 aa, unidentified
  source 1..225: note = Cyanobium sp.
  REGION 1..225: note = tr|A0A182ARL9|A0A182ARL9_9CYAN 7-cyano-7-deazaguanine synthase OS=Cyanobium sp. NIES-981; OX = 1851505 GN=queC PE=3 SV=1
MASPSPTAIALLSGGLDSATAAALAIEAGHRVIGLSFDYGQRHRRELLAASAIAGALNLAEHHTVAVNLAAWGGSALTDPALPVPQEGTAAGVIPSTYVPGRNTVFIALGLSLAEARGAGRLVLGVNAVDYSGYPDCRPDYLEAFQTLADLASKAGREGHGVRLWAPLVQWSKTRIVREALRLGVPIASTWSCYSGGDRPCGVCDSCRIRDAALIEAGRADLVGR

SEQ ID NO: 37721 - protein, 218 aa, unidentified
  source 1..218: note = Cyanobium usitatum
  REGION 1..218: note = tr|A0A2P7MX32|A0A2P7MX32_9CYAN 7-cyano-7-deazaguanine synthase OS=Cyanobium usitatum str. Tous OX=2116684 GN=queC PE=3 SV=1
MPAPPLAIALLSGGLDSATASALAIEAGYQVIGLSLDYGQRHRRELQAAAELAPLLGLAEHHTIAVNLAAWGGSALTDTAIAVPSAGVEAGVIPSTYVPGRNTVFIALALSLAEARGAQKLVLGVNAVDYSGYPDCRPDYLEAFQTLAELASKSGREGHAAQLWAPLVNWSKTRIVQEARRLGVPIERTWSCYEGGEQPCGVCDSCRIRDAALLEAGV

SEQ ID NO: 37722 - protein, 229 aa, unidentified; identical to SEQ ID NO: 37425
  source 1..229: note = Cyanosarcina cf.
  REGION 1..229: note = tr|A0A2T1F8I9|A0A2T1F8I9_9CHRO 7-cyano-7-deazaguanine synthase OS=Cyanosarcina cf. burmensis CCALA 770 OX=2107697 GN=queC PE=3 SV=1

SEQ ID NO: 37723 - protein, 228 aa, unidentified
  source 1..228: note = Cyanothece sp.
  REGION 1..228: note = tr|A0A3B8XZN0|A0A3B8XZN0_9CYAN 7-cyano-7-deazaguanine synthase OS=Cyanothece sp. UBA12306; OX = 2055757 GN=queC PE=3 SV=1
MIHQPKAVILLSGGLDSATSGAIAISEGYNVIAISFRYGQRHEKELESAINIAQALGITEHYTVDVNIAQWGGSSLTDTSLNLPQEGINPNIIPSTYVPGRNTVFIAIALSLAEAKEAKAIFLGINAIDYSGYPDCRPDYLQAYQTLANLSSKAGIEGNAPQLIAPLINDSKVDIVRRAVSLGVPIEQTWSCYQGGEKPCGFCDSCRIRDRALIDAGYPHLASFNNID

SEQ ID NO: 37724 - protein, 229 aa, unidentified
  source 1..229: note = Cyanothece sp.
  REGION 1..229: note = sp|B8HQ99|QUEC_CYAP4 7-cyano-7-deazaguanine synthase; OS = Cyanothece sp. (strain PCC 7425 / ATCC 29141) OX=395961; GN = queC PE=3 SV=1
MKIVILLSGGLDSTTVLYLARSLGHDCYALSFNYGQRHKQELAAAIAVAQLAGVIQHQVISFDLGLWGGSALTDYTLDLPQNRAFKEMAEQIPITYVPARNTIFLSFALSYAEAIGATQVYAGMNAIDYSGYPDCRPDYIAAMQEVYRLGTKQGREGEPIQIITPLIDLTKPAIIQLGNRLGVPWAKTWSCYSDGGGNDPPVACGVCDSCRLRLAAFAELSLTDPLPYR

SEQ ID NO: 37725 - protein, 224 aa, Cycloclasticus sp.
  REGION 1..224: note = tr|A0A1M6ETT4|A0A1M6ETT4_9GAMM 7-cyano-7-deazaguanine synthase OS=Cycloclasticus sp. DSM 27168 OX=1884353 GN=queC PE=3 SV=1
MLKKAVILVSGGLDSATVLAIAKSQGYECYALSFDYGQRHDSELEAASRLAKIYDVQEHKIIELGMGEFGGSALTDDEINVPTEKATGIPVTYVPARNTVFLSIALGWAEVLSAWDIFIGVNAVDYSGYPDCRQEFINAFENLANLATKAGVEEGGFKIHTPLINLSKAQIIQKGEALNVDYSETVSCYQANTKGEACGECESCRLRQQGFEKAKVQDPTRYQH

SEQ ID NO: 37726 - protein, 226 aa, Cycloclasticus sp.
  REGION 1..226: note = tr|A0A1X1QNV1|A0A1X1QNV1_9GAMM 7-cyano-7-deazaguanine synthase OS=Cycloclasticus sp. symbiont of Bathymodiolus heckerae OX=1284675 GN=queC PE=3; SV = 1
MTIKKAVVLLSGGLDSATVLAIAKEQGYECYALSFDYGQRHNSELEAASKLSKKFDVEEHKTIKLGMGEFGGSALTDDDIDVPTEKASGIPVTYVPARNTVFLSIALGWAEVLNAWDIFIGVNAVDYSGYPDCRPEFISAFEKLANLATKAGVEKGGFRIHTPLITLSKAQIIQKGSTLNVDYSATVSCYQANVKGEACGECESCRLRQQGFEKAKIADPTRYEVK

SEQ ID NO: 37727 - protein, 224 aa, unidentified; identical to SEQ ID NO: 37725
  source 1..224: note = Cycloclasticus zancles
  REGION 1..224: note = tr|S5TZ31|S5TZ31_9GAMM 7-cyano-7-deazaguanine synthase OS=Cycloclasticus zancles 78-ME OX=1198232; GN = queC PE=3 SV=1

SEQ ID NO: 37728 - protein, 226 aa, Cylindrospermopsis raciborskii
  REGION 1..226: note = tr|A0A1S2A2F6|A0A1S2A2F6_9CYAN 7-cyano-7-deazaguanine synthase OS=Cylindrospermopsis raciborskii MVCC14 OX=940191 GN=queC PE=3 SV=1
MKAVILLSGGLDSSTVLYQARADGYQCYAISFDYHQRHRRELQSAMSIAQSLGVVEHQLITFDLRSWGGSALTDNSIPVPQNRPLDQMSEYIPITYVPARNTIFLSFALAYAEAIRAERVYIGVNALDYSGYPDCRPDYIHAMQEVFRLGTKQGREGNRIDIVAPLINLTKTQIIQLGNLLGVPWELTWSCYSGDQHPCGVCDSCQLRWSAFHELGLEDPVKQQGM

SEQ ID NO: 37729 - protein, 226 aa, Cylindrospermopsis raciborskii
  REGION 1..226: note = tr|A0A1X4G4T0|A0A1X4G4T0_9CYAN 7-cyano-7-deazaguanine synthase OS=Cylindrospermopsis raciborskii CENA303 OX=1170769 GN=queC PE=3 SV=1
MKAVILLSGGLDSSTVLYQARADGYECYVISFDYHQRHRRELQSAISIAQSLEVVEHQLVTFDLRSWGGSALTDNSIPVPQNRPLDQMSGSIPITYVPARNTIFLSFALAYAEAIRAERVYIGVNALDYSGYPDCRPDYIHAMQEVFRLGTKQGREGKRIDIVAPLINLTKSQIIQLGNLLGVPWELTWSCYSGDQQPCGVCDSCQLRWAAFHELGLEDPVKQQGM

SEQ ID NO: 37730 - protein, 222 aa, Cylindrospermopsis sp.
  REGION 1..222: note = tr|A0A0R0ME73|A0A0R0ME73_9CYAN 7-cyano-7-deazaguanine synthase OS=Cylindrospermopsis sp. CR12 OX=1747196 GN=queC PE=3 SV=1
MKAVILLSGGLDSSTVLYQARADGYECYAISFDYHQRHRRELQSAMSIAQSLGVVEHQLVTFDLRSWGGSALTDNSIPVPHNRPLDQMSESIPITYVPARNSIFLSFGLAYAEAIRAERVYVGVNALDYSGYPDCRPDYIHAMQEVFRLGTKQGREGKPIDIIAPLINLTKTQIIQLGNRLGVPWELTWSCYSGGEHPCGVCDSCQLRWVAFHELGLKDPGV

SEQ ID NO: 37731 - protein, 247 aa, Cylindrospermum sp.
  REGION 1..247: note = tr|A0A1Z4QP59|A0A1Z4QP59_9NOST 7-cyano-7-deazaguanine synthase OS=Cylindrospermum sp. NIES-4074 OX=2005457 GN=queC PE=3 SV=1
MASSLGVIWQAISSPKFKTEMKAVILLSGGLDSSTVLYQAKVDGCECHAISFDYQQRHRRELQSALVIAQKAGVVKHQVVNFDLRQWGGSALTDNTIDLPQERSLEEMSQNIPVTYVPARNTIFLSFALGFAEAIAAERVYIGVNALDYSGYPDCRPDYIQAMQEVYRLGTKQGREGQPISIVAPLITLKKTEIIQLGNQLGVPWDLTWSCYDGGDVACGVCDSCRLRLAAFAELGLKDPLTYAQFG

SEQ ID NO: 37732 - protein, 623 aa, Cylindrospermum sp.
  REGION 1..623: note = tr|A0A1Z4QGH5|A0A1Z4QGH5_9NOST 7-cyano-7-deazaguanine synthase OS=Cylindrospermum sp. NIES-4074 OX=2005457 GN=queC PE=4 SV=1
MIQPQLILCSGVTLPDNDPLRVGRKVLDLDACSTNPNVNIQFDDVAKVFRKHLSPRLVDLLEIASYVYSTDAAIQRGEGWLDDHTREPWTRDFQFVIPVRDLDFWCKPNVQQLLVQVLKFLSDDDYKFEFRALERDRPVHQYLDLQNDEDWPFYGVERVLMFSGGLDSLAGSVETAHNGSNLVLVSHRPVVTLDARLRRLFAQLQQTYTVKMIHVPVWIYKNRKLGREHTQRTRSFLFSALGTVVAESLKAQGVRFFENGIVSLNLPVADEVLRARASRTTHPHALELFTRLYSLVTERQFVVDNPYLLKTKAEVVSIIAERGASHLIQYTCSCAHTGFFQSRTQWHCGTCSQCIDRRIAILATGQAVNDLETDYVSDVFTGSRKDGYEKNMAVDYTRHAIELCHMSETEIATKFNLELSRAVRSQPNRREVAQKLVELHKRHGETTKKVLDKQLQQYVSQLIEGKLDKSSMLAMIAGQEHLASSWHRYADRIGNLLLSGIPTACKTHKPENEPHLQEICDGILKAHDSDLVREFPFMRWSSTLTKPDWSVESLKLWVELKYVRKREDVRKINEAISADITQYGDNQRRVLFVVYDPNHLITDEQAFSEPIHRREEMRVSFVR

SEQ ID NO: 37733 - protein, 231 aa, Cylindrospermum stagnale
  REGION 1..231: note = tr|K9WZQ1|K9WZQ1_9NOST 7-cyano-7-deazaguanine synthase OS=Cylindrospermum stagnale PCC 7417 OX=56107; GN = queC PE=3 SV=1
MKAVILLSGGLDSSTVLYQAKADGCECHAISFDYQQRHRRELQSALLVAQTNGVVKHQVVNFDLRQWGGSALTDDAIALPQERSLDEMSQNIPVTYVPARNTIFLSFALGYAETIAAERVYIGVNALDYSGYPDCRPDYIQAMQDVFRLGTKQGREGQPISIVAPLINLKKTEIIQLGNQLGVPWKLTWSCYDGGDIACGVCDSCRLRLAAFAELGLKDPLLYAEDKNFKF

SEQ ID NO: 37734 - protein, 233 aa, Cystobacter ferrugineus
  REGION 1..233: note = tr|A0A1L9BAK3|A0A1L9BAK3_9DELT 7-cyano-7-deazaguanine synthase OS=Cystobacter ferrugineus; OX = 83449 GN=queC PE=3 SV=1
MLASKKKAVVLLSGGLDSTTCLAMAKAAGFEPVCLAVAYGQRHAVELERARGVAQSMGVTDFRVVTVDLRQVGGSALTADIDVPKDRPEEEMSHGIPVTYVPARNALFLSLALGLAESVGASDLYIGVNAVDYSGYPDCRPEFIRAFEAMATLATKAGVEGTRFRVHAPLSGMTKADIIREGVRLGVDYGMTHSCYDPDEQGRACGRCDSCALRRRGFEQAGVPDPTRYTTGA

SEQ ID NO: 37735 - protein, 975 aa, Cystobacter ferrugineus
  REGION 1..975: note = tr|A0A1L9AXU9|A0A1L9AXU9_9DELT Carrier domain-containing protein OS=Cystobacter ferrugineus; OX = 83449 GN=BON30_40290 PE=3 SV=1
MDNREIAPTQSARTRDAYTAVPPAKAEYPSDVCVHQLFESQADRTPDAVAARAGNESLTYRELNFRANQLARYLVAKGVVPRGSVAVLMNRTPACLVSLLAIIKAGAAYVPVDAGLPAKRVDYILTDSGATCVLTDRETRSLLDEPRSASTLVIDVDDPSIYSGETSNLGLAVDPEQQVYCIYTSGSTGLPKGVMVQHRALMNYVWWAKKQYVTDAVESFALYSSLSFDLTVTSIFVPLISGRCIDVYPDLGEDVPVINRVLEDNRVDVVKLTPAHLALLRNTDLSQSRLKVLILGGEDLRAETAGDVHKRLDGRAVIYNEYGPTETVVGCMIHRYDPAVDLHGSVPIGVGIDNMRIYLLDDRRRPVKPGEVGEIYIGGDGVTLGYKDKPQVTADHFISNPFVEGERLYASGDLGRVNERGALVFLGRKDLQIKLRGYRIELGEIESALLSYPGIKECIVDSTKTAQSQAAAQLTYCTKCGLASSFPNTTYSAEGVCNHCEAFDKYRSVVDDYFSTMDELQSIVTEMKSIHNSKYDCIVALSGGKDSTYALCRMIETGARVLAFTLDNGYISEEAKQNINRVVARLGVDHRYLSTGHMKEIFVDSLKRHSNVCNGCFKTIYTFAINLAQEVGVKHVVMGLSKGQLFETRLSALFRTSTFDNAAFEKSLVDARKIYHRIDDAVSRLLDTTCVKNDKVIENIRFVDFYRYCHASRQEMYDYIQERVGWARPIDTGRSTNCLLNDVGIYVHNKERRYHNYSLPYSWDVRMGHISREEAMRELDDSADIDVERVEGIIKDLGYELNDQVVGSAEAQLVAYYVSAEEFPASDLRQFLSEILPEYMVPRSFVQLDSIPLTPNGKVNRQALPKPDLLRKAGTDGQAAPRTPVEKQLAELWKEVLQVDSVGIHDNFFEMGGHSLPALMLLYKIDSQFHKTISIQEFSKVPTISALAAHLGSDTEAVPPGLGEVVDQSAPAYRG

SEQ ID NO: 37736 - protein, 233 aa, Cystobacter fuscus
  REGION 1..233: note = tr|A0A250JI67|A0A250JI67_9DELT 7-cyano-7-deazaguanine synthase OS=Cystobacter fuscus; OX = 43 GN=queC PE=3 SV=1
MLASKKKAVVLLSGGLDSTTCLAMAKAAGFEPVCLAVAYGQRHAVELERARGVAQAMGVTDYRVVTVDLRQVGGSALTADIDVPKDRAEEEMSHGIPVTYVPARNALFLSLALGLAESVGASDLYIGVNAVDYSGYPDCRPEFIRAFEAMATLATKAGVEGTRFRVHAPLSGMTKADIIREGVRLGVDYGMTHSCYDPDAQGRACGRCDSCSLRRRGFEQAGVPDPTRYTTGA

SEQ ID NO: 37737 - protein, 233 aa, Cystobacter fuscus
  REGION 1..233: note = tr|S9P936|S9P936_9DELT 7-cyano-7-deazaguanine synthase OS=Cystobacter fuscus DSM 2262 OX=1242864 GN=queC; PE = 3 SV=1
MRASKKKAVVLLSGGLDSTTCLAMAKAAGFEPVCLAVAYGQRHAVELERARGVAQALGVTDFRVVTVDLRQVGGSALTADIDVPKDRPEEEMSHGIPVTYVPARNALFLSLALGLAESVDASDLYIGVNAVDYSGYPDCRPEFIRAFEAMAVLATKAGVEGTRFRVHAPLSGMTKADIIREGVRLGVDYGMTHSCYDPDEQGRACGRCDSCSLRRRGFELAGVPDPTRYTTGA

SEQ ID NO: 37738 - protein, 975 aa, Cystobacter sp.
  REGION 1..975: note = tr|A0A0H4NUD7|A0A0H4NUD7_9DELT CysH OS=Cystobacter sp. Cbv34 OX=1679164 GN=cysH PE=3 SV=1
MDNREIAPTQSARTRDAYTAVPPAKAEYPSDVCVHQLFELQADRIPDAVAARAGNESLTYRELNFRANQLARYLVAKGVVPRGSVAVLMNRTPACLVSLLAIIKAGAAYVPVDAGLPAKRVDYILTDSGATCVLTDRETRSLLDEPRSASTLVIDVDDPSIYSGETSNLGLAVDPEQQVYCIYTSGSTGLPKGVMVQHRALMNYVWWAKKQYVTDAVESFALYSSLSFDLTVTSIFVPLISGRCIDVYPDLGEDVPVINRVLEDNKVDVVKLTPAHLALLRNTDLSQSRLKVLILGGEDLRAETAGDVHKRLDGRAVIYNEYGPTETVVGCMIHRYDPAVDLHGSVPIGVGIDNMRIYLLDDRRRPVKPGEVGEIYIGGDGVTLGYKDKPQVTADHFISNPFVEGERLYASGDLGRVNERGALVFLGRKDLQIKLRGYRIELGEIESALLSYPGIKECIVDSTKTAQSQAAAQLTYCTKCGLASSFPNTTYSAEGVCNHCEAFDKYRSVVDDYFSTMDELQSIVTEMKSIHNSKYDCIVALSGGKDSTYALCRMIETGARVLAFTLDNGYISEEAKQNINRVVARLGVDHRYLSTGHMKEIFVDSLKRHSNVCNGCFKTIYTFAINLAQEVGVKHVVMGLSKGQLFETRLSALFRTSTFDNAAFEKSLVDARKIYHRIDDAVSRLLDTTCVKNDKVIENIRFVDFYRYCHASRQEMYDYIQERVGWARPIDTGRSTNCLLNDVGIYVHNKERRYHNYSLPYSWDVRMGHISREEAMRELDDSADIDVERVEGIIKDLGYELNDQVVGSAEAQLVAYYVSAEEFPASDLRQFLSEILPEYMVPRSFVQLDSIPLTPNGKVNRQALPKPDLLRKAGTDGQAAPRTPVEKQLAELWKEVLQVDSVGIHDNFFEMGGHSLPALMLLYKIDSQFHKTISIQEFSKVPTISALAAHLGSDTEAVPPGLGEVVDQSAPAYRG

SEQ ID NO: 37739 - protein, 223 aa, Cytophaga xylanolytica
  REGION 1..223: note = tr|A0A2W7NPI2|A0A2W7NPI2_9BACT 7-cyano-7-deazaguanine synthase OS=Cytophaga xylanolytica; OX = 990 GN=queC PE=3 SV=1
MSSKQAIVLLSGGLDSAVALYLAKSQGFEVHALSFDYGQRHNRELQSARAIAQKAGVTSHHVVSLQLGSWGSSSLTDAAMPVEDGDVDRTDIPATYVPARNMVFLSVAASLAEARGAQDIFIGVSQVDYSGYVDCRESFIKAMETAINQGTVMGAELNRPITIHAPFIYKTKADEIRLGVELGVDFSLTWSCYRGGDKPCGTCDSCLLRAKAFAEAGVTDTSL

SEQ ID NO: 37740 - protein, 504 aa, unidentified
  source 1..504: note = Cytophagaceae bacterium
  REGION 1..504: note = tr|A0A4Q3NN63|A0A4Q3NN63_9BACT FumaraseC_C domain-containing protein OS=Cytophagaceae bacterium; OX = 2026729 GN=EOO38_14805 PE=4 SV=1
MQTHPVTILSSPFQQLRCLVSGLQVMGNAAGIGFAGANGHFELNVFKPMMVTALLHSICLMGDACTSFTHNCVDNMEANEPRIAQLLNESLMLVTALNNHIGYDKAAKTAKKAHKEGTTLKQAALDLGVVTEEQLAEIVAKVDKAEADDGWARDLRLFIPIADPQLWQAAIPLLQKALHFLSGDLWEIILLPDGPRQLTYQNRGRITVMAGHDCVSLFSGGMDSGIGALNLLGEGRHPLLISHAYRGDSEKQIMVRDHLPVQVSRFAAVANPVSLTGRKTDVQMRTRSFNFLAYGALVGATLAQLRVAGTPVELFVPENGLIALNPPMTARRIGALSTRTTHPHFLGLFQQILDTVGLPVRVENPYALQTKGEMLSGCLDQANLRVLASKTVSCGKWKRTHQQCGKCVPCIIRRASFHAAGITDGTTYHAKGADLASVVRDANARDDLMAMILAARRLPAEDVARWVRQSGPLPLHRQSRDYLIGVATRGMGEVRNYLWSLGLL

SEQ ID NO: 37741 - protein, 110 aa, unidentified
  source 1..110: note = Cytophagales bacterium
  REGION 1..110: note = tr|A0A2M6GIZ0|A0A2M6GIZ0_9BACT 7-cyano-7-deazaguanine synthase (Fragment) OS=Cytophagales bacterium CG18_big_fil_WC_8_21_14_2_50_42_9 OX=1973956; GN = COW65_09190 PE=3SV=1
MSEQNNKALVLFSGGQDSTTCLYWAKKQFNTVEALGFRYGQKHDVELRQAEIIAAQAQVPFRVLDITGMLQGSALTEHDKAMAAPHELNENLPASFVPGRNAVFLTIATS

SEQ ID NO: 37742 - protein, 221 aa, unidentified
  source 1..221: note = Cytophagia bacterium
  REGION 1..221: note = tr|A0A2E5GUV6|A0A2E5GUV6_9BACT 7-cyano-7-deazaguanine synthase OS=Cytophagia bacterium; OX = 2026730 GN=queC PE=3 SV=1
MNKAIILLSGGQDSTTCLYWAKQKFDLVEAIGFDYGQRHLIELEFAKKICNKEKISFDIISLKEILSNSALINPQEDFNKSHPSNQNLPNSFVPGRNLIFLSIASSIAYNRKIENIIIGVCETDFSGYPDCRDEFIKSMKKTIYLATEKLIEIHTPLMNLDKAQTWKLANDLGCIETIINSTMTDYNGSQNENDWGLGNLDNPASILRHKGYLKAKKNKWI

SEQ ID NO: 37743 - protein, 225 aa, unidentified
  source 1..225: note = Dactylococcopsis salina
  REGION 1..225: note = tr|K9YUI8|K9YUI8_DACSA 7-cyano-7-deazaguanine synthase OS=Dactylococcopsis salina PCC 8305 OX=13035; GN = queC PE=3 SV=1
MTDKAVVLLSGGLDSSTVLYQGKADGYECYALSFNYQQRHQRELDAARDIAAAAGVTQQVISFDLGLWGGSALTDATINVPRDRAPEEMATEIPVTYVPARNTIFLSFGLAYAEALEAKRVYLGVNALDYSGYPDCRPDYINAMQQVFKLGTKQGREGRSIEIISPLIELKKTEIIQLGNQLNVPWEKTWSCYQGGEKACGVCDSCQLRLKAFQELGLTDPLPYL

SEQ ID NO: 37744 - protein, 231 aa, unidentified
  source 1..231: note = Dankookia rubra
  REGION 1..231: note = tr|A0A4R5Q8V8|A0A4R5Q8V8_9PROT 7-cyano-7-deazaguanine synthase OS=Dankookia rubra; OX = 1442381 GN=queC PE=3 SV=1
MRDDAALVLFSGGQDSATCLAWALDRFAHVETIGFDYGQRHRVELDVRGTFRTRLAAENPHWAAKLAEDHVLALDALRAVSDTALTRDTGIAMQADGLPNTFVPGRNLLFLTFAAALAYRRGLRHIVAGVCETDYSGYPDCRDDTLKALQVAINLGMERRFVLHTPLMWRDKAATWALAERLGGAALVEAIRAETHSCYLGDRSRLYPWGFGCGACPACELRRRGWEQWHG

SEQ ID NO: 37745 - protein, 225 aa, unidentified
  source 1..225: note = Dechloromonas aromatica
  REGION 1..225: note = sp|Q478G3|QUEC_DECAR 7-cyano-7-deazaguanine synthase; OS = Dechloromonas aromatica (strain RCB) OX=159087 GN=queC; PE = 3 SV=1
MMKKAVVLLSGGLDSATCLAIARSQGFESYCLSFNYGQRHCAELVAADRVVKALGAAEHRVLNFGLAQFGGSALTDTNIAVPTEGVQPGIPVTYVPARNTIMLSLALAWAEVLGSRDIFVGVNAVDYSGYPDCRPEYIAAFETMANLATKAGVEGHKLSIHAPLIDLSKAEIIRTGAALGVDYSLTVSCYQADEQGRACGVCDSCRLRAEGFAAAGLADPTLYRA

SEQ ID NO: 37746 - protein, 225 aa, Dechloromonas denitrificans
  REGION 1..225: note = tr|A0A133XFL0|A0A133XFL0_9RHOO 7-cyano-7-deazaguanine synthase OS=Dechloromonas denitrificans OX=281362 GN=queC PE=3 SV=1
MMKPAVVLLSGGLDSATCLALARSQGFDCYCLSFDYGQRHNAELQAAERVVKALGAAEHRVINFGLAQFGGSALTDTNIAVPTAGVQPGIPVTYVPARNTIMLSLALAWAEVLGSRDIFVGVNAVDYSGYPDCRPEYIAAFETMANLATKAGVEGVKLSIHAPLIDMSKAEIIRTGTTLGVDYGLTVSCYQADSAGRACGECDSCRLRAEGFAAAGLADPTIYRV

SEQ ID NO: 37747 - protein, 225 aa, Dechloromonas sp.
  REGION 1..225: note = tr|A0A5C7ZEQ7|A0A5C7ZEQ7_9RHOO 7-cyano-7-deazaguanine synthase OS=Dechloromonas sp.; OX = 1917218 GN=queC PE=3 SV=1
MMKPAVVLLSGGLDSATCLAIARSQGFDCYCLSFDYGQRHNAELKAAERVVKALGAKEHRVLNLGLAQFGGSALTDTSIAVPTDGVHPGIPVTYVPARNTIMLSLALAWAEVLGSDDIFVGVNAVDYSGYPDCRPEYIAAFEKMANLATKSGVEGHKLQIHAPLIALSKAEIIRTGAALGVDYGLTVSCYQADEQGRACGVCDSCRLRAEGFAAAGVADPTPYRI

SEQ ID NO: 37748 - protein, 225 aa, Dechloromonas sp.
  REGION 1..225: note = tr|A0A3B7A963|A0A3B7A963_9RHOO 7-cyano-7-deazaguanine synthase OS=Dechloromonas sp. HYN0024 OX=2231055 GN=queC PE=3 SV=1
MMKPAVVLLSGGLDSATCLAIARSQGFDCYCLSFNYGQRHCAELQAADRVVKALGAVEHRVLNLGLAQFGGSALTDSAINVPVDGVQPGIPVTYVPARNTIMLSLALAWAEVLGSRDIFVGINAVDYSGYPDCRPEYLAAFEKMANLATRAGVEGVKLSIHAPLIDLSKADIIRTGAALGVDYGLTVSCYQADQLGRACGVCDSCRLRAEGFAAAGLTDPTIYQA

SEQ ID NO: 37749 - protein, 235 aa, Deferribacter autotrophicus
  REGION 1..235: note = tr|A0A5A8F1V3|A0A5A8F1V3_9BACT 7-cyano-7-deazaguanine synthase OS=Deferribacter autotrophicus OX=500465 GN=queC PE=3 SV=1
MSKGIVLVSGGMDSCVTAAIAKDLGYELYFLHVNYGQRTEKRELQAFYDISSFYNAKDTMVVDISYLKKIGGSSLTDESMEVEKGKLNREGIPTTYVPFRNANILSIATSWAEVIGAEKIFIGAVEEDSSGYPDCREIFYKKFNELLSVALASDFKVEVVTPLINLKKGQIVQKGVELKAPLHLSWSCYKSEDKACGECDSCFLRLKGFMDAGEIDPISYKKYPDFYQEFLKSSH

SEQ ID NO: 37750 - protein, 237 aa, Deferribacter desulfuricans
  REGION 1..237: note = tr|D3PCT8|D3PCT8_DEFDS 7-cyano-7-deazaguanine synthase OS=Deferribacter desulfuricans (strain DSM 14783 / JCM 11476 / NBRC 101012 / SSM1) OX=639282 GN=queC PE=3; SV = 1
MRKAIVLVSGGMDSCVTAAIAKDMGYELYLLHTNYGQRTENRELKAFYDIASYYDAKDTLVVSIDYLKKIGGSALTDEKIEVEKGNLNRKEIPKTYVPFRNANILSIATSWAEVIEAERIFIGAVEEDSSGYPDCRKIFYDKFNDLLSVALAKDIGLKVETPLINMKKKDIVKKGVELNAPLHLSWSCYKSEDKACGECDSCLLRLKGFMEAGEIDPIPYEKFPEFYETYLIKRRGV

SEQ ID NO: 37751 - protein, 224 aa, unidentified
  source 1..224: note = Deferribacteraceae bacterium
  REGION 1..224: note = tr|A0A3C1BPX8|A0A3C1BPX8_9BACT 7-cyano-7-deazaguanine synthase OS=Deferribacteraceae bacterium OX=2053543 GN=queC PE=3 SV=1
MSKKKAIVLVSGGMDSCVTAAIAAQNYEPCFLHVNYGQRTENREYKAFEDLCRFYGIKRKLVVDISYLKEIGGSSLTDEAIEVEEGELERQGIPKTYVPFRNANILSIAASWAEVLEASAIFIGAVEEDGSGYPDCRRVFYDAFEAAVDAGTKPETKIKIETPLISLKKSDIVKLGKELKAPLELSWSCYKSEDEACGECDSCLLRLRGFEQAGYSDPIPYKKR

SEQ ID NO: 37752 - protein, 620 aa, unidentified
  source 1..620: note = Defluviimonas aquaemixtae
  REGION 1..620: note = tr|A0A2R8BLT5|A0A2R8BLT5_9RHOB 7-cyano-7-deazaguanine synthase OS=Defluviimonas aquaemixtae OX=1542388 GN=queC_2 PE=4 SV=1
MGAAAPPPEHRVRCLGHVAGPRRGERLTFEIDGETRHATLRIGQLTKELAASLPAKTLDLLDLATLVYAVDAAVRRGGTADQRMGAKWYRRFLIEMPVRDLAAWSDFDLKRELEEMLLFLSGDRFEFAFRATEDLVQTASPFFRFGPDEGWRPDRVLMFSGGLDSFAGALEEIVDHGNRVALISHFSSTKIAPIQRDLVAALKDGLGKNMARHFPVQIQLGKGTNLEGTHRTRSFLFAALGTVVALAFNRDRVSFHENGIVSLNLAPVANVLGTRASRTTHPQALDRFTSFFGQLVGTGMRIDNPFFWKTKTDVLLTISRLKMADQIAHTRSCADVHNQTIQHVHCGRCSQCIDRRFAVLAAGLERFDPAEAYRIDLLTGERNAVQDREMALSYLRNAIEAEFTTPISLLASHPEIVAAITHVGEPTAPALDRIVALLNRHGRAVADVIQSATDRRPPSDFPADSLPNLFGDIRRAQMSAYPPLGADRSTEAAQPRFVTLVFDDERKRLSIEDRIDIGSGATYRLLRALAEYHLAAAGKGLDPFDYPMIAAQKLAHKLAVASDEHVRKSVMRARTLLAKRFASAQLDPELGRGVIENNPWRGYRLDPQLVAVRLGSLDMG

SEQ ID NO: 37753 - protein, 455 aa, unidentified
  source 1..455: note = Defluviimonas aquaemixtae
  REGION 1..455: note = tr|A0A2R8BKN9|A0A2R8BKN9_9RHOB 7-cyano-7-deazaguanine synthase OS=Defluviimonas aquaemixtae OX=1542388 GN=queC_1 PE=4 SV=1
MRRFSLIGRLGPDDKSKIKLVQSDSDVFEIDFLDGDLRMGFGIGHALDQLASLGMRPSEKGIDLVVLAALVNAGDTRVSRRLNAQDGWTREIDLYVPVSAAAAWTTSTGSIESMLRFLSGDRWRVFFRDRPKRTRTLAVAPKRLAIDGLTKVSLLSGGLDSLIGAVDLLSGSERPLFVSHYWDSETAKAQAYILDRLENRFSKEAFKSLRVRLGFDKHHLTTGETENTQRGRSFLFYSLATLAASAIEGRSTVDIPENGLIALNVPLDPLRFGALSTRTAHPHFIASMQRLIDALSLDVELDNPYRHMTKGEMVANCADKPFLEKIVENSMSCSSPAKARYKKLSPRHCGYCVPCLIRRASLEVGLDGDDETVYTIEDLKGHILASDQPEGEHVRSFQLMAKRIRAKPDLAKILVHKPGPLHDKPDEIPDYADVFRRGVLEVAELLKGVRARPGG

SEQ ID NO: 37754 - protein, 206 aa, unidentified
  source 1..206: note = Defluviimonas denitrificans
  REGION 1..206: note = tr|A0A2S8S3M7|A0A2S8S3M7_9RHOB 7-cyano-7-deazaguanine synthase OS=Defluviimonas denitrificans OX=404881 GN=LX70_03363 PE=3 SV=1
MKKAVVMVSGGLDSTTVCYLLAKEGREVHPIFFDYGQHCAETEWAKVQEVLPQEAKPPERLNISDIFKGSPSRMIVEADLWKEAVSDDDLYLPYRTMLFFAVAAARAQTLRILDVYSGFINSNHAKEIDCSTEFMNGLEELSRGVGAVRFHAPFREKTKADVVRQALDLGVPIGRTFSCQASSSFPCGACPNCVERLNALLEAGIA

SEQ ID NO: 37755 - protein, 233 aa, unidentified
  source 1..233: note = Defluviimonas sp.
  REGION 1..233: note = tr|A0A059II89|A0A059II89_9RHOB 7-cyano-7-deazaguanine synthase OS=Defluviimonas sp. 20V17; OX = 1417296 GN=queC PE=3 SV=1
MKTIVICSGGLDSVSLAQMVAAEHDLTRLVSFDYGQRHRKELEFAARAAARLGVPHDIIDMRGIGAALTGSALTDDIDVPDGHYAEDTMRITVVPNRNAIMLAVAFGMAAANGDDAVATAVHGGDHFIYPDCRPAFTEAFETMQKAALDGYADIRLYTPFVHRTKADIVTEGARVGTPFAETWSCYKGGARHCGRCGTCVERREAFHLAGIPDPTDYEDPDYWRQAIAAREGR

SEQ ID NO: 37756 - protein, 630 aa, unidentified
  source 1..630: note = Defluviimonas sp.
  REGION 1..630: note = tr|A0A059IMA3|A0A059IMA3_9RHOB Uncharacterized protein OS=Defluviimonas sp. 20V17 OX=1417296; GN = U879_13630 PE=4 SV=1
MTETLVRVETGSQDRVRDMVIRINGANPTFDLQTDPIEHQLLVPANELLLDLLDVAASVFAADSSVPRGGATRPEFGAGWRRRMTFSIPVRSPDIWNRPEVTAALVDAVEFLTDDEVAFEFHKGRQSIGPQQYFDFAGDSAHSGQIEDVLLFSGGLDSLSGAVERLTQGPGRIALVTHLSANKIIKHQKLLIEALKKRFPGRILHIPIRATRKGSEAAETTQRSRSFLFASLAYVVARMLGAKRIAFYENGIVSHNLPISTQVIGTMATRTTHPLSLVKLGAFLDTLGGSPIPIENRFAWLTKAEVITRLTENGGADLIKTSISCTQVRDQSVLHTHCGACSQCLDRRFAMLATGLHVHEPDDMYLTDVISGARDAGRSRTIALDWIAHACRLADLSQRDWMDRFGSELLRIVEGLPNLSGTDALQRIIALHQRHSNTVKKALEDAVAKYAPDLVSRSLPVTSLLRLYLNDPPGTPSLPRLARGRYVSAEPSVAAPTLDAGTRDTGIFPLQVAFHNDGKDDLITVRGLGEVRGRSASAAHLLRPAYEEDQKKGLNSDNHTFVPAMSLFLPVHVSKAAVRKCVQRCRDALAEFYRAIEGHDPPRDLLIENKPQRGYRLDPTCKIVDRDQSK

SEQ ID NO: 37757 - protein, 219 aa, Dehalobacter sp.
  REGION 1..219: note = tr|T0I7J1|T0I7J1_9FIRM 7-cyano-7-deazaguanine synthase OS=Dehalobacter sp. UNSWDHB OX=1339256 GN=queC; PE = 3 SV=1
MQKKEKALVVFSGGQDSTTCLFWARQLFTEVVALSFDYGQRHRLELDCAREICAKHQIEHHLLDLGLLNQLAPNSLTRPEIEVEKNLPGDRLPNTFVDGRNMLFLSFAAIFAKQRGIRHLITGVSQSDYSGYPDCRDIFVKSLNVTLNLAMDYEFVIHTPLMWVDKAETWKLADDLGVLPIIQEETLTCYNGIKGDGCGECPACLLRKEGYQRYCSGVK

SEQ ID NO: 37758 - protein, 235 aa, Dehalobacter sp.
  REGION 1..235: note = tr|A0A4R4D0U7|A0A4R4D0U7_9FIRM 7-cyano-7-deazaguanine synthase OS=Dehalobacter sp. 12DCB1; OX = 2070364 GN=queC PE=3 SV=1
MQKNEKALVVFSGGQDSTTCLFWARQLFAEVIALSFDYEQKHRLELDCAREICAKHQIEHHLLDLGLLNQLAPNALTRTEIEVEKNPSAGRLPNTFVDGRNMLFLSFAAVFAKQRGIRHLITGVSQSDYSGYPDCRDIFIKSLNVTLNLAMDYEFVIHTPLMWIDKAETWKLADDLGVLPIIQEETLTCYNGIKGDGCGECPACLLRKEGYQKYYSKESSHTLVNQKVDKYNEFE

SEQ ID NO: 37759 - protein, 447 aa, unidentified
  source 1..447: note = Dehalococcoides mccartyi
  REGION 1..447: note = tr|A0A328EJR7|A0A328EJR7_9CHLR Uncharacterized protein OS=Dehalococcoides mccartyi OX=61435 GN=C1G87_1587; PE = 4 SV=1
MNCFDFGDFTQSPELENRYWVDDSPLSRAFGSVLPPKLADLVDLAMAVYYADRRSQRQRNSFELTGHREIRVRLPVRELELWKSKEITSSLVDLLAWFTEDTWEFEFSKLNTKRKSEYEESLFSSPVAEHNVSLLFSGGLDSLAGLCTLMDVDRDCSFVLVSGCTSQRMGQVQRDLIRELVRYWRDQSRELRSLVVPFGIRRPMGSFREESSQRSRGFVFLLFGAAAAMMAKSKSLYVCENGVGAANLPFNEGQLGIDNTRGVHPLSLARMSDFIGLILGKPLPIVNPFEFSTKTEMCQVLKKLGLGALIKMTVSCDSFPLRIPDSPAQCGICTSCLLRRCSLHAAGLDGDDSGADYRFDVKKSFVRINKRDLYPLMAMLDQVDRIHACLTQESSWAMLTETFPELFEIQHGLSAHRHMAMNDIAQSYLRMYRAYVGEWGVFPLNVS

SEQ ID NO: 37760 - protein, 445 aa, unidentified
  source 1..445: note = Dehalococcoides mccartyi
  REGION 1..445: note = tr|A0A328EPY9|A0A328EPY9_9CHLR Uncharacterized protein OS=Dehalococcoides mccartyi OX=61435 GN=C1G86_1552; PE = 4 SV=1
MNCFDFGDFTQSPELENRYWVDDSPLSRAFGSVLPPKLADLVDLAMAVYYADRRSQRQRNSFELTGHREIRVRLPVRELELWKSKEITSSLVDLLAWFTEDTWEFEFSKLNTKRKSEYEESLFSSPVAEHNVSLLFSGGLDSLAGLCTLMDVDRDCSFVLVSGCTSQRMGQVQRDLIRELVRYWRDQSRELRSLVVPFGIRRPMGSFREESSQRSRGFVFLLFGAAAAMMAKSKSLYVCENGVGAANLPFNEGQLGIDNTRGVHPLSLARMSDFIGLILGKPLPIVNPFEFSTKTEMCQVLKKLGLGALIKMTVSCDSFPLRIPDSPAQCGICTSCLLRRCSLHAAGLDGDDSGADYRFDVKKSFVRINKRDLYPLMAMLDQVDRIHACLTQESSWAMLTETFPELFEIQHGLSAHRHMAMNDIAQSYLRMYRAYVGEWGYFLST

SEQ ID NO: 37761 - protein, 193 aa, unidentified
  source 1..193: note = Dehalococcoides sp.
  REGION 1..193: note = tr|A0A0C6EMS8|A0A0C6EMS8_9CHLR 7-cyano-7-deazaguanine synthase OS=Dehalococcoides sp. UCH007 OX=1522671 GN=queC PE=3 SV=1
MSMVTLVSGGLDSTLMSILAKEEGITLFPLFIDYGQLCIEREWEACIYVHKQFGLPSPIRMDLAGYGKTIPSGLTSKSLRVNEDAFLPGRNLLFLLAACSYAYSKNANAVAIGLLSEETHIFPDQTKDFVEKAQSTINVALERDIRIITPLMNLNKHDVLAMAKKKGIEGTYSCHSGTLPTCGSCIACRQYID

SEQ ID NO: 37762 - protein, 254 aa, unidentified
  source 1..254: note = Dehalococcoidia bacterium
  REGION 1..254: note = tr|A0A523UQ73|A0A523UQ73_9CHLR 7-cyano-7-deazaguanine synthase OS=Dehalococcoidia bacterium OX=2026734 GN=queC PE=3 SV=1
MRKVGVILLSGGLDSTTVAAYAKKQGYELIAITLHYGQKHTKEVESAKKVAEVMGIKQEVIDISFFKKLAWYSALTSTEDFKVPKQRDSKEMAKDIPITYVPLRNTFFITIAAAFLESEVLNLIENEKVDPAEAEASIFIAADTIDYSGYPDCRPEFYEKMTRALFEGTKLGAQYNKQINIQTPIILKTKAEIVSLAMELKAPLEYTWSCYEGGEVPCGKCDSCILRAKGFAEVGSEDPLIVRLDKDGKIAKSK

SEQ ID NO: 37763 - protein, 247 aa, unidentified
  source 1..247: note = Dehalococcoidia bacterium
  REGION 1..247: note = tr|A0A352UCG2|A0A352UCG2_9CHLR 7-cyano-7-deazaguanine synthase OS=Dehalococcoidia bacterium OX=2026734 GN=queC PE=3 SV=1
MTSYGITLLSGGLDSTTVTAYAKDRVDHLTAITFYYGQTHSKEVDCAQNIAELMGIEHKLLDISFLGEVAWYSALTNPEKFPIPVDRQDGEIGFSIPITYVPLRNTIFLSLSAAYLESDILHAIEVEGMNPKEVEAHIFLAPNAIDYSGYPDCRPEYYEKMRESLELGSKLWTQYKVHINVETPIIELSKAEIAELGKRIQAPIEHTWSCYKGGNEPCGGCDSCILRAKGYEEAGFPDPLLVKLGKA

SEQ ID NO: 37764 - protein, 230 aa, unidentified
  source 1..230: note = Deinococcus actinosclerus
  REGION 1..230: note = tr|A0A2Z3Z7W3|A0A2Z3Z7W3_9DEIO 7-cyano-7-deazaguanine synthase OS=Deinococcus actinosclerus OX=1768108 GN=queC PE=3 SV=1
MTEGKKRAVVLLSGGLDSSTVLGMATRDGYACTALSFRYGQRHTVELERAAKVAAHFGADHRVIDINIGSFGGSALTDESMVVPTDGTEDGVIPPTYVPGRNTVFIAVGLSLAEAIDAERVFLGINAVDYSGYPDCRPEYLAAYQTLADLATKAGLEGRGAVLTAPLAEMTKADIVREALAVGVPIDVTWSCYQGGKEPCGVCDSCRIRDKALIEAGRPDLATTYARAQL

SEQ ID NO: 37765 - protein, 230 aa, unidentified
  source 1..230: note = Deinococcus actinosclerus
  REGION 1..230: note = tr|A0A0U4BAP0|A0A0U4BAP0_9DEIO 7-cyano-7-deazaguanine synthase OS=Deinococcus actinosclerus OX=1768108 GN=queC PE=3 SV=1
MTEGKKRAVVLLSGGLDSSTVLGMATCDGYACTALSFRYGQRHTVELERAAKVAAHFGAAHRVIDINIGSFGGSALTDENIVVPTDGTAEGVIPPTYVPGRNTVFIAVGLSLAEAIDAERVFLGINAVDYSGYPDCRPEYLAAYQTLADLATKAGLEGRGAVLTAPLAELTKADIVREALAVGVPIDVTWSCYQGGEEPCGVCDSCRIRDKALIEAGRPDLATTYAQAQL

SEQ ID NO: 37766 - protein, 231 aa, Deinococcus cellulosilyticus
  REGION 1..231: note = tr|A0A511MZT0|A0A511MZT0_9DEIO 7-cyano-7-deazaguanine synthase OS=Deinococcus cellulosilyticus NBRC 106333 = KACC 11606 OX=1223518; GN = queC PE=3 SV=1
MTRKAVVLLSGGLDSSTTAAIAKHEDGYEVTALSFRYGQRHTIELEQAQKIANHFGLKHFVVDVNISQWGGSALTDESIDVPTSGTEDGVIPPTYVPGRNTVFISIGLSLAEAIDAEALYLGINAVDYSGYPDCRPEYLEAFQNLADLATKAGLEGRGAKLKAPLVLMTKVDIVKKALELGVPIDQTWSCYQGGTEPCGVCDSCRIRDKALIEAGRPDLASRYAQEHLGQQ

SEQ ID NO: 37767 - protein, 237 aa, Deinococcus deserti
  REGION 1..237: note = tr|C1CXM6|C1CXM6_DEIDV 7-cyano-7-deazaguanine synthase OS=Deinococcus deserti (strain VCD115 / DSM 17065 / LMG 22923) OX=546414 GN=queC PE=3 SV=1
MTTQQKRAVVLLSGGLDSSTVLGIATRRDGYTCAALSFRYGQRHTVELDRAAQIARHFGAEHRIIDINLGSFGGSALTDETITVPTDGADDGVIPPTYVPGRNTVFIAIGLSLAEAIGAERIYLGINAVDYSGYPDCRPEYLEAYQHLANLATKAGLEGHGAALVAPLLHMTKVDIVNAALELGVPVDVTWSCYQGGTEPCGVCDSCRIRDRALTEAGHPELASRPAQLAADSGLTS

SEQ ID NO: 37768 - protein, 231 aa, Deinococcus gobiensis
  REGION 1..231: note = tr|H8GTZ3|H8GTZ3_DEIGI 7-cyano-7-deazaguanine synthase OS=Deinococcus gobiensis (strain DSM 21396 / JCM 16679 / CGMCC 1.7299 / I-0) OX=745776 GN=exsB PE=3 SV=1
MIDMQKRAVVLLSGGLDSSTVLGLTVREGYACTALSFRYGQRHTVELERAATIARQFGSDHRVIDINIGSFGGSALTDEAMDVPTGGTQDGVIPPTYVPGRNTVFIAVALSLAEAIGAERVCLGINAVDYSGYPDCRPEYLAAYQTLADLASKAGLEGRGAVLTAPLLAMSKVDIVRAALDVGVPIGETWSCYQGGKEPCGVCDSCMIRDKALAEAGHPELTGPASPYHQG

SEQ ID NO: 37769 - protein, 230 aa, Deinococcus grandis
  REGION 1..230: note = tr|A0A100HGF5|A0A100HGF5_9DEIO 7-cyano-7-deazaguanine synthase OS=Deinococcus grandis; OX = 57498 GN=queC PE=3 SV=1
MTEDMKRAVVLLSGGLDSSTVLGMATRDGYACTALSFRYGQRHTVELERAATVAAHFGAAHRVIDINIGSFGGSALTDESMVVPTDGTEDGVIPPTYVPGRNTVFIAVGLSLAEAIDAERVFLGINAVDYSGYPDCRPEYLAAYQTLADLATKAGLEGRGAVLTAPLAEMTKADIVREALAVGVPIDVTWSCYQGGEEPCGVCDSCRIRDKALIEAGRPDLATTYAQAQL

SEQ ID NO: 37770 - protein, 231 aa, Deinococcus indicus
  REGION 1..231: note = tr|A0A246BEY9|A0A246BEY9_9DEIO 7-cyano-7-deazaguanine synthase OS=Deinococcus indicus; OX = 223556 GN=queC PE=3 SV=1
MTEGMKRAVVLLSGGLDSSTVLGMATRDGYACTALSFRYGQRHTVELERAATVAAHFGAVHRVIDINIGSFGGSALTDESMVVPTDGTEDGVIPPTYVPGRNTVFIAVGLSLAEAIDAERVFLGINAVDYSGYPDCRPEYLSAYQTLADLATKAGLEGRGAVLTAPLAEMTKADIVREALAVGVPIEVTWSCYQGGEEPCGVCDSCRIRDRALIEAGRPDLATRHAQAQLA

SEQ ID NO: 37771 - protein, 230 aa, Deinococcus maricopensis
  REGION 1..230: note = tr|E8U3S5|E8U3S5_DEIML 7-cyano-7-deazaguanine synthase OS=Deinococcus maricopensis (strain DSM 21211 / LMG 22137 / NRRL B-23946 / LB-34) OX=709986 GN=queC PE=3; SV = 1
MHKAVVLLSGGLDSSTTLAIAQQDGYAVTALSFRYGQRHTVELERAAHIAAHFGADHRVIDINIGSFGGSALTDDRIDVPVDATPDGVIPPTYVPGRNTVFIAVALSLAEAIEAERLYLGITAVDYSGYPDCRPEYLDAYQRLADLATKAGLEGRGAKLVAPLLTLTKLDIVRAALDLGVPVNVTWSCYQGGTQPCGVCDSCRIRDRALIDAGRADLATPHAQAHLNHHA

SEQ ID NO: 37772 - protein, 210 aa, Deinococcus peraridilitoris
  REGION 1..210: note = tr|L0A3Q2|L0A3Q2_DEIPD 7-cyano-7-deazaguanine synthase OS=Deinococcus peraridilitoris (strain DSM 19664 / LMG 22246 / CIP 109416 / KR-200) OX=937777 GN=queC PE=3; SV = 1
MAVRRDGYEVSALSFRYGQRHTVELECAASIAQHFGAQHQVVDINISQWGASALTDERIDVPTDGTPDGVIPPTYVPGRNTVFIALGLSLAEAIDAECIYLGINAVDYSGYPDCRPEYLAAYQRLADLATRSGLEGRGARLVAPLVMMTKTDIVRAALELGVPIEQTWSCYQGGEEPCGVCDSCRIRDKALIEAGHGELASRQGRARLGL

SEQ ID NO: 37773 - protein, 233 aa, Deinococcus proteolyticus
  REGION 1..233: note = tr|F0RP03|F0RP03_DEIPM 7-cyano-7-deazaguanine synthase OS=Deinococcus proteolyticus (strain ATCC 35074 / DSM 20540 / JCM 6276 / NBRC 101906 / NCIMB 13154 / VKM Ac-19 39 / CCM 2703 / MRP) OX=693977 GN=queC PE=3 SV=1
MTETTNPRAVVLLSGGLDSSTVLGLAVRSGLEATALSFRYGQRHTVELERAAQIAAHFGAAHRVVDINIGSFGGSALTDEGLAVPQEATPDGVIPPTYVPGRNTVFIAVGLSLAEAIDAGSLHLGITAVDYSGYPDCRPDYLAAYQTLADLATVAGREGRGARLVAPLLEMSKVDIVRTALEVGVPVHLTWSCYSGGSEPCGLCDSCRIRDEALLSAGHPELMTRVGRGRLGV

SEQ ID NO: 37774 - protein, 236 aa, Deinococcus radiophilus
  REGION 1..236: note = tr|A0A3S0IEQ0|A0A3S0IEQ0_9DEIO 7-cyano-7-deazaguanine synthase OS=Deinococcus radiophilus; OX = 32062 GN=queC PE=3 SV=1
MSHSFPNDNPRAVVLLSGGLDSSTVLGLAVQDGYQPTALSFRYGQRHTAELERAAVIAAHFGAEHRIVDINIGSFGGSALTDDGLDVPLEATPDGVVPPTYVPGRNTVFIAVGLSLAEAINAGSVHLGITAVDYSGYPDCRSDYLAAYQTLADLSSVAGREGHGARLVAPLLEMSKVDIVRAALDAHVPIAQTWSCYSGGAEPCGRCDSCRIRDEALRAAGHPELMTAWGQAQLRT

SEQ ID NO: 37775 - protein, 230 aa, unidentified
  source 1..230: note = Deinococcus soli
  REGION 1..230: note = tr|A0A0F7JRU4|A0A0F7JRU4_9DEIO 7-cyano-7-deazaguanine synthase OS=Deinococcus soli Cha et al. 2016 OX=1309411 GN=queC PE=3 SV=1
MTEGKKRAVVLLSGGLDSSTVLGMATRDGYACTALSFRYGQRHTVELERAATVAAHFGADHRVIDINIGSFGGSALTDESIVVPTDGTEDGVIPPTYVPGRNTVFIAVGLSLAEAIDAERVFLGINAVDYSGYPDCRPEYLAAYQTLADLATKAGLEGRGAVLTAPLAELTKADIVREALAVGVPIDVTWSCYQGGEEPCGVCDSCRIRDKALIEAGRPDLATTYAQAQL

SEQ ID NO: 37776 - protein, 234 aa, Deinococcus sp.
  REGION 1..234: note = tr|A0A1T1B6W4|A0A1T1B6W4_9DEIO 7-cyano-7-deazaguanine synthase OS=Deinococcus sp. LM3; OX = 1938608 GN=queC PE=3 SV=1
MTNQNKRAVVLLSGGLDSSTVLGMATRDGYACTALSFRYGQRHTVELERAATVAAHFGAVHRVIDINIGSFGGSALTDESMAVPTDGTEDGVIPPTYVPGRNTVFIAVGLSLAEAIDAERVFLGINAVDYSGYPDCRPEYLSAYQTLADLATKAGLEGRGAVLTAPLAEMTKADIVREALAVGVPIDVTWSCYQGGEEPCGVCDSCRIRDKALIEAGRPDLATRYAQAQDGIQE

SEQ ID NO: 37777 - protein, 231 aa, Deinococcus sp.
  REGION 1..231: note = tr|A0A1T1BDC9|A0A1T1BDC9_9DEIO 7-cyano-7-deazaguanine synthase OS=Deinococcus sp. LM3; OX = 1938608 GN=queC PE=3 SV=1
MSDGQKRAVVLLSGGLDSSTVLGMATRDGYACTALSFRYGQRHTVELERAATVAAHFGAVHRVIDINIGSFGGSALTDESMAVPTDGTEDGVIPPTYVPGRNTVFIAVGLSLAEAIDAERVFLGINAVDYSGYPDCRPEYLSAYQTLADLATKAGLEGRGAVLTAPLAEMTKADIVREALAVGVPIEVTWSCYQGGEEPCGVCDSCRIRDRALIEAGRPDLATRYAQAQLA

SEQ ID NO: 37778 - protein, 230 aa, Deinococcus yavapaiensis
  REGION 1..230: note = tr|A0A318S507|A0A318S507_9DEIO 7-cyano-7-deazaguanine synthase OS=Deinococcus yavapaiensis KR-236 OX=694435 GN=queC PE=3 SV=1
MTAPKRAVVLLSGGLDSSTTLAIATKRDGYDVTALSFRYGQRHTIELERAASIARLFGARHRVVDVNISSWGGSALTDERIDVPTGGTEEGVIPQTYVPGRNTVFIAVGLSLAEAIDADAIYLGINAVDYSGYPDCRPEYLEAFQKLADLATKAGLEGRGAKLVAPLVLMTKTDIVKTALELGVPIVETWSCYQGGEEPCGVCDSCRIRDKALVEAGHPELATPIGRSAR

SEQ ID NO: 37779 - protein, 252 aa, Delftia acidovorans
  REGION 1..252: note = tr|A0A080NIY3|A0A080NIY3_DELAC 7-cyano-7-deazaguanine synthase OS=Delftia acidovorans; OX = 80866 GN=queC PE=3 SV=1
MRAMQNDSSSPQAPAARHTAALVLFSGGQDSTTCLAQALSLYERVETLGFDYGQRHSVEMQVRQQVRERLARDFPQWAPRLGDDHVLSLDVLQQIGGSSLTEDVAFAMQADGLPNTFVPGRNLLFLTLAGALAYRRGLSVIVTGVCETDYSGYPDCRDDTMKAMQLALNLGLERRLRIETPLMWIDKAQTWKMAHDLGGDTLVDLIQRDTHTCYQGTRETLHDWGYGCGTCPACDLRARGWHQWQAQRETAN

SEQ ID NO: 37780 - protein, 252 aa, Delftia acidovorans
  REGION 1..252: note = tr|A0A286J675|A0A286J675_DELAC 7-cyano-7-deazaguanine synthase OS=Delftia acidovorans; OX = 80866 GN=queC PE=3 SV=1
MRAMQNDSSSPQAPAARHTAALVLFSGGQDSTTCLAQALSLYERVETLGFDYGQRHSVEMQVRQQVRERLARDFPQWAPRLGDDHVLSLDVLQQIGGSSLTEDVAFAMQADGLPNTFVPGRNLLFLTLAGALAYRRGLSVIVTGVCETDYSGYPDCRDDTMKAMQLALNLGLERRLRIETPLMWIDKAQTWQMAHDLGGDTLVDLIQRDTHTCYQGTRETLHDWGYGCGTCPACDLRARGWHQWQAQRETAN

SEQ ID NO: 37781 - protein, 249 aa, Delftia lacustris
  REGION 1..249: note = tr|A0A1H3EDD8|A0A1H3EDD8_9BURK 7-cyano-7-deazaguanine synthase OS=Delftia lacustris; OX = 558537 GN=queC PE=3 SV=1
MQNDSSSPQAPAGRHTAALVLFSGGQDSTTCLAQALSMYERVETLGFDYGQRHSVEMQVRQQVRERLARDFPEWAPRLGDDHVLSLDVLQQIGGSSLTEDVAFAMQADGLPNTFVPGRNLLFLTLAGALAYRRGLSVIVTGVCETDYSGYPDCRDDTMKAMQLALNLGLERRLRIETPLMWIDKAQTWQMAHDLGGDTLVDLIQRDTHTCYQGTRETLHDWGYGCGTCPACDLRARGWHQWQAQRETAN

SEQ ID NO: 37782 - protein, 252 aa, Delftia sp.
  REGION 1..252: note = tr|A0A543BG09|A0A543BG09_9BURK 7-cyano-7-deazaguanine synthase OS=Delftia sp. HK171; OX = 1920191 GN=queC PE=3 SV=1
MRAMQNDSSSPQAPAARHTAALVLFSGGQDSTTCLAQALSLYERVETLGFDYGQRHSVEMQVRQQVRERLARDFPQWAPRLGDDHVLSLDVLQQIGGSSLTEDVAFAMQADGLPNTFVPGRNLLFLTLAGALAYRRGLSVIVTGVCETDYSGYPDCRDDTMKAMQLALNLGLERRLRIETPLMWIDKAQTWQMAHELGGDTLVDLIQRDTHTCYQGTRETLHDWGYGCGTCPACDLRSRGWRQWQAQRAHAN

SEQ ID NO: 37783 - protein, 231 aa, Delftia sp.
  REGION 1..231: note = tr|A0A081J5M1|A0A081J5M1_9BURK 7-cyano-7-deazaguanine synthase OS=Delftia sp. 670; OX = 1537702 GN=queC PE=3 SV=1
MVLFSGGQDSTTCLAQALSLYERVETLGFDYGQRHSVEMQVRQQVRERLARDFPEWAPRLGDDHVLSLDVLQQIGGSSLTEDVAFAMQADGLPNTFVPGRNLLFLTLAGALAYRRGLSVIVTGVCETDYSGYPDCRDDTMKAMQLALNLGLERRLRIETPLMWIDKAQTWQMAHDLGGDTLVDLIQRDTHTCYQGTRETLHDWGYGCGTCPACDLRARGWHQWQAQRETAN

SEQ ID NO: 37784 - protein, 252 aa, Delftia tsuruhatensis
  REGION 1..252: note = tr|A0A4R5GT52|A0A4R5GT52_9BURK 7-cyano-7-deazaguanine synthase OS=Delftia tsuruhatensis; OX = 180282 GN=queC PE=3 SV=1
MRAMQNDSSSPQAPAGRHTAALVLFSGGQDSTTCLAQALSLYERVETLGFDYGQRHSVEMQVRQQVRERLARDFPGWAPRLGDDHVLSLDVLQQIGGSSLTEDVAFAMQADGLPNTFVPGRNLLFLTLAGALAYRRGLSVIVTGVCETDYSGYPDCRDDTMKAMQLALNLGLERRLRIETPLMWIDKAQTWQMAHDLGGDTLVDLIQRDTHTCYQGTRETLHDWGYGCGTCPACDLRARGWHQWQAQRETAN

SEQ ID NO: 37785 - protein, 252 aa, Delftia tsuruhatensis
  REGION 1..252: note = tr|A0A1I1A8J4|A0A1I1A8J4_9BURK 7-cyano-7-deazaguanine synthase OS=Delftia tsuruhatensis; OX = 180282 GN=queC PE=3 SV=1
MRAMQNDSSSPQAPAGRHTAALVLFSGGQDSTTCLAQALSLYERVETLGFDYGQRHSVEMQVRQQVRERLARDFPQWAPRLGDDHVLSLDVLQQIGGSSLTEDVAFAMQADGLPNTFVPGRNLLFLTLAGALAYRRGLSVIVTGVCETDYSGYPDCRDDTMKAMQLALNLGLERRLRIETPLMWIDKAQTWQMAHDLGGDTLVDLIQRDTHTCYQGTRETLHDWGYGCGTCPACDLRARGWHQWQAQRETAN

SEQ ID NO: 37786 - protein, 228 aa, unidentified
  source 1..228: note = Unknown
  REGION 1..228: note = tr|D8FCB6|D8FCB6_9DELT 7-cyano-7-deazaguanine synthase OS=delta proteobacterium NaphS2 OX=88274 GN=queC; PE = 3 SV=1
MTAFKEKAVVLLSGGLDSTTVAAIACSEGYDVFALTFRYGQRHAVELKAAEKVAHNLGLTEHLIVDLDLRKIGGSALTDHIDVPKRRGAELSEEEIPVTYVPARNTIFLSYALAWAEVLGAWNIFIGVNAVDYSGYPDCRAEFIKAFEEMANLATKAGVTLTRRLKIRTPVIYMSKGDIIKTGLKLGVDYTLTHSCYDPSPDGKACGLCDSCLLRKKGFEEAGVEWIP

SEQ ID NO: 37787 - protein, 239 aa, unidentified
  source 1..239: note = Unknown
  REGION 1..239: note = tr|Q1NXP2|Q1NXP2_9DELT 7-cyano-7-deazaguanine synthase OS=delta proteobacterium MLMS-1 OX=262489 GN=queC; PE = 3 SV=1
MTENNQPGEAAVVLLSGGLDSTTVLAWASTAGYRCHCLSFDYGQRHTHELELARQNAARWGAVQHLVLKLGLEAIGGSALTSELAVPKADPAGTLSTDPAETGAGQIPVTYVPGRNTIFLSCAVAWAEVLGAGEIFIGVNAVDYSGYPDCRPDFLESFNRTANLGTKAGREGRGFRIQAPLLRLSKAEIIKKGLALGVDYSLTHSCYDPDEHHRPCGRCDACRLRRRGFAAAGVDDPLA

SEQ ID NO: 37788 - protein, 254 aa, unidentified
  source 1..254: note = Deltaproteobacteria bacterium
  REGION 1..254: note = tr|A0A3M1TW86|A0A3M1TW86_9DELT 7-cyano-7-deazaguanine synthase OS=Deltaproteobacteria bacterium OX=2026735 GN=queC PE=3 SV=1
MSTPTGFSKRYRGTTKVPQESQIDELRHAVVLVSGGLDSATVLAMASATGWTCHGLTVDYGQRHKAELEAARAVCEALGAASHRIVRVELGAFGGSALTEPHRTVPTGRDARAIEAGGIPETYVPARNTVMLSVALSLAEAIEADAIFCGVNAIDYSGYPDCRPDFIAAFQALANVATRRGVQGRPIQIKAPLIRMRKAEIIRTGLDLGVDYALTVSCYDPDGAGRACGRCDACTLRRAGFEAAGVADPTRYRP

SEQ ID NO: 37789 - protein, 228 aa, unidentified
  source 1..228: note = Deltaproteobacteria bacterium
  REGION 1..228: note = tr|A0A1F9HBT2|A0A1F9HBT2_9DELT 7-cyano-7-deazaguanine synthase OS=Deltaproteobacteria bacterium RIFCSPLOWO2_02_FULL_40_36 OX=1797875; GN = A3I69_07750 PE=3 SV=1
MRPSALVLLSGGLDSLASLHWASQNADLALGLTINYGHKAFAKECEAAQNICKKYDISHQVMDLTWLGGFGHNALVDPKVLLPKLHRADLDDEKLVQESAQIVWVPNRNGLFINAAASLAENEMISWIVMGFNKEEAKTFPDNSSGFVDAVNKSLSFSTQKKVSVVAPHVEKNKKEIVSWLLKAGGDLTHLWSCYEGSKKMCGECESCQRLMRALDEAGAHEWKSQFF

SEQ ID NO: 37790 - protein, 227 aa, Dendrosporobacter quercicolus
  REGION 1..227: note = tr|A0A1G9LG38|A0A1G9LG38_9FIRM 7-cyano-7-deazaguanine synthase OS=Dendrosporobacter quercicolus OX=146817 GN=queC PE=3 SV=1
MRAVVLLSGGLDSTVCMAVAKHRGYEVFPLSFHYQQRHCIELENARKVANFFGVSRHLVIETNMGEFGGSALTDPDIAVPLGDITRRDIPSTYVPARNLIFLSYALGYAEALQAEKIFIGVNALDYSGYPDCRPEFISLFQQLADYSTKAAVQDKQRISIETPLIQLSKKDIILLGAELKAPFELTHSCYRGGVKACGTCDSCLLRLKGFAEAGFADPVPYEASNDL

SEQ ID NO: 37791 - protein, 237 aa, Denitratisoma sp.
  REGION 1..237: note = tr|A0A518UCK5|A0A518UCK5_9PROT 7-cyano-7-deazaguanine synthase OS=Denitratisoma sp. DHT3; OX = 1981880 GN=queC PE=3 SV=1
MKPAVILLSGGLDSATVLAIARQQGFVCHCLSVDYGQRHSVELAAARRVADALGAREHRVLHLDMNQFGGSALTDPGIGVPTDGVEAAGIPITYVPARNTIMLALAMGWAEVLGADDLFVGVNAVDYSGYPDCRPEFIRAFETMANLATRAGVEGRRLHIHAPLIDMTKAEIIRAGHDLGVDYALTVSCYQADDQGRACGLCDSCRLRRAGFTAAGLPDPTPYAGQAGTLQESSDKR

SEQ ID NO: 37792 - protein, 234 aa, Denitrobacterium detoxificans
  REGION 1..234: note = tr|A0A172RZF5|A0A172RZF5_9ACTN 7-cyano-7-deazaguanine synthase OS=Denitrobacterium detoxificans OX=79604 GN=queC PE=3 SV=1
MSPAAKRALVLSSGGVDSTTCLGLAVEKLGAENVASVSFFYGQRHDRELRAADAVAKHYGVRHYTLDLAGIMQYSDSAMLANSSQQVPHGTYAKQIDENGRPNTYVPFRNGLMLSAAGALAMSLFPDEACDIYLGAHADDAAGDAYPDCSPAFTQAMDEALSVGTYGNVHLVAPFVNCTKAQVVERGLSLDVPYELTWSCYEGGEAPCGTCATCLDRIAAFRANGTEDPVPYAE

SEQ ID NO: 37793 - protein, 242 aa, unidentified
  source 1..242: note = Denitromonas halophilus
  REGION 1..242: note = tr|A0A557RS72|A0A557RS72_9RHOO 7-cyano-7-deazaguanine synthase OS=Denitromonas halophilus; OX = 1629404 GN=queC PE=3 SV=1
MTEITETPPRRAVVLLSGGLDSATCLAIAREQGFECYALSVAYGQRHAAELTASKRVADSLGAAEHRLARVGLGQFGGSALTDPTIDVPIEARGADTSPIPVTYVPARNTVMLSIALAWAEVLGARNIFVGVNAVDYSGYPDCRPEYIQAFETMANLATKAGVEGERLTIHAPLISLSKAEIIRQGTTLGVDYAQTVTCYLADDTGRACGRCEACRLRRAGFLEAGVDDPTRYVNGKPPEIS

SEQ ID NO: 37794 - protein, 242 aa, unidentified
  source 1..242: note = Denitromonas halophilus
  REGION 1..242: note = tr|A0A557QXR7|A0A557QXR7_9RHOO 7-cyano-7-deazaguanine synthase OS=Denitromonas halophilus; OX = 1629404 GN=queC PE=3 SV=1
MTETTETPPRRAVVLLSGGLDSATCLAIAREQGFECYALSVAYGQRHAAELTASKRVADSLGAAEHRLARVGLGQFGGSALTDPTIDIPLDDRQTASPIPVTYVPARNTVMLSIALAWAEVLGANDIFVGVNAVDYSGYPDCRPEYIKAFETMANLATKVGVEGERMSIHAPLIELSKADIIRRGTTLGVDYSQTVTCYQADDTGRACGRCEACRLRRAGFLDAGVDDPTRYANGKPPELSA

SEQ ID NO: 37795 - protein, 226 aa, Denitrovibrio sp.
  REGION 1..226: note = tr|A0A2N6D523|A0A2N6D523_9BACT Uncharacterized protein OS=Denitrovibrio sp. OX=2053308 GN=C0603_11395; PE = 4 SV=1
MDTYNQFFNKYNKALVALSGGADSAYALILAVQHMGCENIVAATCVNNHIFNYEIENARKICEFLGVKHIEFITEVTPEFLKNDDQRCYHCKKTIMSQMQTISDHEVIFDGTNIDDDASDRPGSKAISELKIISPLKELGIGKELILSKVAHLPVVFHDDSCKATRLTHTIDDERMSLVEKLEDQLRDKFSGVRYRIDDKQLAFNKPIRLYKKDFEYINKIKHQNE

SEQ ID NO: 37796 - protein, 238 aa, unidentified
  source 1..238: note = Desertifilum sp.
  REGION 1..238: note = tr|A0A1E5QFW8|A0A1E5QFW8_9CYAN 7-cyano-7-deazaguanine synthase OS=Desertifilum sp. IPPAS B-1220 OX=1781255 GN=queC PE=3 SV=1
MSKPKAVVLLSGGLDSATTAASAIADGCDPIAISFRYGQRHEREIEAARAIALRLQIVEHYVVDINLAQWGGSSLTDASAPIPTEGIQAGEIPSTYVPGRNTVFIAIALSLAEAKGAEAIYLGINAVDYSGYPDCRPEYLAAFQQLANLSSKVGVEGNSPRLVAPLVRDTKVDIVRRAVQLGVPIQLTWSCYQGGEEPCGVCDSCRIRDRALIEAGYPELATAIGQRLHVQNSDIARL

SEQ ID NO: 37797 - protein, 229 aa, Desmospora activa
  REGION 1..229: note = tr|A0A2T4Z6V5|A0A2T4Z6V5_9BACL 7-cyano-7-deazaguanine synthase OS=Desmospora activa DSM 45169 OX=1121389 GN=queC PE=3 SV=1
MGKKAVIVLSGGLDSTTCMGLAQAEGYELYPLTFDYGQRHDREVEQAKAIAHHYEVKEHRIVDIGFLNQIGGSALTEDSISVPTEEEEGIPTTYVPARNLIFLSLAAAYAEVIEAEAVYTGVSAVDYSGYPDCRPQFISHLEETICRATKAGEEGRPIRLVTPLIHLSKGETIREGLRLHVPYHLTTSCYQGGEVACGVCDSCRLRRKGFADAEAIDPIPYVDGVKAGG

SEQ ID NO: 37798 - protein, 231 aa, Desmospora sp.
  REGION 1..231: note = tr|F5SDQ8|F5SDQ8_9BACL 7-cyano-7-deazaguanine synthase OS=Desmospora sp. 8437 OX=997346 GN=exsB PE=3 SV=1
MAEKAVVVLSGGLDSTTCMGLAREAGYELYPLTFHYGQRHDREVEQARKVAKHFGVKKHRVVDMGFLRQIGGSALTDDKMEVPVPDGSGEEIPSTYVPARNLIFLSLATAYAEVIGAVKVYIGVSAVDYSGYPDCRPEFIRSMEETVRRGTKAGVNGNPIRLEAPLLHLSKGETIREGLRLQVPYHLTTSCYRGDRVACGLCDSCRLRLKGFRDVGAEDPIPYAEQVNRVN

SEQ ID NO: 37799 - protein, 254 aa, Desulfacinum hydrothermale
  REGION 1..254: note = tr|A0A1W1XKC3|A0A1W1XKC3_9DELT 7-cyano-7-deazaguanine synthase OS=Desulfacinum hydrothermale DSM 13146 OX=1121390 GN=queC PE=3 SV=1
MTHGERPKAVVLLSGGLDSTTCLAIAKDAGYACYALTFSYGQRHKVELEAARRVAAAFSVEEHLVLELPLDRIGGSALTSPMEVPKDAPLAMEGGSIPVTYVPARNTIFLSLALAWAEVLGAADIFIGVNAVDYSGYPDCRPEYIEAFQHMANLATKAGVEGQMKVRIRTPLLHWSKAQIVRKGRELGVDYDLTHSCYDPDPEGRPCGRCESCRLRARGLEGAQELVRERTGCSLLVRTEGWDYHASPFSRPGL

SEQ ID NO: 37800 - protein, 229 aa, unidentified
  source 1..229: note = Desulfallas geothermicus
  REGION 1..229: note = tr|A0A1I6D4Y0|A0A1I6D4Y0_9FIRM 7-cyano-7-deazaguanine synthase OS=Desulfallas geothermicus DSM 3669 OX=1121426 GN=queC PE=3 SV=1
MKKAVVVLSGGLDSTVCMSVAKQDGYKIFPITFSYGQRHSREVEQAKKVAEFYRCNKHLILDIGFFREIGASALTSYNIDVPTDRSVEQMQEDIPVTYVPFRNAVFLSMAVGYAEAIQAEKIYIGVNALDYSGYPDCRPRFIQAFQEAVNLGTAASDKNMPIKIATPLISLTKGEIIKVGVKNGAPLHLTTSCYLGGEKACGKCDSCRLRLKGFREAGIQDPIEYEIKD

SEQ ID NO: 37801 - protein, 219 aa, unidentified
  source 1..219: note = Desulfamplus magnetovallimortis
  REGION 1..219: note = tr|A0A1W1H7S6|A0A1W1H7S6_9DELT 7-cyano-7-deazaguanine synthase OS=Desulfamplus magnetovallimortis OX=1246637 GN=queC PE=3 SV=1
MTDSVVVFSGGMDSTVLMADILGKGKNVQALSFDYGSRHNDRELLCAATFCQEHKIEHRIVKLPFINELFSSSLLKSGKDVPDGSYMEENMKSTVVPFRNGIMLSIAAGFAESIGAGEVLLASHSGDHFIYPDCRPEFNEAFSRAVFMGTGEQVSIRFPFANMDKRDIGDLGRELGIDFTTTWTCYKGGEIHCGTCGACDERKYALRYDEGFDPTNYAI

SEQ ID NO: 37802 - protein, 234 aa, Desulfarculus baarsii
  REGION 1..234: note = tr|E1QIA2|E1QIA2_DESB2 7-cyano-7-deazaguanine synthase OS=Desulfarculus baarsii (strain ATCC 33931 / DSM 2075 / VKM B-1802 / 2st14) OX=644282 GN=queC PE=3 SV=1
MKRFDQKPPAVVLLSGGLDSATCLAMANDQGFEPHALSFRYGQRHAVELLAAQRVAQALGARRHLILDVDLRGVGGSALTADMAVPKGRSLAEMTDGVPVTYVPARNTLFLSLALAWAETLDCADIFIGVNALDYSGYPDCRPEFILAFENLANLATKMSTEQGRYIRVHAPLIRMTKAQIIRAGLALGVDYGLTHSCYDPDADGKPCGQCDSCLLRAKGFAEAKTPDPALKDS

SEQ ID NO: 37803 - protein, 696 aa, Desulfarculus baarsii
  REGION 1..696: note = tr|E1QK27|E1QK27_DESB2 Uncharacterized protein; OS = Desulfarculus baarsii (strain ATCC 33931 / DSM 2075 / VKM B-1802 / 2st14) OX=644282 GN=Deba_2565 PE=4 SV=1
MSNERSILCGDVKGDRLPFDDKKPLSLHLWGKGENVSLHISDIRSQLLRDIPSFFHDLIEIATYVYCADQAITRGGDGVDNFGENWRRTLFFRIAVRNPDLWNSSPLKDQLVETLSFLSEDEYYFDFVELKNGPLTQKHLELNVDPPEEVMLFSGGLDSLGGAIEEAVINSRRIVMVTHKATHKFNRRHRRLLDLLSSAAVHKPLHIPVSINKSKFLGREYTQRSRSFLYAALGATVAQMFNLRRIRFYENGVISFNLPISAQVVGARATRTTHPQVINGFANIFSTLSGQPFTVENPFIWKTKTEVVSDIVKAGCADTIKFSTSCTHTWAMTKLNTHCGTCSQCIDRRFAVLAADAQEHDPKEAYGVDLLTGERDEGEPKAMLAAYVETANEVADMTALEFFGSYGEATRVLNHLNGSPDSTALRLYELHHRHAKCITKVVDDAIAQNRSAIRKRQLPANCLLRLVCDSGGVQADPGDSNTCPTHEPTNNYICIRGQCWTIRYDGNEEKIYTPDIGFYHLQILLDNPGSTFSASELDVMVRRMTKNELYTSVCPGETPFDEGVSVLGQSDAGPVLDDDAVRSYRTRLHEIDNDLEKAQANNDLGKIEALANEKGWIESELSNAQGLGGAIRKLGDDRNKVRNRVGNAIRRALKKIKQYDKHLSDHLQKPILNLGHALSYVPRDGLTWSSTSTQNN

SEQ ID NO: 37804 - protein, 233 aa, Desulfarculus sp.
  REGION 1..233: note = tr|A0A3A6P109|A0A3A6P109_9DELT 7-cyano-7-deazaguanine synthase OS=Desulfarculus sp.; OX = 2093367 GN=queC PE=3 SV=1
MPEPQPKPVAVVLLSGGLDSSTCLALAQDQGYECYALTVRYGQRHQAELAAARRVARALGVKQHLELSVDLAAVGGSALTADIAVPKGRDAAQMAQGVPVTYVPARNTVFLSLALAWAETLSAEHIFIGVNALDYSGYPDCRPEFIMAFENLAALATKMGTQQGRRLRVHAPLIRMSKAQIIQTGLSLGLDYGLTHSCYDPTPDGGPCGACDSCLLRAKGFAEAGAADPLLKP

SEQ ID NO: 37805 - protein, 233 aa, Desulfatibacillum aliphaticivorans
  REGION 1..233: note = sp|B8FMW6|QUEC_DESAL 7-cyano-7-deazaguanine synthase; OS = Desulfatibacillum aliphaticivorans OX=218208 GN=queC; PE = 3 SV=1
MNAIQKEKAVVLLSGGLDSATAMAIAKDMGFQVYALSFSYGQRHTTELEAAKRVAKTLGAVEHQVANIDLTCFGGSALTADLDVPKGRAPEDMEKEIPVTYVPARNTIFLSFALAWAEVLETSHIFIGVNAVDYSGYPDCRPEYIQAFTAMANLATKAGVEGRTKIEIHTPLIDLTKAQIIQKGIALGVDYGLTHSCYDPSPEGLACGQCDSCLLRKKGFAEAGIPDPTKYIP

SEQ ID NO: 37806 - protein, 234 aa, Desulfatibacillum alkenivorans
  REGION 1..234: note = tr|A0A1M6MMM0|A0A1M6MMM0_9DELT 7-cyano-7-deazaguanine synthase OS=Desulfatibacillum alkenivorans DSM 16219 OX=1121393 GN=queC PE=3 SV=1
MTEKQTKKAVVLLSGGLDSATAMAMAKDMGFQVYALSFSYGQRHTTELESAKRVAKTQGAVRHQIANIDLTCFGSSALTADLDVPKGRATEDMQKEIPVTYVPARNTIFLSFALAWAEVLETPHIFIGVNAVDYSGYPDCRPEYIRAFATMANLATKAGVEGRTKIEIHTPLIDLTKAQIIQKGTALGVDYGLTHSCYDPSPEGLACGQCDSCLLRKKGFEEAGVPDPTKYFGG

SEQ ID NO: 37807 - protein, 229 aa, unidentified
  source 1..229: note = Desulfatitalea sp.
  REGION 1..229: note = tr|A0A0F2QZC1|A0A0F2QZC1_9DELT 7-cyano-7-deazaguanine synthase OS=Desulfatitalea sp. BRH_c12 OX=1629708 GN=queC PE=3 SV=1
MKKKAVVLSSGGIDSTTAMAIAAQEGFTLFSLSFDYGQRHRCELAAAGRVAVFFNVDKHLVLKIDMGAIGGSALTTDMAVPKEREISDVENDIPVTYVPARNTIFLSYGLAWAEVLAASDIVIGVNAVDYSGYPDCRPAFIQAYQAMANLATKAAVQGHMAVRIHTPLIHMTKAQIIQTGAALGVDYALTHSCYDPSPAGLACGRCDSCVLRRKGFQEAGVPDPTQYSI

SEQ ID NO: 37808 - protein, 186 aa, Desulfitibacter sp.
  REGION 1..186: note = tr|A0A101V6B5|A0A101V6B5_9FIRM 7-cyano-7-deazaguanine synthase OS=Desulfitibacter sp. BRH_c19 OX=1734395 GN=APF76_18260 PE=3 SV=1
MNYPVLVLSSGGIDSTAVIKFYLNQSFEVSTLFVDYGQLSLKNEEKAVTKVCEYYNVPLKKIGFFGFKKKTDGFILGRNALLLHIALMEFKQPKGLIGIGIHSSTSYVDCSNEFVNIMQASFDLYTNGCISIGAPFLNWGKKEICEYCVNNQVPLNLTYSCELGLDQPCGRCLSCRDLEVIYKDDS

SEQ ID NO: 37809 - protein, 233 aa, Desulfitobacterium chlororespirans
  REGION 1..233: note = tr|A0A1M7UQB8|A0A1M7UQB8_9FIRM 7-cyano-7-deazaguanine synthase OS=Desulfitobacterium chlororespirans DSM 11544 OX=1121395 GN=queC PE=3 SV=1
MKKAVVLLSGGLDSTTCMSVAHKAGYELYPLSFDYGQRHQRELEAAKAVAQYYKAKEHRIIKIDNVGGSALTDSSIQVPDYAEDGQIPVTYVPARNILFLSYALGYGEAIGAEAIFIGISSVDYSGYPDCRPEFLQAFQKVVDVGTKAGVSGQTIEIKAPLIYLSKAETIQLAAENGAPLHETTSCYRGGEKACGTCDSCTLRLKGFAEAGIKDPITYVNQGDRSCFSTPLED

SEQ ID NO: 37810 - protein, 222 aa, Desulfitobacterium dehalogenans
  REGION 1..222: note = tr|I4AAL7|I4AAL7_DESDJ 7-cyano-7-deazaguanine synthase OS=Desulfitobacterium dehalogenans (strain ATCC 51507 / DSM 9161 / JW/IU-DC1) OX=756499 GN=queC PE=3 SV=1
MKKAVVLLSGGLDSTTCMSVAYKAGYELYPLSFDYGQRHQRELDAAKAVAQYYKVKEHRIIKIDSVGGSALTDSAIQVPDYAEDGEIPVTYVPARNILFLSYALGYGEVIGAEAIFIGISSVDYSGYPDCRPEFLQAFQKVVDVGTKAGVSGQTIAIKAPLMYLSKAETIQLAVENDAPLHSTTSCYRGGEKACGTCDSCALRLKGFAEAGIKDPISYKEMD

SEQ ID NO: 37811 - protein, 221 aa, unidentified
  source 1..221: note = Desulfitobacterium dichloroeliminans
  REGION 1..221: note = tr|L0F750|L0F750_DESDL 7-cyano-7-deazaguanine synthase OS=Desulfitobacterium dichloroeliminans (strain LMG P-21439 / DCA1) OX=871963 GN=queC PE=3 SV=1
MKKSVVLLSGGLDSTTCMSVAAKAGYEIYPLSFDYGQRHQRELEAAKAVAQFYQVKEHRIITLDNVGGSALTDPSIQVPDYAEDDQIPVTYVPARNLLFLSYALGYGEVIGAEAIFIGISSVDYSGYPDCRPEFLEAFQKVAEVGTKAGANGQRIEIKAPLLHLSKADTIRLAGSNGAPLHLTTSCYRGGERACGTCDSCILRLKGFAEAGVADPVPYIEN

SEQ ID NO: 37812 - protein, 233 aa, Desulfitobacterium hafniense
  REGION 1..233: note = sp|Q24VU8|QUEC2_DESHY 7-cyano-7-deazaguanine synthase 2 OS=Desulfitobacterium hafniense (strain Y51); OX = 138119 GN=queC2 PE=3 SV=2
MKKAVVLLSGGLDSTTCMSVAHKAGYELYPLSFDYGQRHQRELEAAKAVAQYYKVKEHRLIKIEHVGGSALTDASIQVPDYTEDGQIPVTYVPARNILFLSYALGYGEVMGAEAIFIGISSVDYSGYPDCRPEFLQAFQKVVDVGTKAGVSGQTIAIKAPLLYLSKAETIQLAAENGAPLHHTTSCYRGGEKACGTCDSCTLRLKGFAEAGIKDPIDYVNQGDRSCFSTPLED

SEQ ID NO: 37813 - protein, 233 aa, Desulfitobacterium hafniense
  REGION 1..233: note = tr|G9XNX0|G9XNX0_DESHA 7-cyano-7-deazaguanine synthase OS=Desulfitobacterium hafniense DP7 OX=537010; GN = queC PE=3 SV=1
MKKAVVLLSGGLDSTTCMSVAHKAGYELYPLSFDYGQRHQRELEAAKAVAQYYKVKEHRLIKIEHVGGSALTDASIQVPDYTEDGQIPVTYVPARNILFLSYALGYGEVIGAEAIFIGISSVDYSGYPDCRPEFLQAFQKVVDVGTKAGVSGQTIAIKAPLLYLSKGETIQLAAENGAPLHHTTSCYRGGEKACGTCDSCTLRLKGFAEAGIKDPIDYVNQGDRSCFSTPLED

SEQ ID NO: 37814 - protein, 223 aa, Desulfitobacterium metallireducens
  REGION 1..223: note = tr|W0ECM1|W0ECM1_9FIRM 7-cyano-7-deazaguanine synthase OS=Desulfitobacterium metallireducens DSM 15288; OX = 871968 GN=queC PE=3 SV=1
MKKAVILLSGGLDSTTCMSVAHQEGYELYPISFNYGQRHQRELESAKAVASFYRVKEHRIFEIDYVGGSALTDPSISVPAYQEAEGIPVTYVPARNILFLSYALGYAEVLGAEAIFIGVSSIDYSGYPDCRPEFIEAFQQVVKVGTKAGVDGKAMTIRTPLIQLSKAATIQLAMANGAPLHLTTSCYQGGEKACGICDSCTLRLKGFKEAGLVDPIPYETFSV

SEQ ID NO: 37815 - protein, 233 aa, Desulfitobacterium sp.
  REGION 1..233: note = tr|A0A562HBS9|A0A562HBS9_9FIRM 7-cyano-7-deazaguanine synthase OS=Desulfitobacterium sp. LBE OX=884086 GN=queC PE=3 SV=1
MKKAVVLLSGGLDSTTCMSVAHKAGYELYPLSFDYGQRHQRELEAAKAVAQYYKVKEHRLIKIEHVGGSALTDASIQVPDYAEDGQIPVTYVPARNILFLSYALGYGEVIGAEAIFIGISSVDYSGYPDCRPEFLQAFQKVVDVGTKAGVSGQTIAIKAPLLYLSKGETIQLAAENGAPLHHTTSCYRGGEKACGTCDSCTLRLKGFAEAGIKDPIDYVNQGDRSCFSTPLED

SEQ ID NO: 37816 - protein, 227 aa, Desulfobacca acetoxidans
  REGION 1..227: note = tr|F2NDB5|F2NDB5_DESAR 7-cyano-7-deazaguanine synthase OS=Desulfobacca acetoxidans (strain ATCC 700848 / DSM 11109 / ASRB2) OX=880072 GN=queC PE=3 SV=1
MSDRKLAVVLLSGGLDSCVTAAVAGQDYDLALFHGNYGQRTVRRELQAFRELAVFFRCRHLLEANLDYLGAIGGSSLTDASLAIPQTDTESEELPSTYVPFRNTILIAAVVAWAEVIGASAVFIGANIIDGPDYPDCRPDYFNAYNRLIELGTRPGTHIRIHTPLIHLDKADIIRLGLKLQVPLELTWSCYRNEDRACGCCPSCRIRLKGFAEVGIKDPILYDEENL

SEQ ID NO: 37817 - protein, 258 aa, Desulfobacca acetoxidans
  REGION 1..258: note = tr|F2NET7|F2NET7_DESAR Uncharacterized protein; OS = Desulfobacca acetoxidans (strain ATCC 700848 / DSM 11109 / ASRB2) OX=880072 GN=Desac_0387 PE=4 SV=1
MRALLRTWRRVLVLFSGGIDSTLLLKIVADLFGENSAALTFEGPHRPTGETLEARKITRLLGVRHLTEDFDPFGLPDFRENTPERCYACKCEMYRRGWEIASKFEAEVLLDGTNLDDLNDTRPGLKAAQEMGVRSPFLKIGWRKADIRELSRVWQLPGWDRPPQSCLATRFPAYTHLQSQDLQKVDQVETFLGDKGFGPVRCRVHGDLVRLELPLKQRFRLLEPETLTALNLMIREQGWRYATLDLRGYQTGSMNLKE

SEQ ID NO: 37818 - protein, 233 aa, Desulfobacca sp.
  REGION 1..233: note = tr|A0A1F9P787|A0A1F9P787_9DELT 7-cyano-7-deazaguanine synthase OS=Desulfobacca sp. RBG_16_60_12 OX=1797909 GN=queC PE=3 SV=1
MVVSSSPKTENGKRKTAVVLASGGLDSCVAAAVARRHFDLAMFHANYGQRSLEQELEAFRAQAAFFQAATLEADLNYLGEIGGSSLTDFGPAVPTNAAEPPGIPSTYVPFRNTNLLAAAVAWAEVLGADAVFIGANVLDNPGYPDCRPEYFEAFSRLIELGTRPETHIRIHTPLIHLDKAGIVRLGLELGAPLELTWSCYQGEFRACGRCSSCRLRLKGFAAAGVPDPIPYQP

SEQ ID NO: 37819 - protein, 243 aa, Desulfobacter hydrogenophilus
  REGION 1..243: note = tr|A0A328FKE2|A0A328FKE2_9DELT 7-cyano-7-deazaguanine synthase OS=Desulfobacter hydrogenophilus OX=2291 GN=queC PE=3 SV=1
MTKKAVVLSSGGIDSTTAMAIARDRGHNIYSLSFSYGQRHSVELECAKKVACHMGAVMHKIVDIDLRQFGGSALTDDIAVPKHESVSQIDQTQIPVTYVPARNTIFLSYAMAWAEVLKAEAIFIGVTAVDYSGYPDCRPQFIEAFQTMANLATKTGITKQTVLTIETPLIQMSKSEIITTGHGLGVDYSLTISCYDPDSQGRSCGRCDSCLHRKKGFTEAGLPDPTPYIRDPQSYSNLLQLKS

SEQ ID NO: 37820 - protein, 229 aa, Desulfobacter postgatei
  REGION 1..229: note = tr|I5AYH8|I5AYH8_9DELT 7-cyano-7-deazaguanine synthase OS=Desulfobacter postgatei 2ac9 OX=879212 GN=queC; PE = 3 SV=1
MTKKAVVLSSGGIDSTTAMAIARDMGYDIYSLSFRYGQRHSVELECAKKVACHLGTIDHKIMDIDLRQFGGSALTDDIAVPKHDNVAQIDQTRIPVTYVPARNTIFLSYAMAWAEVLKAEAIFIGVTAVDYSGYPDCRPKFIEAFQTMANLATKTGVTKQTVLTIETPLIQMSKSEIITTGHRLGVDYSLTISCYDPDDQGRSCGRCDACLHRKKGFREAGIPDPTPYT

SEQ ID NO: 37821 - protein, 229 aa, Desulfobacter sp.
  REGION 1..229: note = tr|A0A357YSP5|A0A357YSP5_9DELT 7-cyano-7-deazaguanine synthase OS=Desulfobacter sp.; OX = 2294 GN=queC PE=3 SV=1
MTKKAVVLSSGGIDSTTAMAIARDREYDIYSLSFRYGQRHSVELECAKKVACHLGTIDHKIIDIDLRQFGGSALTDDIAVPKHDNVAQIDQTRIPITYVPARNTIFLSYAMAWAEVLKAEAIFIGVTAVDYSGYPDCRPKFIQAFQTMANLATKTGVTKQTVLTIETPLIQMSKSEIITTGDRLGVDYSLTISCYDPDDQGRSCGRCDACLHRKKGFSEAGIPDPTPYT

SEQ ID NO: 37822 - protein, 234 aa, Desulfobacter sp.
  REGION 1..234: note = tr|A0A2D6ETF1|A0A2D6ETF1_9DELT 7-cyano-7-deazaguanine synthase OS=Desulfobacter sp.; OX = 2294 GN=queC PE=3 SV=1
MHQRKKAIVLSSGGLDSTTAMAIAKNKRFEVYSLSFFYGQRHAEELDAAKRVAAFIGAAKHLLLNIDLTMIGGSALTDQIRVPKDRNKHKMIEEIPVTYVPARNTIFLSFALAWAEVLQSSDIFIGVNAVDYSGYPDCRPEYIEAFERMSNLATKAGLEGRISIKIRTPLMHMTKSQIIRKGLELGVDYSITHSCYDPFPGGLACGRCDSCVLRKKGFEEAMAKDPLPYKTEVK

SEQ ID NO: 37823 - protein, 231 aa, unidentified
  source 1..231: note = Desulfobacteraceae bacterium
  REGION 1..231: note = tr|A0A1J5DZ90|A0A1J5DZ90_9DELT 7-cyano-7-deazaguanine synthase OS=Desulfobacteraceae bacterium CG2_30_51_40 OX=1805128 GN=queC PE=3 SV=1
MKRAVVLLSGGIDSTTAMAVAKAEGFDLYALSFRYGQRHAVELEAAKTVAALLGVKEHLVMDIRLDRIGGSALTSEIVVPKDRNEHEIGRGIPATYVPARNTIFLSVALAWAEVLQAEDIFIGVNILDYSGYPDCRTEYIDAFERMANLATRAGVEGRARIEIHTPLIAMTKAEIIKKGLDLGVDYSITHSCYDPSYGGLACGRCDSCLLRIKGFRDAGVQDPTRYVSGSL

SEQ ID NO: 37824 - protein, 230 aa, unidentified
  source 1..230: note = Desulfobacteraceae bacterium
  REGION 1..230: note = tr|A0A1W9TRC5|A0A1W9TRC5_9DELT 7-cyano-7-deazaguanine synthase OS=Desulfobacteraceae bacterium 4572_187 OX=1971620 GN=queC PE=3 SV=1
MTIDKKAVILSSGGLDSTTVMAMAKNECYAIYSMSFSYGQRHKIELEAAKNVAEIIGVEKHLVINLDLNKIGGSALTDSIDVPKNRDEEAFSTDIPATYVPARNTIFLSYALAWAEVVGSSDIFIGVNAIDYSGYPDCRPEYIQAFEKMANLATKAGVEGLTRIKINTPLINMSKSRIIKKGIELGVDYSLTHSCYDPNPEGVACGRCDSCILRKKGFKEAGVKDPTKYF

SEQ ID NO: 37825 - protein, 239 aa, unidentified
  source 1..239: note = Desulfobacterales bacterium
  REGION 1..239: note = tr|A0A0S8AIC8|A0A0S8AIC8_9DELT 7-cyano-7-deazaguanine synthase OS=Desulfobacterales bacterium SG8_35 OX=1703400 GN=queC PE=3 SV=1
MAQKTRKEKKAVVLLSGGLDSTTVLAIARDAGFVCCCLSFKYGQRQSVELEKAKLNSAKMGAAQHLVLDIGLERIGGSALTGEFEVPKGRSFEAMEEGIPQTYVPGRNTIFLAYAMAWAEVVGADDIFIGVNALDYSGYPDCRPEYIKAFEKMARLATRAGTEGERTLRIHAPLMYRSKKEIIQKGMELGVDYSTTHSCYDPGTDGIACGQCDACRLRLKGFAEAGIDDPLPYQGKRNE

SEQ ID NO: 37826 - protein, 233 aa, unidentified
  source 1..233: note = Desulfobacterales bacterium
  REGION 1..233: note = tr|A0A2G9ZZM1|A0A2G9ZZM1_9DELT 7-cyano-7-deazaguanine synthase OS=Desulfobacterales bacterium CG23_combo_of_CG06-09_8_20_14_all_51_8; OX = 1973983 GN=queC PE=3 SV=1
MEKNQKKAIVLCSGGLDSTTVLAIARSQNYDCHTLTFFYGQRHHHELLAAEKISRALGAAGHHVITVDLGKIGGSALTGDIPVPKNRNAEEISSGIPVTYVPARNTIFLSHALAWAEVLGAPDIFIGVNAVDYSGYPDCRPEYIAAFETMANLALKCAVEGENTIHIRAPLLNMTKADIIRTGVQLHVDYSMTHSCYDPDLAGRACGFCDSCVLRKKGFAEAGVPDPTVYIKP

SEQ ID NO: 37827 - protein, 228 aa, Desulfobacterium sp.
  REGION 1..228: note = tr|A0A1W9U1T9|A0A1W9U1T9_9DELT 7-cyano-7-deazaguanine synthase OS=Desulfobacterium sp. 4572_20 OX=1971621 GN=queC PE=3 SV=1
MKKKAVVLASGGLDSTTIMAITRHGGYDIYALTFDYGQRHKIELKAAQKIAKYFGAKKHLILHIELDTIGGSALTADIPIPQERKLKEISSSGVPITYVPARNTIFLAYALSWAEVLEATDIFIGVNSIDFSNYPDCRPEFIESFQRTANLATRAGMEGKEIRINTPLIDMTKGEIIKKGLSLGVDYSMTHSCYNPKKDGLPCGKCDSCLLRKKGFEEAGIADPLFDQ

SEQ ID NO: 37828 - protein, 219 aa, Desulfobacterium vacuolatum
  REGION 1..219: note = tr|A0A1W2A6T3|A0A1W2A6T3_9DELT 7-cyano-7-deazaguanine synthase OS=Desulfobacterium vacuolatum DSM 3385 OX=1121400 GN=queC PE=3 SV=1
MVDAIIVLSGGMDSAVLLADTLEQGKTVEAISFDYGSKHNGRELPMARELCEHFKIDHEIIPLPFINELFSSSLLSSGEDVPDGAYMASNMKSTVVPFRNGIMLSIAAGYAESVEASEVLLGSHSGDHHIYPDCRPEFNNAFAHAVNVGTDGKIDIRFPFSHLNKRDIGDIGRRLGVDFSRTWTCYKGGRIHCGTCGACDERKYALRHEQGLDVTRYLV

SEQ ID NO: 37829 - protein, 229 aa, Desulfobacula phenolica
  REGION 1..229: note = tr|A0A1H2IEC0|A0A1H2IEC0_9DELT 7-cyano-7-deazaguanine synthase OS=Desulfobacula phenolica; OX = 90732 GN=queC PE=3 SV=1
MPDKAIVLSSGGIDSSTAMAIAKSKGKEIYSLSFRYGQRHSIEIEASKKIAQSLGAKAHKIIDIDLRQFGGSALTDDITVPKHDTVDDINANQIPITYVPARNTIFLSYAMAWAEVLKATSIYIGVTAVDYSGYPDCRPQFIEAFEKMANLATRTGITKEAVLKIETPLIHLSKADIIRTGVDLGVDYGLTTSCYDPDALGSSCGSCESCLHRIKGFKEAGIKDPTLYY

SEQ ID NO: 37830 - protein, 236 aa, Desulfobacula sp.
  REGION 1..236: note = tr|A0A1F9NC48|A0A1F9NC48_9DELT 7-cyano-7-deazaguanine synthase OS=Desulfobacula sp. GWF2_41_7 OX=1797910 GN=queC PE=3 SV=1
MQDKAVVLSSGGIDSTTAMAIAKSEGKDIYSLSFRYGQRHSVELKAAVKIAKMLGAKAHKIIDIDLRQFGHSALTDEIPVPKHNTLDDIKKDEVPVTYVPARNTIFLSYAMAWAEVLKASSIFIGVTAVDYSGYPDCRPEFIKAFEKMANLATKTGITKETILKIETPLIHLSKAEIIKTGIQLGVDYSLTISCYDPDDKGRSCGFCDSCLHRKKGFAKAGITDPTPYYPPASASA

SEQ ID NO: 37831 - protein, 151 aa, Desulfobacula sp.
  REGION 1..151: note = tr|A0A1F9RDH4|A0A1F9RDH4_9DELT 7-cyano-7-deazaguanine synthase (Fragment); OS = Desulfobacula sp. RIFOXYB2_FULL_45_6 OX=1797912; GN = A3J80_07470 PE=3 SV=1
MPDKAIVLSSGGIDSTTAMAIAKSKGKDIYSLSFRYGQRHSAELDAAVKIARTLGAKAHKIIEIDLRQFGGSALTDEIPVPKHGRLEDLKKDGIPVTYVPARNTIFLSYAMAWAEILKADSIYIGVTAVDYSGYPDCRPEFIAAFEKMANL

SEQ ID NO: 37832 - protein, 229 aa, Desulfobacula toluolica
  REGION 1..229: note = tr|K0NK54|K0NK54_DESTT 7-cyano-7-deazaguanine synthase OS=Desulfobacula toluolica (strain DSM 7467 / Tol2) OX=651182 GN=queC PE=3 SV=1
MPDKAIVLSSGGIDSSTAMAIAKSKGKEIYSLSFRYGQRHSIEIKASKKIAQSLGAKAHKIIDIDLRQFGGSALTDDINVPKHDTVDDIDANQIPITYVPARNTIFLSYAMAWAEVLKATSIYIGVTAVDYSGYPDCRPQFIEAFEKMANLATRTGITKEAVLKIETPLIHLSKADIIRTGVDLGVDYGLTTSCYDPDALGRSCGSCESCLHRIKGFKEAGIKDPTLYY

SEQ ID NO: 37833 - protein, 229 aa, Desulfobotulus alkaliphilus
  REGION 1..229: note = tr|A0A562RVG1|A0A562RVG1_9DELT 7-cyano-7-deazaguanine synthase OS=Desulfobotulus alkaliphilus OX=622671 GN=queC PE=3 SV=1
MSGCTDCVLVLSGGMDSTVLLYDLISRGKKTAALSFDYGSRHNHKELPLAASTCRKLGISHKIVSLDFMAELFSSALFHTGPPVPEGPYKSENMSQTIVPFRNPIMMSIAVGYAESIGAAEVLLASHSGDHALYPDCRREFNAAFNQAVRLGTDDKVRLSFPYADLDKRQIADLGRSLGVDFSRTWTCYKGGALHCGRCSACIERSHALRHGEGMDPTSYENPDEKNGR

SEQ ID NO: 37834 - protein, 434 aa, unidentified
  source 1..434: note = Desulfobulbaceae bacterium
  REGION 1..434: note = tr|A0A1W9LVL0|A0A1W9LVL0_9DELT DNA-binding protein; OS = Desulfobulbaceae bacterium A2 OX=1934250 GN=BWK76_25960; PE = 4 SV=1
MTCLVFHHNHQLLPPADDDLLPVQLYGLSGQGRGDISIIGNPVIDKVKRLGVRVPAQVMDFLTIALAVTAADTFIRRSDAVDGWTRQFSIQLPLHEPGRWQLLNKDLQRALHFLSGDIWDFDFREGGCPPPVPYRQRDRFHLVRLRGLDCVCLFSGGLDSAIGAIDLLAQGRAPLLVSHAYKGDKTRQDEIAEALKGRYSRFEVNADPHLYTGETDITMRTRSLNFFAFAAVGAYAVKAASQQERVDLVVPENGFISLNAPLTSRRIGALSTRTTHPHFIESIQKLFDAADIPCRINNPYQFKTKGQMAAECLNGQLLEDIVDSTVSCSHWKRSNRQCGVCVPCIIRRAALYAGGFTEETEYTYNDMANVLNETDRRDDLLALSIAVAQKATRKPGPWIADSGPLPPSQFADFQEVFLRGLDEVEAFLKAEGAV

SEQ ID NO: 37835 - protein, 235 aa, unidentified
  source 1..235: note = Desulfobulbaceae bacterium
  REGION 1..235: note = tr|A0A1Q6DMS1|A0A1Q6DMS1_9DELT 7-cyano-7-deazaguanine synthase OS=Desulfobulbaceae bacterium DB1 OX=1920419 GN=queC PE=3 SV=1
MENEIKKAVVLLSGGLDSTTVLAIARDRGFACYCLSFSYGQRQKVELDRAREIARRQGAVTHLVLGLDLDKIGGSALTADIDVPKKRSAAEMQASIPVTYVPGRNTIFLSHAMAWAEVIGAFDLFIGINVLDYSGYPDCRPEYLDAFEKVANLGTRAGVEAGKKFKIHAPLMHLTKKEIIMKGKGMGVDYSLTHSCYDPDGQGRACGQCDACQLRLKGFAEAGFVDPAHYQKVVA

SEQ ID NO: 37836 - protein, 228 aa, unidentified
  source 1..228: note = Desulfobulbus oralis
  REGION 1..228: note = tr|A0A2L1GR48|A0A2L1GR48_9DELT 7-cyano-7-deazaguanine synthase OS=Desulfobulbus oralis; OX = 1986146 GN=queC PE=3 SV=1
MQDEKKAVILLSGGLDSTTVLAMAKDRGFACHCLSFRYGQRQELELEKAQHIARHFGASHLILRVDLDIIGGSALTTGAAVPKDRPMNTVGQDIPATYVPGRNIIFLAHALAWAEVLGADDIFLGINAMDYSGYPDCRPEFLEAFARMASLGTRAGVQGRAFRFHAPLQYLSKKEIIVRGLALGVDYSMTHSCYDPVDGRACGHCDACRLRLKGFAEAGAQDPAPYAS

SEQ ID NO: 37837 - protein, 234 aa, Desulfobulbus propionicus
  REGION 1..234: note = tr|A0A2G6M6M2|A0A2G6M6M2_9DELT 7-cyano-7-deazaguanine synthase OS=Desulfobulbus propionicus OX=894 GN=queC PE=3 SV=1
MGSENNAVILLSGGLDSTTVLAMAANQGYTCNCLSFRYGQRQEIELQRAQKVSEQLGAARHLVLEVDLGAIGGSALTTTIDVPKDREIGDNEIPVTYVPARNIIFLAHALSWAEVVGARDIFLGINAVDYSGYPDCRPEFLDAFTQMANLGTKAGSTGQSFHFHAPLMRMSKKEIIEQGVRLGVNYGLTHSCYDPVGELACGRCDACLLRLKGFAEAGLTDPAPYVKIEKRSGS

SEQ ID NO: 37838 - protein, 228 aa, Desulfobulbus sp.
  REGION 1..228: note = tr|A0A0A2HU82|A0A0A2HU82_9DELT 7-cyano-7-deazaguanine synthase OS=Desulfobulbus sp. Tol-SR OX=1536652 GN=queC PE=3 SV=1
MPEQPPAVILLSGGLDSTTVLAIADAEGYACHCLSFDYGQKQTVELAKAEKIAARYGAKRHLILRLDLDRIGGSALTDNIVVPKDGNPEQQGTIPVTYVPARNTILLAHAVAWAEVLGAWDIFIGVNAVDYSGYPDCRPEFLAAFAHMANLGTKAGISGAAQFTIKAPLMYLSKAEIIKRGLSLGVDYSLTHSCYDPRGTKACGRCDACILRRNGFAAAGVPDPTDYL

SEQ ID NO: 37839 - protein, 230 aa, Desulfobulbus sp.
  REGION 1..230: note = tr|A0A3A6MY48|A0A3A6MY48_9DELT 7-cyano-7-deazaguanine synthase OS=Desulfobulbus sp.; OX = 895 GN=queC PE=3 SV=1
MKEQQKEAVVLFSGGLDSTTVLAIAQAEGYLCSCLSFRYGQRQEIELERARDIGARMGVRRHLILRLDLAAIGGSALTDDIAVPKDRAPDEMQNEIPITYVPGRNIIFLAHALAWGEVIGAADIFLGINAIDYSGYPDCRPDFLAAFEKMANLGTKNGCAGRPFSLHAPLQHLRKSEIIKLGLTLGVDYSLTHSCYDPQDGLACGRCDACRLRLQGFTEAGIVDPLRYVP

SEQ ID NO: 37840 - protein, 232 aa, Desulfocapsa sp.
  REGION 1..232: note = tr|A0A432QP51|A0A432QP51_9DELT 7-cyano-7-deazaguanine synthase OS=Desulfocapsa sp.; OX = 2066021 GN=queC PE=3 SV=1
MRSIEKKKAVILFSGGLDSTTVLAIVQEAGYSCHCLSFQYGQKQTVELEKAARLAKESKVSKHLILNLDLDKIGGSALTDAIEVPKDRDTDDDSIPITYVPARNTIFLSHAVAWAEVLGARDIFIGVNAVDYSGYPDCRPEFLEAFSTMANLGTKAGVSGKDGFIIHAPLLRMSKAEIVAEGMRLGVDYAKTHSCYDPVADKACGRCDACLLRLQGFRDAGLTDPADYISSS

SEQ ID NO: 37841 - protein, 232 aa, Desulfocapsa sulfexigens
  REGION 1..232: note = tr|M1P1I3|M1P1I3_DESSD 7-cyano-7-deazaguanine synthase OS=Desulfocapsa sulfexigens (strain DSM 10523 / SB164P1) OX=1167006 GN=queC PE=3 SV=1
MIPDNKKAVILFSGGLDSTTVLAIAKEAGYSCYCLSFQYGQKQTVELEKARRIADASQVAKHLILNLDLDKIGGSALTDSIDVPKDRDMIHNAEEIPITYVPARNIIFLAHAVAWAEVLGATEIFIGINAVDYSGYPDCRPEFLESFTQMANLGTRAGIEKTGRFSIQAPLLNMSKAEIIKTGIGLGVDYATTHSCYDPVSGKACGRCDACVLRMKGFSEAGIVDPTDYIKT

SEQ ID NO: 37842 - protein, 136 aa, unidentified
  source 1..136: note = Desulfocarbo indianensis
  REGION 1..136: note = tr|A0A0K9I262|A0A0K9I262_9DELT 7-cyano-7-deazaguanine synthase (Fragment) OS=Desulfocarbo indianensis OX=1348163 GN=AAU61_22385 PE=3 SV=1
GIPITYVPARNTIMLSLALGWAEAVGARDLFFGANAVDYSGYPDCRPEYVAAYETLANLATKAGVEGEHIRVNAPIIAMTKAEIIQAGARLGVDYGMTVSCYKADEEGRACGVCDSCRIRKAGFEAAGVPDPTRYV

SEQ ID NO: 37843 - protein, 231 aa, unidentified
  source 1..231: note = Desulfocarbo indianensis
  REGION 1..231: note = tr|A0A0K9I437|A0A0K9I437_9DELT 7-cyano-7-deazaguanine synthase OS=Desulfocarbo indianensis OX=1348163 GN=queC PE=3 SV=1
MPPAKPKAIVLLSGGLDSSTCLAMAQEQGFAVYALSFDYGQRHQVELAASQRVARALGAAQHLILRVDLRPIGGSALTADLEVPKGREPQAMAQGVPITYVPARNTLFLSLALAWAETLQCSDIFIGVNAVDYSGYPDCRPEFIQAFERLARLATRLGAEEGTDFKIHTPLIKLSKAQIIAKGAELGLDYGLTHSCYDPTPPGLACGQCDSCLLRLKGFAEAGLKDPLPYA

SEQ ID NO: 37844 - protein, 159 aa, Desulfococcus multivorans
  REGION 1..159: note = tr|S7TBW7|S7TBW7_DESML 7-cyano-7-deazaguanine synthase (Fragment) OS=Desulfococcus multivorans DSM 2059; OX = 1121405 GN=dsmv_3424 PE=3 SV=1
METPRKAIVLSSGGLDSTTVMAIAKSEGYDIYSLSFSYGQRHSAELDAANRVADTIGVKKHLVINVDMRLIGGSALTDDIAVPKDRNESDMAGEIPVTYVPARNTIFLSYALGWAEAVGAPDIFIGVNAVDYSGYPDCRHEFIAAFEALANLDTKAGVE

SEQ ID NO: 37845 - protein, 228 aa, unidentified
  source 1..228: note = Desulfococcus oleovorans
  REGION 1..228: note = tr|A8ZTP2|A8ZTP2_DESOH 7-cyano-7-deazaguanine synthase OS=Desulfococcus oleovorans (strain DSM 6200 / Hxd3) OX=96561 GN=queC PE=3 SV=1
MTADSRRAVVLSSGGIDSTTAMAMAVSQGFSVFSLTFDYGQRHRHELSAARAVARHLNAEKHLVLETDFRKIGGSALTADIPVPGTGPVENTIPVTYVPARNTIFLAYALAWAETLDAADIFIGVNAVDYSGYPDCRPEYIEAFARVANLGSKAGVEGRITFAVHTPLIHMTKAEIIRTGAALGVDYSITSSCYDPSPEGLACGLCDSCRIRKKGFVDAGLPDPTRYV

SEQ ID NO: 37846 - protein, 228 aa, Desulfococcus sp.
  REGION 1..228: note = tr|A0A1W9PWX0|A0A1W9PWX0_9DELT 7-cyano-7-deazaguanine synthase OS=Desulfococcus sp. 4484_241 OX=1968522 GN=queC PE=3 SV=1
MNNRQTKAVILSSGGIDSTTAMAIAAFQGFEIYSLTFSYGQRHSCELAAAAKVAQRFKAADHLVLETDLTKIGGSALTDDIPVPKDGPDKTQIPITYVPARNIIFLSYALAWAETIGSRDIFIGANAVDYSGYPDCRPEFISAFERMANLGTKTGVEKKGNITIHAPLMEMTKARIIQTGARLGVDYSITWSCYDPAPGGLACGRCDSCRIRKKGFEQAGIPDPTRYA

SEQ ID NO: 37847 - protein, 229 aa, unidentified
  source 1..229: note = Desulfocucumis palustris
  REGION 1..229: note = tr|A0A2L2X6Q0|A0A2L2X6Q0_9FIRM 7-cyano-7-deazaguanine synthase OS=Desulfocucumis palustris OX=1898651 GN=queC PE=3 SV=1
MKKAVVILSGGLDSTVCMSIAKSKGYDVFPLTFAYGQRHNKEVEQARKVADYYGCNKHLVVDIDFFRAIGESALTSDRINVPVNRSQEELAEGIPVTYVPFRNAVFLSMATGYAESIRAEIIYIGVNALDYSGYPDCRPQFIQAFQEVIRLGATTSDKGAQIKIESPLIHMSKGEIVKLGLKNKSPLHLTTSCYQGRERACGICDSCQLRLKGFSDAGTKDPIQYEEVM

SEQ ID NO: 37848 - protein, 219 aa, Desulfofaba hansenii
  REGION 1..219: note = tr|A0A2M9DJX0|A0A2M9DJX0_9DELT 7-cyano-7-deazaguanine synthase OS=Desulfofaba hansenii; OX = 157842 GN=queC PE=3 SV=1
MIDCIVVLSGGMDSTVLLADALKRNRHPAAISFDYGSKHNDRELPRAAEICKKFGVSHRIIRLPFIGELFSSSLLSSGEAIPDGNYNEADMKRTVVPFRNGILLSIAVGYAESKGAAEVLLGSHAGDHFIYPDCRPEFNKAFAEAALLGTDRAVHVLFPFASITKRDIGDLGRTLDVDFAATWTCYRGGEIHCGTCAACLERKNALRNDEGLDPTPYAA

SEQ ID NO: 37849 - protein, 229 aa, unidentified
  source 1..229: note = Desulfofarcimen acetoxidans
  REGION 1..229: note = tr|C8VWI1|C8VWI1_DESAS 7-cyano-7-deazaguanine synthase OS=Desulfofarcimen acetoxidans (strain ATCC 49208 / DSM 771 / VKM B-1644 / 5575) OX=485916 GN=queC PE=3 SV=1
MKNAVIILSGGMDSTVCMAYAGSREYNLYPITFNYGQRHAYEVGQAKKIASYFQSNRHLVVDLAFFREIGGSALTSEAIELPLNRTEKEIGSGIPITYVPFRNGVFLSLAVAYAEAVKAQAIFIGVNALDYSGYPDCRPEFIEAYQTVIDAGTKQASEDKQKLQIITPLLYKTKAEIVKMGMDLAAPLQLTTSCYRGEELACGRCDSCLLRLKGFSEAGFIDPISYESY

SEQ ID NO: 37850 - protein, 216 aa, unidentified
  source 1..216: note = Desulfofundulus australicus
  REGION 1..216: note = tr|A0A1M5C6Y0|A0A1M5C6Y0_9FIRM 7-cyano-7-deazaguanine synthase OS=Desulfofundulus australicus DSM 11792 OX=1121425 GN=queC PE=3 SV=1
MKSVVLLSGGLDSTVSMAQALIEGEVQLCLTIDYGQRAAAKEIAAAQALAAHYNLAHRVISLPFLADVTTTSLVNRKVIIPEPEGELDNPQQARTRAKAVWVPNRNALFINIAACFAEALGCEQVVTGFNREEAAAFPDNSIDFIEAINLSLSYSTANKIRVVSYTARLNKREIVRLGQRLKIPWHLLWSCYYGGETMCGRCESCRRFMRAMSAAR

SEQ ID NO: 37851 - protein, 233 aa, unidentified
  source 1..233: note = Desulfofundulus kuznetsovii
  REGION 1..233: note = tr|A0A101HZ21|A0A101HZ21_9FIRM 7-cyano-7-deazaguanine synthase OS=Desulfofundulus kuznetsovii OX=58135 GN=queC PE=3 SV=1
MRSVVLLSGGLDSTVSLAHALRESEVELCLTMDYGQRSAAREINSASAIAEYYDLNHMVIDLPFLRKITFSALVNTSKAVPNPSADLLDDPQAALDCAAAVWVPNRNGLFINIAASFAEALDCGLIVTGFNREEARTFPDNRPAFVKAANEALAFSTRNSVRVVSYTQRLDKVEIVQLGKKLNVPWRLIWSCYHGGSEMCGVCESCLRFSKAMKEAGIDGFSAEPGGSGDSSV

SEQ ID NO: 37852 - protein, 224 aa, unidentified
  source 1..224: note = Desulfofundulus salinum
  REGION 1..224: note = tr|A0A494WW94|A0A494WW94_9FIRM 7-cyano-7-deazaguanine synthase OS=Desulfofundulus salinum; OX = 2419843 GN=queC PE=3 SV=1
MKSIVLLSGGLDSTVSMAQALREGQVELCLTMDYGQRAAAREIAAASALAAYYKLAHRVIQLPFLGEVTTTSLVNKEETIPEPAEESLNDPQQATATAAAVWVPNRNGLFINIAACFAEALGCEQVVTGFNREEAATFPDNSLDFLEAINNSLAYSTASGVRVVSYTARLNKAEIVRLGQHLGVPWHLIWSCYYGGQTMCGRCESCRRLGRAMAAAGLEDQVRR

SEQ ID NO: 37853 - protein, 224 aa, unidentified
  source 1..224: note = Desulfofundulus thermosubterraneus
  REGION 1..224: note = tr|A0A1M6DGX9|A0A1M6DGX9_9FIRM 7-cyano-7-deazaguanine synthase OS=Desulfofundulus thermosubterraneus DSM 16057 OX=1121432 GN=queC PE=3 SV=1
MKSIVLLSGGLDSTVSMAQALREGEVELCLTMDYGQRAAAREIAAASALAAYYKLAHRVIQLPFLGEVTTTSLVNRKETIPEPAEEFLDDPQQATATAAAVWVPNRNGLFINIAACFAEALGCEQVVTGFNREEAATFPDNSFDFLEAINSSLAYSTASGVRVVSYTARLNKAEIVRLGQRLGVPWHLIWSCYYGGETMCGRCESCRRLCRAMAAAGLEDWVRR

SEQ ID NO: 37854 - protein, 234 aa, Desulfofustis glycolicus
  REGION 1..234: note = tr|A0A1M5SDM7|A0A1M5SDM7_9DELT 7-cyano-7-deazaguanine synthase OS=Desulfofustis glycolicus DSM 9705 OX=1121409 GN=queC PE=3 SV=1
MENRPLSPRAVILLSGGLDSTTVLAIASAQGYDCYCLSFRYGQKQAIELQRAARIAEHFNARRHLILQLDLGLIGGSALTDNIAVPKDRDLERCTDIPVTYVPARNTIMLAHALAWAEVIGAAEIFIGVNAVDYSGYPDCRPEFLEAFTVMANLGTKAGSTAGDHFQIRAPLMTMSKAEIIRTGLSLGVDYSMTHSCYDPDADAACGRCDACLLRLRGFAEVGITDPAPYRGTI

SEQ ID NO: 37855 - protein, 233 aa, Desulfoglaeba alkanexedens
  REGION 1..233: note = tr|A0A4P8L3G6|A0A4P8L3G6_9DELT 7-cyano-7-deazaguanine synthase OS=Desulfoglaeba alkanexedens ALDC OX=980445 GN=queC PE=3 SV=1
MQHQTSIPKAVVILSGGLDSSTCLAVAADQGFEPCALTFDYGQRHRVELEAARRVARSFGVSHHLVLELPLRKIGRSALTDNMEVPKDRSEIGGSTIPVTYVPARNTIFLSLALGWAEVLGAADIFIGVNALDYSGYPDCRPEYIRAFERMANLALKETVEGRLTIRIHTPLIHLSKAEIIRKGVALGVDYSLTLSCYDPDPEGRACGRCDSCRLRKRGFQEAGIPDPTPYVD

SEQ ID NO: 37856 - protein, 219 aa, Desulfoluna butyratoxydans
  REGION 1..219: note = tr|A0A4U8YQL0|A0A4U8YQL0_9DELT 7-cyano-7-deazaguanine synthase OS=Desulfoluna butyratoxydans OX=231438 GN=queC PE=3 SV=1
MYETVVVLSGGMDSAVLLAHCLSKGQRCVAISFDYGSKHNASELPMAKAMCDHLGVTHTLVPLPFINELFDSSLLKSGEEVPDGAYDSENMKSTVVPFRNGIMLSIAAGYAESVGARQVVLASHAGDHFIYPDCRPEFNEALGKAIHLGTDGQVTIAFPFAQLDKREIGDLGRTLGVDFAATWTCYKGGTAHCGTCGACDERKYALRFDEGLDPTTYLA

SEQ ID NO: 37857 - protein, 219 aa, Desulfoluna spongiiphila
  REGION 1..219: note = tr|A0A1G5FWB3|A0A1G5FWB3_9DELT 7-cyano-7-deazaguanine synthase OS=Desulfoluna spongiiphila OX=419481 GN=queC PE=3 SV=1
MYETVVVLSGGMDSAVLLADCVAKGQNCVAISFDYGSKHNASELPMAKAMCDHLGVPHTLVPLPFINELFDSSLLQSGDAVPDGAYDAENMKSTVVPFRNGIMLSIAAGYAESVGARQVVLASHAGDHVIYPDCRPEFNEALGKAIHLGTDGQVAIAFPFARMDKREIGDLGRTLGVDFAATWTCYKGGSAHCGTCGACDERKYALRFDEGLDPTTYLV

SEQ ID NO: 37858 - protein, 271 aa, Desulfoluna spongiiphila
  REGION 1..271: note = tr|A0A5E7X958|A0A5E7X958_9DELT Pyridinium-3 5-biscarboxylic acid mononucleotide sulfurtransferase lare; OS = Desulfoluna spongiiphila OX=419481 PE=4 SV=1
MKSSALKYESLLTRLKLYDSLAVAFSGGVDSTLLLKAAVDTLGENVVAVTSVSPVHARREIEAAKACAATLGVRHILYDPGMMEDKGFLENTPRRCYFCKRRMFMRMSNEVRALGVSNVVHGVNCDDLGDYRPGLKAAEELGIGAPMVDAGLFKAEIRELAEELGLSVARKPAMSCLATRIPYGEPITREALAMVEAAEATLDDLGFQQFRVRHHGDVARIEFSRKDLARLFTESMMAQVVSGVRRAGYLHVAADLEGYGQGRMNRGLEDV

SEQ ID NO: 37859 - protein, 218 aa, Desulfomicrobium apsheronum
  REGION 1..218: note = tr|A0A1I3UR98|A0A1I3UR98_9DELT 7-cyano-7-deazaguanine synthase OS=Desulfomicrobium apsheronum OX=52560 GN=queC PE=3 SV=1
MDAVIVLSGGMDSAVLLAHELSLGTRVAALSFDYGSKHNPRELPMAREICARLNVGHKVVGLPFINELFASSLLQSGEAIPEGAYDADSMKSTVVPFRNGILIAIAVGYAESVGASRVLIGSHSGDHHIYPDCRPEFNAAIDEAARLGTDDAVRVAFPFSAMDKREIGDLGRTLGVDFARTWTCYKGGELHCGTCGACDERKFALRHDQGLDPTRYLK

SEQ ID NO: 37860 - protein, 700 aa, Desulfomicrobium norvegicum
  REGION 1..700: note = tr|A0A1I4LR50|A0A1I4LR50_DESNO 7-cyano-7-deazaguanine synthase (Queuosine biosynthesis); OS = Desulfomicrobium norvegicum (strain DSM 1741 / NCIMB 8310) OX=52561 GN=SAM N05421830_109112 PE=4 SV=1
MQDKRYIICGNAPTDGIEENPDRDLRLRLWGKDGPDKITLRIEDIHKKMSKDVPDSFQDLLEIATYVYSADQAIPRGADDVDSFGHGWRRDLHFIIPVRKPDFWNGDDIHQALRSTLGFLSDDNYHFEFVKLKEAQAFQGYLKFDDDGRLFGYPEQVVMFSGGLDSLAGAIDEVLNEKHKVVLVTHKSTPKLNTRHRRLEKMIADKAGENAPLHIGVRVNKNKGLNYEYTQRSRSFLYVSIGATIAKMLNLKSVRFYENGVISLNLPVCAQVVGGRATRTTHPRVIRGFQEIISLVAGEPFTIENPYIWKTKAGVIEVITKAGCQDMIAASTTCTHTWEMTNHHTHCGTCSQCIDRRFAMIAAKADQYDPVEAYKADIFTQSRSKDEDKIMTAAYLERANQVREQDDITQFIARFSEVSRVFRYLNGNSGKVAQKVYDLYKRHAKEVCDAMDTMVGRNITAIRQRTLPGDCLLRTVYESGSVISVPAIPVEQKQPDNYFRKRGGVWAARFNGNAEVLVTGVDKGAEYINFLLARPNKETSVYEIVCGFAIDSCNAVLNSNETDEGFQVTQGVPLGDTGFVADRKAVEQYRETAHELLREIEEARAENNDAEIQRLENEMTQITAAINEAVGLGGKLRKSNDKRKNIRDAFRSAVNRAITYLEKYDKPLAAHLKESIKCGNEPVYRTEEEIVWEVRPIVNE

SEQ ID NO: 37861 - protein, 218 aa, Desulfomicrobium norvegicum
  REGION 1..218: note = tr|A0A1I4KY47|A0A1I4KY47_DESNO 7-cyano-7-deazaguanine synthase OS=Desulfomicrobium norvegicum (strain DSM 1741 / NCIMB 8310) OX=52561 GN=queC; PE = 3 SV=1
MDAVIVLSGGMDSAVLLAHEISMGTRVAALSFDYGSKHNPRELPMAREICARLNVGHKVVGLPFINELFASSLLQSGEAIPEGAYDADSMKSTVVPFRNGILIAIAVGYAESVGASRVLIGSHSGDHHIYPDCRPEFNAAIDEAARLGTDDAVRVAFPFASMDKREIGDLGRTLGVDFARTWTCYKGGELHCGTCGACDERKFALRHDQGLDPTRYLK

SEQ ID NO: 37862 - protein, 233 aa, Desulfomonile tiedjei
  REGION 1..233: note = tr|I4C7D7|I4C7D7_DESTA 7-cyano-7-deazaguanine synthase OS=Desulfomonile tiedjei (strain ATCC 49306 / DSM 6799 / DCB-1) OX=706587 GN=queC PE=3 SV=1
MQKRPEEKAVVLLSGGLDSTTCLAIARAQGYLTYALSFFYDQRHEIEMRAAKRVAAIMGITHHLILQIPLGKIGGSALTSDLQVPKSADISHMPQGIPLTYVPARNTIFLSFALAWAEVLEAENIFIGVNALDYSGYPDCRPEYIAAFETMANLGTKMAVEGFMRFRIHTPLIRLSKGEIIKKGIELGVDYSATHSCYDPDPEGMACGHCDSCLLRKKGFAEAGVPDPTVYVE

SEQ ID NO: 37863 - protein, 271 aa, Desulfonatronum thiosulfatophilum
  REGION 1..271: note = tr|A0A1G6ET40|A0A1G6ET40_9DELT Uncharacterized protein OS=Desulfonatronum thiosulfatophilum OX=617002; GN = SAMN05660653_03112 PE=4 SV=1
MTAPEPNTGAKHQDLLRALRAMGKAVVAFSGGLDSTFLLHAARQALGENVVAVTIFTPYMPETEIEDATNTARVMSVAHELLNVPFPEAIRTNPANRCYFCKRTLFAHLLQLAAARGIDHVLDGTNLDDLGDHRPGFKAVRELGVESPLLAAGLTKQDLRDLSKNQGLPTWNKPAGACLLTRIPHDTPVKEAELRRIDRAETVLKELGFHAVRLRSHGDIARIEVPREQLVDVVEADARHGISKQLIALGYRHVTLDLAGYRMGSLNREAK

SEQ ID NO: 37864 - protein, 227 aa, Desulfonauticus sp.
  REGION 1..227: note = tr|A0A117KMZ5|A0A117KMZ5_9DELT 7-cyano-7-deazaguanine synthase OS=Desulfonauticus sp. 38_4375 OX=1635258 GN=queC PE=3 SV=1
MRPTNRDWALVCLSGGQDSATCLAWAKDRFTKVYSVSFYYGQRHAIELECSRKLSELAQCEHHFEIQMDQLFSQIEVSSLLDKSKDVTSSFDLDANLPSSFVPFRNLFFISSAASIAYLYGIKNIVVGVSQTDFSGYPDCRNNFIKSLNATLELAVDSSFEIHAPLMYLSKKETVLLMKNLGCLDWYRYTHTCYKGERPACGICPACKLRLKGFAEAGIKDLIEYRK

SEQ ID NO: 37865 - protein, 233 aa, Desulfonema ishimotonii
  REGION 1..233: note = tr|A0A401FU07|A0A401FU07_9DELT 7-cyano-7-deazaguanine synthase OS=Desulfonema ishimotonii; OX = 45657 GN=queC PE=3 SV=1
METDKKAVVLSSGGLDSSTVIAIAKDQGYTVHSLSFFYGQRHAFELEAARKVAGAMGVAKHLVVEADLKKIGGSALTDDIEVPKSRNEAEMAGEIPVTYVPARNTVFLSYALAWAEVLGASDIFIGVNAVDYSGYPDCRPEYIAAFERMANLATKAGVEGKTVLRIHAPLMRMTKADIIRKGTELGVDYGITHSCYDPSPEGLACGQCDSCLLRKKGFAEAGVPDPTRYVRVI

SEQ ID NO: 37866 - protein, 219 aa, Desulfopila sp.
  REGION 1..219: note = tr|A0A4U1A9K4|A0A4U1A9K4_9DELT 7-cyano-7-deazaguanine synthase OS=Desulfopila sp. IMCC35005 OX=2569541 GN=queC PE=3 SV=1
MIDSVIILSGGMDSTVMLAHEIDSGRKVAALSFHYGSKHNDKELPLAAMSCKQFGIDHKQVALPFIDQLFSSSLLQSGTEIPDGTYDAENMQSTVVPFRNGILIAIAVGYAESIGASKVLLGSHSGDHHIYPDCRPAFNEAMNTAVLSGTDNAVQLEFPFARMDKREIGDLGRKLGIDFTTTWTCYKGGDIHCGTCSACVERKFALRKDKGLDPTIYHQ

SEQ ID NO: 37867 - protein, 219 aa, Desulfopila sp.
  REGION 1..219: note = tr|A0A4U1AHY0|A0A4U1AHY0_9DELT 7-cyano-7-deazaguanine synthase OS=Desulfopila sp. IMCC35006 OX=2569542 GN=queC PE=3 SV=1
MFDCLVVLSGGLDSTVLLIDSISRYPKVAAVSFDYGSKHNGCELPLAKSTCARLGVDHKIIHLPFINALFSSTLLASGEDIPNGAYDEPTMKSTVVPFRNGIMLSIAAGYAESIGAAKVLLGSHAGDHFIYPDCRPEFNLAFAEAVKLGTDAKVVIEFPYSMLDKRDIGDLGRRLDVDFLATWTCYKGEDIHCGTCGACNERKYALRKNQGMDPTVYRN

SEQ ID NO: 37868 - protein, 219 aa, Desulforhopalus singaporensis
  REGION 1..219: note = tr|A0A1H0IZ97|A0A1H0IZ97_9DELT 7-cyano-7-deazaguanine synthase OS=Desulforhopalus singaporensis OX=91360 GN=queC PE=3 SV=1
MCDTLVVLSGGMDSAVLLADCINKAHRCAAISFDYGAKHNDCELAMATALCQLLKVPHTVVELPFINRLFSSTLLQSGEEVPDGAYDAETMQSTVVPFRNGIMLSIAAGYAESLGASRVVLASHSGDHFIYPDCRPEFNDAFSRAVRMGTDGKVAIEFPFARLDKRQIGDLGHTLGVDFTSTWTCYKGGEVHCGTCGACDERKYALRFDEGKDPTIYAR

SEQ ID NO: 37869 - protein, 220 aa, unidentified; identical to SEQ ID NO: 37105
  source 1..220: note = Desulforudis audaxviator
  REGION 1..220: note = sp|B1I3W2|QUEC_DESAP 7-cyano-7-deazaguanine synthase; OS = Desulforudis audaxviator (strain MP104C) OX=477974; GN = queC PE=3 SV=1

SEQ ID NO: 37870 - protein, 231 aa, unidentified
  source 1..231: note = Desulfosporosinus acididurans
  REGION 1..231: note = tr|A0A0J1FWU8|A0A0J1FWU8_9FIRM 7-cyano-7-deazaguanine synthase OS=Desulfosporosinus acididurans OX=476652 GN=queC PE=3 SV=1
MAGIVLLSGGLDSTVAMALFLEKTTLDLAITFDYGQRAKEKEISASRQIADHFNIRHTIIALPFLQEQTRTALVNRSTDLPQLEFKQLDNIEEEALKSAHQVWVPNRNGLFMNIAAVFAENMGEAVTLITGFNREEAATFPDNSLEFMTAMNDCFKYSTQNTVTVDSPTAALSKSEIVREGLRLNIPFEKVWSCYENGQRPCGHCESCLRMKRALIVNEAEALVSELFDTP

SEQ ID NO: 37871 - protein, 231 aa, Desulfosporosinus acidiphilus
  REGION 1..231: note = tr|I4D853|I4D853_DESAJ 7-cyano-7-deazaguanine synthase OS=Desulfosporosinus acidiphilus (strain DSM 22704 / JCM 16185 / SJ4) OX=646529 GN=queC PE=3 SV=1
MSGIVLLSGGLDSTVSLALFLEKATVDLALTFDYGQRAKDKELSASLEIAKYYNIPHKIVALPFLQEQTRTALVNRSHELPQIMYEQLDDLQGEALESARQVWVPNRNGLFMNIAAVFAENMGEEATIITGFNREEAATFPDNSIEFMAAMDECFKYSTQNKVKVASPTATFSKSEIVREGLRVGIPFEKLWSCYENGVQPCGHCESCLRMKRALIANNAQELANTLFTVP

SEQ ID NO: 37872 - protein, 219 aa, unidentified
  source 1..219: note = Desulfosporosinus fructosivorans
  REGION 1..219: note = tr|A0A4Z0R6B7|A0A4Z0R6B7_9FIRM 7-cyano-7-deazaguanine synthase OS=Desulfosporosinus fructosivorans OX=2018669 GN=queC PE=3 SV=1
MNKSALVVFSGGQDSTTCLFWAMKNFDRVEAITFNYNQRHKAEIDCAIKIASEFDIPHLVVDMGLLNQLAPNALTRNDLEIKVGEGGEPPNTFVDGRNLLFLSFAAVVAKQKGINHIVTGVCETDFSGYPDCRDIFIKSLNVTLDLAMDYTFVIDTPLMWIDKADTWELADKLGRLEYVQKNTLTCYNGIMGIGCGECPACILRSAGLKKYLEKKEAAQ

SEQ ID NO: 37873 - protein, 234 aa, unidentified
  source 1..234: note = Desulfosporosinus fructosivorans
  REGION 1..234: note = tr|A0A4Z0R982|A0A4Z0R982_9FIRM 7-cyano-7-deazaguanine synthase OS=Desulfosporosinus fructosivorans OX=2018669 GN=queC PE=3 SV=1
MDSPRSAIVLLSGGIDSTTCAVLACREFGPENVLALSLFYGQKHAKEIDAAREVSKHLGLKDHIIQQLPDIFKGGGSTLIDQDRQNPEKTYEELSTSQGISPTYVPFRNANLLSVATSISLIKGADTIFYGAHSEDARNWAYPDCTPEFNGAMANAIYIGSYMKVRLVTPLQWFSKSEVVALGKKIGTPFQLTWSCYNGKEKACGVCPACVGRLHGFEENGLIDPIEYETGRCF

SEQ ID NO: 37874 - protein, 219 aa, Desulfosporosinus hippei
  REGION 1..219: note = tr|A0A1G7W4X0|A0A1G7W4X0_9FIRM 7-cyano-7-deazaguanine synthase OS=Desulfosporosinus hippei DSM 8344 OX=1121419 GN=queC PE=3 SV=1
MNQSALVVFSGGQDSTTCLFWAMKTFERVEAVTFNYNQRHKSEIDCARKIAEEFNIAHMVIDMSLLNQLAPNALTRTELEIKTGEDGQPPTTFVDGRNLLFLSFAAVVAKQKGIKHIVTGVCETDFSGYPDCRDIFIKSLNVTLNLAMDYSFVIDTPLMWIDKAETWELADQLGHLEYVQKNTLTCYNGIMGEGCGDCPACKLRNAGLKKYLDKKEQSS

SEQ ID NO: 37875 - protein, 233 aa, Desulfosporosinus lacus
  REGION 1..233: note = tr|A0A1M5WJ99|A0A1M5WJ99_9FIRM 7-cyano-7-deazaguanine synthase OS=Desulfosporosinus lacus DSM 15449 OX=1121420 GN=queC PE=3 SV=1
MAGIVLLSGGLDSTVALALYLEKDSIDLALTIDYGQRASRNEISASRKIAEYYNIAHQVIPIPFLQDQTHSALVNRSENLPLIEYNKLDDLQGQALESARQVWVPNRNGLFLNIAAVFGENMGDHPVIITGFNREEAATFPDNSLEFIKAVNRCLTFSTQNNVTVVSPTSVYEKKEIVREGLRLNVPFHYIWSCYESGNKVCGQCESCQRLKRALLKNDAEELVRELFEIDHK

SEQ ID NO: 37876 - protein, 187 aa, Desulfosporosinus meridiei
  REGION 1..187: note = tr|J7IUP9|J7IUP9_DESMD 7-cyano-7-deazaguanine synthase OS=Desulfosporosinus meridiei (strain ATCC BAA-275 / DSM 13257 / NCIMB 13706 / S10) OX=768704; GN = Desmer_0370 P E=3 SV=1
MKSEILVLLSGGLDSTACVAYYLNLGFKVKALFVDYNQNAVDQEKKSAYAISNYYCVDFQVLKCSGLRQWGTGVIPGRNAFLLSIALLSSNLSQGLIAIGIHSGTSYYDCSPNFLLEMNNLFDCYTDGKISISAPFLNYNKDFIWQYCLDHAVPIELTYSCEKGFLEPCGSCLSCRDREVLRACKKK

SEQ ID NO: 37877 - protein, 219 aa, Desulfosporosinus meridiei
  REGION 1..219: note = tr|J7IZ58|J7IZ58_DESMD 7-cyano-7-deazaguanine synthase OS=Desulfosporosinus meridiei (strain ATCC BAA-275 / DSM 13257 / NCIMB 13706 / S10) OX=768704 GN=queC; PE = 3 SV= 1
MNQSALVVFSGGQDSTTCLFWAMKTFERVEAVTFNYNQRHKSEIDCARKIAEEFNIPHMVIDMSLLNQLAPNALTRTELEIKTGEEGQPPTTFVDGRNLLFLSFAAVVAKQKGIKHIVTGVCETDFSGYPDCRDIFIKSLNVTLNLAMDYSFVIDTPLMWIDKAETWELADQLGHLEYVQENTLTCYNGIMGEGCGDCPACKLRNAGLKKYLAKKEQST

SEQ ID NO: 37878 - protein, 230 aa, Desulfosporosinus orientis
  REGION 1..230: note = tr|G7WDT2|G7WDT2_DESOD 7-cyano-7-deazaguanine synthase OS=Desulfosporosinus orientis (strain ATCC 19365 / DSM 765 / NCIMB 8382 / VKM B-1628) OX=768706 GN=queC; PE = 3 S V=1
MAGIVLLSGGLDSTVALALYLEKNRLDLALTFDYGQRARIQEISAAQKIAEHYQLAHRVVPIPFLQEQTRSALVNRSEDLPLVDYSKLDDLQGQALASARQVWVPNRNGLFLNIGAVFAENMGDAPVLITGFNREEAATFPDNSLEFMEAMNRSLSFSTQNKVTVVSPTSVYTKKEIVSEGLRLQVPWQYIWSCYESGERVCGQCESCQRLKRALLNNQAQDLVQELFGA

SEQ ID NO: 37879 - protein, 230 aa, Desulfosporosinus sp.
  REGION 1..230: note = tr|A0A1C3F4M1|A0A1C3F4M1_9FIRM 7-cyano-7-deazaguanine synthase OS=Desulfosporosinus sp. BG OX=1633135 GN=queC PE=3 SV=1
MAGIALLSGGLDSTLAVALYLEKAGINLALTFDYGQRANEKEVSAARRIADYYNIPHKVIALPFLQEQTHSALVNRSEDLPLLKSDELDDLSRAQLSAHQVWVPNRNGLFMNIAAVYAENLGEPAELITGFNQEEAATFPDNSLEFIGAMNRCLSYSTQEKVTVVSPTSTLTKTEIVREGLRLKVPFEDIWSCYESKETICGQCESCQRLKRALHRNEAQGLVDQLFGAE

SEQ ID NO: 37880 - protein, 219 aa, Desulfosporosinus sp.
  REGION 1..219: note = tr|A0A101WRC1|A0A101WRC1_9FIRM 7-cyano-7-deazaguanine synthase OS=Desulfosporosinus sp. BRH_c37 OX=1734396 GN=queC PE=3 SV=1
MNQSALVVFSGGQDSTTCLFWAMKNFARVEAITFNYNQRHKAEIDCAIKIAQEFDVPHSVIDMSLLNQLAPNALTRHDLEIKASGSGELPTTFVDGRNLLFLSFAAVVAKQKGIHHIVTGVCETDFSGYPDCRDIFIKSLNVTLDLAMDYTFILDTPLMWIDKAETWELAEQLGRLEYVQHNTLTCYNGIIGVGCGNCPACKLRSAGLKKYLEKKEAVQ

SEQ ID NO: 37881 - protein, 220 aa, Desulfosporosinus youngiae
  REGION 1..220: note = tr|H5XXM9|H5XXM9_9FIRM 7-cyano-7-deazaguanine synthase OS=Desulfosporosinus youngiae DSM 17734 OX=768710; GN = queC PE=3 SV=1
MNRSALVVFSGGQDSTTCLFWAMENFEKVEAITFNYNQRHRAEIDCASKIAKELHIPHLVLDMSLLNQLAPNALTRNDLEIKSGDNGQLPNTFVDGRNLLFLSFAAVSAKQKGIRHIVTGVCETDFSGYPDCRDIFIKSLNVTLNLAMDYTFVIDTPLMWIDKADTWELADQLGKLEYIQKNTLTCYNGIMGVGCGECPACKLRSAGLEKYLQKKATHNL

SEQ ID NO: 37882 - protein, 219 aa, Desulfotalea psychrophila
  REGION 1..219: note = sp|Q6ARX9|QUEC_DESPS 7-cyano-7-deazaguanine synthase; OS = Desulfotalea psychrophila (strain LSv54 / DSM 12343); OX = 177439 GN=queC PE=3 SV=1
MVDSIIVLSGGMDSAVLLAQTLKEGKTAQAISFDYGSKHNDRELPMAVGLCEEFAIKHQIIKLPFIGELFSSSLLTGGEEIPDGAYGQENMKSTVVPFRNGIMLAIAAGYAESVQAGEVLLGSHSGDHHIYPDCRPEFNNAFAEAVNLGTDGQVAIRFPFSEMTKRDIGDLGRTLDLDFAKTWTCYKGGELHCGVCAACDERKEALRHPEGLDVTKYLV

SEQ ID NO: 37883 - protein, 219 aa, Desulfotignum phosphitoxidans
  REGION 1..219: note = tr|S0FWD4|S0FWD4_9DELT 7-cyano-7-deazaguanine synthase OS=Desulfotignum phosphitoxidans DSM 13687; OX = 1286635 GN=queC PE=3 SV=1
MVDAVLVLSGGMDSAVLLAQTLNQGKTVEAVSFDYGSKHNARELPMARDLCAHFNIPHQVILLPFINALFSSSLLAGGETVPDGAYTAATMKSTVVPFRNGIMLAIAAGYAESINASQVLLGSHSGDHHIYPDCRPGFNSAFRDAVYIGTDKKVMVCFPFSGMDKRDIGDLGRKLDLDFTKTWTCYKGLALHCGTCGACNERKYALRHEEGLDATTYLA

SEQ ID NO: 37884 - protein, 270 aa, Desulfotignum phosphitoxidans
  REGION 1..270: note = tr|S0FY02|S0FY02_9DELT ExsB family protein; OS = Desulfotignum phosphitoxidans DSM 13687 OX=1286635; GN = Dpo_4c01380 PE=4 SV=1
MTDESTSACDANKLTLKAGLKKLKTAAVAFSGGVDSAFLLAVAAESGLENLLAVTVESAFVTKQEIRQARQTAKDLGVAHQVVKLDILSHEQVTANTLARCYHCKNVVFSVIRRVADKNGITHVLHGVNTDDLGDFRPGLKAAEELGVRAPLVEAGFSKHRIRTCSRQMGLATWDLPSQSCLATRIPFFDVITEKALVRIDQAEQFLRSLGFFHVRVRCHGTVARIEIEAAAIEAMVAHRKQISVALKTIGFTFVSLDLDGYHTGKMNPS

SEQ ID NO: 37885 - protein, 234 aa, Desulfotomaculum aeronauticum
  REGION 1..234: note = tr|A0A1M6NES4|A0A1M6NES4_9FIRM 7-cyano-7-deazaguanine synthase OS=Desulfotomaculum aeronauticum DSM 10349 OX=1121421 GN=queC PE=3 SV=1
MSSVVLLSGGLDSTVNLAYALTEGSVKLALTVNYGQLAAQQEIEAAGRLAKHYGIAHQIIELPWLQRITNTALVNQEQLLPEPSGDALDQYEQARQTAAAVWVPNRNGLFVNIAACFAENLHCHRVITGFNREEAATFPDNTPEFTQAATAAMKYSTANQVEVVSYTARLDKKEIVALGQRLGVPWELVWSCYRGGDAMCGKCESCQRLIRAFRYLNVDLPASLPKAGEGDSLC

SEQ ID NO: 37886 - protein, 42 aa, unidentified
  source 1..42: note = Desulfotomaculum aquiferis
  REGION 1..42: note = tr|A0A4Q2WIZ8|A0A4Q2WIZ8_9FIRM Uncharacterized protein OS=Desulfotomaculum aquiferis OX=1397668; GN = N752_13995 PE=4 SV=1
MKSVVLLSGGLDSAVCLAYAKTEGDVRLALTFNYGKGPQKRK

SEQ ID NO: 37887 - protein, 96 aa, unidentified
  source 1..96: note = Desulfotomaculum aquiferis
  REGION 1..96: note = tr|A0A4Q2WL10|A0A4Q2WL10_9FIRM 7-cyano-7-deazaguanine synthase OS=Desulfotomaculum aquiferis OX=1397668 GN=N752_13985 PE=3 SV=1
MRSNYLPDNTPEFAQAASAAMAFSTANQVKVLSYTGRLDKGEIVALGHRLGVPWQLLWSCYQAGENMCGRCESCRRFIRAFQAQGLAIPGLIQRGE

SEQ ID NO: 37888 - protein, 228 aa, Desulfotomaculum arcticum
  REGION 1..228: note = tr|A0A1I2QJK3|A0A1I2QJK3_9FIRM 7-cyano-7-deazaguanine synthase OS=Desulfotomaculum arcticum DSM 17038 OX=1121424 GN=queC PE=3 SV=1
MKKSIVILSGGLDSTVCMSVAHSKGYELYPITFSYGQRHSREVEQAKKVAKYYSCARHLILDIGFFREIGASALTSQEIEVPTNRHIDDEIPLTYVPFRNAVFLSMAVGYAEAIGAEKIYIGVNALDYSGYPDCRPQFIKAFQEAVNLGSAAPQKGCPIAIETPLLSLTKAEIVKLGVKNGAPLHLTTSCYNGGEKACGICDSCQLRLKGFKEAGVEDPIDYEDYQQK

SEQ ID NO: 37889 - protein, 227 aa, unidentified
  source 1..227: note = Desulfotomaculum copahuensis
  REGION 1..227: note = tr|A0A1B7LE18|A0A1B7LE18_9FIRM 7-cyano-7-deazaguanine synthase OS=Desulfotomaculum copahuensis OX=1838280 GN=queC PE=3 SV=1
MKSVVLLSGGLDSTVSLAQALRESSVELCLTVDYGQRAAIREAGAARALAAYYHLHHQTVAVPFLQSLTCTALVNREFSVPRPDEEDLDDPQKAGETAALVWVPNRNGLLINIAACFAESLGCTRVVTGFNREEAVTFPDNSPAYVEAANRALSYSTANGVQVVSYTQRLNKVEIVRLGQRLGVPWHLIWSCYLGKELMCGQCESCRRLQRALKAVGIPFPGGREEI

SEQ ID NO: 37890 - protein, 229 aa, unidentified
  source 1..229: note = Desulfotomaculum ferrireducens
  REGION 1..229: note = tr|A0A1S6IWG7|A0A1S6IWG7_9FIRM 7-cyano-7-deazaguanine synthase OS=Desulfotomaculum ferrireducens OX=1833852 GN=queC PE=3 SV=1
MSSVVLLSGGLDSTVNLAYALTEGPVKLALTINYGQLAANQEIAAASRLAKYYHIPHRVIELPWLQQITNTALVNQGQTLPEPTTEALDQYEQASKSAAAVWVPNRNGLFVNIAACFAESLQCQRVITGFNGEEAATFPDNTPEFTEAVSAAMKYSTANQVKVLSYTARMTKKEIVALGQRLGVPWELVWSCYRGDHTMCGKCESCQRLMRAFRYLNLDLPAQFAKGEG

SEQ ID NO: 37891 - protein, 171 aa, Desulfotomaculum hydrothermale
  REGION 1..171: note = tr|K8DXB3|K8DXB3_9FIRM 7-cyano-7-deazaguanine synthase OS=Desulfotomaculum hydrothermale Lam5 = DSM 18033 OX=1121428 GN=DESHY_110064 PE=3 SV=1
MDSVVLLSGGLDSTVNLAYALTEGSVKLALTMDYGQRAARREIKAAAALAGYYNIRHQVVELPWLAQITATSLVKEEGSLPEPAAEELDNPDVTQKTAAAVWVPNRNGLFINIAACFAESLNCGQVVAGFNREEAATFPDNTPEFAAAAGKALAYATANQVRVSQLYQPLV

SEQ ID NO: 37892 - protein, 228 aa, Desulfotomaculum nigrificans
  REGION 1..228: note = tr|F6B4U3|F6B4U3_DESCC 7-cyano-7-deazaguanine synthase OS=Desulfotomaculum nigrificans (strain DSM 14880 / VKM B-2319 / CO-1-SRB) OX=868595 GN=queC PE=3 SV=1
MKSIVLLSGGLDSAVCLAYGLTETKVELALTFNYGQRSATREIQAAAALANYYGVKHRVIDLPWLAEITTTSLVNEEENIPEPMGPELDYMPTAKATAAAVWVPNRNGLFVNIAACFAETLNCQLVVAGFNREEAATFPDNTPEFVTAASTAMAYSTANQVKVVSFTNRLNKKEIVALGHRLGVPWDLIWSCYHGGDKMCGRCESCQRMMRAFTSQGLDLPATLVYNG

SEQ ID NO: 37893 - protein, 232 aa, unidentified
  source 1..232: note = Desulfotomaculum profundi
  REGION 1..232: note = tr|A0A2C6MEX8|A0A2C6MEX8_9FIRM 7-cyano-7-deazaguanine synthase OS=Desulfotomaculum profundi OX=1383067 GN=queC PE=3 SV=1
MNSVVLLSGGLDSAVNLAYALTEGRVELALTMNYGQRAAEKEIEAAGQLARHYNIPHRVIELPWVAQITQTALVSRDDTLPEPTAGELDDMNAASKTAAAVWVPNRNGLFVNIAACFAEALKCGQVVTGFNREEAATFPDNTPEFAMAASRAMEYSTANQVKVISYTNRLDKKEIVALGDRLRVPWDFIWSCYRGETQMCGRCESCRRMIRAFTSLNIDLPAALKNNQAGGE

SEQ ID NO: 37894 - protein, 231 aa, Desulfotomaculum putei
  REGION 1..231: note = tr|A0A1M4T169|A0A1M4T169_9FIRM 7-cyano-7-deazaguanine synthase OS=Desulfotomaculum putei DSM 12395 OX=1121429 GN=queC PE=3 SV=1
MNSVVLLSGGLDSAVNLAYALTEGKVKLALTMNYGQHAANKEIDAAAALARHYDIPHRVIELPWLAQITQTALVSNQNALPEPSAEELDNMDAAHKTAAAVWVPNRNGLFVNIAACFAETLNCGLVVAGFNREEAATFPDNTPEFAAAASRAMAYSTSNQVKVISYTNRLDKKEIVALGDRLGVPWDFIWSCYRGEEQMCGKCESCRRMMRAFTSLNINLPAALKNRAGGE

SEQ ID NO: 37895 - protein, 228 aa, unidentified
  source 1..228: note = Desulfotomaculum reducens
  REGION 1..228: note = sp|A4J5C7|QUEC_DESRM 7-cyano-7-deazaguanine synthase; OS = Desulfotomaculum reducens (strain MI-1) OX=349161; GN = queC PE=3 SV=1
MNSVVLLSGGLDSAVNLAFARTEGNVKLALTINYRQRAAHKEIAAAAQLARYYAIPHRVIELPWLAEITKTALVRSESQLPEPKTEELDQLELAGKTAAEVWVPNRNGLFVNIAACFAETLHCEIVVAGFNCEEAATFPDNTPEFALAASAAMQYSTANQVKVLSYTGRLNKKDIVALGQRLQLPWELIWSCYRGEALMCGKCESCQRMIRAFHSLGLNLPQNFLMTE

SEQ ID NO: 37896 - protein, 238 aa, Desulfotomaculum ruminis
  REGION 1..238: note = tr|F6DLC0|F6DLC0_DESRL 7-cyano-7-deazaguanine synthase OS=Desulfotomaculum ruminis (strain ATCC 23193 / DSM 2154 / NCIMB 8452 / DL) OX=696281 GN=queC PE=3 SV=1
MLKAVVLLSGGLDSAVCLAYARTEASVELALTMDYGQRSAEKEIAAAAQLARYYQIPHKVIALPWLAEITHTALVQREEDLPEPAAADLDNLELGNQTAAAVWVPNRNGLFLNLAACFAESLGCSLVIAGFNREEAATFPDNTPEFTLAATAAMAYSTANKVKVVSYTGHLDKGEIVALGNRLGVPWESIWSCYRGESSMCGSCESCRRLIRAFATAGLTLPASLKDFATTGGEANAG

SEQ ID NO: 37897 - protein, 221 aa, Desulfotomaculum sp.
  REGION 1..221: note = tr|A0A3C2C495|A0A3C2C495_9FIRM 7-cyano-7-deazaguanine synthase OS=Desulfotomaculum sp.; OX = 41211 GN=queC PE=3 SV=1
MRSVVLLSGGLDSAVSLAHALREGMVKLCLTMDYGQRAATREISAAAALADYYDIEHRVVELPFLREVTSTALVNRSTVVPEPVDEILDDPVHAKASAAAVWVPNRNGLFINIAASFAEAMNCQLVVTGFNKEEALSFPDNSAAFVSKVNDALAYSTANQVRVISYTQRLSKIEIVRLGQRLQVPWRLLWSCYYGGRTMCGNCESCRRFFRAMEAAGLAGY

SEQ ID NO: 37898 - protein, 218 aa, Desulfotomaculum sp.
  REGION 1..218: note = tr|A0A358QWC0|A0A358QWC0_9FIRM 7-cyano-7-deazaguanine synthase OS=Desulfotomaculum sp.; OX = 41211 GN=queC PE=3 SV=1
MSSIVLLSGGLDSAVSLAQALREGEVKLCLTFAYGQRAAAREAAASSALAQHYGLDHRVIELPFLRSITRTSLVNLEEDVPLPGDGDLDSCAKSEESAKAVWVPNRNGIFINIAAGFAESMGAGQVVTGFNAEEAKTFPDNSRAYLQAASQALCYSTLSGVRVLSYTMLLDKAGIVKLGRRLGVPLGIVWPCYFGGEELCGRCESCKRYFRALEAAGE

SEQ ID NO: 37899 - protein, 235 aa, Desulfovibrio carbinolicus
  REGION 1..235: note = tr|A0A4V0YQQ3|A0A4V0YQQ3_9DELT 7-cyano-7-deazaguanine synthase OS=Desulfovibrio carbinolicus OX=296842 GN=queC PE=3 SV=1
MTTDIQKKAVVLFSGGLDSTTCLAVARRDGFLPCALSFEYGQRHKVELEAARRVAKAMAVTSHLILPLPLGAIGGSALTADIDVPKDRDIGEMEADIPVTYVPARNTIFLSMALGWAEVLGASDIYIGVNALDYSGYPDCRPEFIGAFEAMANLAVKEAVEGRLSIRIHTPLLHLSKAGIVELGTSLGVDYGLTHSCYDPDPDGLACGRCDSCLLRKKGFEEAGVADPTRYRPSL

SEQ ID NO: 37900 - protein, 201 aa, Desulfovibrio carbinoliphilus
  REGION 1..201: note = tr|G7QAY2|G7QAY2_9DELT 7-cyano-7-deazaguanine synthase OS=Desulfovibrio carbinoliphilus subsp. oakridgensis OX=694327 GN=DFW101_2318 PE=3 SV=1
MVKNSAILLSGGMDSTSLAFWKKPNFAFTIDYGQKAAMAEIRAARQVAKEIGISHDTIAIDCSSLGSGDMAMAAPLPNAPSTDWWPFRNQLLITLAAMKAICRNINLLYIGLVKSDSSYKDGCSDFVDKISRTLSFQEGNIEVMAPAIDMTAAELVNMSKIPRTLLAWSHSCHVSDFACGRCRGCNKHRLVMEECYGKESC

SEQ ID NO: 37901 - protein, 233 aa, Desulfovibrio carbinoliphilus
  REGION 1..233: note = tr|G7QC35|G7QC35_9DELT 7-cyano-7-deazaguanine synthase OS=Desulfovibrio carbinoliphilus subsp. oakridgensis OX=694327 GN=queC PE=3 SV=1
MTAQPKAVVLFSGGLDSTTCLAVARSEGFLPCALSFEYGQRHSVELLAARRVAAALDVHAHLILPLPLGAIGGSALTADIDVPKDRDPATMETEIPATYVPARNTIFLSLALGWAEVLGAEDIFIGVNALDYSGYPDCRPQFIAAFEAMANLAVKEAVEGRLRIRIHTPLLHLTKAGIVRLGTSLGVDFGLTHSCYDPTEEGLACGRCDSCLLRKKGFEEADIQDPTRYRPSL

SEQ ID NO: 37902 - protein, 234 aa, Desulfovibrio desulfuricans
  REGION 1..234: note = tr|A0A1M6LB45|A0A1M6LB45_DESDE 7-cyano-7-deazaguanine synthase OS=Desulfovibrio desulfuricans OX=876 GN=queC PE=3 SV=1
MNNSALVIFSGGQDSTTCLAWALERFDSVATIGFSYGQRHSIEMDCRKNVLSEIRDIRKNWGQRLTHDEVLEISLFNEIGGTALTEEVEIQMGENGLPTTFVPGRNLVFLTAASAYAYRQGIRHIIMGVCETDFSGYPDCRDDTIKAMQVALNLGMESRFVIHTPLMWIDKAATWTMADELGGKPFVNLVREHTHTCYLGDRTELHAWGYGCGTCPACELRAKGWEQFEKGKQK

SEQ ID NO: 37903 - protein, 258 aa, Desulfovibrio desulfuricans
  REGION 1..258: note = tr|A0A1K1MMK7|A0A1K1MMK7_DESDE 7-cyano-7-deazaguanine synthase OS=Desulfovibrio desulfuricans OX=876 GN=queC PE=3 SV=1
MSRQSPGRTTSSPLADQTALVIFSGGQDSATCLAWALDRFARVRTLGFDYGQRHAVELACRQNLREKLATLNPQWAARLDADCLLDIGLFRQLANTALTSTSPIEDKPEGLPNTFVPGRNLIFILHAAAWAYGLDIRHMVLGVCQSDSSGYPDCRDDSIKAMQVALNVGMDANFVLHTPLMWRSKKDAWTLAEVLGGANLVDLIVEESHTCYEGQRGQRHPWGYGCGQCPACRLRAAGYTEYLTEKSEAKERVCPKSN

SEQ ID NO: 37904 - protein, 252 aa, unidentified
  source 1..252: note = Desulfovibrio fairfieldensis
  REGION 1..252: note = tr|A0A109W484|A0A109W484_9DELT 7-cyano-7-deazaguanine synthase OS=Desulfovibrio fairfieldensis OX=44742 GN=queC PE=3 SV=1
MSTVSPSPLQQEQALVIFSGGQDSATCLAWALSRFERVQTLGFDYGQRHNVELACRQRLRAALADLDPLWASRLGPDTLLNVDIFRQLADTALTSEAPIAADGPGGLPTTFVPGRNLLFILHAAVWAYAKNIRHLILGVCQSDSSGYPDCRDDSIKAMQVALNCGMDSRFVLHTPLMWLSKRGAWELAESLGGTALVDLILEESHTCYAGERGRRYDWGYGCGVCPACRLRASGYAAYREARKNGEQGRTEV

SEQ ID NO: 37905 - protein, 233 aa, Desulfovibrio fructosivorans
  REGION 1..233: note = tr|E1JX68|E1JX68_DESFR 7-cyano-7-deazaguanine synthase OS=Desulfovibrio fructosivorans JJ OX=596151; GN = queC PE=3 SV=1
MTTPEKKAVVLFSGGLDSTTCLAVAREEGFAPCALSFAYGQRHEVELQAAKRVAAAMNVAAHLVLPLPLGAIGGSALTADIAVPKDRDVAAMEAEIPVTYVPARNTIFLSMALGWAEVLGAQDIYIGVNALDYSGYPDCRPQFVAAFEAMANLAVKEAVEGHLRISIHTPLLHLTKADIVRLGTRLGVDYGLTHSCYDPDPSGLACGRCDSCLLRKKGFAEAGIPDPTRYTPA

SEQ ID NO: 37906 - protein, 182 aa, Desulfovibrio fructosivorans
  REGION 1..182: note = tr|E1JT92|E1JT92_DESFR 7-cyano-7-deazaguanine synthase OS=Desulfovibrio fructosivorans JJ OX=596151; GN = DesfrDRAFT_0841 PE=3 SV=1
MKKVYVLLSGGIDSSACAHFYQQADFLVEAIFFSYGQAASAKEEIASKNIADHLGIHLTKYNLETTQTFSTGELIGRNAFFIFSAIFFSRITNGSISLGIHAGTTYYDCSAIFFDRINKLVNEYTNGCVNIQAPFLKWTKNDIYQYFLSTKIPIELTYSCELGSDYPCGRCASCRDRKALGC

SEQ ID NO: 37907 - protein, 273 aa, unidentified
  source 1..273: note = Desulfovibrio legallii
  REGION 1..273: note = tr|A0A1G7JPC2|A0A1G7JPC2_9DELT 7-cyano-7-deazaguanine synthase OS=Desulfovibrio legallii; OX = 571438 GN=queC PE=3 SV=1
MTAMHNASLVPPSPSSGPAANPQPAALPGALADQQALVIFSGGQDSATCLAWALSRFGRVLTLGFDYGQRHAVELSCRQALREGLAALNPQWAARLGSDTLLRLDIFRDLANTALTSDAPIEEHGPGGLPNTFVPGRNLIFILHAAAWAYARQIRHLVLGVCQSDYSGYPDCRDDSVKAMQVAVNTGMDANYVLHTPLMWRSKKDAWELAEQLGGEHLVDMIVERSHTCYLGERGERHPWGYGCGNCPACRLRAAGYAAYVRAKAEAGAAAHD

SEQ ID NO: 37908 - protein, 235 aa, Desulfovibrio magneticus
  REGION 1..235: note = tr|K6GQW2|K6GQW2_9DELT 7-cyano-7-deazaguanine synthase OS=Desulfovibrio magneticus str. Maddingley MBC34; OX = 1206767 GN=queC PE=3 SV=1
MTTDVQKKAVVLFSGGLDSTTCLAVARRDGFTPCALSFEYGQRHKVELEAARRVAKAMAVATHLILPLPLGAIGGSALTADIDVPKDRDVNEMEADIPVTYVPARNTIFLSMALGWAEVLGASDIYIGVNALDYSGYPDCRPEFIGAFTAMANLAVKEAVEGRLSIRIHTPLLHLSKAGIVELGTSLGVDYGLTHSCYDPDPDGLACGRCDSCLLRKKGFEEAGVADPTRYRPSL

SEQ ID NO: 37909 - protein, 235 aa, Desulfovibrio magneticus
  REGION 1..235: note = sp|C4XPJ3|QUEC_DESMR 7-cyano-7-deazaguanine synthase; OS = Desulfovibrio magneticus (strain ATCC 700980 / DSM 13731 / RS-1) OX=573370 GN=queC PE=3 SV=1
MTTDAPQKAVVLFSGGLDSTTCLAVARRDGFLPCALSFEYGQRHKVELEAARRVAKAMAVTTHLILPLPLGSIGGSALTADIDVPKDRDIGEMEADIPVTYVPARNTIFLSMALGWAEVLGASDIYIGVNALDYSGYPDCRPEFIAAFEAMANLAVKEAVEGRLAIRIHTPLLHLSKAGIVELGTSLGVDYGLTHSCYDPAPDGLACGRCDSCLLRRKGFEEAGVADPTRYRPSL

SEQ ID NO: 37910 - protein, 233 aa, Desulfovibrio mexicanus
  REGION 1..233: note = tr|A0A238Z463|A0A238Z463_9DELT 7-cyano-7-deazaguanine synthase OS=Desulfovibrio mexicanus; OX = 147047 GN=queC PE=3 SV=1
MTPTPIGALVVFSGGQDSTTCLAWALSRFDRVETLGFDYGQRHSIELECREAVLAALRGQRPDWAQKLGSDTLLSLDVFRQLGETALTHDVEISMTATGLPSTFVPGRNLVFLTLAGAQAYRRGLKHLVTGVCETDYSGYPDCRDDTMKALQVALNLGMETRLVIDTPLMWLTKGQTWALARDLGGQPFVDLILEHTHTCYRGERGQRHPWGYGCGQCPACQLRAAGWRDYSE

SEQ ID NO: 37911 - protein, 242 aa, Desulfovibrio piger
  REGION 1..242: note = tr|A0A1K1LDS0|A0A1K1LDS0_9DELT 7-cyano-7-deazaguanine synthase OS=Desulfovibrio piger; OX = 901 GN=queC PE=3 SV=1
MSHQPPLSDRQALVIFSGGQDSATCLAWALSRFAAVRTLGFDYGQRHSVELACRGKVRSAIAALRAEWRDRLGPDTLLDIGLFRQLADTALTSDMPIEQADGGIPNTFVPGRNLLFIMHAAAWAYGKGIRHLVLGVCESDSSGYPDCRDDSIKAMQVALNAGMDSHFVLHTPLMWRDKADTWRLAEELGGMPLVDCILEQSHTCYEGTRRERHPWGYGCGRCPACKLRAHGYEVYLSRYHRK

SEQ ID NO: 37912 - protein, 242 aa, Desulfovibrio piger
  REGION 1..242: note = tr|B6WQF2|B6WQF2_9DELT 7-cyano-7-deazaguanine synthase OS=Desulfovibrio piger ATCC 29098 OX=411464; GN = queC PE=3 SV=1
MSHQPPLSDQQALVIFSGGQDSATCLAWALSRFARVCTLGFDYGQRHSVELECRGKVRSAIAALKPEWQDRLGPDTLLDISLFRQLADTALTSDMPIEQEGEGIPNTFVPGRNLLFIMHAAAWAYGKDIRHLVLGVCESDSSGYPDCRDDSIKAMQVALNTGMDSHFVLHTPLMWLDKADTWRLAEDLGGMPLVDCILEQSHTCYEGTRGERYPWGYGCGRCPACKLRAHGYEVYLSRYHQK

SEQ ID NO: 37913 - protein, 269 aa, Desulfovibrio salexigens
  REGION 1..269: note = tr|C6BXJ5|C6BXJ5_DESAD ExsB family protein; OS = Desulfovibrio salexigens (strain ATCC 14822 / DSM 2638 / NCIB 8403 / VKM B-1763) OX=526222 GN=Desal_0486 PE=4 SV=1
MDRLALKYKTLLGILAETGGAVIAFSGGVDSTLLLHTAKEALGDKAIAASISTPYVPQWEQGEAKEFAEQMEVKHVVVDMGFPEELRMNPPEHCYTCKNILFSKLLEIAQENDIEHVLEGTNIDDLSDYRPGIKALRELEIRSPFVEAELTKQEIRDISRRFNLPTWNKPSFACLLSRMPVDVEVTDLALQQVEQAEVFLMKIGFPAVRVRHHGEVARIEVPADKIQDVINANEIHGINNKLKEFGYRHVTLDLGGYKMGSLNKNSKIN

SEQ ID NO: 37914 - protein, 260 aa, Desulfovibrio sp.
  REGION 1..260: note = tr|A0A231NZL1|A0A231NZL1_9DELT 7-cyano-7-deazaguanine synthase OS=Desulfovibrio sp. MES5; OX = 1899016 GN=queC PE=3 SV=1
MSGWLEQNDAAHGPLADQTALVIFSGGQDSATCLAWALERFGKVRTLGFDYGQRHSVELACRQNLRQGMAALKPQWEQRLGPDCLLDIDLFRQLANTALTSSAPIEEQGPDGLPNTFVPGRNLIFILHAAAWAYGLGIRHMVLGVCQSDYSGYPDCRDDSIKAMQVALNTGMGASYVLHTPLMWRSKKDAWTLASNLGGSALVDLIVEESHTCYAGQRGDRHTWGYGCGQCPACRLRAAGHAEYVAARQTESEKTCPKNS

SEQ ID NO: 37915 - protein, 264 aa, Desulfovibrio sp.
  REGION 1..264: note = tr|A0A2E3R6C2|A0A2E3R6C2_9DELT Uncharacterized protein OS=Desulfovibrio sp. OX=885 GN=CL942_06850 PE=4; SV = 1
  VARIANT 188: note = Xaa can be any naturally occurring amino acid
MTTTTTKLFFTGGWDSTFRLLELLVAEKRPVQPIYVIDPDRWSLREEQKAMADIKTTVVERFPEAANLLKPTMIIDKTDLKPDPAFKACELKLLETNIFGSQYEWLGRAAKQFGLEGAEVCVEYSEIKVAGCYVTINPLVEQIEDGSYYFAEEHKNTLEYEFFGMYSFPVMRTSKAEMMEKAEKYGFXDILEMSWFCHKPNFLGQACGMCNPCKDAMTMEMTHRVPPFGRFCYHLKRNLNPRTHLQHFPKVYDYLRTLKRKLKG

SEQ ID NO: 37916 - protein, 242 aa, Desulfovibrio vulgaris
  REGION 1..242: note = sp|Q728E4|QUEC_DESVH 7-cyano-7-deazaguanine synthase; OS = Desulfovibrio vulgaris (strain Hildenborough / ATCC 29579 / DSM 644 / NCIMB 8303) OX=882 GN=queC PE=3 SV=1
MPSCDGNALVIFSGGQDSTTCLGWALNRFRTVATIGFHYGQRHDVEMQCRQDVLAAIGDVRPGWKAHLGTDTVVEMGLFRELGETALTHDVAIEMGRNGLPSTFVPGRNLMFLTAAAACAYRQGIRHLVLGVCETDFSGYPDCRDDAMKAMQVALNLGMESRFVVHTPLMWLTKAQTWDMARDEGGQDFVELVLERSHTCYKGVRDVRHPWGYGCGTCPACELRRAGWDAYVAGHAVHGEGR

SEQ ID NO: 37917 - protein, 242 aa, Desulfovibrio vulgaris; identical to SEQ ID NO: 37916
  REGION 1..242: note = sp|A1VB03|QUEC_DESVV 7-cyano-7-deazaguanine synthase; OS = Desulfovibrio vulgaris subsp. vulgaris (strain DP4); OX = 391774 GN=queC PE=3 SV=1

SEQ ID NO: 37918 - protein, 234 aa, unidentified
  source 1..234: note = Desulfovibrionaceae bacterium
  REGION 1..234: note = tr|A0A1J4SMD4|A0A1J4SMD4_9DELT 7-cyano-7-deazaguanine synthase OS=Desulfovibrionaceae bacterium CG1_02_65_16 OX=1805130 GN=queC PE=3 SV=1
MAQENSALVVFSGGQDSTTCLAWALSRFERVETIGFDYGQRHAVELSCRSVVLERLRALRPDWAGKLGGDALLSMDVFRQLGETALTHDVAISMNENGLPSTFVPGRNLVFLTLAGAQAYRRGIKRIVTGVCETDFSGYPDCRDDTMKALQVALNLGMQTRLVIDTPLMWRTKAQTWKLALKLGGAALVELILEHTHTCYRGERGERHTWGYGCGDCPACLLRAKGYAEYLRDE

SEQ ID NO: 37919 - protein, 239 aa, unidentified
  source 1..239: note = Desulfovibrionales bacterium
  REGION 1..239: note = tr|A0A1F9PYD2|A0A1F9PYD2_9DELT 7-cyano-7-deazaguanine synthase OS=Desulfovibrionales bacterium GWA2_65_9 OX=1797915 GN=queC PE=3 SV=1
MEHTTDSALVVFSGGQDSATCLAWALSRFGRVETMGFDYGQRHAVELACRTEVLARLRALSPPWGTKLGPDTLLTLDAFQQLGETALTHDVEITMTASGLPSTFVPGRNLIFLTLAAAQAYRRGIKHIVTGVCETDFSGYPDCRDDTMKALQVAVNLGMQARLVIDTPLMWLTKAQTWGLAHDLGGQALVELILEHTHTCYQGSRGTRHAWGYGCGACPACELRAAGYAGYRERSASGG

SEQ ID NO: 37920 - protein, 238 aa, Desulfurella acetivorans
  REGION 1..238: note = tr|W0JEI5|W0JEI5_DESAE 7-cyano-7-deazaguanine synthase OS=Desulfurella acetivorans A63 OX=694431 GN=queC; PE = 3 SV=1
MKKCLLIFSGGLDSTTCLFWALDYYDEVHTITFDYHQRHVIEKKMALETIKLAKSIKQKDIDYFEFNIDLSKIGASALTDFSINVPKNRNIDNQIPITYVPFRNGIFLAISVAYAEKLDISNIIGGWNVLDYSGYPDCRPDFLESFRQAATLGTKIGQTKPFNIIAPLIGLKKSEIIKLGKKHNADYSYAYSCYEGNEIPCGQCDSCILRAKGFKEAGFVDDYMVRLATSSKETKSHP

SEQ ID NO: 37921 - protein, 235 aa, unidentified
  source 1..235: note = Desulfurella amilsii
  REGION 1..235: note = tr|A0A1X4XV35|A0A1X4XV35_9DELT 7-cyano-7-deazaguanine synthase OS=Desulfurella amilsii; OX = 1562698 GN=queC PE=3 SV=1
MLIFSGGLDSTTCLFWALDNYDKVYTITFDYNQRHIIEKEMAQKTIELVKSIKKKEISYFEFKIDLSTMGASALTDFSIDVPKNRDVNSNEIPITYVPFRNGIFLSVAVAYAETLDITDIIGGWNVIDYSGYPDCRPNFLKSFQQTATLGTKIGQKKPFNIIAPLIGLKKSQIIKLGKKHNADYSFAYSCYEGREEFCGECDSCILRAQGFKEAGYLDDYLVRVATSLKGTKLHP

SEQ ID NO: 37922 - protein, 238 aa, Desulfurella multipotens
  REGION 1..238: note = tr|A0A1G6MJ67|A0A1G6MJ67_9DELT 7-cyano-7-deazaguanine synthase OS=Desulfurella multipotens OX=79269 GN=queC PE=3 SV=1
MKKCLLIFSGGLDSTTCLFWALDYYDEVHTITFDYHQRHVIEKKMALETIKLAKSIKQKDIDYFEFNIDLSKIGASALTDFSINVPKNRNIDNQIPITYVPFRNGIFLAISVAYAEKLDISNIIGGWNVLDYSGYPDCRPDFLESFRQAATLGTKIGQTKPFNIIAPLIGLKKSEIIKLGKKHNADYSYAYSCYEGNEIPCGQCDSCILRAKGFEEAGFVDDYMVRLATSSKETKSHP

SEQ ID NO: 37923 - protein, 238 aa, Desulfurella sp.; identical to SEQ ID NO: 37922
  REGION 1..238: note = tr|A0A2N7PVV3|A0A2N7PVV3_9DELT 7-cyano-7-deazaguanine synthase OS=Desulfurella sp.; OX = 1962857 GN=queC PE=3 SV=1

SEQ ID NO: 37924 - protein, 149 aa, unidentified
  source 1..149: note = Desulfurellales bacterium
  REGION 1..149: note = tr|A0A5C7Q9Q6|A0A5C7Q9Q6_9DELT 7-cyano-7-deazaguanine synthase (Fragment); OS = Desulfurellales bacterium OX=2482794 GN=E6Q97_08630; PE = 3 SV=1
MNENDRSVVVLSGGMDSTTALYVAIGESAPIALSFDYGQRHRKELKSAALICADLGIEHHIIDLTSLTQLIATSALTDPNHQVPEGHYADDNMKQTVVPNRNAIMANIAIGVAVARKARYVFLGVHAGDHAVYPDCRPEFIDSLQSLAE

SEQ ID NO: 37925 - protein, 89 aa, unidentified
  source 1..89: note = Desulfurellales bacterium
  REGION 1..89: note = tr|A0A5C7Q6C9|A0A5C7Q6C9_9DELT 7-cyano-7-deazaguanine synthase (Fragment); OS = Desulfurellales bacterium OX=2482794 GN=E6Q97_10380; PE = 3 SV=1
SLAEVANQGFIEPFFEIRTPFIYKTKADIVALGVKLGVPYEKTWTCYNGGDVHCGRCATCVERLEAFDLAGAVDPVTYEDSEVWKEFVK

SEQ ID NO: 37926 - protein, 241 aa, unidentified
  source 1..241: note = Desulfuribacillus alkaliarsenatis
  REGION 1..241: note = tr|A0A1E5G5Z2|A0A1E5G5Z2_9BACL 7-cyano-7-deazaguanine synthase OS=Desulfuribacillus alkaliarsenatis OX=766136 GN=queC PE=3 SV=1
MKQGQQSTEKSRLAVVLLSSGLDSVVSMAMALDQGYDVELTITVDYGQVAAKKEIEQAVLLTRHYGLKHKVIDIKSMMADITSGLLTGTIPAIDESELDNFEIASKTAEKVWVPNRNGLLINLAAMFAESLGCSRVITGFNVEEASTFPDNSVEFVQAINNSLKYSTANSVQVLSLTQELNKNEIIEQAIELHVPLELIWSCYYGGQRMCGTCESCKRLYRALKPHRDLTNVIKFSNGVTE

SEQ ID NO: 37927 - protein, 229 aa, unidentified
  source 1..229: note = Desulfuribacillus stibiiarsenatis
  REGION 1..229: note = tr|A0A1E5L7L1|A0A1E5L7L1_9BACL 7-cyano-7-deazaguanine synthase OS=Desulfuribacillus stibiiarsenatis OX=1390249 GN=queC PE=3 SV=1
MGQAAVILLSSGIDSFTSLAIAKEKGYEVQLALTVNYGQKAALREIMFAELICKHYGVPHKVLDVQGIMNGVTSGLTTNDVPNIAQDQLDDMDLTTRTAKKVWVPNRNGLLINIAATYAENLGCEWVITGFNREEAVTFPDNSDDFVHAINQSLYYSTSNHVQVISFTQSMTKQEIIDTAVNLQVPLEYVWSCYHGNELMCGTCESCQRLKRAISKYPMLVSSIKFTTE

SEQ ID NO: 37928 - protein, 216 aa, Desulfurispirillum indicum
  REGION 1..216: note = tr|E6W4G1|E6W4G1_DESIS 7-cyano-7-deazaguanine synthase OS=Desulfurispirillum indicum (strain ATCC BAA-1389 / S5) OX=653733 GN=Selin_1200 PE=3 SV=1
MKPSAVALLSGGMDSTCALLKYLHDGGVVRHALTMAYGQLAQEKEIAAAAAICDHLGIPHETVELPFLARLSNSSLNRGTIPENIDINDTRQSEQSARSVWVPNRNGLFINIAAVFAESMGCQHIITGFNVEEAQTFPDNSRDFLMAANGALHFSTLDTLFVVSGTIDMDKKEIAGYLMRNAFPMELIWSCYKGEEVPCGTCESCLRMKRAIEEAQ

SEQ ID NO: 37929 - protein, 258 aa, Desulfurivibrio alkaliphilus
  REGION 1..258: note = tr|D6Z744|D6Z744_DESAT 7-cyano-7-deazaguanine synthase OS=Desulfurivibrio alkaliphilus (strain DSM 19089 / UNIQEM U267 / AHT2) OX=589865 GN=queC PE=3 SV=1
MTDGITNSVLPDAKGQPAVVLLSGGLDSTTVLALAKAAGYRCHCLSFRYGQRHTQELELARANARHWGAARHLILNIELDAIGGSALTGDELEVPKDNLSPLDSPDGAETDAPGMAGEVPVTYVPGRNTIFLAYAASWAEVLGARDIFIGVNAVDFSGYPDCRPDYLEALAAALNLGSQCGREGRPFRLQAPLLHLSKAEIIAKGLALGVDYARTHSCYDPDQQHRACGRCDACILRRRGFAAAGCPDPTTYQPARSE

SEQ ID NO: 37930 - protein, 231 aa, Desulfurivibrio sp.
  REGION 1..231: note = tr|A0A3A6PBU4|A0A3A6PBU4_9DELT 7-cyano-7-deazaguanine synthase OS=Desulfurivibrio sp.; OX = 2093369 GN=queC PE=3 SV=1
MSTEKEKAVVLLSGGLDSTTVLAMAIAEGYACYCLSFSYGQRQTVELARARENARLLGAMDHLVLHVDLDKIGGSALTGDLAVPKNRSAGEMAAAIPVTYVPGRNTIFLSHAMAWAEVLGAFHLFIGINVLDYSGYPDCRPEYLAAFEKVANLGTRAGVESGRSFKIHAPLMHSTKKEIILKGKALGVDYSRTHSCYDPDSEGRACGRCDACQLRLKGFQEAGLVDPVDYQ

SEQ ID NO: 37931 - protein, 235 aa, Desulfurobacterium atlanticum
  REGION 1..235: note = tr|A0A238ZLQ0|A0A238ZLQ0_9BACT 7-cyano-7-deazaguanine synthase OS=Desulfurobacterium atlanticum OX=240169 GN=queC PE=3 SV=1
MSKCVVILSGGLDSTTVLYWAKKRFDEIFAITFFYGQRHSIEVEMAKRIAEKARVKEHKLFKVDLSQFGGSALTDKNIEVPEAHSVKEVLEREIPVTYVPFRNGIFISLAAAYAETKLCTNIAGGWNAVDFSGYPDCRPSFLKAMEEALNQGTKLGAEGRRWKIYAPLINLTKGDIIKLGLELGADYSYSISCYRGEEVPCGTCDSCILRAKGWQEVGMEDHLIKRLKMEGKIKE

SEQ ID NO: 37932 - protein, 237 aa, unidentified
  source 1..237: note = Desulfurobacterium indicum
  REGION 1..237: note = tr|A0A1R1MLL1|A0A1R1MLL1_9BACT 7-cyano-7-deazaguanine synthase OS=Desulfurobacterium indicum OX=1914305 GN=queC PE=3 SV=1
MNSCVVILSGGLDSTTVLYWAKKHFDDVYAITFFYGQRHNIEVEMARKIAENARVKEHKIFEIDLSRIGGSALTDKSIDVPEAHTVEEIKDRGIPITYVPFRNGIFISIAAAYAETKGCTDIAGGWNAVDYSGYPDCRPEFLKSMEETLNRGTKIGVEGVRWHIHAPLINLTKGEIIKLGLSLGADYSYSVSCYRGGEIPCGRCDSCVLRAKGWEEVGEEDHLIRRLKREGKIQERI

SEQ ID NO: 37933 - protein, 235 aa, Desulfurobacterium sp.
  REGION 1..235: note = tr|A0A432QUS5|A0A432QUS5_9BACT 7-cyano-7-deazaguanine synthase OS=Desulfurobacterium sp.; OX = 2004706 GN=queC PE=3 SV=1
MASAVVVFSGGLDSTTALYWAKRKFDKVYAITFYYGQRHSLEVEMAKITAKNAGVEEHLLFEVDLSKFGASALTDMSIEVPETKSIEEIKERGIPVTYVPFRNGVFIALAAAYAEAKGTTHLVGGWNAVDYSGYPDCRPEFLKAMEEVLNRGTKLGAEGKEWHIHAPLIHLTKGEIIKLGLELGADYSYSLSCYRGGEIPCMKCDSCILRAKGWAEVGVTDHLIERLRKEGKIAE

SEQ ID NO: 37934 - protein, 51 aa, Desulfurobacterium sp.
  REGION 1..51: note = tr|A0A432QVC2|A0A432QVC2_9BACT 7-cyano-7-deazaguanine synthase (Fragment); OS = Desulfurobacterium sp. OX=2004706 GN=DSY35_05140 PE=4; SV = 1
MNIPIRDEIDEVEIPSTYVPARNIIFLSFAASYAEAVGARAIFIGANAIDY

SEQ ID NO: 37935 - protein, 233 aa, Desulfurobacterium thermolithotrophum
  REGION 1..233: note = tr|F0S1L5|F0S1L5_DESTD 7-cyano-7-deazaguanine synthase OS=Desulfurobacterium thermolithotrophum (strain DSM 11699 / BSA) OX=868864 GN=queC PE=3 SV=1
MSSAIVILSGGLDSTTALYWAKKNFNKVFAITFYYGQRHSLEVEMARIIAKKAKVEEHILFEVDISKFGGSALTDKNLEVPETQSIEEIKERGIPITYVPFRNGIFLSIAAAYAETKNTTNLVGGWNAVDYSGYPDCRPEFLAAMEEALNKGTKLGSEGKSWKIHAPLINLTKGEIIKLGLSLGADYSYSISCYRGTEVPCGKCDSCVLRAKGWMEVGKEDHLIERLKREGKV

SEQ ID NO: 37936 - protein, 227 aa, unidentified
  source 1..227: note = Desulfuromonadaceae bacterium
  REGION 1..227: note = tr|A0A1G2WI71|A0A1G2WI71_9DELT 7-cyano-7-deazaguanine synthase OS=Desulfuromonadaceae bacterium GWB2_53_15 OX=1801895 GN=queC PE=3 SV=1
MERKAVILYSGGLDSSTCLAIARSEGYVPCAISFSYGQRHSYELEVAKANARQLGASEHLVVDFDLRLMGGSALTADIDVPKQGVGDDIPVTYVPARNTIFLSFALGWAEVLGAFDIFIGVNALDYSGYPDCRPEYIAAYERMANLATKAGVEGKGQFRIHTPLISLTKAETIKQGVSLGVDYALTHSCYDPTPEGLSCGQCDSCRLRLKGFAEAGLVDPLQYVPGS

SEQ ID NO: 37937 - protein, 227 aa, unidentified
  source 1..227: note = Desulfuromonadaceae bacterium
  REGION 1..227: note = tr|A0A1G2VVU9|A0A1G2VVU9_9DELT 7-cyano-7-deazaguanine synthase OS=Desulfuromonadaceae bacterium GWC2_58_13 OX=1801896 GN=queC PE=3 SV=1
MSNPKKAVVLYSGGLDSTTCMAIARDRGFAPCAMSFAYGQRHSIELDKAKEYAPRIGAVKHHLVEIDLRRIGGSALTSDLAVPKDGVQEGEIPVTYVPARNTIFLSFALGWAEVLGAFDIFIGVNALDYSGYPDCRPEYIAAFEAMANLATRAAVEGIGRYRIHTPLIDLSKADIIRRGLALGVDYALTHSCYDPTPAGLACGQCDSCRLRLKGFAEVGISDPVAYQ

SEQ ID NO: 37938 - protein, 227 aa, unidentified; identical to SEQ ID NO: 37936
  source 1..227: note = Desulfuromonadales bacterium
  REGION 1..227: note = tr|A0A1F9P776|A0A1F9P776_9DELT 7-cyano-7-deazaguanine synthase OS=Desulfuromonadales bacterium GWD2_54_10 OX=1797917 GN=queC PE=3 SV=1

SEQ ID NO: 37939 - protein, 228 aa, unidentified
  source 1..228: note = Desulfuromonadales bacterium
  REGION 1..228: note = tr|A0A1E7H0R2|A0A1E7H0R2_9DELT 7-cyano-7-deazaguanine synthase OS=Desulfuromonadales bacterium C00003096 OX=1869311 GN=queC PE=3 SV=1
MSKKAIILYSGGLDSTTCLAIARAEGFAPYTMSFDYGQRHTVELTKAALYAPQLGAVEHQLVNIDLRRIGGSALTSDLAVPKNSVDEGIPITYVPARNTIFLSFALAWAEVLGAFDIFIGVNALDYSGYPDCRPEYIAAYETMANLATKAGVEGEGRYRIHTPLIDLTKAEIIRRGLDLGVDYALTHSCYDPTSDGQACGACDSCRLRLKGFREAGVEDPVPYLQKEP

SEQ ID NO: 37940 - protein, 230 aa, Desulfuromonas acetexigens
  REGION 1..230: note = tr|A0A550JB88|A0A550JB88_9DELT 7-cyano-7-deazaguanine synthase OS=Desulfuromonas acetexigens OX=38815 GN=queC PE=3 SV=1
MPNRKKAVVLYSGGLDSTTCMAIAQAEGFAPYAMSFAYGQRHTVELDQARRYAPRMGAVEHQLVEIDLRRIGGSALTSTLEVPKEGVQEGEIPVTYVPARNTIFLSFALGWAEVLGAFDIYIGVNALDYSGYPDCRPEYIAAFETLANLATRAGVEGSGRYRIHTPLISLTKAEIIRKGLDLGVDYALTHSCYDPTPDGLACGRCDSCRLRLKGFAEAGVPDPVRYVSKA

SEQ ID NO: 37941 - protein, 227 aa, Desulfuromonas acetoxidans
  REGION 1..227: note = tr|Q1JZH4|Q1JZH4_DESA6 7-cyano-7-deazaguanine synthase OS=Desulfuromonas acetoxidans (strain DSM 684 / 11070) OX=281689 GN=queC PE=3 SV=1
MSKKAIVLYSGGLDSTTCLAWAKAQGMTPYALSFRYGQRHSIELEKAESFAPQMGAEQHLIVDIDLRKIGGSALTADIEVPKDRQIDEAIPVTYVPARNTIFLSYGLAWAEALGAFDIVIGVNALDYSGYPDCRPEFIEAYQNMANLATKAAVEGSGQYQIHTPLLHLSKADIIRMGTDLGVDYALTHSCYDPAPDGRACGRCDSCVLRLNGFAQAGQTDPVPYVEK

SEQ ID NO: 37942 - protein, 226 aa, unidentified
  source 1..226: note = Desulfuromonas soudanensis
  REGION 1..226: note = tr|A0A0M4D4I6|A0A0M4D4I6_9DELT 7-cyano-7-deazaguanine synthase OS=Desulfuromonas soudanensis OX=1603606 GN=queC PE=3 SV=1
MSKKAVILYSGGLDSTTCLAIARAEGFTPYAMSFAYGQRHSIEIEKARHNAPLIGAAEHQLVEIDLRRIGGSALTSDAAVPKGRDIDASIPVTYVPARNTIFLSFALAWAEVLGAFDIYIGVNALDYSGYPDCRPEYIAAFEAMANLATKAAVEGEGRYLIHTPLIAQSKGEIIRRGLALGVDYALTHSCYDPTPEGLACGECDSCVLRLKGFAEIGMADPAAYLR

SEQ ID NO: 37943 - protein, 230 aa, Desulfuromonas sp.
  REGION 1..230: note = tr|A0A2N6FGN1|A0A2N6FGN1_9DELT 7-cyano-7-deazaguanine synthase OS=Desulfuromonas sp.; OX = 892 GN=queC PE=3 SV=1
MLRLKKAVVLYSGGLDSTTCLAIARSEGFSPCALSFSYGQRHSVELVKAKEYAPRIGAVEHRVVDIDLRQFGGSALTADVEVPKGRPIDDAIPVTYVPARNTIFLSYALAWAEVLGANDIFIGVNALDYSGYPDCRPEYIAAYEAMANLATKSGVEQKGLKIHTPLISLTKAETITLGTSLGVDYSLTHSCYDPTADDLACGTCDSCQLRLKGFREAGYKDPVAYAIEVE

SEQ ID NO: 37944 - protein, 230 aa, Desulfuromonas sp.
  REGION 1..230: note = tr|A0A357YCV0|A0A357YCV0_9DELT 7-cyano-7-deazaguanine synthase OS=Desulfuromonas sp.; OX = 892 GN=queC PE=3 SV=1
MPKKAVVLYSGGLDSTTCMAIAREEGFAPYAISFSYGQRHSVEIEKARLHAPRLGAIEHLVVDFDYRLIGGSALTADIAVPKAGVGTDIPVTYVPARNTVFLSFALGWAEVLGAFDIFIGVNALDYSGYPDCRPEYIAAFETMANLATRASTEGRGSFHIRTPLINLTKAEIIHQGMDLGVDYGLTHSCYDPGADGLACGVCDSCRLRLKGFAEAGVSDPIPYAVTGGTP

SEQ ID NO: 37945 - protein, 227 aa, Desulfuromonas thiophila
  REGION 1..227: note = tr|A0A1G7CL66|A0A1G7CL66_9DELT 7-cyano-7-deazaguanine synthase OS=Desulfuromonas thiophila OX=57664 GN=queC PE=3 SV=1
MKKAVVLYSGGLDSTTCVALAQAAGCRVHALSFAYGQRHQIELEQARRFAGRLGISEHRIVSIDLRQFGGSALTADLEVPKDCCDEPGIPVTYVPARNTIFLSYALAWAEVLGCFDIYIGVNALDYSGYPDCRPEFIAAFEQMANLATRAAVEGQGHFRIHAPLLQLTKREIIETGLRLGVDYSLTHSCYDPDASGAACGRCDSCLLRLKGFREAGLTDPVRYQARG

SEQ ID NO: 37946 - protein, 223 aa, Desulfuromusa kysingii
  REGION 1..223: note = tr|A0A1H4DEA5|A0A1H4DEA5_9DELT 7-cyano-7-deazaguanine synthase OS=Desulfuromusa kysingii; OX = 37625 GN=queC PE=3 SV=1
MKKAVVLYSGGLDSTTCMAIAREQGFQPYALSFAYGQRHTVELDKARKYAPLIGAEEHMVIDIDLRKMGGSALTADIDVPKSGVCADEIPVTYVPARNTIFLSFALGWAEVLGASDIYIGVNALDYSGYPDCRPEFIQAFQQMANLATKAGVEGHPYQIHAPLLNLTKAQIIQQGLSLGVDYQLTHSCYDPTPEGLSCGQCDSCRLRLKGFADAGQEDPVSYV

SEQ ID NO: 37947 - protein, 234 aa, unidentified
  source 1..234: note = Dethiosulfatarculus sandiegensis
  REGION 1..234: note = tr|A0A0D2JDI9|A0A0D2JDI9_9DELT 7-cyano-7-deazaguanine synthase OS=Dethiosulfatarculus sandiegensis OX=1429043 GN=queC PE=3 SV=1
MTAKNNKRQAVVLLSGGLDSTTCLAIANDMGFTCHALSFRYGQRNFVELKSAARVAKILGAETHRILDLDLRIIGGSALTDELEVPKDRTEAEMESQVPVTYVPARNTLFLSLALGLAEVVGALDIFIGVNALDYSGYPDCRPEFIKAFEEVARLGTCVGAEKGQKINIQTPLIDLTKAQIIKKGLSLGVDYGLTHTCYDPDEQGRACGRCDSCQLRLKGFAQAGIEDPVIYSS

SEQ ID NO: 37948 - protein, 221 aa, Dethiosulfatibacter aminovorans
  REGION 1..221: note = tr|A0A1M6AS06|A0A1M6AS06_9FIRM 7-cyano-7-deazaguanine synthase OS=Dethiosulfatibacter aminovorans DSM 17477 OX=1121476 GN=queC PE=3 SV=1
MNTEKAVVVFSGGQDSTTCLFWAMKEFGEVVAVSFDYSQKHVLELECAREICTKHNIEHHSLDLSLLNQLAPNALTRKDIDVDETAPEEGLPNTFVDGRNMIFLTYAAVIAKQKGINNIVTGVSQSDFSGYPDCRDVFIKSLNVTLNLAMDYQFDIHTPLMWIDKEATWRMAYELGILDVIENETLTCYNGIKGKGCGECPACHLRNKGYEKFKESLKKEN

SEQ ID NO: 37949 - protein, 232 aa, unidentified
  source 1..232: note = Devosia elaeis
  REGION 1..232: note = tr|A0A178I6P0|A0A178I6P0_9RHIZ 7-cyano-7-deazaguanine synthase OS=Devosia elaeis; OX = 1770058 GN=queC PE=3 SV=1
MKTLVICSGGLDSVSLAHKVAAEQTLTGLVSFDYGQRHSKELGFAAACAQRLGVPHQIIDIRDVGRQLSGSALTDDVAVPDGHYAEESMRITVVPNRNAIMLAIAFGVAAARQAEAVGVAVHGGDHFIYPDCRPDFIDAFQAMQNQALDGYANVRLYAPFVNVSKADIVTEGARHATPFDQTWSCYKGGETHCGRCGTCVERREAFDLARLPDPTLYADADFWRDAVEAKRA

SEQ ID NO: 37950 - protein, 232 aa, Devosia psychrophila
  REGION 1..232: note = tr|A0A0F5Q0C7|A0A0F5Q0C7_9RHIZ 7-cyano-7-deazaguanine synthase OS=Devosia psychrophila; OX = 728005 GN=queC PE=3 SV=1
MKTLVICSGGLDSVSLAYKVAAEQTLTGLVSFDYGQRHSKELGFAAACAQRLGVPHQIIDIRDVGRQLSGSALTDDVAVPDGHYAEESMRITVVLNRNAIMLAIAFGVAAARQSEAVGVAVHGGDHFIYPDCRPDFIDAFQAMQNRALDGYANVRLYAPFVHVSKADIVTEGARHATPFDQTWSCYKGGDVHCGRCGTCVERREAFDLARLQDPTDYADADFWHGAVRARSA

SEQ ID NO: 37951 - protein, 232 aa, Devosia riboflavina
  REGION 1..232: note = tr|A0A087LYJ8|A0A087LYJ8_9RHIZ 7-cyano-7-deazaguanine synthase OS=Devosia riboflavina; OX = 46914 GN=queC PE=3 SV=1
MKTLVICSGGLDSVSLAHKVASEQTLTGLVSFDYGQRHNKELGFAAACAQRLGVPHQIIDIRDVGRQLSGSALTDDVAVPDGHYAEVSMRITVVPNRNAIMLAIAFGVAAARQAEAVGVAVHGGDHFIYPDCRPDFIDAFQAMQNRALDGYANVRLYAPFVHVSKADIVTEGARHATPFDQTWSCYKGGEVHCGRCGTCVERREAFDLARLQDPTHYADADFWHAAVQGRSA

SEQ ID NO: 37952 - protein, 232 aa, Devosia sp.
  REGION 1..232: note = tr|A0A2L1S771|A0A2L1S771_9RHIZ 7-cyano-7-deazaguanine synthase OS=Devosia sp. I507; OX = 2083786 GN=queC PE=3 SV=1
MKTLVICSGGLDSVSLAHKVAAEQTLTGLVSFDYGQRHSKELGFAAACAQRLGVPHQVIDIRDIGRQLSGSALTDDVAVPDGHYAEESMRITVVPNRNAIMLAIAFGVAAARQDQAVGVAVHGGDHFIYPDCRPDFIGTFQAMQDRALDGYANVRLYAPFVNVSKANIVTEGARHATPFDQTWSCYKGGEMHCGRCGTCVERREAFDLARLPDPTPYADADFWRDAIEAKRA

SEQ ID NO: 37953 - protein, 193 aa, Devosia sp.
  REGION 1..193: note = tr|A0A1H9AZV0|A0A1H9AZV0_9RHIZ 7-cyano-7-deazaguanine synthase OS=Devosia sp. YR412; OX = 1881030 GN=SAMN05428969_1065 PE=3 SV=1
MEKQQGAGKPVAVEATILLSGGIDSAACAHLLMQQGATVRGVFFDYGQAAAVPEFQAAKRLAKTLGIPVKKFKFPSSTKLGAGELTGRNAFLIWASIFVARAHTGLVGIGIHSGTPYYDCSATFLERMRVLVEEHTEGGLTVVAPFVNWSKGQIFDYFIASKLRVDQTYSCEAGTNPPCGICASCGDRRALGC

SEQ ID NO: 37954 - protein, 233 aa, Dialister invisus
  REGION 1..233: note = tr|C9LPW7|C9LPW7_9FIRM 7-cyano-7-deazaguanine synthase OS=Dialister invisus DSM 15470 OX=592028 GN=queC; PE = 3 SV=1
MKKAIILSSGGVDSTTCLSVAVNALGAENVSTASIFYGQKHKKELDAARAVAAYYHVPHYEFDLAQIMQYSNCSLLSHSTESIVHKSYGEQIAEKGAGKVSTYVPFRNGLMISVAASLAAGIYEEEETDIYVGAHGDDAAGEAYADCSPQFLKAMGEAVAVGTYGKVHLVFPFADKNKTGVVAEGLKLGTPYELTWSCYEGGDTPCGECGTCIDRAKAFAENGVEDPWNGGKG

SEQ ID NO: 37955 - protein, 233 aa, Dialister invisus
  REGION 1..233: note = tr|R5SWW0|R5SWW0_9FIRM 7-cyano-7-deazaguanine synthase OS=Dialister invisus CAG:218 OX=1263072 GN=queC; PE = 3 SV=1
MKKAIILSSGGVDSTTCLSVAVNALGAENVSTASIFYGQKHKKELDAARAVAAYYHVPHYEFDLAQIMQYSNCSLLSHSTESIVHKSYGEQIAEKGAGKVSTYVPFRNGLMISVAASLAAGIYEEEETDIYVGVHGDDAAGEAYADCSPRFLKAMGEAVAVGTYGKVHLVFPFADKNKTGVVAEGLKLGTPYELTWSCYEGGDTPCGECGTCIDRAKAFAENGVEDPWNGGKG

SEQ ID NO: 37956 - protein, 230 aa, Dialister micraerophilus
  REGION 1..230: note = tr|F2BWC8|F2BWC8_9FIRM 7-cyano-7-deazaguanine synthase OS=Dialister micraerophilus DSM 19965 OX=888062; GN = exsB PE=3 SV=1
MKRAIILSSGGVDSTTCISVAVDKLGRENVATASIFYGQKHEKELECARKVAQFYNLKHYEFNLAQVLQYSNCPLLAKSTKEIEHASYEEQVRENSGKVATYVPFRNGLMLSVAASLAASIFENEETGIYIGAHADDAAGNAYADCSEEFLKSMNDAIMIGTYEKVKLVFPFANTNKAGVVATGLKLKTPYELTWSCYEGGEKPCGTCGTCIDRQKAFEENGVKDPALEA

SEQ ID NO: 37957 - protein, 230 aa, unidentified; identical to SEQ ID NO: 37956
  source 1..230: note = Dialister microaerophilus
  REGION 1..230: note = tr|E4L7B5|E4L7B5_9FIRM 7-cyano-7-deazaguanine synthase OS=Dialister microaerophilus UPII 345-E OX=910314; GN = queC PE=3 SV=1

SEQ ID NO: 37958 - protein, 235 aa, Dialister pneumosintes
  REGION 1..235: note = tr|A0A1B3WEU8|A0A1B3WEU8_9FIRM 7-cyano-7-deazaguanine synthase OS=Dialister pneumosintes; OX = 39950 GN=queC PE=3 SV=1
MKKAIILCSGGVDSTTCLSVAVHELGADNVCAASIFYGQKHEKELESARKIAAYYHVKHVELNLSSIFNHSKCALLSHSTKEIEHTSYEEQIQKTKDGKVSTYVPFRNGLMLSAAASLAAGLYEDDEVDIYIGAHADDAAGNAYADCSEKFLSSIANAISLGTYNKVHLVFPFADKNKAEIIKTGLALGTPYELTWSCYEGQEDPCGTCGTCIDRERAFAMNGIIDPLVRKVKGR

SEQ ID NO: 37959 - protein, 229 aa, Dialister sp.
  REGION 1..229: note = tr|A0A510GEV2|A0A510GEV2_9FIRM 7-cyano-7-deazaguanine synthase OS=Dialister sp. 5BBH33; OX = 2582419 GN=queC PE=3 SV=1
MKKAIILSSGGVDSTTCVSLAVDRLGADNVVTASIFYGQKHKKEILAARKVAEYYHLRHYEFDLSSLFQYSNCSLLEGSTQEIVHESYAEQIEKNGEGKVSTYVPFRNGLMLSTAASLAASLFEDDDVDIYIGAHADDAAGDAYADCSEPFLKAMGDAVSIGTYGKVHLAFPFAKLNKAGVVAMGLKLKTPYELTWSCYEGGEKPCGTCGTCIDRAAAFAANGVKDPAL

SEQ ID NO: 37960 - protein, 235 aa, Dialister sp.
  REGION 1..235: note = tr|R7PRR1|R7PRR1_9FIRM 7-cyano-7-deazaguanine synthase OS=Dialister sp. CAG:588 OX=1262871 GN=queC PE=3; SV = 1
MKKAIILCSGGVDSTTCLSVAVHELGADNVCAASIFYGQKHEKELESARKIAAYYHVKHVELNLSSIFNHSKCALLSHSTKEIEHTSYEEQIQKTKDGKVSTYVPFRNGLMLSAAASLAAGLYEDDEVDIYIGAHADDAAGNAYADCSEKFLSSIANAISLGTYNKVHLVFPFADKNKAEIIKAGLALGTPYELTWSCYEGQEEPCGTCGTCIDRERAFAMNGIIDPLVRKAKGR

SEQ ID NO: 37961 - protein, 230 aa, Dialister succinatiphilus
  REGION 1..230: note = tr|H1D0W3|H1D0W3_9FIRM 7-cyano-7-deazaguanine synthase OS=Dialister succinatiphilus YIT 11850 OX=742743; GN = queC PE=3 SV=1
MKKAIILSSGGVDSTTCVSLAVDRLGAENVVTASIFYGQKHKKEILAARKVAQYYHLKHYEFDLSQIFQYSNCSLLANSTEEIVHESYARQIAENGEGKVSTYVPFRNGLMLSTAASLAASLFEEEDVDIYIGAHADDAAGDAYADCSEPFLQHMGEAIRIGTYGKVHLVFPFAKMNKAGVVATGLKLKTPYELTWSCYEGGDKPCGTCGTCIDRAAAFAANGVKDPALN

SEQ ID NO: 37962 - protein, 239 aa, Diaphorobacter nitroreducens
  REGION 1..239: note = tr|A0A3N1ZAG6|A0A3N1ZAG6_9BURK 7-cyano-7-deazaguanine synthase OS=Diaphorobacter nitroreducens OX=164759 GN=queC PE=3 SV=1
MSRLPQRRALVLLSGGQDSATCLAWALARYGHVETLGFDYGQRHRVELDCRQRLIDGVRALPWPGQLGPDHMLTVDVLAQLGGSAMTEDVAIAMQADGLPNTFVPGRNLLFFTLAAALAYRRGLDVLVGGMSETDYSGYPDCRDSTLKALQVALSLGVDRPLTLETPLMWRSKADTWALAQRLGGDALVELIRCESHTCYLGQRGDLHAWGHGCGGCPACELRAQGWEQWTAQRSLNGA

SEQ ID NO: 37963 - protein, 239 aa, unidentified; identical to SEQ ID NO: 37962
  source 1..239: note = Diaphorobacter polyhydroxybutyrativorans
  REGION 1..239: note = tr|A0A2Z2LCY5|A0A2Z2LCY5_9BURK 7-cyano-7-deazaguanine synthase OS=Diaphorobacter polyhydroxybutyrativorans OX=1546149 GN=queC PE=3 SV=1

SEQ ID NO: 37964 - protein, 177 aa, Diaphorobacter sp.
  REGION 1..177: note = tr|A0A4Y8ZCY4|A0A4Y8ZCY4_9BURK 7-cyano-7-deazaguanine synthase (Fragment); OS = Diaphorobacter sp. DS2 OX=1302548 GN=E4O93_08145 PE=3; SV = 1
WPGRLGPDHLLTVDVLAQLGGSAMTEEVAIAMQQDGLPNTFVPGRNLLFFTLAAALAYRRGLQVLVGGMSETDYSGYPDCRDNTLKALQVALSLGLERPLTLETPLMWIDKAGTWALAHQLGGGALVELIRRDSHTCYLGQRDRLHGWGYGCGSCPACELRAQGWTQWAEKNRPACA

SEQ ID NO: 37965 - protein, 239 aa, Diaphorobacter sp.; identical to SEQ ID NO: 37962
  REGION 1..239: note = tr|A0A2S4KDG8|A0A2S4KDG8_9BURK 7-cyano-7-deazaguanine synthase OS=Diaphorobacter sp. LR2014-1 OX=1933219 GN=queC PE=3 SV=1

SEQ ID NO: 37966 - protein, 244 aa, Dichotomicrobium thermohalophilum
  REGION 1..244: note = tr|A0A397Q4U8|A0A397Q4U8_9RHIZ 7-cyano-7-deazaguanine synthase OS=Dichotomicrobium thermohalophilum OX=933063 GN=queC PE=3 SV=1
MNKSSQIGTTALVLFSGGQDSTVCLAWALERFARVETIGFDYSQRHSAELEARHDVRGEIARHFPDWAARLGEDHMLALPTLAQISDTALTRESEIFMTEAGLPSTFVPGRNILFFTYAAALGYRRGIADLVGGMCETDYSGYPDCRNETLQSLARTLSLGMDHDVAILTPLMWIDKAGTWALAHELGGDKLVDLIAEHTHTCYIGDRTQRHDWGYGCGQCPACELRANGWRQWRAGTETAATG

SEQ ID NO: 37967 - protein, 231 aa, unidentified
  source 1..231: note = Dickeya aquatica
  REGION 1..231: note = tr|A0A375ACZ3|A0A375ACZ3_9GAMM 7-cyano-7-deazaguanine synthase OS=Dickeya aquatica; OX = 1401087 GN=queC PE=3 SV=1
MTSAVVVFSGGQDSTTCLIQALQQYDDVHCVTFDYGQRHRAEIDVAASLAQQLGAKAHKILNVSLLNELAVSSLTRDNIPVPEFDAEAKGLPSTFVPGRNILFLTLASIYAYQVGADTVITGVCETDFSGYPDCRDEFVKALNQAIVLGLAREVRFVTPLMWLNKAETWALADYYQQLETVKHHTLTCYNGIQGAGCGECAACHLRAKGLAEYQHAPAEIMASLKRKTGLK

SEQ ID NO: 37968 - protein, 231 aa, Dickeya chrysanthemi
  REGION 1..231: note = tr|C6CQU1|C6CQU1_DICC1 7-cyano-7-deazaguanine synthase OS=Dickeya chrysanthemi (strain Ech1591); OX = 561229 GN=queC PE=3 SV=1
MTSAVVVFSGGQDSTTCLIQALQQYDDVHCVTFDYGQRHRAEIDVAAALAQTLGARAHKVLNVGLLNELAVSSLTRDNIPVPEFDATADGLPSTFVPGRNILFLTLASIYAYQVGADTVITGVCETDFSGYPDCRDEFVKALNQAVALGLAKDIRFVTPLMWLNKAETWALADYYQQLETVKNHTLTCYNGIKGTGCGQCAACHLRAKGLAEYQRNPAAIMAALKHKTGLK

SEQ ID NO: 37969 - protein, 231 aa, Dickeya dadantii
  REGION 1..231: note = tr|E0SD76|E0SD76_DICD3 7-cyano-7-deazaguanine synthase OS=Dickeya dadantii (strain 3937) OX=198628; GN = queC PE=3 SV=1
MTSAVVVFSGGQDSTTCLIQALQQYDEVHCVTFDYGQRHRAEIDVAAELAQTLGARAHKVLNVGLLNELAVSSLTRDNIPVPEFDANADGLPSTFVPGRNILFLTLASIYAYQVGADTVITGVCETDFSGYPDCRDEFVKALNQAITLGLARDIRFVTPLMWLNKAETWALADYYQQLDTVKNHTLTCYNGIKGTGCGQCAACHLRAKGLAEYQHNPSAVMASLKHKTGLK

SEQ ID NO: 37970 - protein, 231 aa, Dickeya dianthicola
  REGION 1..231: note = tr|A0A385XUR6|A0A385XUR6_9GAMM 7-cyano-7-deazaguanine synthase OS=Dickeya dianthicola; OX = 204039 GN=queC PE=3 SV=1
MTSAVVVFSGGQDSTTCLIQALQQYDEVHCVTFNYGQRHRAEIDVAEELAQALGARSHKVLNVGLLNELAVSSLTRDNIPVPEFDANTDGLPSTFVPGRNILFLTLASIYAYQVGANTIITGVCETDFSGYPDCRDEFVKALNQAVTLGLARDIRFVTPLMWLNKAETWALADYYQQLDTVKNHTLTCYNGIKGTGCGQCAACHLRAKGLAEYQHDPLAVMTSLKHKTGLK

SEQ ID NO: 37971 - protein, 231 aa, unidentified
  source 1..231: note = Dickeya fangzhongdai
  REGION 1..231: note = tr|A0A2K8QJ98|A0A2K8QJ98_9GAMM 7-cyano-7-deazaguanine synthase OS=Dickeya fangzhongdai; OX = 1778540 GN=queC PE=3 SV=1
MTSAVVVFSGGQDSTTCLIQALQQYDEVHCVTFDYGQRHRAEIDVAAELAQTLGARAHKVLNVGLLNELAVSSLTRDNIPVPEFDANADGLPSTFVPGRNILFLTLASIYAYQVGADTVITGVCETDFSGYPDCRDEFVKALNQAVTLGLARDIRFVTPLMWLNKAETWALADYYQQLDTVRNHTLTCYNGIKGTGCGQCAACHLRAKGLAEYQHNPSAVMASLKHKTGLK

SEQ ID NO: 37972 - protein, 231 aa, Dickeya paradisiaca
  REGION 1..231: note = tr|C6CBB7|C6CBB7_DICP7 7-cyano-7-deazaguanine synthase OS=Dickeya paradisiaca (strain Ech703) OX=579405; GN = queC PE=3 SV=1
MSCAVVVFSGGQDSTTCLIQALQQYDEVHCVTFDYGQRHRAEIDAAAELTQRLGARAHKILNVELLNQLAVSSLTRDSIPVPEYDETSEGLPSTFVPGRNILFLTLASIYAYQVGAESVITGVCETDFSGYPDCRDEFVKALNQAVSLGLAREIRFVTPLMWLNKAETWALADYYHQLDTVKHHTLTCYNGIKGEGCGQCAACHLRAQGLTQYQQNRAAVIASLKSKTGLK

SEQ ID NO: 37973 - protein, 231 aa, unidentified
  source 1..231: note = Dickeya solani
  REGION 1..231: note = tr|A0A2K8W3J4|A0A2K8W3J4_9GAMM 7-cyano-7-deazaguanine synthase OS=Dickeya solani RNS 08.23.3.1.A OX=1240086 GN=queC PE=3 SV=1
MTSAVVVFSGGQDSTTCLIQALQQYDEVHCVTFDYGQRHRAEIDVAAELAQTLGARAHKVLNVGLLNELAVSSLTRDNIPVPEFDANADGLPSTFVPGRNILFLTLASIYAYQVGADTVITGVCETDFSGYPDCRDEFVKALNQAVTLGLARDIRFVTPLMWLNKAETWALADYYQQLDTVKNHTLTCYNGIKGTGCGQCAACHLRAKGLAEYQHNPSAVMASLKHKTGLK

SEQ ID NO: 37974 - protein, 231 aa, Dickeya sp.
  REGION 1..231: note = tr|A0A3N0G4Z3|A0A3N0G4Z3_9GAMM 7-cyano-7-deazaguanine synthase OS=Dickeya sp. FVG1-MFV-O17 OX=2487136 GN=queC PE=3 SV=1
MTSAVVVFSGGQDSTTCLIQALQQYDEVHCVTFDYGQRHRAEIDVAAELAQTLGARAHKVLNVSLLNELAVSSLTRDSIPVPEFDANADGLPSTFVPGRNILFLTLASIYAYQVGADTVITGVCETDFSGYPDCRDEFVKALNQAVTLGLARDIRFVTPLMWLNKAETWALADYYQQLDTVKNHTLTCYNGIKGSGCGQCAACHLRAKGLAEYQHNPSAVMASLKHKTCLK

SEQ ID NO: 37975 - protein, 231 aa, Dickeya sp.; identical to SEQ ID NO: 37974
  REGION 1..231: note = tr|A0A454UTZ9|A0A454UTZ9_9GAMM 7-cyano-7-deazaguanine synthase OS=Dickeya sp. FVG10-MFV-A16 OX=2487135 GN=queC PE=3 SV=1

SEQ ID NO: 37976 - protein, 231 aa, Dickeya zeae
  REGION 1..231: note = tr|A0A2K9QC82|A0A2K9QC82_9GAMM 7-cyano-7-deazaguanine synthase OS=Dickeya zeae OX=204042; GN = queC PE=3 SV=1
MTSAVVVFSGGQDSTTCLIQALQQYDEVHCVTFDYGQRHRAEIDVAAELAHTLGARAHKVLNVNLLNELAVSSLTRDNIPVPEFDATVDGLPSTFVPGRNILFLTLASIYAYQVGAETVITGVCETDFSGYPDCRDEFVKALNQAVTLGLAKDIRFVTPLMWLNKAETWALADYYQQLDTVQNHTLTCYNGIKGTGCGQCAACHLRAKGLAEYRQNPSAVMAAMKKKTGLK

SEQ ID NO: 37977 - protein, 231 aa, Dickeya zeae
  REGION 1..231: note = tr|A0A0A8FAP0|A0A0A8FAP0_9GAMM 7-cyano-7-deazaguanine synthase OS=Dickeya zeae EC1; OX = 1427366 GN=queC PE=3 SV=1
MTSAVVVFSGGQDSTTCLIQALQQYDEVHCVTFDYGQRHRAEIDVAAELAHTLGARAHKVLNVSLLNELAVSSLTRDNIPVPEFDATVDGLPSTFVPGRNILFLTLASIYAYQVGAETVITGVCETDFSGYPDCRDEFVKALNQAITLGLAKDIRFVTPLMWLNKAETWALADYYQQLDTVQNHTLTCYNGIKGTGCGQCAACHLRAKGLAEYRQNPSAVMAAMKKKTGLK

SEQ ID NO: 37978 - protein, 247 aa, unidentified
  source 1..247: note = Dictyobacter alpinus
  REGION 1..247: note = tr|A0A402BIS1|A0A402BIS1_9CHLR 7-cyano-7-deazaguanine synthase OS=Dictyobacter alpinus; OX = 2014873 GN=queC PE=3 SV=1
MPTNNRAVLIVSGGMDSCVLAHYYAAAGFHLHLLSFDYGQKHVKELTYAERYINDLRTRYSQLEIAHDTIDLPIASLLTNSDSALINTEREMPHGHYTDDSMKATVVPYRNPNMLLQAATVAWNEHASVVAYAAHQGDYSQYPDCRKIFVDAFNDMLAVAMEGQKIEVESPFMRFTKAQIAQLGASLKVPFELTWSCYEGGNSGLGDQHCGICGTCVERYEAFKIAGIPDPTTYANDPEQYLHIPGK

SEQ ID NO: 37979 - protein, 250 aa, unidentified
  source 1..250: note = Dictyobacter aurantiacus
  REGION 1..250: note = tr|A0A401ZQH9|A0A401ZQH9_9CHLR 7-cyano-7-deazaguanine synthase OS=Dictyobacter aurantiacus OX=1936993 GN=queC PE=3 SV=1
MPINNRAVLIVSGGMDSCVLAHYYAAAGFHLHLLSFDYGQKHVKELDYAERYIADLRARYSQLEIVHDTIDLPIAQLLTNSDSALINPERQMPHGHYTDDSMKATVVPYRNPNMLLQAATVAWNEHASVVAYAAHQGDYSQYPDCREEFVDAFNNLLAVAMEGQTIKVESPFMRFTKAQIARLGSNLHVPFEHTWSCYEGGSSGLDDRHCGICGTCVERYEAFKEAGVPDPTVYANDPEQYLHIPGRADA

SEQ ID NO: 37980 - protein, 222 aa, unidentified
  source 1..222: note = Dictyobacter kobayashii
  REGION 1..222: note = tr|A0A402AVU9|A0A402AVU9_9CHLR 7-cyano-7-deazaguanine synthase OS=Dictyobacter kobayashii; OX = 2014872 GN=queC PE=3 SV=1
MPTAIAIVSGGLDSVTLAYLLKAQGYDIHLLSFDYGQRHKKELDYARICAERLNGKHNIVDLSSLGKHLKGSALTDDIDVPDGHYADANMAITVVPNRNAIMLSIAYGIAVSEEAEVVAIGAHGGDHYIYPDCRPDFISSFEAMQKQAVEGFGNAKLHLAAPFLHIGKHQIVSLGDKLGVQFADTWSCYKGGAKHCGTCGTCVERKEAFELSGVPDPTPYEK

SEQ ID NO: 37981 - protein, 78 aa, unidentified
  source 1..78: note = Dictyobacter kobayashii
  REGION 1..78: note = tr|A0A402AWT8|A0A402AWT8_9CHLR 7-cyano-7-deazaguanine synthase OS=Dictyobacter kobayashii; OX = 2014872 GN=KDK_73140 PE=3 SV=1
MRFSKAQIARLGANLNVPFELTWSCYEGGNEGLGDQHCGVCGTCVERYEAFKVAGVPDPTVYANDPEQYLHIPGQANA

SEQ ID NO: 37982 - protein, 250 aa, unidentified
  source 1..250: note = Dictyobacter sp.
  REGION 1..250: note = tr|A0A5A5T672|A0A5A5T672_9CHLR 7-cyano-7-deazaguanine synthase OS=Dictyobacter sp. Uno17; OX = 2014874 GN=queC PE=3 SV=1
MPITNRAVLIVSGGMDSCVLAHYYAAAGFQLHLLSFDYGQKHVKELTYAERYITDLRARYSNLEIMHDTIDLPIARLLADSDSALINTNRQMPHGHYTDDSMKATVVPYRNPNMLLQAATVAWNDHASVVAYAAHQGDYSQYPDCRKIFVDAFNTLLSVSMEGQQIEVESPFMRFTKAQIARLGATLQVPFELTWSCYEGGSDGLDDRHCGVCGTCVERYEAFRVAGVPDPTAYANDPEQYLHIPGRADQ

SEQ ID NO: 37983 - protein, 250 aa, unidentified
  source 1..250: note = Dictyobacter sp.
  REGION 1..250: note = tr|A0A5J4KT14|A0A5J4KT14_9CHLR 7-cyano-7-deazaguanine synthase OS=Dictyobacter sp. W12; OX = 2607529 GN=queC PE=4 SV=1
MPANNRAVLIVSGGMDSCVLAHYYAAAGFHLHLISFDYGQKHVKELTYAERYIADLRSRYSQLEIVHNTIDLPIASLLTNSDSALINTEKQMPHGHYTDDSMKATVVPYRNPNMLLQAATVAWNEHASVVAYAAHQGDHAQYPDCRKVFVDAFNDLLAVAMEGQKIEVESPFMRFTKAQIAQLGASLNVPFDLTWSCYEGGNSGLGDQHCGICGTCVERYEAFKLAGVPDPTSYANDPEQYLHIPGKRES

SEQ ID NO: 37984 - protein, 479 aa, Dinoroseobacter shibae
  REGION 1..479: note = tr|A8LMN3|A8LMN3_DINSH Uncharacterized protein; OS = Dinoroseobacter shibae (strain DSM 16493 / NCIMB 14021 / DFL 12) OX=398580 GN=Dshi_3225 PE=4 SV=1
MFLTGDRFAFTFTEAPSAKAPRSPFFKFDKESSWQATRVLMFSGGLDSLSGAVEEIAEHGQRVALVSHFSATKIAPVQRYMQRSLADAFGANTCQHVPVQVQMMGRSLKEGTHRSRSFLFAALGAITAEAFDLNRVSFHENGVVSLNLPPVGNVLGTRATRTTHPQTLSRFTALLGQVFQGAMRVDNPYFWRTKKEVVETIARLNMAEQIAVSRSCADVHNQTRQHPHCGRCSQCIDRLEGSRTDVRDREIALSYVRNAQAFEYMTPEDLERSLPAVLDAVMHVQQPPETALDMIRGLLARHGSSVAGVMRKALDQRAAGSFPAHSLPRLYGEMQTQVLLPTVAVAAAPAGRAEPETIAVEIDGAARWVRVGPHITFQRDANADLLLVLAESWLSGAGQGLTPLDYPCISAPELARRLGLESEEALRRRVLRARNALQKKFASSGLDADATREIIENVPWQGYRLAPDRVTVRRRVDKG

SEQ ID NO: 37985 - protein, 236 aa, unidentified
  source 1..236: note = Dissulfuribacter thermophilus
  REGION 1..236: note = tr|A0A1B9F8H0|A0A1B9F8H0_9DELT 7-cyano-7-deazaguanine synthase OS=Dissulfuribacter thermophilus OX=1156395 GN=queC PE=3 SV=1
MENNKRPLAVCLVSGGLDSCVTAAFAKEECEVAFVHVNYGQRTQQRELEAFNKIADYYQVEKRLVVDIGYLKKIGGSALTDTSIDVPQDTLSTNGIPITYVPFRNAHLISIATSWAEVIGAQFIYIGATEVDFSGYPDCRRSFFDAMELAIHEGTRPETNIKIRTPIIHMGKKEVVEAGARLGAPLELTWSCYKDEDLACGRCDSCLLRLKGFKEAGLKDPIPYKADKENRGETSI

SEQ ID NO: 37986 - protein, 226 aa, Dokdonella fugitiva
  REGION 1..226: note = tr|A0A4V2S321|A0A4V2S321_9GAMM 7-cyano-7-deazaguanine synthase OS=Dokdonella fugitiva; OX = 328517 GN=queC PE=3 SV=1
MANENQRAVVLVSGGMDSAVTLAMARARGHACYALSVDYGQRHSSELDAARRVALALGAVEHKTVHVDLRSIGGSALTADDIAVPDEGGSGIPVTYVPARNTIMLSIALGWAEVLGARDIWCGVNAVDYSGYPDCRPAFIEAFGRLAEVATKAGVEGAHLAVHAPLLDMGKADIVRAGLGLGIDFAQTVSCYQADADGRACGHCDACRLRADGFRVAGVADPTRYR

SEQ ID NO: 37987 - protein, 226 aa, unidentified
  source 1..226: note = Dokdonella immobilis
  REGION 1..226: note = tr|A0A1I4XF57|A0A1I4XF57_9GAMM 7-cyano-7-deazaguanine synthase OS=Dokdonella immobilis; OX = 578942 GN=queC PE=3 SV=1
MSKENRKPAVVLVSGGMDSAVTLALAREGGFACHALSVAYGQRHSSELAAAAGLARSLGAVEHKTVSVDLRSIGGSALTADIDVPEQGGAGIPVTYVPARNTIMLSIALGWAEVLGASDIFCGVNAVDYSGYPDCRPAFIEAFERLANLATKSGVEGAGIRVHAPLMAMSKADIARAGARLGIDFSATVSCYQADAEGRACGHCDACRLRAEGFAAAGLDDPTRYR

SEQ ID NO: 37988 - protein, 221 aa, Dokdonella koreensis
  REGION 1..221: note = tr|A0A167H596|A0A167H596_9GAMM 7-cyano-7-deazaguanine synthase OS=Dokdonella koreensis DS-123 OX=1300342 GN=queC PE=3 SV=1
MKRAVVLVSGGMDSAVTLALARAEGFDCHALSVAYGQRHSSELAAAERLARDLGAHQHKTVHVDLRTIGGSALTADIDVPEQGGAGIPVTYVPARNTIMLSIALGWAEVLGAADIFCGVNAVDYSGYPDCRPAFIAAFETLANLATKAGVEGTPLRVHAPLIALGKADIVRAGLCLGVDFAQTVSCYQADADGRACGHCDACRLRADGFVAAGVADPTRYR

SEQ ID NO: 37989 - protein, 225 aa, Dokdonia sp.
  REGION 1..225: note = tr|A0A559RLC0|A0A559RLC0_9FLAO 7-cyano-7-deazaguanine synthase OS=Dokdonia sp. Hel1_53; OX = 1566287 GN=OD90_0050 PE=4 SV=1
MSNSVHNVLWTSGWDSTFRVIQLYRNNCTIQPIYVRDHNRKSTQREFETIQSLTSSIQDHFSTSKGSILPLIIYERKKIPSNFRLKFAYNILRKRKNLGKQYYWLAFLAKKYNRLELSIHKGDLYRFFNLDELIVINQGASGENWVINKKKVDIFRKLLFGNMTFPIVNISKPEMKKIAEDYNFSNLMEQTWFCHRSGSKACGECSPCKQYRRDGFGYRIDQVNL

SEQ ID NO: 37990 - protein, 224 aa, unidentified
  source 1..224: note = Dolichospermum compactum
  REGION 1..224: note = tr|A0A1Z4V528|A0A1Z4V528_9CYAN 7-cyano-7-deazaguanine synthase OS=Dolichospermum compactum NIES-806 OX=1973481 GN=queC PE=3 SV=1
MKAVILLSGGLDSSTVLYQAKADGCECYAISFNYQQRHSKELHSAFMVAKAAGVVQHQVVNFDLRQWGGSALTDNKIDLPAGRSLDEMADNIPVTYVPARNTIFLSFALGYAEAIAAQRVYIGVNALDYSGYPDCRPDYIEAMQQVFQLGTKQGREGQPIEIITPLIDLKKTEIIQLGNQLGVPWEITWSCYAGGDSACGVCDSCQLRLAAFAALGLEDPIDYV

SEQ ID NO: 37991 - protein, 226 aa, unidentified
  source 1..226: note = Dolichospermum planctonicum
  REGION 1..226: note = tr|A0A480AE93|A0A480AE93_9CYAN 7-cyano-7-deazaguanine synthase OS=Dolichospermum planctonicum OX=136072 GN=queC PE=3 SV=1
MKAVILLSGGLDSSTVLYQAKADGCQCYAISFDYQQRHRKELNSALMLANTVGVIEHQVVNFDLRQWGGSALTDDKINLPQERSLAEMADHIPTTYVPARNTIFLSFALGYAEAIAAERVYIGVNALDYSGYPDCRPDYIQAIQEVFRLGTKQGRSGKPIKIIAPLIDLKKTEIIQLGNQLGVPWHLTWSCYAGNDIACGVCDSCQLRLAAFAELGLKDPVLYAGG

SEQ ID NO: 37992 - protein, 227 aa, unidentified
  source 1..227: note = Dolichospermum sp.
  REGION 1..227: note = tr|A0A5C0E1M2|A0A5C0E1M2_9CYAN 7-cyano-7-deazaguanine synthase OS=Dolichospermum sp. UHCC 0315A OX=1914871 GN=queC PE=3 SV=1
MKAVILLSGGLDSSTVLYKAKADGCECYAISFDYQQRHRKELNSALMIAKAAGVIQHQVVNFDLGQWGGSALTDQKIDLPTGRSLAEMGDNIPVTYVPARNTIFLSFALSYAEAIAAERVYIGVNILDYSGYPDCRPDYIEAMQEVFRLGTKQGREGEAMKIIAPLIDLKKTEIIQLGNQLGVPWDLTWSCYAGGESACGVCDSCQLRLAAFAELGLKDPIDYSEVG

SEQ ID NO: 37993 - protein, 220 aa, unidentified
  source 1..220: note = Domibacillus aminovorans
  REGION 1..220: note = tr|A0A177L7J9|A0A177L7J9_9BACI 7-cyano-7-deazaguanine synthase OS=Domibacillus aminovorans OX=29332 GN=queC PE=3 SV=1
MLKDEKAVVVFSGGQDSTTCLFWAKQTFKEVIAVTFDYGQRHDAEIDVAKEIAAHLNVPHHILNMGLLNQLAPNALTRTDIAIEEREGEPPSTFVEGRNLLFLSFAAILGKQYDARHIVTGVCETDFSGYPDCRDSFVKSLNVTLNLSMDHEFVIHTPLMWLNKKETWALADQLGAFEYVRENTLTCYNGVKGSGCGECPACKLRQNGLDQYVEQKGGDV

SEQ ID NO: 37994 - protein, 220 aa, unidentified
  source 1..220: note = Domibacillus aminovorans
  REGION 1..220: note = tr|A0A177KZ57|A0A177KZ57_9BACI 7-cyano-7-deazaguanine synthase OS=Domibacillus aminovorans OX=29332 GN=queC PE=3 SV=1
MLKDEKAVVVFSGGQDSTTCLFWAKQTFKEVIAVTFDYGQRHDAEIDVAKEIAAHLDVPHHILNMGLLNQLAPNALTRRDIAIEEREGEPPSTFVEGRNLLFLSFAAILGKQYDARHIVTGVCETDFSGYPDCRDSFVKSLNVTLNLSMDHEFVIHTPLMWLNKKETWALADQLGAFEYVRENTLTCYNGVKGSGCGECPACKLRQNGLDQYLEQKGGDV

SEQ ID NO: 37995 - protein, 221 aa, unidentified
  source 1..221: note = Domibacillus antri
  REGION 1..221: note = tr|A0A1Q8Q8Z7|A0A1Q8Q8Z7_9BACI 7-cyano-7-deazaguanine synthase OS=Domibacillus antri; OX = 1714264 GN=queC PE=3 SV=1
MIKNEKAVVVFSGGQDSTTCLFWAKKTFKEVVAVTFHYGQRHEAEIDAAKDIAAELNVPHHILDMGLLGQLAPNALTRNDIAIEEREGQPPTTFVEGRNLLFLSFAAILGKQYDARHIVTGVCETDFSGYPDCRDSFVKSLNVTLNLSMDYEFVIHTPLMWLDKKETWALADDLGAFDYVREHTLTCYNGIKGAGCGECPACKLRQNGLDQYLAEKGGDVR

SEQ ID NO: 37996 - protein, 221 aa, unidentified
  source 1..221: note = Domibacillus enclensis
  REGION 1..221: note = tr|A0A1N6YH60|A0A1N6YH60_9BACI 7-cyano-7-deazaguanine synthase OS=Domibacillus enclensis; OX = 1017273 GN=queC PE=3 SV=1
MLKNEKAVVVFSGGQDSTTCLFWAKQTFKEVIAVTFHYGQRHDAEIDVAKDIADDLNVPHHILDMGLLNQLAPSALTRSDIDIEVKEGELPSTFVEGRNLLFLSFAAIFGKQAGARHIVTGVCETDFSGYPDCRDAFVKSLNVTLNLSMDHEFVIHTPLMWLDKKETWKLADDLGAFDYVRERTLTCYNGVKGSGCGECPACELRQNGLDQYIEEKGGSMQ

SEQ ID NO: 37997 - protein, 221 aa, unidentified
  source 1..221: note = Domibacillus epiphyticus
  REGION 1..221: note = tr|A0A1V2A9V4|A0A1V2A9V4_9BACI 7-cyano-7-deazaguanine synthase OS=Domibacillus epiphyticus OX=1714355 GN=queC PE=3 SV=1
MIKNEKAVVVFSGGQDSTTCLFWAKQTFKDVIAVTFNYGQRHDAEIDVAKKIAADFNIPHHILDMGLLNQLAPSALTRDEILIKERDGQPPTTFVEGRNLLFLSFAAILGKQYDARHIVTGVCETDFSGYPDCRDSFVKSLNVTLNLSMDFDFVIHTPLMWLDKKQTWALADDLGAFDYVRENTLTCYNGIKGSGCGECPACKLRQNGLDQYKEDKRGDVQ

SEQ ID NO: 37998 - protein, 221 aa, unidentified
  source 1..221: note = Domibacillus iocasae
  REGION 1..221: note = tr|A0A1E7DU09|A0A1E7DU09_9BACI 7-cyano-7-deazaguanine synthase OS=Domibacillus iocasae; OX = 1714016 GN=queC PE=3 SV=1
MLKHEKAVVVFSGGQDSTTCLFWAKQTFKDVIAVTFNYGQRHSAEIEVAKEIAADLQVPHHVLDMGLLNQLAPSALTRSNIDIEIKEGELPSTFVEGRNLLFLSFAAILGKQAGARHIVTGVCETDFSGYPDCRDSFVKSLNVTLNLSMDHEFVIHTPLMWLDKKETWKLADELGAFDYVRERTLTCYNGLKGSGCGECPACTLRQNGLDQYIEEKGGSVQ

SEQ ID NO: 37999 - protein, 220 aa, unidentified
  source 1..220: note = Domibacillus mangrovi
  REGION 1..220: note = tr|A0A1Q5NZW4|A0A1Q5NZW4_9BACI 7-cyano-7-deazaguanine synthase OS=Domibacillus mangrovi; OX = 1714354 GN=queC PE=3 SV=1
MLKDEKAVVVFSGGQDSTTCLFWAKQTFKDVIAVTFDYGQRHDAEINVAKEIAAHLDVPHHILNMGLLNQLAPSALTRTDIAIEEREGEPPSTFVEGRNLLFVSFAAILGKQFDARHIVTGVCETDFSGYPDCRDSFVKSLNVTLNLSMDYEFVIHTPLMWLDKKETWALADQLGAFAYVCENTLTCYNGVKGSGCGECPACKLRQNGLDQYLEQKGGNV

SEQ ID NO: 38000 - protein, 233 aa, Donghicola sp.
  REGION 1..233: note = tr|A0A1M4N1Z5|A0A1M4N1Z5_9RHOB 7-cyano-7-deazaguanine synthase OS=Donghicola sp. KarMa; OX = 1779855 GN=queC PE=3 SV=1
MKTIVICSGGLDSVSLAHMVADQHELTRLVSFDYGQRHRKELDYAALAATRLGVPHDIIDMRTIGAALTGSALTDDIDVPDGHYAEETMKITVVPNRNAIMLTIAFGVAAANGDQAVATAVHGGDHFIYPDCRPAFAEAFNTMQKAALDGYADVSLYTPFVHRTKADIVTEGAKHNTPFAETWSCYKGGAHHCGRCGTCVERREAFHLAGVADPTVYDDPDFWQAAISAHEGK

SEQ ID NO: 38001 - protein, 240 aa, unidentified
  source 1..240: note = Donghicola tyrosinivorans
  REGION 1..240: note = tr|A0A2T0WAS4|A0A2T0WAS4_9RHOB 7-cyano-7-deazaguanine synthase OS=Donghicola tyrosinivorans OX=1652492 GN=queC PE=3 SV=1
MSRSALVLFSGGQDSTTCLAWALSRFERVETIGFDYGQKHIVEMTCRDTILGRIGGLRANWSERLGEDHLIDLGILGQISETALTQDMAIAIAEDGLPNTFVPGRNLLFLTLAAAVAYRRGIRHLVGGMCETDFSGYPDCRDDTIKALQVTLNLGMDKRFVIDTPLMWLDKAATWQLAEEVGGTNLVDLILEGSHTCYTGDRSHLHDWGYGCGECPACRLRAKGYENFRSRNATFTGRRE

SEQ ID NO: 38002 - protein, 236 aa, unidentified
  source 1..236: note = Donghicola tyrosinivorans
  REGION 1..236: note = tr|A0A2T0WFY8|A0A2T0WFY8_9RHOB 7-cyano-7-deazaguanine synthase OS=Donghicola tyrosinivorans OX=1652492 GN=queC PE=3 SV=1
MKTIVICSGGLDSVSLAHMVADQHTLTRLVSFDYGQRHRKELDYAARAATRLGVPHDIIDMRPIGAALTGSALTDNIDVPDGHYAEETMKITVVPNRNAIMLAIAFGVAAANKDDAVATAVHGGDHFIYPDCRPAFTQAFEVMQKAALDGYADVSLYTPFVHRSKADIVTEGAKHNTPFADTWSCYKGGAHHCGRCGTCVERREAFHLAGVQDPTIYEDPDFWEKAVADAAAKGVK

SEQ ID NO: 38003 - protein, 227 aa, Dorea longicatena
  REGION 1..227: note = tr|A0A564UF02|A0A564UF02_9FIRM 7-cyano-7-deazaguanine synthase OS=Dorea longicatena; OX = 88431 GN=queC PE=3 SV=1
MKALVLFSGGIDSTTALGLAIKKYGKDQVIALSVSYGQKHDKEIKAAIAVAQYYGVEHLFLDLSKIFQYSNCSLLQQSTEDIPEESYAEQISKTNGDKPVSTYVPFRNGLFLSSAASIALSKDCEVIYYGAHADDSAGFAYPDCSSVFNQAMNEAIWEGSGHQLKIEAPFVNVSKAEVVRIGLELGVPYELTWSCYEGGEKPCGKCGTCIDRAAAFQANHMEDPALR

SEQ ID NO: 38004 - protein, 227 aa, Dorea longicatena
  REGION 1..227: note = tr|A0A3E5GDB2|A0A3E5GDB2_9FIRM 7-cyano-7-deazaguanine synthase OS=Dorea longicatena; OX = 88431 GN=queC PE=3 SV=1
MKALVLFSGGIDSTTALGLAIKKYGKDQVIALSVSYGQKHDKEIKAAIAVAQYYGVEHLFLDLSKIFQYSNCSLLQQSTEDIPEESYAEQISKTNGDKPVSTYVPFRNGLFLSSAASIALSKDCEVIYYGAHADDSAGFAYPDCSPVFNQAMNEAIWEGSGHQLKIEAPFVNVSKAEVVRIGLELGVPYELTWSCYEGGEKPCGKCGTCIDRAAAFQANQMEDPALR

SEQ ID NO: 38005 - protein, 230 aa, Dorea sp.
  REGION 1..230: note = tr|R9N8B3|R9N8B3_9FIRM 7-cyano-7-deazaguanine synthase OS=Dorea sp. 5-2 OX=1235798 GN=queC PE=3 SV=1
MKVLVLSSGGIDSTVCLALAVEKYGYENVLSLSVSYGQKHSNELKAAQRIAQHYHVRHKELDMGMIFAGSDCTLLEGRGEIPKGTYASQLQESTGKPVSTYVPFRNGLFLAAAASVALADGCEKIYYGAHADDSAGNAYPDTSEAFHDAISRAVYEGSGKQLEIEAPFLCSHKADVVRTGMRLQAPFAFTWSCYEGGEKPCGKCATCLDRRKAFELNEIQDPAEYEEEKK

SEQ ID NO: 38006 - protein, 223 aa, unidentified
  source 1..223: note = Draconibacterium sediminis
  REGION 1..223: note = tr|A0A0D8JB62|A0A0D8JB62_9BACT 7-cyano-7-deazaguanine synthase OS=Draconibacterium sediminis OX=1544798 GN=queC PE=3 SV=1
MTFIDKKKALVVFSGGQDSTTCLFWAKREFEEVYAIAFNYGQRHAVELESAKTIAETAGVPLQVFPMDLISQLSRNSLTYHSMQVDRNKPEDTPPNTLVEGRNMLFLTYAAIFAKVHNIHHLVTGVGQADFSGYPDCRNDFIVSLNETLNLSMDYPYQIHTPLMWKNKSEIWQLADELGVFDLVQNETVTCYNGIKGVGCGECPACELRNKGLEKYLEKKENT

SEQ ID NO: 38007 - protein, 252 aa, unidentified
  source 1..252: note = Drancourtella sp.
  REGION 1..252: note = tr|A0A1Z7M4Z5|A0A1Z7M4Z5_9FIRM TIGR00268 family protein OS=Drancourtella sp. An12 OX=1965548; GN = B5E64_07280 PE=4 SV=1
MTLEEFFCEVPKAAVAFSGGTDSAFLLWAAKQYGCDVHAYYMKTAFQPDFEMEDARRVVEELGIPMTVLEKDILSVQEAAANGPKRCYYCKRALFSQLWAAARKDGYFCLLDGTNASDDADDRPGMQAIRELEVRSPLRECGIPKSEVRRLSEEAGLFTSRKPAYACLATRIPTGTAITPELLKKAETAETALANLGFHDFRVRLMEDGGARLQITEEQMPLLFSKREEILTILRPFFSSILLDLEARAKSV

SEQ ID NO: 38008 - protein, 252 aa, unidentified
  source 1..252: note = Drancourtella sp.
  REGION 1..252: note = tr|A0A1Y3WIK1|A0A1Y3WIK1_9FIRM TIGR00268 family protein OS=Drancourtella sp. An57 OX=1965647; GN = B5G11_04725 PE=4 SV=1
MTLEEFFCEVPKAAVAFSGGTDSAFLLWAAKQYGCDVHAYYMKTAFQPEFEMEDARRVVEALNIPMTVLEKDILAVPEAAANGPKRCYYCKRALFTQLWAAARKDGYFCLLDGTNASDDADDRPGMQAIRELEVRSPLRECGISKSEVRRLSEEAGLFTSRKPAYACLATRIPTGTAITPELLKKAETAETALANLGFHDFRVRLMEDGGARLQITEEQMPLLFSKREEILTILRPLFSSILLDLEARAKSV

SEQ ID NO: 38009 - protein, 235 aa, unidentified
  source 1..235: note = Duganella phyllosphaerae
  REGION 1..235: note = tr|A0A1E7WYG0|A0A1E7WYG0_9BURK 7-cyano-7-deazaguanine synthase OS=Duganella phyllosphaerae OX=762836 GN=queC PE=3 SV=1
MLPTDSALVLFSGGQDSTTCLAWALKHYARVETIGFDYGQRHAVELTVRPQLIASLRALNPAWDARLGEDHMIDLSLISRISQTAMTHDIAIETQANGLPNTFVPGRNLLFMTVAATVAYRRGLTVLVGGMCETDFSGYPDCRDDTMKALQVALNLGMDTRTKLETPLMWRDKRQTWELAQDLGGTPLVDLIRSGTHTCYLGERGALHDWGYGCGTCPACELRARGYRQFTGTGN

SEQ ID NO: 38010 - protein, 235 aa, unidentified
  source 1..235: note = Duganella sacchari
  REGION 1..235: note = tr|A0A1M7QWN8|A0A1M7QWN8_9BURK 7-cyano-7-deazaguanine synthase OS=Duganella sacchari; OX = 551987 GN=queC PE=3 SV=1
MLPTDTALVLFSGGQDSTTCLAWALKHYARVETIGFDYGQRHAVELTVRPQLLQSLRGQSADWNARLGEDHMIDLSLISAISQTAMTHDIAIETQANGLPNTFVPGRNLLFMTVAATVAYRRGLTVLVGGMCETDFSGYPDCRDDTMKALQVALNLGMDTRIKLETPLMWRDKKQTWELAQELGGQQLVDLIRSGTHTCYLGERGALHDWGYGCGTCPACALRARGYHQFVGAEV

SEQ ID NO: 38011 - protein, 235 aa, Duganella sp.
  REGION 1..235: note = tr|A0A0Q5CLN7|A0A0Q5CLN7_9BURK 7-cyano-7-deazaguanine synthase OS=Duganella sp. Leaf126; OX = 1736266 GN=queC PE=3 SV=1
MLPTDSALVLFSGGQDSTTCLAWALKHYARVETIGFDYGQRHAVELTVRPQLLASLRALDPAWDAKLGEDHMIDLSLISRISQTAMTHDIAIETQANGLPNTFVPGRNLLFMTVAATVAYRRGLTVLVGGMCETDFSGYPDCRDDTMKALQVALNLGMDTRTKLETPLMWRDKRQTWELAQELGGAALVDLIRAGTHTCYLGERGALHDWGYGCGACPACELRARGYRQFVNAGH

SEQ ID NO: 38012 - protein, 235 aa, Duganella sp.
  REGION 1..235: note = tr|A0A1E7V1Y3|A0A1E7V1Y3_9BURK 7-cyano-7-deazaguanine synthase OS=Duganella sp. HH105; OX = 1781067 GN=queC_2 PE=3 SV=1
MLPTDSALVLFSGGQDSTTCLAWALKHYARVETIGFDYGQRHAVELTVRPSVIASLRAHSPEWNAKLGEDHMIDLSLISEISQTAMTHDIAIETQANGLPNTFVPGRNLLFMTVAATVAYRRGLTVLVGGMCETDFSGYPDCRDDTMKALQVALNLGMDTRLKLETPLMWRDKRQTWELAQELGGQALVDLIRDGTHTCYLGERGALHDWGYGCGTCPACALRARGYRQFAGSEV

SEQ ID NO: 38013 - protein, 215 aa, unidentified
  source 1..215: note = Duncaniella muris
  REGION 1..215: note = tr|A0A2V1IQT9|A0A2V1IQT9_9BACT 7-cyano-7-deazaguanine synthase OS=Duncaniella muris; OX = 2094150 GN=queC PE=3 SV=1
MAKDTLLVLSGGMDSTTMLWDYADTIAAAVTFQYGSNHNRREAECARWNCERLGIRWIEIDLEFMGRYFKSSLLSGADEIPEGHYADDNMRSTVVPFRNGIMLAVAAGLAESMELKKVMIANHSGDHAIYPDCRPEFVRSMGAAISDGTYEHLELLAPYTDMTKGEIALRGKNLGVDYSHTYSCYKGGEHHCGKCGTCVERREALEFAGIVLDND

SEQ ID NO: 38014 - protein, 215 aa, unidentified; identical to SEQ ID NO: 38013
  source 1..215: note = Duncaniella sp.
  REGION 1..215: note = tr|A0A4P7VZH5|A0A4P7VZH5_9BACT 7-cyano-7-deazaguanine synthase OS=Duncaniella sp. C9; OX = 2530392 GN=queC PE=3 SV=1

SEQ ID NO: 38015 - protein, 216 aa, unidentified
  source 1..216: note = Duncaniella sp.
  REGION 1..216: note = tr|A0A4Z0V761|A0A4Z0V761_9BACT 7-cyano-7-deazaguanine synthase OS=Duncaniella sp. TLL-A3; OX = 2530391 GN=queC PE=3 SV=1
MQGKEYLLVLSGGMDSVTMLYDYRERIAAAVTFQYGSNHNRREAHYARLNCERLGIEWIEIDLTFMASHFSSSLLEGADAIPEGSYDDENMKSTVVPFRNGIMLAVAAGLAESRGLAGVMIANHSGDHAIYPDCRPEFIRSMGAAIADGTYEHLELFAPYTSLSKGEIARRGKELGVDYSLTYSCYKGGEKHCGKCGTCVERAEALRYAGIVLNDD

SEQ ID NO: 38016 - protein, 228 aa, Dyella japonica
  REGION 1..228: note = tr|A0A075JZW4|A0A075JZW4_9GAMM 7-cyano-7-deazaguanine synthase OS=Dyella japonica A8; OX = 1217721 GN=queC PE=3 SV=1
MTQTSPRKAVVLVSGGMDSAVTIAIAREQGYQVHSLSVAYGQRHSAELAASERVSRLLGAVEHKTVHVDLRTIGGSALTADIDVPLDQTGEQGIPVTYVPARNTIMLSIALGWAEVLGSNDIWCGVNAVDYSGYPDCRPAFIEAFEQLANVATKAGVEGAGIRIHAPLMRMSKADIAREGQRLGVDFSETVSCYQADAEGRACGHCDACRLRAQGFSAAGLPDPTRYA

SEQ ID NO: 38017 - protein, 228 aa, Dyella japonica
  REGION 1..228: note = tr|A0A0G9H681|A0A0G9H681_9GAMM 7-cyano-7-deazaguanine synthase OS=Dyella japonica DSM 16301 OX=1440762 GN=queC PE=3 SV=1
MSQATPRKAVVLVSGGMDSAVTIAIAREQGFQVHALSVAYGQRHSAELAASERVSGLLGAVEHKTVQVDLRTIGGSALTADIDVPLDQTGEQGIPVTYVPARNTIMLSIALGWAEVLGSTDIWCGVNAVDYSGYPDCRPAFIEAFEQLANVATKAGVEGAGIRIHAPLMRMGKADIAREGQRLGVDFSETVSCYQADAQGRACGHCDACVLRAQGFKAAGLPDPTRYA

SEQ ID NO: 38018 - protein, 228 aa, unidentified
  source 1..228: note = Dyella jiangningensis
  REGION 1..228: note = tr|A0A328P3R7|A0A328P3R7_9GAMM 7-cyano-7-deazaguanine synthase OS=Dyella jiangningensis; OX = 1379159 GN=queC PE=3 SV=1
MSQSSPRKAVVLVSGGMDSAVTIAIAREQGYQVHALSVAYGQRHSAELAASERVSRMLGAVEHKTVQVDLRSIGGSALTADIDVPLDQTGDAGIPVTYVPARNTIMLSIALGWAEVLGSTDIWCGVNAVDYSGYPDCRPAFIESFEQLANVATKAGVEGAGIRIHAPLMRMSKADIAREGQRLGVDFSETVSCYQADAEGRACGHCDACHLRAQGFKTAGLPDPTRYI

SEQ ID NO: 38019 - protein, 228 aa, unidentified
  source 1..228: note = Dyella jiangningensis
  REGION 1..228: note = tr|A0A023NVN1|A0A023NVN1_9GAMM 7-cyano-7-deazaguanine synthase OS=Dyella jiangningensis; OX = 1379159 GN=queC PE=3 SV=1
MSQSSPRKAVVLVSGGMDSAVTIAIAREQGYQVHALSVAYGQRHSAELAASERVSRMLGAVEHKTVQVDLRSIGGSALTADIDVPLDQTGDSGIPVTYVPARNTIMLSIALGWAEVLGSADIWCGVNAVDYSGYPDCRPAFIESFEQLANVATKAGVEGAGIRIHAPLMRMSKADIAREGQRLGVDFSETVSCYQADAEGRACGHCDACHLRAQGFKMAGLPDPTRYA

SEQ ID NO: 38020 - protein, 234 aa, Dyella marensis
  REGION 1..234: note = tr|A0A1I2FEY8|A0A1I2FEY8_9GAMM 7-cyano-7-deazaguanine synthase OS=Dyella marensis; OX = 500610 GN=queC PE=3 SV=1
MSPMSQTSLPRAVVLVSGGMDSAVTIAIAREQGYQVHALSVAYGQRHSSELEASARVSRLLGAVEHKTVQVDLRSIGGSALTADIDVPLDADLHGDSGGIPITYVPARNTIMLSIALGWAEVLGSSDIWCGVNAVDYSGYPDCRPAFIEAFESLANVATKAGVEGAGIRVHAPLMRMSKADIAREGARLGVDFSETVSCYQADAQGRACGHCDACRLRAQGFRDAGLADPTRYA

SEQ ID NO: 38021 - protein, 228 aa, Dyella soli
  REGION 1..228: note = tr|A0A4R0YFB4|A0A4R0YFB4_9GAMM 7-cyano-7-deazaguanine synthase OS=Dyella soli OX=522319; GN = queC PE=3 SV=1
MSQESPRKAVVLVSGGMDSAVTIALAREQGYQVHALSVAYGQRHSAELAASERVSRALGAVEHKTVQVDLRTIGGSALTADIDVPVDQAGDVGIPVTYVPARNTIMLSIALGWAEVLGSTDIWCGVNAVDYSGYPDCRPAFIEAFEQLANVATKAGVEGAGIRVHAPLMRMSKADIAREGQRLGVDFSITVSCYQADAEGLACGHCDACRLRAQGFVAAGLPDPTRYA

SEQ ID NO: 38022 - protein, 228 aa, Dyella soli
  REGION 1..228: note = tr|A0A4R0YS30|A0A4R0YS30_9GAMM 7-cyano-7-deazaguanine synthase OS=Dyella soli OX=522319; GN = queC PE=3 SV=1
MSDATPKKAVILVSGGMDSAVTIAIAREQGYQVHALSVAYGQRHSSELEASERVSRMLGAVEHKTVNVDLRSIGGSALTADIDVPEEGGEGIPVTYVPARNTIMLSIALGWAEVLGSTDIWCGVNAVDYSGYPDCRPAFVEAFEALANVATKAGVEGAGIRIHAPLMQMSKADIAREGLRLGVDFSQTVSCYQADAQGRACGHCDACRLRAEGFQRAGIPDPTHYVPA

SEQ ID NO: 38023 - protein, 226 aa, Dyella sp.
  REGION 1..226: note = tr|A0A370XAG6|A0A370XAG6_9GAMM 7-cyano-7-deazaguanine synthase OS=Dyella sp. 4MSK11; OX = 1927960 GN=queC PE=3 SV=1
MSGPTSRKAVILVSGGMDSAVTLAIAREQGYQIHALSVNYGQRHSSELEAAARVAHMLGAVEHKTVHVDLRSIGGSALTADIDVPEEGGEGIPVTYVPARNTIMLSIALGWAEVLGSNDIWCGVNAVDYSGYPDCRPAFVEAFERLANLATKAGVEGAAIRVHAPLIAMSKADIAREGQRLGVDFSATVSCYQADAEGRACGHCDACRLRAQGFRQAGLPDPTRYV

SEQ ID NO: 38024 - protein, 228 aa, Dyella sp.
  REGION 1..228: note = tr|A0A370KDZ8|A0A370KDZ8_9GAMM 7-cyano-7-deazaguanine synthase OS=Dyella sp. DHG54; OX = 1920168 GN=queC PE=3 SV=1
MSPSSPRKAVVLVSGGMDSAVTIAIAREQGYQVHALSVAYGQRHSAELEASERVSRLLGAIEHKTVQVDLRTIGGSALTADIDVPLDRADEQGIPVTYVPARNTIMLSIALGWAEVLGSTDIWCGVNAVDYSGYPDCRPAFIEAFEQLANVATKAGVEGAGIRVHAPLMRMSKADIAREGQRLGVDFAETVSCYQADAQGRACGHCDACRLRAQGFAAAGLPDPTRYA

SEQ ID NO: 38025 - protein, 227 aa, Dyella thiooxydans
  REGION 1..227: note = tr|A0A160N289|A0A160N289_9GAMM 7-cyano-7-deazaguanine synthase OS=Dyella thiooxydans; OX = 445710 GN=queC PE=3 SV=1
MSDNTLPRAVVLVSGGMDSAVTIAIAREQGYQVHALSVAYGQRHSSELEASARVARMLGAVEHKTVHVDLRSIGGSALTADIDVPLDQESTGIPVTYVPARNTIMLSIALGWAEVLGSRDIWCGVNAVDYSGYPDCRPAFIEAFEKLANVATKAGVEGQGLRVHAPLMSMSKADIAREGQRLGVDFAETVSCYQADAQGRACGHCDACRLRAQGFRDAGLPDPTRYV

SEQ ID NO: 38026 - protein, 229 aa, unidentified
  source 1..229: note = Dysgonamonadaceae bacterium
  REGION 1..229: note = tr|A0A2N4S7A8|A0A2N4S7A8_9BACT 7-cyano-7-deazaguanine synthase OS=Dysgonamonadaceae bacterium OX=2065189 GN=queC PE=3 SV=1
MNEYKNEDALVLFSGGQDSTTCLFWAKQNFRNVHTLCFSYGQRHSQEVKNAECIAAMANVSFQVLDATIISHLAPNSLTDNTMVMDEEKPADSYPNTFVPGRNMLFLTFAATIAYARNIRHLVTGVSEADYSGYPDCRDTFIKSVNATLNLAMDRQFVIHTPLMWRNKKQVWQLADELGVFDLVRNETLTCYNGIIADGCGHCPACKLRNKGLQEYLAERKLQSNYSDH

SEQ ID NO: 38027 - protein, 222 aa, unidentified
  source 1..222: note = Dysgonomonas alginatilytica
  REGION 1..222: note = tr|A0A2V3PTC1|A0A2V3PTC1_9BACT 7-cyano-7-deazaguanine synthase OS=Dysgonomonas alginatilytica OX=1605892 GN=queC PE=3 SV=1
MKSTESALVLFSGGQDSTTCLFWALKHFSSVRTLCFTYGQRHSQEVEIAEGIAQRAGVPFQKLDASIISHLSTNSLTDNTVVMDKEKPADAYPNTFVPGRNLLFLTFAAVIARSHGIRHIVTGVSEADYSGYPDCRDTFIMSANTSINLAMDEHFQIHTPLMWRDKTAVWQLSDQLGVFDLIRNETLTCYNGIPADGCGECPSCQLRKQGLENYLKIRKQNH

SEQ ID NO: 38028 - protein, 221 aa, Dysgonomonas capnocytophagoides
  REGION 1..221: note = tr|A0A4Y8L1U9|A0A4Y8L1U9_9BACT 7-cyano-7-deazaguanine synthase OS=Dysgonomonas capnocytophagoides OX=45254 GN=queC PE=3 SV=1
MNSKEPALVLFSGGQDSTTCLFWALKHFSSVRTLCFTYGQRHSKEVEIAEGIASRAGVPFQKLDASIISQLSSNSLTDSNVVMDKEKPADAYPNTFVPGRNLLFLTFAAVIARSHGIRHIVTGVSEADYSGYPDCRDTFILSANASINLAMDEHFQIHTPLMWRDKTAVWQLADELGAFDLIRNETLTCYNGIPADGCGECPSCKLRKHGLDEYLKIRESK

SEQ ID NO: 38029 - protein, 221 aa, Dysgonomonas gadei
  REGION 1..221: note = tr|F5IZ44|F5IZ44_9BACT 7-cyano-7-deazaguanine synthase OS=Dysgonomonas gadei ATCC BAA-286 OX=742766; GN = queC PE=3 SV=1
MNKKEPALVLFSGGQDSTTCLYWAIENFSSVRTLCFTYGQRHSKEVEVAQSIAGHAGVPFQLLDASIISQLSVNSLTSDIVMDQEKPADSYPNTFVPGRNLLFLTFAAVIARSHGIRHIVTGVSEADYSGYPDCRDTFILSANASINLAMDEHFQIHTPLMWRDKTAVWQLADQLGVFDVVRTQTLTCYNGIIADGCGHCPACKLRKQGLENYLKIKGQWE

SEQ ID NO: 38030 - protein, 221 aa, unidentified
  source 1..221: note = Dysgonomonas macrotermitis
  REGION 1..221: note = tr|A0A1M4Y919|A0A1M4Y919_9BACT 7-cyano-7-deazaguanine synthase OS=Dysgonomonas macrotermitis OX=1346286 GN=queC PE=3 SV=1
MNSKESALVLFSGGQDSTTCLFWALKNFSSVRTLCFTYGQRHSLEVEIAEGIASRANVPFQKLDASIISRLSTNSLTDANVVMDKEKPADAYPNTFVPGRNLLFLTFAAVIARSHGIRHIVTGVSEADYSGYPDCRDTFIMSANTSINLAMDEHFEIHTPLMWRDKTAVWQLADELGVFDLIRNETLTCYNGIPADGCGECPSCKLRKQGLDNYLKIKENK

SEQ ID NO: 38031 - protein, 218 aa, Dysgonomonas mossii
  REGION 1..218: note = tr|F8X4P8|F8X4P8_9BACT 7-cyano-7-deazaguanine synthase OS=Dysgonomonas mossii DSM 22836 OX=742767; GN = queC PE=3 SV=1
MNKKESALVLFSGGQDSTTCLYWALENFSSVRTLCFTYGQRHSKEVEVAKSIAEKANVPFQLLDASIISQLSVNSLTSDIVMDQEKPADSYPNTFVPGRNLLFLTFAAVIARSHGIRHIVTGVSEADYSGYPDCRDTFILSANASINLAMDEHFQIHTPLMWRDKTAVWQLADELGVFDIIRTQTLTCYNGIIADGCGHCPSCKLRKQGLNNYLKTKL

SEQ ID NO: 38032 - protein, 218 aa, Dysgonomonas mossii
  REGION 1..218: note = tr|A0A4Y9IPK9|A0A4Y9IPK9_9BACT 7-cyano-7-deazaguanine synthase OS=Dysgonomonas mossii; OX = 163665 GN=queC PE=3 SV=1
MNKTESALVLFSGGQDSTTCLYWALENFSSVRTLCFTYGQRHSKEVEVAKAIAEKANVPFQLLDASIISQLSVNSLTSDIVMDQEKPADSYPNTFVPGRNLLFLTFAAVIARSHGIRHIVTGVSEADYSGYPDCRDTFILSANASINLAMDEHFQIHTPLMWRDKTAVWQLADELGVFDIIRTQTLTCYNGIIADGCGHCPSCKLRKQGLDNYLKTKL

SEQ ID NO: 38033 - protein, 221 aa, Dysgonomonas sp.
  REGION 1..221: note = tr|A0A3D3TFI3|A0A3D3TFI3_9BACT 7-cyano-7-deazaguanine synthase OS=Dysgonomonas sp.; OX = 1891233 GN=queC PE=3 SV=1
MKSKESALVLFSGGQDSTTCLFWAIKEFESVRTLCFTYGQRHSKEVEIARNIAHQANVPFQMLDASIISQLSVNSLTDVNVVMDSEKPEDNYPNTFVPGRNLLFLTFAAVIARSHGIRHIVTGVSEADYSGYPDCRDTFIMSANTSINLAMDEHFQIHTPLMWRDKTAVWELADELGVFALIRDKTLTCYNGIIADGCGECPSCRLRKQGLDNYLKIKNHT

SEQ ID NO: 38034 - protein, 218 aa, Dysgonomonas sp.
  REGION 1..218: note = tr|A0A1M3L734|A0A1M3L734_9BACT 7-cyano-7-deazaguanine synthase OS=Dysgonomonas sp. 37-18; OX = 1895907 GN=queC PE=3 SV=1
MNKTESALVLFSGGQDSTTCLYWALENFASVRTLCFTYGQRHSKEVEVANAIAEKANVPFQLLDASIISQLSVNSLTSDIVMDQEKPADSYPNTFVPGRNLLFLTFAAVIARSHGIRHIVTGVSEADYSGYPDCRDTFILSANASINLAMDEHFQIHTPLMWRDKTAVWQLADELGVFDIIRTQTLTCYNGIIADGCGHCPSCKLRKQGLDNYLKTKL

SEQ ID NO: 38035 - protein, 238 aa, Ectothiorhodosinus mongolicus
  REGION 1..238: note = tr|A0A1R3W2Z8|A0A1R3W2Z8_9GAMM 7-cyano-7-deazaguanine synthase OS=Ectothiorhodosinus mongolicus OX=233100 GN=queC PE=3 SV=1
MAAEALVAGAKPAVVLLSGGMDSATVLALAKAEGFACHCLSFRYGQRHSVELMAAQQLASELGAAEHRIVDLDLSLFGGSALTDASIAVPETPGEGIPVTYVPARNTIFLSIALAWAEVLGARDIFIGVNAVDYSGYPDCRPEFIRAFEAMAQLATRQGVEGAGPCFRTPLIDLSKAQIIRQGVALGVDFSKTVSCYQADHEGRACGVCDACRLRAKGFADVEMADNTRYRSQPPATS

SEQ ID NO: 38036 - protein, 225 aa, Ectothiorhodospira haloalkaliphila
  REGION 1..225: note = tr|W8KMT5|W8KMT5_9GAMM 7-cyano-7-deazaguanine synthase OS=Ectothiorhodospira haloalkaliphila OX=421628; GN = queC PE=3 SV=1
MTMKNAVVLLSGGMDSATVLALARAEGFDCHCLSFRYGQRHHAELVAAAELAQSLGAADHRVVDLNLGLFGGSALTDQAIQVPDAPSNGIPVTYVPARNTVFLSIALAWAEVLDARDIFIGVNAVDYSGYPDCRPEFIQAFETMANLATKAGVGGDHCHIRTPLIDLSKAEIIRQGVGAGVDFARTVSCYSADDQGRACGLCDACRLRARGFADAGLPDTTRYRL

SEQ ID NO: 38037 - protein, 223 aa, Ectothiorhodospira magna
  REGION 1..223: note = tr|A0A1H8ZB93|A0A1H8ZB93_9GAMM 7-cyano-7-deazaguanine synthase OS=Ectothiorhodospira magna OX=867345 GN=queC PE=3 SV=1
MKNALVLLSGGMDSATVLALARAEGFACHCLSVRYGQRHSAELAAAAELAHSLGAADHRVVDLNLGLFGGSALTDDSIQVPDQRSEGIPVTYVPARNTVFLAVALAWAEVLQARDLFIGVNAVDYSGYPDCRPEFIQAFETLANLATKAGVEGDRIRIRTPLIHLTKAEIIRRGIGAGVDFSRTVSCYSADSQGRACGTCDACHLRAKGFADAGIADVTRYQP

SEQ ID NO: 38038 - protein, 223 aa, Ectothiorhodospira marina
  REGION 1..223: note = tr|A0A1H7HKW5|A0A1H7HKW5_9GAMM 7-cyano-7-deazaguanine synthase OS=Ectothiorhodospira marina OX=1396821 GN=queC PE=3 SV=1
MKNAVVLLSGGMDSATVLALARAKGFDCHCLSFRYGQRHHAELVAAAELAQSLGAADHRVVDLNLGLFGGSALTDQAIQVPDAPSDGIPVTYVPARNTVFLSIALAWAEVLDARDIFIGVNAVDYSGYPDCRPEFIQAFEIMANLATKAGVGGDQCHIRTPLIDLTKAEIIRQGVEAGVDFARTVSCYSADDQGRACGVCDACRLRARGFAEAGLPDTTRYRP

SEQ ID NO: 38039 - protein, 222 aa, Ectothiorhodospira mobilis
  REGION 1..222: note = tr|A0A1I4RDH7|A0A1I4RDH7_ECTMO 7-cyano-7-deazaguanine synthase OS=Ectothiorhodospira mobilis OX=195064 GN=queC PE=3 SV=1
MKQAVVLLSGGMDSATVLALARAEGFACHCLSFRYGQRHQAELQAAADLARALGAVDHRVVDLNLALFGGSALTDEAIQVPETPGQGIPVTYVPARNTVFLSIALAWAEVLQARDLFIGVNAVDYSGYPDCRPAFIEAFETMANLATKAGVEGDRFHIRTPLMQLSKAEIIRRGTAAGVDFARTVSCYQADDQGRACGVCDACRLRARGFAEAGLPDPTRYR

SEQ ID NO: 38040 - protein, 223 aa, Ectothiorhodospira sp.
  REGION 1..223: note = tr|H1G0Y8|H1G0Y8_9GAMM 7-cyano-7-deazaguanine synthase OS=Ectothiorhodospira sp. PHS-1 OX=519989 GN=queC; PE = 3 SV=1
MNNAVVLLSGGMDSATVLALARAEGFTCHCLSFRYGQRHSAELAAAVELAHALGATDHRVVDLNLGLFGGSALTDETIQVPDQLSDGIPVTYVPARNTVFLAVALAWAEVLKARDLFIGVNAVDYSGYPDCRPEFIQAFETMANLATKAGVEGDRIRIRTPLIDLSKAEIIRRGVATGVDFSRTVSCYSADAEGRACGTCDACRLRAKGFADAGIPDMTRYRS

SEQ ID NO: 38041 - protein, 225 aa, Ectothiorhodospira sp.
  REGION 1..225: note = tr|A0A166ZZ43|A0A166ZZ43_9GAMM 7-cyano-7-deazaguanine synthase OS=Ectothiorhodospira sp. BSL-9 OX=1442136 GN=queC PE=3 SV=1
MTMKNAVVLLSGGMDSATVLALARAQGFDCHCLSFRYGQRHHAELVAAAELAQSLDAADHRVVDLNLGLFGGSALTDQAIQVPDAPSDGIPVTYVPARNTVFLSIALAWAEVLDARDIFIGVNAVDYSGYPDCRPEFIQAFETMANLATKAGVGGDHCHIRTPLIDLSKAEIIRQGVEAGVDFARTVSCYSADDQGRACGLCDACRLRARGFADAGLPDTTRYRS

SEQ ID NO: 38042 - protein, 230 aa, unidentified
  source 1..230: note = Ectothiorhodospiraceae bacterium
  REGION 1..230: note = tr|A0A2E0UMT1|A0A2E0UMT1_9GAMM 7-cyano-7-deazaguanine synthase OS=Ectothiorhodospiraceae bacterium OX=2026737 GN=queC PE=3 SV=1
MSAKPLAIVLASGGMDSCVTIAMAAKSYELALLHVNYGQRTQDRELHAFTAIADHYEVPEDRRLVISIEHLAKIGGSSLTDNTIEIPSADPGAVHAASSIPNTYVPFRNANMLSIAVSWAEVLGAEALFIGAVEEDSSGYPDCREEFYVAYQRVIESGTKYERPLKIHTPLIHLAKSEIISQGLELGAPLHLTWSCYRNSDTACGTCESCRLRLRGFEQAGVEDPVEYAW

SEQ ID NO: 38043 - protein, 243 aa, unidentified
  source 1..243: note = Ectothiorhodospiraceae bacterium
  REGION 1..243: note = tr|A0A2A4X8U3|A0A2A4X8U3_9GAMM 7-cyano-7-deazaguanine synthase OS=Ectothiorhodospiraceae bacterium OX=2026737 GN=queC PE=3 SV=1
MSTKKNAVVLLSGGLDSATTLVMAKAEGYSCYALSFDYGQRHRAELHAAAKLANKLGVVEYRVAPLDLRAIGGSALTDESIDVPTASTIIPSSGDSMEDGVGQGETSIIPVTYVPARNTIFLSYALAWAEVLEAEHIFIGVNAVDYSGYPDCRPEYIKAFQTMASLATKAGVEGHPTHIHTPLIQLSKADIIRKGLSLGLGYGDTISCYDADDQGRACGQCDSCHLRAAGFAEAGVNDPTLYR

SEQ ID NO: 38044 - protein, 222 aa, unidentified
  source 1..222: note = Edaphobacillus lindanitolerans
  REGION 1..222: note = tr|A0A1U7PPW5|A0A1U7PPW5_9BACI 7-cyano-7-deazaguanine synthase OS=Edaphobacillus lindanitolerans OX=550447 GN=queC PE=3 SV=1
MLQHEKALVVFSGGQDSTTCLLWARQQFAEVEAVTFDYGQRHELEIECAREIAGELGVRHHVLDMSLLGQLAPNALTDTGLEIQDGEDGGLPSTFVPGRNLLFLSFAGVLAGQIGAKHLVTGVSETDFSGYPDCRDAFIKSLNVTLNLAMDEPYAIHTPLMWLDKAGVWELADELGALEFVRVKTLTCYNGVKADGCGDCPACRLRRKGLQQYQAQKAQPAR

SEQ ID NO: 38045 - protein, 230 aa, Edaphobacter aggregans
  REGION 1..230: note = tr|A0A3R9QCM5|A0A3R9QCM5_9BACT 7-cyano-7-deazaguanine synthase OS=Edaphobacter aggregans; OX = 570835 GN=queC PE=3 SV=1
MTDTALPRAVVSLSGGMDSVVCAALASRDFETYAVHFSYGQRTENRELLAAQDAVRILGIRELLHLKLDVFRRIGGSALTDKSIPVPNAPAHESDIGTDIPVTYVPFRNAHFLSAAVSWAEVLGAKTVFIGAVEQDSSGYPDCRPAYYDAFNQLIREGTKEGDIQVVTPLIHLKKHEIVRLGVELGAPFHVSWSCYSGETEACGVCESCVLRLRAFREAGAVDPILYATP

SEQ ID NO: 38046 - protein, 238 aa, unidentified
  source 1..238: note = Edaphobacter dinghuensis
  REGION 1..238: note = tr|A0A495BWD1|A0A495BWD1_9BACT 7-cyano-7-deazaguanine synthase OS=Edaphobacter dinghuensis OX=1560005 GN=queC PE=3 SV=1
MTKMTTTEITTDSVRPRAVVCLSGGMDSCVCAALAARDYDVYALHFSYGQRTEGRELRSAEEVARIVGARELLPLRIDLFRKIGGSALTDPNIAVPVAGDEASIGQEVPVTYVPFRNAHFLSAAVSWAEVLGAKTVFIGAVEQDSSGYPDCRPAYYEAFNKLIEMGTKEGDIRIATPLIELRKSEIVRLGVELGAPFHVSWSCYSNETVACGVCESCILRLRAFRDAGAVDPIPYVIA

SEQ ID NO: 38047 - protein, 240 aa, Edaphobacter modestus
  REGION 1..240: note = tr|A0A4Q7YUN8|A0A4Q7YUN8_9BACT 7-cyano-7-deazaguanine synthase OS=Edaphobacter modestus; OX = 388466 GN=queC PE=3 SV=1
MITPADGAHQRPKAVLCLSGGMDSTVCASLATREFDVYALHFSYGQRTEAKELASAKEIARLTGAKEFLPLKMDLFRRIGGSALTDETIAVPDAPAEEAIGAEIPVTYVPFRNAHFLSAAVSWAEVVGAKKIFIGAVEQDSSGYPDCRPSYYEAFNELIRQGTKEGDIRVETPLISMRKSEIVRLGVELGAPFHVSWSCYSGEREACGVCESCVLRLRAFREIGTLDPIPYAGLKAASNS

SEQ ID NO: 38048 - protein, 229 aa, unidentified
  source 1..229: note = Edwardsiella anguillarum
  REGION 1..229: note = tr|A0A076LRT2|A0A076LRT2_9GAMM 7-cyano-7-deazaguanine synthase OS=Edwardsiella anguillarum ET080813 OX=667120 GN=queC PE=3 SV=1
MKRAVVVFSGGQDSTTCLIQALHRYDDVHCITFDYGQRHRAEIDVARRLAEQLGASAHKVLNVGLLNELAISSLTRDNIPVPTQSEGGIPNTFVPGRNVLFLTLAAIYAYQVEAEAVITGVCETDFSGYPDCRDQFVQALNHAVCLGMARDIRFETPLMWLNKAETWALADYYGQLARVRHDTLTCYNGIQGDGCGHCAACHLRAHGLQQYLADPAAVMAALKHKSGLQ

SEQ ID NO: 38049 - protein, 229 aa, Edwardsiella hoshinae
  REGION 1..229: note = tr|A0A376DJ09|A0A376DJ09_9GAMM 7-cyano-7-deazaguanine synthase OS=Edwardsiella hoshinae; OX = 93378 GN=queC PE=3 SV=1
MKRAVVVFSGGQDSTTCLIQALQRYDDVHCITFDYGQRHRAEIDVARNLAQQLGASAHKVLDVGLLNELAISSLTRDNIPVPTQSESGIPNTFVPGRNILFLTLAAIYAYQVEAEAVITGVCETDFSGYPDCRDQFVKALNHAVSLGMARDIRFETPLMWLNKAETWALADYYGQLERVRHDTLTCYNGIQGDGCGHCAACHLRAHGLQQYQADPAGVMAALRQKSGLA

SEQ ID NO: 38050 - protein, 229 aa, Edwardsiella ictaluri
  REGION 1..229: note = sp|C5BCK3|QUEC_EDWI9 7-cyano-7-deazaguanine synthase; OS = Edwardsiella ictaluri (strain 93-146) OX=634503 GN=queC; PE = 3 SV=1
MKRAVVVFSGGQDSTTCLIQALHHYDDVHCITFDYGQRHRAEIDVARRLAGQLGASAHKVLDVGLLNELAISSLTRDNIPVPTQSEDGIPNTFVPGRNVLFLTLAAIYAYQVEAEAVITGVCETDFSGYPDCRDQFVQALNHAVCLGMARDIRFETPLMWLNKAETWALADYYGQLARVRHDTLTCYNGVQGDGCGHCAACHLRAHGLQQYLANPAAVMAALKRKSGLQ

SEQ ID NO: 38051 - protein, 229 aa, unidentified
  source 1..229: note = Edwardsiella piscicida
  REGION 1..229: note = tr|A0A411GZX2|A0A411GZX2_9GAMM 7-cyano-7-deazaguanine synthase OS=Edwardsiella piscicida; OX = 1263550 GN=queC PE=3 SV=1
MKRAVVVFSGGQDSTTCLIQALHRYDDVHCITFDYGQRHRAEIDVARRLAEQLGASAHKVLDVGLLNELAISSLTRDNIPVPTQSEDGIPNTFVPGRNVLFLTLAAIYAYQVEAEAVITGVCETDFSGYPDCRDQFVQALNHAVCLGMARDIRFETPLMWLNKAETWALADYYGQLERVRHDTLTCYNGIQGDGCGHCAACHLRAHGLQQYLADPAAVMAALKQKSGLQ

SEQ ID NO: 38052 - protein, 229 aa, unidentified; identical to SEQ ID NO: 38048
  source 1..229: note = Edwardsiella piscicida
  REGION 1..229: note = tr|A0A034T1E4|A0A034T1E4_9GAMM 7-cyano-7-deazaguanine synthase OS=Edwardsiella piscicida; OX = 1263550 GN=queC PE=3 SV=1

SEQ ID NO: 38053 - protein, 229 aa, Edwardsiella tarda
  REGION 1..229: note = tr|D4F307|D4F307_EDWTA 7-cyano-7-deazaguanine synthase OS=Edwardsiella tarda ATCC 23685 OX=500638; GN = queC PE=3 SV=1
MKRAVVVFSGGQDSTTCLIQALQRYDDVHCITFDYGQRHRAEIDVARNLAHQLGASAHKVLDVGLLNELAISSLTRDNIPVPTQSETGIPNTFVPGRNILFLTLAAIYAYQVEAEAVITGVCETDFSGYPDCRDAFVKALHHAVSLGMARDIRFETPLMWLNKAETWALADYYGQLERVRHDTLTCYNGIQGDGCGHCAACHLRAHGLQQYQADPAGVMASLRQKSGLA

SEQ ID NO: 38054 - protein, 229 aa, Edwardsiella tarda
  REGION 1..229: note = tr|A0A0H3DR61|A0A0H3DR61_EDWTF 7-cyano-7-deazaguanine synthase OS=Edwardsiella tarda (strain FL6-60) OX=718251 GN=queC PE=3 SV=1
MKRAVVVFSGGQDSTTCLIQALHRYDDVHCITFDYGQRHRAEIDVARRLAKQLGASAHKVLDVGLLNELAISSLTRDNIPVPTQSEDGIPNTFVPGRNVLFLTLAAIYAYQVEAEAVITGVCETDFSGYPDCRDQFVQALNHAVCLGMARDIRFETPLMWLNKAETWALADYYGQLERVRHDTLTCYNGIQGDGCGHCAACHLRAHGLQQYLADPAAVMAALKQKSGLQ

SEQ ID NO: 38055 - protein, 235 aa, unidentified
  source 1..235: note = Effusibacillus lacus
  REGION 1..235: note = tr|A0A292YJI4|A0A292YJI4_9BACL 7-cyano-7-deazaguanine synthase OS=Effusibacillus lacus; OX = 1348429 GN=queC PE=3 SV=1
MADAKKSVVVLSGGLDSTTCMAVAREAGYDVWPLTFFYGQKHSIELESARKVAEYYGYKDRHFIADLNGIIRGSALTDADKEIPVGRSEEEMTSEIPVTYVPARNIIFLSIALSYAESIGAEAIYIGVNALDYSGYPDCRPEFIQAFQEVINKGTVAGAHGQGIRIEAPLQNLTKAEIARLGLRLGAPLQFTHSCYLGTDPACGVCDSCQLRIKGFKEAGVPDPVPYAIQIDWEN

SEQ ID NO: 38056 - protein, 210 aa, Eggerthella lenta
  REGION 1..210: note = tr|A0A369NGB6|A0A369NGB6_EGGLN ExsB family transcriptional regulator OS=Eggerthella lenta OX=84112; GN = C1859_15440 PE=4 SV=1
MTATGPGQDVGVEALDAFFARTPRLAVAFSGGCDSSFLLVAALRAGCDVKAYGVRTAFQPAFEIDDAKRLAAELGADFELVDADVLAQGEICANGPDRCYRCKTFIFSTILARMAEDGFEVLADGTNVTDDPANRPGFRALAELGVVSPLRRAGMAKDDVRAASRELGLFTADKPSFSCIAVHVGAGRPVTAQTLAETAERLGVTGGKRP

SEQ ID NO: 38057 - protein, 210 aa, Eggerthella lenta
  REGION 1..210: note = tr|A0A369N4M0|A0A369N4M0_EGGLN ExsB family transcriptional regulator OS=Eggerthella lenta OX=84112; GN = C1853_14660 PE=4 SV=1
MTLTGSGQDVGVEALDAFFARTPRLAVAFSGGCDSSFLLAAALRAGCDVRAYGVRTAFQPAFEIEDAQRLAAELGADFELVDADVLAQGEICANGPDRCYRCKTFIFSTILARMAEDGFEVLADGTNVTDDPANRPGFQALAELGVVSPLRRAGMTKDDVRAASRELGLFTADKPSFSCIAVHVGEGRPITAAALAETAERLGVADGRRP

SEQ ID NO: 38058 - protein, 279 aa, Eggerthella sp.
  REGION 1..279: note = tr|A0A415XT75|A0A415XT75_9ACTN 7-cyano-7-deazaguanine synthase OS=Eggerthella sp. AM16-19; OX = 2292042 GN=queC PE=3 SV=1
MGIFEGQAFSSFAAAAANACENLRVHGTLGEDPASRDENGKVCGENPQKALVLSSGGVDSSTLLALAVKRFGAENVFALSISYGQRHEKEIESAKAVAAHYGVEQRFLDLSAIFADSDCSLLEHSSQDVPEESYADQIDEADGSPVSTYVPFRNGLFLSSAASMALSLGASVLFYGAHHDDWAGDAYPDCSIEFVNAMNLAITQGTAGQLHMEAPFVSWSKADIVKCGLELDVPYELTWSCYEGGERPCGKCGTCIDRNRAFEANGMRDPLLDKLDAQG

SEQ ID NO: 38059 - protein, 226 aa, Eggerthella sp.
  REGION 1..226: note = tr|R5G0Q2|R5G0Q2_9ACTN 7-cyano-7-deazaguanine synthase OS=Eggerthella sp. CAG:1427 OX=1262874 GN=queC; PE = 3 SV=1
MRALVLCSGGVDSTTLLAMAVDRYGSENVVALSISYGQRHEKELKAARDVARYYHVEQRFLDLAAIFADSSCSLLAHSEKDIPRESYAEQLEQADTKLVSTYVPFRNGLFLSSAASMALSLECSVLYYGAHHDDWAGNAYPDCSREFVAAMNNAIREGTGGELHMEAPFVEWSKADIVKKGLELNVPYELTWSCYEGGDKPCGVCATCIDRKRAFELNGSIDPLLK

SEQ ID NO: 38060 - protein, 438 aa, Eikenella corrodens
  REGION 1..438: note = tr|A0A3S9SMY9|A0A3S9SMY9_EIKCO 7-cyano-7-deazaguanine synthase OS=Eikenella corrodens; OX = 539 GN=ELB75_11810 PE=3 SV=1
MNQLFFHHDIEQLKNLPNGVLPIRLYGTGNKSLQIAHIGNMVLDRVRRLGVELNNQVMDFLTIAMAVTAADTFILRKDTANGWCRSFSITLPLCQPDIWQANKVHLEQILHFLSGDIWQFDFQAGGQLPPQPYKLSGRTKLVDLRNKDCVCLFSGGLDSAIGVIDLLEQGHSPVLVSHSYKGDKSRQQAIIQQLNQNGYINQFSQFDAIAQPHLNNEKSTEITMRTRSLNFLAFAIVSAYALQEVAQKKIDILVPENGVISINAPLTVRRVGALSTRTTHPYFIQEIQKFFTAVNIPFTLRNPYQFKTKGQMIAECKNLLLLRQIIPDTVSCSHWKRKNQQCGVCVPCLIRRASLHYAGITNDTQYEFNDIRQILINQDRRDDLFALMSAIRQKDYRNINQWVLQSGPLPIQQLNQFANVFMTGLDEVEQLLIENQIL

SEQ ID NO: 38061 - protein, 239 aa, unidentified
  source 1..239: note = Eilatimonas milleporae
  REGION 1..239: note = tr|A0A3M0C996|A0A3M0C996_9PROT 7-cyano-7-deazaguanine synthase OS=Eilatimonas milleporae; OX = 911205 GN=queC PE=3 SV=1
MKQSGKKAVVLLSGGLDSATVVAMAHDQGYHVHALSFRYGQRHSVELTAAEAVAKQLGVAEHKIAELDLRLFGGSALTADIAVPKDRTEDAMTADIPITYVPARNTIFLSFALAYAEVSGAGDIFIGVNALDYSGYPDCRAEYIRAYETMANLATKAGVSGERPLRIQAPLIDMTKADIIKTGTALGVDYGLTISCYDPDDAGRACGHCDSCLLRKKGFREAGVDDPTRYQKRHDSFQR

SEQ ID NO: 38062 - protein, 196 aa, unidentified
  source 1..196: note = Elizabethkingia bruuniana
  REGION 1..196: note = tr|A0A5E8D5W3|A0A5E8D5W3_9FLAO 7-cyano-7-deazaguanine synthase OS=Elizabethkingia bruuniana OX=1756149 GN=AYC65_09055 PE=3 SV=1
MKQAVLLSGGIDSICLTYGIKPDIAYTIDYGQRVAGREIYVSKYICQKLGIEHKIIHINCSSLGTGSLAGTENINIAPSEEWWPYRNQLLITFASMQAIKDKVSSLFLASVKSDNFHKDGTSIFYQLIHNLVSYQEGSINIYCPTLEYYSHELVTKYNVPIDLLTIAHSCHISNLACGKCSGCLKQLKVRYEIGIE

SEQ ID NO: 38063 - protein, 241 aa, unidentified
  source 1..241: note = Elstera cyanobacteriorum
  REGION 1..241: note = tr|A0A255XKB0|A0A255XKB0_9PROT 7-cyano-7-deazaguanine synthase OS=Elstera cyanobacteriorum OX=2022747 GN=queC PE=3 SV=1
MSIPETALVLFSGGQDSATCLAWALDRFDRVETIGFDYGQRHKIELECRATIRDELAAQFPQWRGKLGPDHLLDLSVVGAIGETAMTADTVITYAENGLPNTFVPGRNILMFTVAAALAYRRGARHLVGGMCETDYSGYPDCRDDTIKALQVALGLGMDKRFVLHTPLMWLDKAATWKLAETLGGVDLIELIRRESHSCYLGDRTHLHPWGHGCGTCPACQLRSRGWEAYRADPPDLATTP

SEQ ID NO: 38064 - protein, 241 aa, unidentified
  source 1..241: note = Elstera litoralis
  REGION 1..241: note = tr|A0A0F3IXX5|A0A0F3IXX5_9PROT 7-cyano-7-deazaguanine synthase OS=Elstera litoralis; OX = 552518 GN=queC PE=3 SV=1
MAIPETALVLFSGGQDSATCLAWALDRFDHVETIGFDYGQRHRIELDCRDTLRAEIAAQFPQWRGKLGPDHLLDLGVVGTISDTALTSDAAIQFSDTGLPNTFVPGRNILMFTVAAALAYRRGARHLVGGMCETDYSGYPDCRDDTIKALQVALGLGMDKRFVLHTPLMWLDKAATWELAEDLGGVDLVELIRRESHSCYLGDRDHLHPWGFGCGTCPACQLRSKGWEAYRANPPDLATTP

SEQ ID NO: 38065 - protein, 213 aa, unidentified
  source 1..213: note = Elusimicrobia bacterium
  REGION 1..213: note = tr|A0A2M7S2X9|A0A2M7S2X9_9BACT 7-cyano-7-deazaguanine synthase OS=Elusimicrobia bacterium CG_4_10_14_0_8_um_filter_37_32 OX=2014301 GN=queC PE=3 SV=1
MINKAVVLLSGGLDSTTTLYYAKKQKYDCYCLIFDYGQRHKKEIISAKKIAKLNSCHYYIIKFTLPWRGSSLIDGGLQIPFHKANQIGKTGVPSTYVPARNTIFISFALSLAETIGAESIFIGANAIDFSGYPDCRPEYYRQFNKLVSTAIPGKKIKIHTPLIDKTKAEIIRLGKKLNVPFELTWSCYSGGRLPCGKCDSCILRSKGFQEANS

SEQ ID NO: 38066 - protein, 227 aa, unidentified
  source 1..227: note = Elusimicrobia bacterium
  REGION 1..227: note = tr|A0A355E417|A0A355E417_9BACT 7-cyano-7-deazaguanine synthase OS=Elusimicrobia bacterium; OX = 2030800 GN=queC PE=3 SV=1
MSRSEAPAVVVLLSGGLDSATCLYWARARGWRLHALAVGYGQRHVRELRSARRLARAAGAELHELRLRLPWLGVSSLVGRGTALPDVPLARIGKQGIPSTYVPGRNTVFLALAVSLADSLGAEGVVIGANAMDSSGYPDCRPDFISAFERTARLGTRKGRETGRLKVYAPLLRDGKGAIVRKAFRLGVPLELTWSCYRGGRRPCGSCDSCKLRAKGFAEAGRKDPAL

SEQ ID NO: 38067 - protein, 484 aa, Elusimicrobium minutum
  REGION 1..484: note = tr|B2KDX5|B2KDX5_ELUMP 7-cyano-7-deazaguanine synthase OS=Elusimicrobium minutum (strain Pei191); OX = 445932 GN=queC PE=3 SV=1
MNIVVANSVFDCENWEGNALVIDVLRSSTTVCALVNRGKEDIRVYGDKDLAAHYKNTRSEVELFSELIIEGVNKEDNSPFLAGKSNPKKPGAIVTTAGTPAVMSLENAKEIFMGGYCNIYTLSSYLKSLKEDLLIVPSNLFGHSSDIEDAVCAESYMQMFSGLGNTEQDIQTIKNTARYEDFIKNGPKTAVKDAALCLTVNSIPVIPIIKIMGGYGVVCTPFNKEKVLKREEESGMKAVNNNIDSSVMPSITQRREIPAKVEENKTSKKKAVVLFSGGLDSTVCLYWALKEGYECYALSVAYGQKHLKEIEVAQRLAKQAGVTHKHIEINLPWLAEATSLVGGAEIPATPMEQIGKSIPSTYVPARNLIFVSLGASWADSIGAEAVVLGPNAVDYSGYPDCTPQFYKPLSEAVRVGTRLGKKFEILTPIIKLNKAEIVKLGRKLGAPLEQTWTCYNGGEKPCGVCESCKLRRKGFEDAGEREEY

SEQ ID NO: 38068 - protein, 636 aa, Elusimicrobium sp.
  REGION 1..636: note = tr|A0A1Y4DB96|A0A1Y4DB96_9BACT 7-cyano-7-deazaguanine synthase OS=Elusimicrobium sp. An273 OX=1965617 GN=queC PE=3 SV=1
MNVLIARTIEECEQWTDVAVVVDVLCASTTVCALLKRGKKDVLAFGDAAQAAAFVQAHGDFEVYSDVDFALPHENNSPSLAAKSNARKPALVLTSAGTKALEHLKQASLVLMGGFCNFYALAEALAAQPKDILLVSGSLFDMADDVEDGLCVSALKDYIQGIGNPQDAIVEFNNTMRFGEFLHSGSKTAEKDLKTAFKVNGIAVVPQVSFAPDGYGVCHVFGQPAPQEWMGKQPSSAAPEPAPQAAAPAEETPAPATVPQQPAPVQESTPAADTLQTPAAENTLRKEVKTAEKNLQAAAQQATTRLKGFFSGILKAVKEEKAELEGDLGMAQKQAESPKTAPQNQFEDPLDRVLKKSERAPAPQENHPARPAEPEAPAAPEQEAAPQPSPVQAAVPAGEVTFSREAAAGLSNKKRKKAIVLFSGGLDSTTCLYWALAHGYECEALTVSYGQRHEREVQSAQAIARKLGIKHHLITLDLPWLSCCSLVDKNKQLPDIAVEDIPKEGIPSTYVPGRNLMFLAIAGSLLDAVGADAIIAGPNAVDFSGYPDCTPAFFKAAAEALNRGTKTGVSEGIEVLAPLMRLSKAQIVKLAANLKVPFELTWSCYAGGKKPCGHCDSCKLRAKGFEEAGVHDTSLD

SEQ ID NO: 38069 - protein, 238 aa, unidentified
  source 1..238: note = Emcibacter congregatus
  REGION 1..238: note = tr|A0A2G4YM83|A0A2G4YM83_9PROT 7-cyano-7-deazaguanine synthase OS=Emcibacter congregatus; OX = 2043170 GN=queC PE=3 SV=1
MTEKKKAVVLLSGGLDSTTCVAIAKAEGFEVYGLSFDYGQRHTIELDAAARVAETMGLAKHVIAKIDLRVFGGSALTADIDVPKGRDEDHMGDDIPVTYVPARNTIFLSFALAFAETQGANDIFIGVNALDFSGYPDCRPDYIAAYQKMANLATRSGVEGAKTESSLTIHTPLIDLTKADIVRTGLSLGVDYSITTSCYDPLPDGTSCGQCDACHLRLKGFREAGERDPVAYKNDLDR

SEQ ID NO: 38070 - protein, 235 aa, unidentified
  source 1..235: note = Emcibacter nanhaiensis
  REGION 1..235: note = tr|A0A501PSI1|A0A501PSI1_9PROT 7-cyano-7-deazaguanine synthase OS=Emcibacter nanhaiensis; OX = 1505037 GN=queC PE=3 SV=1
MSESTAEPKKAVVLLSGGLDSSTCVAIAQKEGYEVYGLSFSYGQRHTIELDAAKRVAQAMGIRKHVIANIDLAAFGGSALTDDIPVPKDRSHEDMGADVPVTYVPARNTIFLSFALGWAEVLGADDIFIGVNAMDYSGYPDCRPEFIKAYEVMANLATRAGTQDARHLTIHTPLIDMTKGEIVKTGLALGVDYSQTISCYDPDEQGRACGHCDACQLRLKGFAEAGTTDPVAYQD

SEQ ID NO: 38071 - protein, 234 aa, unidentified
  source 1..234: note = Empedobacter haloabium
  REGION 1..234: note = tr|A0A5C7BTG7|A0A5C7BTG7_9FLAO 7-cyano-7-deazaguanine synthase OS=Empedobacter haloabium; OX = 592317 GN=queC PE=3 SV=1
MKSDAALVLFSGGQDSTTCLAWALDRYARVETIGFDYGQRHAIELTMRPELLGKLRAQRPDWAARLGEDHMIDLGLIKQLSHTAMTEDIEITMQANGLPNTFVPGRNLMFMMVAATLAYRRGLNVLVGGMCETDFSGYPDCRDDTMKALQVALNLGMDTRVKLETPLMWLDKAETWELAERLGGQALVDLIRADTHTCYKGERGALHDWGYGCGECPACALRARGYREYAARRA

SEQ ID NO: 38072 - protein, 217 aa, unidentified
  source 1..217: note = Endomicrobium proavitum
  REGION 1..217: note = tr|A0A0G3WGA8|A0A0G3WGA8_9BACT 7-cyano-7-deazaguanine synthase OS=Endomicrobium proavitum; OX = 1408281 GN=queC PE=3 SV=1
MKIRQKQNAVILFSSGLDSTTALYYALSKGYKCYCLIFDYGQRHKREIKSAQKIAKLVKADFTVIKLSLPWSKDVLTNKNKKVPTHKVIKDIIPATYVPGRNTLFLSYGLSYAESINARSIFIGANALDYSGYPDCRPEFIKAYNGLLKSLGLKITVQAPLVNMTKAQIIKLGGKLKVPYQYTWSCYNGLKKPCGTCDSCKLRAKGFKEAELNDPAI

SEQ ID NO: 38073 - protein, 226 aa, Escarpia spicata
  REGION 1..226: note = tr|A0A370DMY5|A0A370DMY5_9GAMM 7-cyano-7-deazaguanine synthase OS=endosymbiont of Escarpia spicata OX=2200908 GN=queC PE=3 SV=1
MLKTKKAVILLSGGLDSATVLAMAQQQGYVCHALSMEYGQRHMAELSAARRVAQSLNTAEHKMVRIGLETIGGSALTDSAIPVPDHAEEGIPVTYVPARNTVFLSLALGWAEVLGAQDIFIGVNAVDYSGYPDCRPEFIHSFERLANIATKAGVEGERFKVHTPLIDMSKAEIISTGIRLGVDYSLTISCYQADPEGRACGVCDSCRLRAKGFQDAAIDDPTSYRC

SEQ ID NO: 38074 - protein, 226 aa, unidentified
  source 1..226: note = Unknown
  REGION 1..226: note = tr|S6BTY1|S6BTY1_9GAMM 7-cyano-7-deazaguanine synthase OS=endosymbiont of unidentified scaly snail isolate Monju OX=1248727 GN=queC PE=3 SV=1
MSDQPKAVVLLSGGLDSATTLAIAREQGFACHALSFDYGQRHAAELNAARRVAAALGVLEHKVLPLSLDAIGGSALTDQAIAVPEEGGEGIPVTYVPARNTVFLSLALGWAEVLGARDLFVGVNAVDYSGYPDCRPEFIAAFEQLANLATRAGVEGERFRIHAPLIEMSKAEIVRTGSRLGLDYGLTVSCYQADAEGRACGRCDSCRFRAQGFAEAGLPDPTHYQD

SEQ ID NO: 38075 - protein, 265 aa, unidentified
  source 1..265: note = Endozoicomonadaceae bacterium
  REGION 1..265: note = tr|A0A444GPU4|A0A444GPU4_9GAMM 7-cyano-7-deazaguanine synthase OS=Endozoicomonadaceae bacterium GTF-13 OX=2506149 GN=queC PE=3 SV=1
MRTSRNRRSLCPHRFSGADRIKCGHFCSPHRTPYPRERHALSSRSLMNKKVVVIYSGGMDSFTVLHRAIEEGLEVHALSFNYGQRHQRELDYARRVCSRLGVPHLVSDITSINALLQGSSLTSSEIEVAEGHYTAENMKSTVVPNRNMILLSLAVGYAVSIGADRVFYGAHSGDHTIYPDCRPEFVEAMNSVTRIANFEPVEIVSPFLEQDKIEILRWGLARGLDYADTWTCYNGREKACGKCGSCCERLEAFSLNQATDPLPYE

SEQ ID NO: 38076 - protein, 239 aa, Endozoicomonas elysicola
  REGION 1..239: note = tr|A0A081KE30|A0A081KE30_9GAMM 7-cyano-7-deazaguanine synthase OS=Endozoicomonas elysicola OX=305900 GN=queC PE=3 SV=1
MRKAVVLLSGGLDSATVLALAAEQGYETYSVSFDYGQRHRAELEASRRLADAMGVREHKVLKLGLTEIGGSALTDEDIPVPDFGEHPKETLKDVPRDNLSSIPVTYVPARNTVFLSLALGWAEVLGARDIFIGANVVDYSNYPDCRPEYLKAFEDMANLATRAGVEGDHFRIRAPLLNLTKAEIISEGVRLGVDYGMTISCYQADDQGAACGVCDSCSFRRKGFLEAAVPDPTPYRTAV

SEQ ID NO: 38077 - protein, 227 aa, Endozoicomonas montiporae
  REGION 1..227: note = tr|A0A081N9X7|A0A081N9X7_9GAMM 7-cyano-7-deazaguanine synthase OS=Endozoicomonas montiporae OX=1027273 GN=queC PE=3 SV=1
MCMSKKAVILLSGGLDSTTVLAMAKDQGYECYTVSFDYGQRHRAELRASKIVSEVLGAKDHKTLKMDFRDIGGSALTDDDIAVPEELDEGIPVTYVPARNTVFLSLALGWAEVLGARDIFIGANDVDYSGYPDCRPEFLEAFQNMANLATKAGVEGDHFHIRAPLLRLTKAEIVQAGDRLGVDYGLTVSCYQADDEGRACGVCDSCRYRKKGFEEAGLVDPTRYQSS

SEQ ID NO: 38078 - protein, 225 aa, Endozoicomonas montiporae
  REGION 1..225: note = tr|A0A142BEA8|A0A142BEA8_9GAMM 7-cyano-7-deazaguanine synthase OS=Endozoicomonas montiporae CL-33 OX=570277 GN=queC PE=3 SV=1
MSKKAVILLSGGLDSTTVLAMAKDQGYECYTVSFDYGQRHRAELRASKIVSEVLGAKDHKTLKMDFRDIGGSALTDDDIAVPEELDEGIPVTYVPARNTVFLSLALGWAEVLGARDIFIGANDVDYSGYPDCRPEFLEAFQNMANLATKAGVEGDHFHIRAPLLRLTKAEIVQAGDRLGVDYGLTVSCYQADDEGRACGVCDSCRYRKKGFEEAGLVDPTRYQSS

SEQ ID NO: 38079 - protein, 227 aa, unidentified
  source 1..227: note = Endozoicomonas numazuensis
  REGION 1..227: note = tr|A0A081NE16|A0A081NE16_9GAMM 7-cyano-7-deazaguanine synthase OS=Endozoicomonas numazuensis OX=1137799 GN=queC PE=3 SV=1
MSMTKKAVILLSGGLDSSTVLAIARGQGYECYTVSFDYGQRHRVELKASARVSKELGAKDHKTLKLDLRDLGGSALTDDEIDVPEELGEGIPVTYVPARNTVFLSLALGWAEILGARDIFIGANDVDYSGYPDCRPAYLEAFEKMANLATKAGIEGDHFHIRAPLLELTKAEIIKEGSRLGVDYGITVSCYQADGQGRACGVCDSCRYRSKGFEEAGVADPTPYIES

SEQ ID NO: 38080 - protein, 224 aa, Endozoicomonas sp.
  REGION 1..224: note = tr|A0A1D2X4Z2|A0A1D2X4Z2_9GAMM 7-cyano-7-deazaguanine synthase OS=Endozoicomonas sp. (ex Bugula neritina AB1) OX=1868284 GN=queC PE=3 SV=1
MNDKRAVVLVSGGLDSATVLAIARKKNYKCFTMSFDYGQKHRSELAASEVVSNRLGAQVHKIIKLDLREIGGSALTDDGMDVPNFGGEGIPATYVPARNTVFLSLALGWAEVLGARDIFIGANNIDYSGYPDCRPEYLQAFQTMANLATKAGVEGDHFTIQAPLLEMTKAEVIREGNRLGVDYGITISCYQADDYGRACGECDSCHYRKKGFIEAGIEDPTHYQ

SEQ ID NO: 38081 - protein, 265 aa, Endozoicomonas sp.; identical to SEQ ID NO: 38075
  REGION 1..265: note = tr|A0A3P3VKM5|A0A3P3VKM5_9GAMM 7-cyano-7-deazaguanine synthase OS=Endozoicomonas sp. GTF13 OX=2528527 GN=queC PE=3 SV=1

SEQ ID NO: 38082 - protein, 235 aa, Enhydrobacter aerosaccus
  REGION 1..235: note = tr|A0A1T4RAX8|A0A1T4RAX8_9PROT 7-cyano-7-deazaguanine synthase OS=Enhydrobacter aerosaccus OX=225324 GN=queC PE=3 SV=1
MDDSRSALVLFSGGQDSTTCLAWALNRFQRVETVAFDYRQRHRVELDQRLVVLDRIRAGFPQWADRLGEDHFVDMAVLGQISETSLTRDVAFAMQQDGLPNTFVPGRNLLFFTFAAAIAWRRNIRHLIGGMCETDYSGYPDCRDNTIKALQVALNLGMDRNFALHTPLMWRDKAETWALAQELGGEALIEIIREHTHTCYRSERDQRHDWGYGCGECPACVLRKHGYESWNARAA

SEQ ID NO: 38083 - protein, 235 aa, Enhydrobacter sp.
  REGION 1..235: note = tr|A0A5C8PWB9|A0A5C8PWB9_9PROT 7-cyano-7-deazaguanine synthase OS=Enhydrobacter sp. CC-CFT640 OX=2586908 GN=queC PE=3 SV=1
MTDRALVLFSGGQDSTVCLAWALDRYDHVETVGFDYGQRHAIEMACREAVRFALRRGFPRWASRLGADHVLDLRTLAAIGDTALTSNAAIAFEQNGLPNTFVPGRNILFFTYAAAVAYRRDLRRLVGGMCETDYSGYPDCRDDTLKALQVALTLGLDRRLVIDTPLMWLDKAATWQLAEALGGTALVDLVVAETHTCYLGDRATRHAWGYGCGTCPACALRAQGWARYRQSAGSR

SEQ ID NO: 38084 - protein, 236 aa, Enhydrobacter sp.
  REGION 1..236: note = tr|A0A1V2GML6|A0A1V2GML6_9PROT 7-cyano-7-deazaguanine synthase OS=Enhydrobacter sp. H5; OX = 1907940 GN=queC PE=3 SV=1
MSTSTTPQNAVVLLSGGLDSVTCLYWAKANYANVTAVSFNYGQRHNSELNAAKKIAATAQVNHRIIDIDLAQLGGSALTDASLVVPDAKQTDFSDNQHNDSIPITYVPARNTIFLSYALALAEVTQSNAIVIGVNAVDYSGYPDCRPEYIAAFEKMANLATKAGVMGNHLHIATPLLHLSKAEIIKLGVSLGVDYALTVSCYRADSEGRACGHCDSCYLRQQGFLQAEIDDPTIYQ

SEQ ID NO: 38085 - protein, 244 aa, Enhygromyxa salina
  REGION 1..244: note = tr|A0A2S9XXV4|A0A2S9XXV4_9DELT 7-cyano-7-deazaguanine synthase OS=Enhygromyxa salina; OX = 215803 GN=queC PE=3 SV=1
MSVREPKDAPAIVLLSGGLDSTTVLAIAAREAGQRVHALSFAYGQRHAIELRQAARQAARFGVVAHEVVDLGHLGKLVASASSLVAASELDVPSASARAGHDDIPSTYVPARNTVFLSYALAWAEVVGARDIWLGVNAVDYSGYPDCRPEFIAAFETTANLATKLGVSAGGAEGIQIHAPLIELHKHEIIARGLALGVDYAETVSCYDPVEREGVALACGRCESCTLRRAGFEQAGVADPTRYV

SEQ ID NO: 38086 - protein, 240 aa, Enhygromyxa salina
  REGION 1..240: note = tr|A0A2S9XLB9|A0A2S9XLB9_9DELT 7-cyano-7-deazaguanine synthase OS=Enhygromyxa salina; OX = 215803 GN=queC PE=3 SV=1
MPQREPTPGAAAIVLLSGGLDSSTVLAIAAREAKQRIHALSFSYGQRHGHELSCAATQAASFGAVAHQVLDLGQLGQLVAPATSLVAGSELAVPSAASREGHDDIPSTYVPARNTVFLSYALAWAEVVGAHDIWLGVNAVDYSGYPDCRPEFIESFERTANLATKFGAGPDRLRIHAPLIELHKHEIIQRGVSLGVDYAQTTSCYDPAHGLACGQCESCALRRAGFEQAGVADPTRYRQS

SEQ ID NO: 38087 - protein, 236 aa, Ensifer adhaerens
  REGION 1..236: note = tr|A0A4S2TS02|A0A4S2TS02_ENSAD 7-cyano-7-deazaguanine synthase OS=Ensifer adhaerens; OX = 106592 GN=queC PE=3 SV=1
MKTIVICSGGLDSVSLAHKVAAEHELIGLLSFDYGQRHRKELDFAAACAKRLGVPHQVIDISAIGAHLTGSALTDDVDVPDGHYAEETMKATVVPNRNAIMLAIGFGLAAAQKADAVAVAVHGGDHFIYPDCRPGFIDAFQAMQNHALDGYADITLYAPYVTISKADIVTDGASHQTPFEATWSCYKGGARHCGRCGTCVERREAFHLAGVADPTDYEDPDFWVAATSAFAAEEVK

SEQ ID NO: 38088 - protein, 236 aa, Ensifer adhaerens
  REGION 1..236: note = tr|W8I696|W8I696_ENSAD 7-cyano-7-deazaguanine synthase OS=Ensifer adhaerens OV14 OX=1416753 GN=exsB PE=3; SV = 1
MRTIVICSGGLDSVSLAHRIAAEHELVGILSFDYGQRHRKELDFAAACAHRLGVPHQIIDITGVGRHLTGSALTDDVDVPDGHYAEETMKATVVPNRNAIMLAIAFGLASAQKADAVAVAVHGGDHFIYPDCRPGFIDAFQKMQDEALEGYGTVQLLAPYVNVPKAAIVTDGAKHGTPFGETWSCYKGGARHCGRCGTCVERREAFHLAGVDDPTEYADPDFWRAATSRFSAEEVR

SEQ ID NO: 38089 - protein, 236 aa, unidentified
  source 1..236: note = Ensifer alkalisoli
  REGION 1..236: note = tr|A0A1E3V7I5|A0A1E3V7I5_9RHIZ 7-cyano-7-deazaguanine synthase OS=Ensifer alkalisoli; OX = 1752398 GN=queC PE=3 SV=1
MKTIVICSGGLDSVTLAHKVAAQHELVRLVSFDYGQRHRKELDFAAACARRLGVPHQLIDISEIGRHLTGSALTDDVEVPDGHYAEETMKTTVVPNRNAIMLAIAFGVAAARNAEAVATAVHGGDHFIYPDCRPGFINAFQSMQDHALEGYAEVRLYAPYVNVSKADIVADGAKHDTPFAETWSCYKGGVRHCGRCGTCVERREAFHLAGIADPTDYEDPEFWTKAIGAFAAEEVK

SEQ ID NO: 38090 - protein, 236 aa, unidentified
  source 1..236: note = Ensifer glycinis
  REGION 1..236: note = tr|A0A178XX86|A0A178XX86_9RHIZ 7-cyano-7-deazaguanine synthase OS=Ensifer glycinis; OX = 1472378 GN=queC PE=3 SV=1
MKTIVICSGGLDSVSLAHRIAAEHQLLGLLSFDYGQRHRKELDFAAACARRLGVPHQIIDIREIGRHLTGSALTDDVDVPDGHYAEETMKATVVPNRNAIMLAIAFGVAAARKADAVAAAVHGGDHFIYPDCRPGFIDAFQAMQNHALEGYADVTLHTPYVNVSKADIVADGAKHDTPFAETWSCYKGGARHCGRCGTCVERREAFHLAGVADPTEYEDPDFWVAATRAFAAEEVK

SEQ ID NO: 38091 - protein, 236 aa, Ensifer sojae
  REGION 1..236: note = tr|A0A249PIU0|A0A249PIU0_9RHIZ 7-cyano-7-deazaguanine synthase OS=Ensifer sojae CCBAU 05684 OX=716928 GN=queC PE=3 SV=1
MKTIVICSGGLDSVSLAHKVAAEHELALLVSFDYGQRHRKELDFAAACARRLGVPHQVIDLTEVGRHLTGSALTDDVEVPDGHYAEETMKTTVVPNRNAIMLAIAFGIAAAHKAEAVATAVHGGDHFIYPDCRPGFINAFQAMQNHALEGYADVRLYAPYVNVSKADIVADGAKHDTPFAETWSCYKGGSRHCGRCGTCVERREAFHLAGVADPTDYEDPDFWVEATGAFVAEEVK

SEQ ID NO: 38092 - protein, 236 aa, Ensifer sp.
  REGION 1..236: note = tr|A0A0Q9D6U8|A0A0Q9D6U8_9RHIZ 7-cyano-7-deazaguanine synthase OS=Ensifer sp. Root278; OX = 1736509 GN=queC PE=3 SV=1
MKTIVICSGGLDSVSLAHKVAAEQELIGLLSFDYGQRHRKELDFAAACARRLGVPHQIIDIRAIGAHLTGSALTDDVDVPDGHYAEETMKATVVPNRNAIMLAIAFGLAAAQKADAVAVAVHGGDHFIYPDCRPGFIDAFQAMQNQALDGYANVALYAPYVTVSKADIVTDGASHATPFEETWSCYKGGARHCGRCGTCVERREAFHLAGVADPTDYEDPDFWVAATSAFSAEEVK

SEQ ID NO: 38093 - protein, 236 aa, Ensifer sp.
  REGION 1..236: note = tr|A0A1C0SH44|A0A1C0SH44_9RHIZ 7-cyano-7-deazaguanine synthase OS=Ensifer sp. LC14; OX = 1873714 GN=queC PE=3 SV=1
MKTIVICSGGLDSVSLAHKVAAEHELIGLLSFDYGQRHRKELDFAAACARRLNVPHQIIDIRAIGAHLTGSALTDDVDVPDGHYAEDTMKATVVPNRNAIMLAIAFGLAAAQKADAVAVAVHGGDHFIYPDCRPGFIDAFQTMQNHALDGYANVRLYAPYVTISKADIVTDGASHATPFAETWSCYKGGARHCGRCGTCVERREAFHLAGVADPTDYEDSDFWVAATSAFAAEEVK

SEQ ID NO: 38094 - protein, 229 aa, unidentified
  source 1..229: note = Enterobacillus tribolii
  REGION 1..229: note = tr|A0A370QNH8|A0A370QNH8_9ENTR 7-cyano-7-deazaguanine synthase OS=Enterobacillus tribolii; OX = 1487935 GN=queC PE=3 SV=1
MKRAVVVFSGGQDSTTCLIQALEQYDEVHCVTFDYGQRHRAEIDVARELAQTLGAAAHKTLDVGLLNELAVSSLTRDNIPVPDQSEDGIPNTFVPGRNILFLTLAAIYAYQVGAEAVITGVCETDFSGYPDCRDEFVKALNHAVTLGMARDVRFETPLMWLNKAETWALAAYYHRLELVRNETLTCYNGVRGDGCGHCAACHLRANGLQQYLAQPDAVMAALKSKTGLR

SEQ ID NO: 38095 - protein, 231 aa, unidentified; identical to SEQ ID NO: 37699
  source 1..231: note = Enterobacter agglomerans
  REGION 1..231: note = tr|A0A379AJI4|A0A379AJI4_ENTAG 7-cyano-7-deazaguanine synthase OS=Enterobacter agglomerans OX=549 GN=queC PE=3 SV=1

SEQ ID NO: 38096 - protein, 198 aa, unidentified
  source 1..198: note = Enterobacter agglomerans
  REGION 1..198: note = tr|A0A379AF52|A0A379AF52_ENTAG 7-cyano-7-deazaguanine synthase OS=Enterobacter agglomerans OX=549 GN=NCTC9381_01754 PE=3 SV=1
MHKRTGLILSGGMDSLTIAWWKKPEVAFTVDYGQKAANAEIQASSQICKILNIEHHILRVDCSSLGSGDMAGKASDKNAPETDWWPYRNQMLVTLIAMKAIGQDVDKLLIGTVCSDSNHKDGTLEFIKLMSNLLAFQEGHLILEAPAIGMTTHELITKSNIPHGYLLWAHSCHTSNIPCGKCRGCNKFHNVIHELNIL

SEQ ID NO: 38097 - protein, 231 aa, Enterobacter asburiae
  REGION 1..231: note = tr|A0A0H0ADS8|A0A0H0ADS8_ENTAS 7-cyano-7-deazaguanine synthase OS=Enterobacter asburiae; OX = 61645 GN=queC PE=3 SV=1
MKRAVVVFSGGQDSTTCLVQALHQYDEVHCVTFDYGQRHRAEIDVARELALKLGARAHKVLDVTLLNELAVSSLTRDSIPVPDYEPDASGIPNTFVPGRNILFLTLTAIYAYQVKAEAVITGVCETDFSGYPDCRDEFVKALNHAVNLGMAKETRFETPLMWLDKAETWALADYWGKLDLVRSETLTCYNGIKGDGCGQCAACNLRANGLNHYLADKSGVMAAMQKKTGLK

SEQ ID NO: 38098 - protein, 231 aa, Enterobacter asburiae
  REGION 1..231: note = tr|A0A5A9A1S3|A0A5A9A1S3_ENTAS 7-cyano-7-deazaguanine synthase OS=Enterobacter asburiae; OX = 61645 GN=queC PE=3 SV=1
MKRAVVVFSGGQDSTTCLVQALHQYDEVHCVTFDYGQRHRAEIDVARELALKLGARAHKVLDVTLLNELAVSSLTRDSIPVPDYEPDASGIPNTFVPGRNILFLTLTAIYAYQVKAEAVITGVCETDFSGYPDCRDEFVKALNHAVNLGMAKETRFETPLMWLDKAETWALADYWGKLDLVRSETLTCYNGIKGDGCGQCAACNLRANGLNHYLADKAGVMAAMQKKTGLK

SEQ ID NO: 38099 - protein, 231 aa, unidentified; identical to SEQ ID NO: 38098
  source 1..231: note = Enterobacter bugandensis
  REGION 1..231: note = tr|A0A2J7RUY1|A0A2J7RUY1_9ENTR 7-cyano-7-deazaguanine synthase OS=Enterobacter bugandensis OX=881260 GN=queC PE=3 SV=1

SEQ ID NO: 38100 - protein, 231 aa, unidentified
  source 1..231: note = Enterobacter bugandensis
  REGION 1..231: note = tr|A0A4S3T2G6|A0A4S3T2G6_9ENTR 7-cyano-7-deazaguanine synthase OS=Enterobacter bugandensis OX=881260 GN=queC PE=3 SV=1
MKRAVVVFSGGQDSTTCLVQALHQYDEVHCVTFDYGQRHRAEIDVARELALKLGARAHKVLDVTLLNELAVSSLTRDSIPVPDYEPDASGIPNTFVPGRNILFLTLTAIYAYQVKAEAVITGVCETDFSGYPDCRDEFVKALNHAVSLGMAKETRFETPLMWLDKAETWALADYWGKLDLVRSETLTCYNGIKGDGCGQCAACNLRANGLNHYLADKVGVMAAMQKKTGLK

SEQ ID NO: 38101 - protein, 231 aa, Enterobacter cancerogenus
  REGION 1..231: note = tr|D2ZG30|D2ZG30_9ENTR 7-cyano-7-deazaguanine synthase OS=Enterobacter cancerogenus ATCC 35316 OX=500639; GN = queC PE=3 SV=1
MKRAVVVFSGGQDSTTCLIQALHQYDEVHCVTFDYGQRHRAEIDVARELALNLGARAHKVLDVNLLNELAVSSLTRDSIPVPDYEPDASGIPNTFVPGRNILFLTLTAIYAYQVKAEAVITGVCETDFSGYPDCRDEFVKALNHAVNLGMAKETRFETPLMWLDKAETWALADYWGKLDLVRSETLTCYNGIKGDGCGQCAACNLRANGLNHYLADKPGVMAAMKQKTGLK

SEQ ID NO: 38102 - protein, 231 aa, Enterobacter cancerogenus; identical to SEQ ID NO: 38101
  REGION 1..231: note = tr|A0A2J7P6S6|A0A2J7P6S6_9ENTR 7-cyano-7-deazaguanine synthase OS=Enterobacter cancerogenus OX=69218 GN=queC PE=3 SV=1

SEQ ID NO: 38103 - protein, 231 aa, unidentified
  source 1..231: note = Enterobacter chengduensis
  REGION 1..231: note = tr|A0A0F4BS96|A0A0F4BS96_9ENTR 7-cyano-7-deazaguanine synthase OS=Enterobacter chengduensis OX=2494701 GN=queC PE=3 SV=1
MKRAVVVFSGGQDSTTCLVQALHQYDEVHCVTFDYGQRHRAEIDVARELALKLGARAHKVLDVTLLNELAVSSLTRDSIPVPDYEPDASGIPNTFVPGRNILFLTLTAIYAYQVKAEAVITGVCETDFSGYPDCRDEFVKALNHAVNLGMAKETRFETPLMWLDKAETWALADYWGKLDLVRSETLTCYNGIKGDGCGQCAACNLRANGLNHYFADKVGVMAAMKKKTGLK

SEQ ID NO: 38104 - protein, 231 aa, unidentified
  source 1..231: note = Enterobacter chuandaensis
  REGION 1..231: note = tr|A0A3A3ZK68|A0A3A3ZK68_9ENTR 7-cyano-7-deazaguanine synthase OS=Enterobacter chuandaensis OX=2497875 GN=queC PE=3 SV=1
MKRAVVVFSGGQDSTTCLVQALHQYDEVHCVTFDYGQRHRAEIDVARELALKLGARAHKVLDVTLLNELAVSSLTRDSIPVPDYEPDASGIPNTFVPGRNILFLTLTAIYAYQVKAEAVITGVCETDFSGYPDCRDEFVKALNHAVNLGMAKETRFETPLMWLDKAETWALADYWGKLDLVRSETLTCYNGLKGDGCGQCAACNLRANGLNHYLSDKVGVMAAMQKKTGLK

SEQ ID NO: 38105 - protein, 231 aa, Enterobacter cloacae
  REGION 1..231: note = tr|A0A144XRJ6|A0A144XRJ6_ENTCL 7-cyano-7-deazaguanine synthase OS=Enterobacter cloacae; OX = 550 GN=queC PE=3 SV=1
MKRAVVVFSGGQDSTTCLIQALHQYDEVHCVTFDYGQRHRAEIDVARELALKLGARAHKVLDVTLLNELAVSSLTRDSIPVPDYEPDASGIPNTFVPGRNILFLTLTAIYAYQVKAEAVITGVCETDFSGYPDCRDEFVKALNHAVDLGMAKETRFETPLMWLDKAETWALADYWGKLDVVRNETLTCYNGIKGDGCGQCAACNLRANGLNHYFADKAGVMAAMQKKTGLK

SEQ ID NO: 38106 - protein, 231 aa, Enterobacter cloacae
  REGION 1..231: note = tr|A0A5E3W216|A0A5E3W216_ENTCL 7-cyano-7-deazaguanine synthase OS=Enterobacter cloacae; OX = 550 GN=queC PE=3 SV=1
MKRAVVVFSGGQDSTTCLVQALHQYDEVHCVTFDYGQRHRAEIDVARELALKLGARAHKVLDVTLLNELAVSSLTRDSIPVPDYTPDASGIPNTFVPGRNILFLTLTAIYAYQVQAEAVITGVCETDFSGYPDCRDEFVKALNHAVNLGMAKETRFETPLMWLDKAETWALADYWGKLDLVRSETLTCYNGIKGDGCGQCAACNLRANGLNHYLADKAGVMAAMQKKTGLK

SEQ ID NO: 38107 - protein, 231 aa, unidentified
  source 1..231: note = Enterobacter genomosp.
  REGION 1..231: note = tr|A0A0X4EQP0|A0A0X4EQP0_9ENTR 7-cyano-7-deazaguanine synthase OS=Enterobacter genomosp. O OX=2364150 GN=queC PE=3 SV=1
MKRAVVVFSGGQDSTTCLVQALHQYDEVHCVTFDYGQRHRAEIDVARELALKLGARAHKVLDVTLLNELAVSSLTRDSIPVPDYEPDASGIPNTFVPGRNILFLTLTAIYAYQVKAEAVITGVCETDFSGYPDCRDEFVKALNHAVNLGMAKETRFETPLMWLDKAETWALADYWGKLDLVRSETLTCYNGIKGDGCGQCAACNLRANGLNHYLADKVGVMAAMQKKTGLK

SEQ ID NO: 38108 - protein, 231 aa, Enterobacter hormaechei
  REGION 1..231: note = tr|F5RUZ3|F5RUZ3_9ENTR 7-cyano-7-deazaguanine synthase OS=Enterobacter hormaechei ATCC 49162 OX=888063; GN = exsB PE=3 SV=1
MKRAVVVFSGGQDSTTCLIQALHQYDEVHCVTFDYGQRHRAEIDVARELALKLGARAHKVLDVTLLNELAVSSLTRDSIPVPDYEPDASGIPNTFVPGRNILFLTLTAIYAYQVKAEAVITGVCETDFSGYPDCRDEFVKALNHAVDLGMAKETCFETPLMWLDKAETWALADYWGKLDVVRNETLTCYNGIKGDGCGQCAACNLRANGLNHYLADKAGVMAAMQKKTGLK

SEQ ID NO: 38109 - protein, 231 aa, Enterobacter hormaechei
  REGION 1..231: note = tr|A0A5A9FRE8|A0A5A9FRE8_9ENTR 7-cyano-7-deazaguanine synthase OS=Enterobacter hormaechei; OX = 158836 GN=queC PE=3 SV=1
MKRAVVVFSGGQDSTTCLIQALHQYDEVHCVTFDYGQRHRAEIDVARELALKLGARAHKVLDVTLLNELAVSSLTRDSIPVPDYEPDASGIPSTFVPGRNILFLTLTAIYAYQVKAEAVITGVCETDFSGYPDCRDEFVKALNHAVDLGMAKETRFETPLMWLDKAETWALADYWGKLDVVRNETLTCYNGIKGDGCGQCAACNLRANGLNHYFADKAGVMAAMQKKTGLK

SEQ ID NO: 38110 - protein, 231 aa, unidentified
  source 1..231: note = Enterobacter huaxiensis
  REGION 1..231: note = tr|A0A3R9Q2S5|A0A3R9Q2S5_9ENTR 7-cyano-7-deazaguanine synthase OS=Enterobacter huaxiensis; OX = 2494702 GN=queC PE=3 SV=1
MKRAVVVFSGGQDSTTCLVQALHQYDEVHCVTFDYGQRHRAEIDVARDLALKLGARAHKVLDVTLLNELAVSSLTRDSIPVPDYEPDASGIPNTFVPGRNILFLTLTAIYAYQVKAEAVITGVCETDFSGYPDCRDEFVKALNHAVNLGMAKETRFETPLMWLDKAETWALADYWGKLDLVRSETLTCYNGIKGDGCGQCAACNLRANGLNHYLADKVGVMAAMQKKTGLK

SEQ ID NO: 38111 - protein, 231 aa, Enterobacter kobei
  REGION 1..231: note = tr|A0A5E1A1W8|A0A5E1A1W8_9ENTR 7-cyano-7-deazaguanine synthase OS=Enterobacter kobei; OX = 208224 GN=queC PE=3 SV=1
MKRAVVVFSGGQDSTTCLVQALHQYDEVHCVTFDYGQRHRAEIDVARELALKLGARAHKVLDVTLLNELAVSSLTRDSIPVPDYKPDASGIPNTFVPGRNILFLTLTAIYAYQVQAEAVITGVCETDFSGYPDCRDEFVKALNHAVNLGMAKETRFETPLMWLDKAETWALADYWGKLDLVRSETLTCYNGIKGDGCGQCAACNLRANGLNHYLADKAGVMAAMQKKTGLK

SEQ ID NO: 38112 - protein, 231 aa, Enterobacter kobei
  REGION 1..231: note = tr|A0A5A9BBR0|A0A5A9BBR0_9ENTR 7-cyano-7-deazaguanine synthase OS=Enterobacter kobei; OX = 208224 GN=queC PE=3 SV=1
MKRAVVVFSGGQDSTTCLVQALHQYDEVHCVTFDYGQRHRAEIDVARELALKLGARAHKVLDVTLLNELAVSSLTRDSIPVPDYEPDASGIPNTFVPGRNILFLTLTAIYAYQVKAEAVITGVCETDFSGYPDCRDEFVKALNHAVNLGMAKETRFETPLMWLDKAETWALADYWGKLDLVRSETLTCYNGIKGDGCGQCAACNLRANGLNHYLADKVGVMAAMKQKTGLK

SEQ ID NO: 38113 - protein, 231 aa, unidentified
  source 1..231: note = Enterobacter lignolyticus
  REGION 1..231: note = tr|E3G6W1|E3G6W1_ENTLS 7-cyano-7-deazaguanine synthase OS=Enterobacter lignolyticus (strain SCF1); OX = 701347 GN=queC PE=3 SV=1
MKRAVVVFSGGQDSTTCLVQALQQYDEVHCVTFDYGQRHRAEIDVARTLALQLGARAHKVLDVTLLNELAVSSLTRDSIPVPDYEPDADGIPNTFVPGRNILFLTLTAIYAYQVKAEAVITGVCETDFSGYPDCRDEFVKALNHAVNLGMAKDIRFETPLMWLDKAQTWALADYWGKLDLVRNETLTCYNGVKGDGCGQCAACNLRSNGLSHYFADKPAVMAAMKAKTGLK

SEQ ID NO: 38114 - protein, 231 aa, Enterobacter ludwigii
  REGION 1..231: note = tr|G8LPV4|G8LPV4_9ENTR 7-cyano-7-deazaguanine synthase OS=Enterobacter ludwigii OX=299767 GN=queC PE=3; SV = 1
MKRAVVVFSGGQDSTTCLVQALHQYDEVHCVTFDYGQRHRAEIDVARELALKLGARAHKVLDVTLLNELAVSSLTRDSIPVPDYEPDASGIPNTFVPGRNILFLTLTAIYAYQVKAEAVITGVCETDFSGYPDCRDEFVKALNHAVNLGMAKETRFETPLMWLDKAETWALADYWGKLDMVRSETLTCYNGIKGDGCGQCAACNLRANGLNHYLADKAGVMSAMKKKTGLK

SEQ ID NO: 38115 - protein, 77 aa, Enterobacter mori
  REGION 1..77: note = tr|A0A2U2NG19|A0A2U2NG19_9ENTR 7-cyano-7-deazaguanine synthase (Fragment) OS=Enterobacter mori OX=539813 GN=DEM28_26135 PE=3 SV=1
MTQHTLNYNKEIVVFTGGQDSTTCLFWAKKHFDEVELVTFEYGQRHDTEIEVAKQIAQEQNLKHHVLDMSLLSQLTP

SEQ ID NO: 38116 - protein, 231 aa, Enterobacter mori
  REGION 1..231: note = tr|A0A2J0NBK5|A0A2J0NBK5_9ENTR 7-cyano-7-deazaguanine synthase OS=Enterobacter mori; OX = 539813 GN=queC PE=3 SV=1
MKRAVVVFSGGQDSTTCLVQALHQYDEVHCVTFDYGQRHRAEIDVARELALKLGARAHKVLDVTLLNELAVSSLTRDSIPVPDYEPDASGIPNTFVPGRNILFLTLTAIYAYQVQAEAVITGVCETDFSGYPDCRDEFVKALNHAVNLGMAKETRFETPLMWLDKAETWALADYWGKLDLVRSETLTCYNGIKGDGCGQCAACNLRANGLNHYLADKAGVMTAMQKKTGLK

SEQ ID NO: 38117 - protein, 231 aa, unidentified
  source 1..231: note = Enterobacter roggenkampii
  REGION 1..231: note = tr|A0A1S2AVE7|A0A1S2AVE7_9ENTR 7-cyano-7-deazaguanine synthase OS=Enterobacter roggenkampii OX=1812935 GN=queC PE=3 SV=1
MKRAVVVFSGGQDSTTCLVQALHQYDEVHCVTFDYGQRHRAEIDVARELALKLGVRAHKVLDVTLLNELAVSSLTRDSIPVPDYEPDASGIPNTFVPGRNILFLTLTAIYAYQVKAEAVITGVCETDFSGYPDCRDEFVKALNHAVNLGMAKETRFETPLMWLDKAETWALADYWGKLDLVRSETLTCYNGIKGDGCGQCAACNLRANGLNHYLADKAGVMAAMQKKTGLK

SEQ ID NO: 38118 - protein, 231 aa, unidentified
  source 1..231: note = Enterobacter roggenkampii
  REGION 1..231: note = tr|A0A5D1UCX8|A0A5D1UCX8_9ENTR 7-cyano-7-deazaguanine synthase OS=Enterobacter roggenkampii OX=1812935 GN=queC PE=3 SV=1
MKRAVVVFSGGQDSTTCLVQALHQYDEVHCVTFDYGQRHRAEIDVARELALKLGARAHKVLDVTLLNELAVSSLTRDSIPVPDYEPDASGIPNTFVPGRNILFLTLTAIYAYQVKAEAVITGVCETDFSGYPDCRDEFVKALNHAVNLGMAKETRFETPLMWLDKAETWALADYWGKLDLVRSETLTCYNGIKGDGCGQCAACNLRANGLNHYLANKAGVMAAMQKKTGLK

SEQ ID NO: 38119 - protein, 231 aa, unidentified
  source 1..231: note = Enterobacter sichuanensis
  REGION 1..231: note = tr|A0A0F1B333|A0A0F1B333_9ENTR 7-cyano-7-deazaguanine synthase OS=Enterobacter sichuanensis OX=2071710 GN=queC PE=3 SV=1
MKRAVVVFSGGQDSTTCLVQALHQYDEVHCVTFDYGQRHRAEIDVARELALKLGARAHKVLDVTLLNELAVSSLTRDSIPVPDYQPDASGIPNTFVPGRNILFLTLTAIYAYQVQAEAVITGVCETDFSGYPDCRDEFVKALNHAVNLGMAKETRFETPLMWLDKAETWALADYWGKLDLVRSETLTCYNGIKGDGCGQCAACNLRANGLNHYLADKAGVMAAMQKKTGLK

SEQ ID NO: 38120 - protein, 231 aa, Enterobacter soli
  REGION 1..231: note = tr|A0A198GQT4|A0A198GQT4_9ENTR 7-cyano-7-deazaguanine synthase OS=Enterobacter soli ATCC BAA-2102 OX=1354262 GN=queC PE=3 SV=1
MKRAVVVFSGGQDSTTCLVQALHQYDEVHCVTFDYGQRHRAEIDVARELALKLGARAHKVLDVTLLNELAVSSLTRDSIPVPDYEPDASGIPNTFVPGRNILFLTLTAIYAYQVKAEAVITGVCETDFSGYPDCRDEFVKALNHAVNLGMAKDIRFETPLMWLDKAETWALADYWGKLDMVRSETLTCYNGIKGDGCGQCAACNLRANGLNHYLADKAGVMAALQKKTGLK

SEQ ID NO: 38121 - protein, 231 aa, Enterobacter sp.
  REGION 1..231: note = sp|A4W7B5|QUEC_ENT38 7-cyano-7-deazaguanine synthase; OS = Enterobacter sp. (strain 638) OX=399742 GN=queC PE=3; SV = 2
MKRAVVVFSGGQDSTTCLIQALHQYDEVHCVTFDYGQRHRAEIDVARELALKLGARAHKVLDVTLLNELAVSSLTRDSIPVPDYEPDADGIPNTFVPGRNILFLTLTAIYAYQVKAEAIITGVCETDFSGYPDCRDEFVKALNHAVDLGMAKEIRFETPLMWLDKAETWALADYWEKLELVRTETLTCYNGIKGDGCGQCAACNLRSNGLNHYLANKPAVMSAMKAKTGLK

SEQ ID NO: 38122 - protein, 231 aa, Enterobacter sp.; identical to SEQ ID NO: 38098
  REGION 1..231: note = tr|A0A4S3ENT9|A0A4S3ENT9_9ENTR 7-cyano-7-deazaguanine synthase OS=Enterobacter sp. AD2-3; OX = 2547834 GN=queC PE=3 SV=1

SEQ ID NO: 38123 - protein, 232 aa, unidentified
  source 1..232: note = Enterobacterales bacterium
  REGION 1..232: note = tr|A0A389M936|A0A389M936_9GAMM 7-cyano-7-deazaguanine synthase OS=Enterobacterales bacterium OX=1993870 GN=queC PE=3 SV=1
MKRAVVVFSGGQDSTTCLIQALTQYDEVHCITFDYGQRHRAEIDIARTLSVELGAKAHKVLDVGLLNELAVSSLTRDNIPVPALGETEDNGLPSTFVPGRNILFLTLAAIYAYQIQAEAVITGVCETDFSGYPDCRDEFVKALNHAVSLGIARDIRFETPLMWLNKAETWALADYYQQLDLVRQQTLTCYNGIAGDGCGECAACHLRANGLQQYQQDRDAVNASLKKKIGLR

SEQ ID NO: 38124 - protein, 231 aa, unidentified
  source 1..231: note = Enterobacterales bacterium
  REGION 1..231: note = tr|A0A2I0FST9|A0A2I0FST9_9GAMM 7-cyano-7-deazaguanine synthase OS=Enterobacterales bacterium CwR94 OX=2025587 GN=queC PE=3 SV=1
MKRAVVVFSGGQDSTTCLVQALQQYDEVHCVTFDYGQRHREEIIVAAELANKLGAVAHKVLDVTLLNELAISSLTRDSIPVPHYTPDASGLPSTFVPGRNILFLTLASIYAYQVDAEAVITGVCETDFSGYPDCRDAFVKALNHAVELGMARQVRFETPLMWLNKAETWALADHWQSLTLIREETLTCYNGKRGDGCGECAACHLRARGLAEYQQDADTVKASLYKKTGLR

SEQ ID NO: 38125 - protein, 231 aa, unidentified
  source 1..231: note = Enterobacteriaceae bacterium
  REGION 1..231: note = tr|A0A3C2BDW1|A0A3C2BDW1_9ENTR 7-cyano-7-deazaguanine synthase OS=Enterobacteriaceae bacterium OX=1849603 GN=queC PE=3 SV=1
MKRAVVVFSGGQDSTTCLIQALNQYDEVHCVTFDYGQRHRAEIDIAKDLAHKLGARAHKVLDVGLLNELAVSSLTRDSIPVPDYDPDASGIPSTFVPGRNILFLTLTAIYAYQVQAEAIITGVCETDFSGYPDCRDEFVKALHHAVNLGMASNIRFETPLMWLNKAETWALADRWGKLDLVRNETLTCYNGIKGDGCGECAACHLRANGLNQYLADKPGVMAQLKRKMDLP

SEQ ID NO: 38126 - protein, 231 aa, unidentified
  source 1..231: note = Enterobacteriaceae bacterium
  REGION 1..231: note = tr|A0A427BW11|A0A427BW11_9ENTR 7-cyano-7-deazaguanine synthase OS=Enterobacteriaceae bacterium CCUG 66741 OX=1851514 GN=queC PE=3 SV=1
MKRAVVVFSGGQDSTTCLVQALQQYDEVDCVTFDYGQRHRVEIDVARELALKLGARAHKVLDVTLLNELAVSSLTRDSIPVPDYEPEANGIPNTFVPGRNILFLTLTAIYAYQVKAEAVITGVCETDFSGYPDCRDEFVKALNHAVNLGMAKEIRFETPLMWIDKAETWALADYWGHLDMVRSETLTCYNGIKGDGCGHCAACTLRANGLNHYLADKTGVMAALKAKTGLQ

SEQ ID NO: 38127 - protein, 425 aa, Enterococcus casseliflavus
  REGION 1..425: note = tr|A0A4V0APR7|A0A4V0APR7_ENTCA Uncharacterized protein OS=Enterococcus casseliflavus OX=37734; GN = NCTC4725_03280 PE=4 SV=1
MKQLVGKANFNNELFEIDLEDNKIQKNNFWDRFLKNELFSYPSTEAIDLMYLSEFVYFCDRNFMRELNDDGWKRDISLSIPVLNIKKFEDKKDIIQDLLNFLSGDTWNLSFFKRKETDNEKRYRSKCADRDQNYISNVCMFSGGLDSFIGAIDLLEKEEKQIFVSHYGGSKGTLKYQDLLREQLMGKYPSLNENDFFQFYIAPQIQHKDRNEDTTRSRSLLFFSHAISIATSVGANKLIIPENGFISLNVPLTPARIGSSSTRTTHPYYFLLFENLLEGLGINIEIYNPFKYLTKGQMIKNCKNRNFLEKNIVNTMSCSKPDHARWNGYNEPIHCGYCIPCTIRRASILEGKFIDKTEYFVTDYSTNESKSNLNAFRLAIANNMEKDPLFTIQSNGPILNNFEEYGKIYLNGLIELKNFLERLKL

SEQ ID NO: 38128 - protein, 246 aa, Enterococcus casseliflavus
  REGION 1..246: note = tr|S4B2R4|S4B2R4_ENTCA Uncharacterized protein; OS = Enterococcus casseliflavus 14-MB-W-14 OX=1259825; GN = D932_00580 PE=4 SV=1
MKKVLWTGGWDSTFRVLDLVINKKEMVQPYYVVDRNRASNKIELKTMKEIKNKINSNFPDSKGLIKETIFIEKNEIPVNQSITDKFNRLLNESYMGTQYDWLGRYAEANNLENLELNIHKDDKAEFFVRPLVEKTDDGPGSYSYVLKNSALGTDYDLFKYYSFPVLDLTKTQMSEISKKSGFDSLMEMTWFCFNPTWRKTPCGYCNPCKYTRNEGLGRRVPSEGIAKYNKLENKIYYKMKQIMGSN

SEQ ID NO: 38129 - protein, 83 aa, Enterococcus faecium
  REGION 1..83: note = tr|A0A2V2L2Z3|A0A2V2L2Z3_ENTFC 7-cyano-7-deazaguanine synthase (Fragment) OS=Enterococcus faecium OX=1352 GN=DKX15_19785 PE=3 SV=1
VEIDAARRIAASLECACHVILPLDLRQFGGSALTDDLDVPTGGVGDGIPVTYVPARNIVFLSLTLAWAEAIGAQDIFIGVNAL

SEQ ID NO: 38130 - protein, 237 aa, Enterorhabdus caecimuris
  REGION 1..237: note = tr|A0A4S4G7E0|A0A4S4G7E0_9ACTN 7-cyano-7-deazaguanine synthase OS=Enterorhabdus caecimuris OX=671266 GN=queC PE=3 SV=1
MTANRKALVLCSGGVDSTTLLAQAVAKYGAENVYALSISYGQKHGCEIEAARAVAAHYGVQQRFLDLGAIFADSACSLLAHSDTAVPAGTYAEQQAEGGEGAPVSTYVPFRNGLFLSSAASMALSLGCEVVLYGAHHDDAAGNAYPDCSMEFVEAMNRAIVEGTGGELVLEAPFVALAKADIVREGLALGVPYELTWSCYEGGEVPCGVCATCLDRAAAFAANGVEDPALATGITRG

SEQ ID NO: 38131 - protein, 240 aa, Enterorhabdus caecimuris
  REGION 1..240: note = tr|R9L0B4|R9L0B4_9ACTN Uncharacterized protein; OS = Enterorhabdus caecimuris B7 OX=1235794 GN=C811_00255; PE = 4 SV=1
MGVPMDVRKAGSLEENRTAADYEAHIAEDTEDVGPGQHLFGEPLEMYLLREPRLAVAFSGGCDSSLLLAAAKLAGCEVRAYLVKTAFQPDFELDDARRVAEALGVPLTVVEADVLAQAEICENQLDRCYRCKRFIFQKVREAAATDGFTVIVDGTNASDDPARRPGFKALAEAGIVSPLRRAGMTKANVRAVLAHLERSFGLEAGALMSAKPSFPCLAVYVPEGEPITQSALDAAQMRGL

SEQ ID NO: 38132 - protein, 229 aa, Enterorhabdus sp.
  REGION 1..229: note = tr|A0A4V3RS85|A0A4V3RS85_9ACTN 7-cyano-7-deazaguanine synthase OS=Enterorhabdus sp. NM05_H27 OX=2516956 GN=queC PE=3 SV=1
MQEKALVLCSGGVDSTTLLAGAVARFGAENVYALSISYGQRHIREIEAARAVAAHYGVEQRFLDLEAIFADSACSLLAHSDEAVPTGAYGEQQEAAEGGVVSTCVPFRNGLFLSSAASMALSLGCSVVLYGAHHDDWAGAAYPDCSPAFVEAMAAAIAEGTGGELRLEAPFVTWSKADIVAEGLTLGVPYELTWSCYEGGAAPCGACATCIDRAAAFAANHVEDPALKG

SEQ ID NO: 38133 - protein, 226 aa, Enterovibrio coralii
  REGION 1..226: note = tr|A0A135I396|A0A135I396_9GAMM 7-cyano-7-deazaguanine synthase OS=Enterovibrio coralii; OX = 294935 GN=queC PE=3 SV=1
MKKAVVVFSGGQDSTTCLIQALSEFDEVHCITFDYNQRHKQEIDVARDVANALGATSHKVMDVGLLNELAISSLTRDNIPVSHELQENGLPNSFVPGRNILFLTLAGIYAYQLGAEAVITGVCETDFSGYPDCRNDFVQAMNNALVLGMDRQLDIRTPLMWLNKAETWALADKFGKLDFVRDQTLTCYNGVIGSGCGDCPACDLRQKGLVSYLNDKENVMASLNSK

SEQ ID NO: 38134 - protein, 228 aa, Enterovibrio nigricans
  REGION 1..228: note = tr|A0A1T4UMD3|A0A1T4UMD3_9GAMM 7-cyano-7-deazaguanine synthase OS=Enterovibrio nigricans DSM 22720 OX=1121868 GN=queC PE=3 SV=1
MKKAVVVFSGGQDSTTCLIQALSEFDEVHCITFDYNQRHKQEIDVACDVAKALGATSHKVMDVGLLNELAISSLTRDNIPVSHELQENGLPNSFVPGRNILFLTLAGIYAYQLGAETVITGVCETDFSGYPDCRNDFVQAMNNALVLGMDRQLEIRTPLMWLNKAETWALADKYGKLDFVRDQTLTCYNGVIGSGCGDCPACDLRQKGLDSYLHDKDCVMADLNSKIQ

SEQ ID NO: 38135 - protein, 228 aa, Enterovibrio norvegicus
  REGION 1..228: note = tr|A0A4U1XYL2|A0A4U1XYL2_9GAMM 7-cyano-7-deazaguanine synthase OS=Enterovibrio norvegicus; OX = 188144 GN=queC PE=3 SV=1
MKKAVVVFSGGQDSTTCLIQALSEFDEVHCITFDYGQRHKQEIEVAADVAKALGATSHKVMDVSLLNELAISSLTRDNIPVSHELQENGLPNSFVPGRNILFLTLSGIYAYQLGAETVITGVCETDFSGYPDCRNDFVQAMNKALVLGMDRELELRTPLMWLNKAETWALADTFGKLEYVRDNTLTCYNGVIGSGCGDCPACDLRQKGLDSYINDKDNVMASLDSKRH

SEQ ID NO: 38136 - protein, 228 aa, Enterovibrio norvegicus
  REGION 1..228: note = tr|A0A4U1Z696|A0A4U1Z696_9GAMM 7-cyano-7-deazaguanine synthase OS=Enterovibrio norvegicus; OX = 188144 GN=queC PE=3 SV=1
MKKAVVVFSGGQDSTTCLIQALSEFDEVHCITFDYGQRHKQEIEVAADVAKALGATSHKVMDVSLLNELAISSLTRDNIPVSHELQENGLPNSFVPGRNILFLTLSGIYAYQLGAETVITGVCETDFSGYPDCRNDFVQAMNKALVLGMDRELELRTPLMWLNKAETWALADKYGKLDYVRDNTLTCYNGVIGKGCGDCPACDLRQKGLDSYLEDKENVMASLDSKRH

SEQ ID NO: 38137 - protein, 228 aa, unidentified
  source 1..228: note = Enterovibrio pacificus
  REGION 1..228: note = tr|A0A1C3E689|A0A1C3E689_9GAMM 7-cyano-7-deazaguanine synthase OS=Enterovibrio pacificus; OX = 1080227 GN=queC PE=3 SV=1
MNKAVVVFSGGQDSTTCLIQALSEFDEVHCITFDYNQRHAEEIEVAKKVANTLGVSSHKIMDVGLLNELAISSLTRDNIAVSHELQDNGLPNTFVPGRNILFLTLAGIYAYQLGANTLITGVCETDFSGYPDCRDNFVKAMNNALVLGMDKALEIKTPLMWLNKAETWALADKFNKLDFVRENTLTCYNGLIGPGCGDCPACDLRQRGLDDYLADTGAVMAALESKTA

SEQ ID NO: 38138 - protein, 228 aa, Enterovibrio sp.
  REGION 1..228: note = tr|A0A4Q0YRU6|A0A4Q0YRU6_9GAMM 7-cyano-7-deazaguanine synthase OS=Enterovibrio sp. CAIM 600 OX=1278244 GN=queC PE=3 SV=1
MNKAVVVFSGGQDSTTCLIQALAEFDEVHCITFDYNQRHQEEIDVAKKLAASLGATSHKIMDVGLLNELAASSLTRDNIEVSHELQENGLPNTFVPGRNILFLTLAGIFAYQLGANTVITGVCETDFSGYPDCRDDFVKAMNSALVQGMDKPLDIKTPLMWLNKAETWALADKYSKLDVVREETLTCYNGVIGSGCGDCPACTLRQRGLDDYLAEKKAVMASLDSKTA

SEQ ID NO: 38139 - protein, 235 aa, unidentified
  source 1..235: note = Enterovirga rhinocerotis
  REGION 1..235: note = tr|A0A4R7C5Y1|A0A4R7C5Y1_9RHIZ 7-cyano-7-deazaguanine synthase OS=Enterovirga rhinocerotis OX=1339210 GN=queC PE=3 SV=1
MITLSDTRALVLFSGGQDSTTCLAWALRRFAEVETIGFDYGQRHSVELAVRPGLRDGLAALALGGALGPDHLVPIEGLGQISETALTRDVEIGMAETGLPTTFVPGRNLLFLTFAAALAYRRGCRHIVLGVCETDYSGYPDCRDDTIKAMQVALNLGLEARLVLHTPLMWRDKAATFAMAEEIGGPDLLRLVVEETHSCYLGDRTHRHEWGFGCGTCPACELRAAGWRRWCAAAA

SEQ ID NO: 38140 - protein, 233 aa, unidentified
  source 1..233: note = Epibacterium mobile
  REGION 1..233: note = tr|A0A1B1A2W3|A0A1B1A2W3_9RHOB 7-cyano-7-deazaguanine synthase OS=Epibacterium mobile F1926 OX=1265309 GN=queC PE=3 SV=1
MKTLVICSGGLDSVSLAHITANEHQLTRLVSFDYGQRHRKEVDFAEAAAKRLGVPFHLIDMRGIGGALTGSALTDDIDVPDGHYAEETMKITVVPNRNAIMLSIGFGIAAAQGDAAVATAVHGGDHFIYPDCRPGFTRAFDAMQQAALEGYADVRLHTPFVEHSKAEIVRQGARHGTPFAETWSCYKGGAFHCGRCGTCVERREAFHLAGVSDPTTYADPEYWTTALATRGES

SEQ ID NO: 38141 - protein, 233 aa, unidentified
  source 1..233: note = Epibacterium mobile
  REGION 1..233: note = tr|A0A1H3DH78|A0A1H3DH78_9RHOB 7-cyano-7-deazaguanine synthase OS=Epibacterium mobile; OX = 379347 GN=queC PE=3 SV=1
MKTLVICSGGLDSVSLAHITANEHQLTRLVSFDYGQRHRKEVDFAEAAAKRLGVPFHLIDMRGIGGALTGSALTDDIDVPDAHYAEETMKITVVPNRNAIMLSIGFGIAAAQGDAAVATAVHGGDHFIYPDCRPGFTRAFDAMQQAALEGYADVRLHTPFVEHSKAEIVRQGAQHGTPFAETWSCYKGGAFHCGRCGTCVERREAFHLAGVNDPTTYADPEYWITALATRGES

SEQ ID NO: 38142 - protein, 234 aa, unidentified
  source 1..234: note = Epibacterium multivorans
  REGION 1..234: note = tr|A0A0P1GVP7|A0A0P1GVP7_9RHOB 7-cyano-7-deazaguanine synthase OS=Epibacterium multivorans OX=928856 GN=queC PE=3 SV=1
MKTIVICSGGLDSVSLAHSIAAKGELSRLVSFDYGQRHAKEIDYAAACAQRLGVPHHIIDMRTIGASLTGSALTDDIDVPDGHYAEDTMKVTVVPNRNAIMLTIAYGIAAANGDTGVATAVHGGDHFIYPDCRPAFTEAFDTMQRAALDGYADVSLVTPFVHKSKADIVTEGARVNTPFADTWSCYKGGEHHCGRCGTCVERREAFHLAGIEDPTTYEDPDFWRAATGTAEESA

SEQ ID NO: 38143 - protein, 236 aa, unidentified
  source 1..236: note = Epibacterium ulvae
  REGION 1..236: note = tr|A0A1G5PJM2|A0A1G5PJM2_9RHOB 7-cyano-7-deazaguanine synthase OS=Epibacterium ulvae; OX = 1156985 GN=queC PE=3 SV=1
MKTIVICSGGMDSVSLAYMVAEQHELTRLVSFDYGQRHRKELDFAALAAKRLGVPHDIIDMRGIGASLTGSALTDDIDVPDGHYAEETMKVTVVPNRNAIMLSVAFGVAAANGDDAVATAVHGGDHFIYPDCRPAFTEAFNTMQQAALDGYAEVKLYTPFVHRSKADIAVEGAKVNTPFAETWSCYKGGEDHCGRCGTCVERREAFHLAGLTDPTIYEDPDFWRNATGVTATEETI

SEQ ID NO: 38144 - protein, 438 aa, unidentified
  source 1..438: note = Epibacterium ulvae
  REGION 1..438: note = tr|A0A1G5RIN8|A0A1G5RIN8_9RHOB 7-cyano-7-deazaguanine synthase (Queuosine biosynthesis); OS = Epibacterium ulvae OX=1156985 GN=SAMN04488118_1205 PE=4; SV = 1
MTKCVAHFQTEEIQRTKNIADNCRVVRLYDTCHHIANAGFIGKTVPDKVERLGAPTSTAAYDFLTISMAVTAADTFFRREDVSQNGWARDFELHVPLVQPAKWAAVEPLLRKILNFLTGDSWAFTFLPNGPSKPNAVGGRLRKKSNLTNVDSVCLYSGGLDSWLGAKHLTAGGKNPILVSHSYPQDARRQNYLYDRLGYPLQRFSLNASPRQSGSANDTTMRGRSFNFLAMGAVCADAVAELNGLNQVPLYIPENGFIALNAPLTPRRVGSHSTRTAHPNYLSQLQELFSRVGIRANIGNPFWTLTKGEMMKNAALTADDQRHACQTVSCGKWKRKSEQCGRCLPCLIRRASFHKAGIVDSTPYTYSIPQNFAERDGTKKDDLMAVIRSVRQTTKKQRLVNALKSGPLPIDSTERRAWLSVYERGLEEMGDFLTSQGV

SEQ ID NO: 38145 - protein, 230 aa, unidentified
  source 1..230: note = Epsilonproteobacteria bacterium
  REGION 1..230: note = tr|A0A496XSZ0|A0A496XSZ0_9PROT 7-cyano-7-deazaguanine synthase OS=Epsilonproteobacteria bacterium OX=2026809 GN=queC PE=3 SV=1
MNNLAVVLVSGGMDSLVSAAIANEKHDKLAFLHLNYGQNTENKELECFEKIANFYHVDINLRKVIDISFLKQIGGSSLTDEKIEVKKYHGDSADIPDSYVPFRNTHIVSMAVSWSEIIGAKKIYIGAVEEDSSGYPDCRPSYYKALNNLIKEGTKEGDIEVITPVIHMKKFEIVKKALDLKAPLEFTWSCYAREDKACGECDSCALRLRGFQMAGAVDPIEYVKRPDYSA

SEQ ID NO: 38146 - protein, 222 aa, unidentified
  source 1..222: note = Epsilonproteobacteria bacterium
  REGION 1..222: note = tr|A0A426VV57|A0A426VV57_9PROT 7-cyano-7-deazaguanine synthase OS=Epsilonproteobacteria bacterium (ex Lamellibrachia satsuma) OX=2496635 GN=queC; PE = 3 SV=1
MSKKAVCIISGGMDSALSAKIAQKDGYEIIALHFNYGQRTQEKELKCFRKIAAAVEARETYEIDLPFFEQIGASALTDKNIDVPTGGLEDGVPVTYVPFRNGIFLSIAAAIAEKHGAEALYIGVVEEDSSGYPDCRESYIEQMQKAINLGTKDETNIEIKMPLVTLKKSEIVQKALDLGVPLEDTWSCYQAEEKACGICDSCRLRLKGFKEAGRVDLIPYNI

SEQ ID NO: 38147 - protein, 214 aa, unidentified
  source 1..214: note = Epulopiscium sp.
  REGION 1..214: note = tr|A0A1V2YHR7|A0A1V2YHR7_9FIRM 7-cyano-7-deazaguanine synthase OS=Epulopiscium sp. Nuni2H_MBin001 OX=1884656 GN=queC PE=3 SV=1
MTKAIVVFSGGQDSTTCLFWALQQFDKVITVAFDYGQKHKAELECAASIANDLNVEHHVLDLMLINQLSANALTRDDIDINAGTNDSLPSTFVEGRNMLFLTFAAIFAKTHDIKNIITGVCQTDFSGYPDCRDIFIKSLNVTLNLAMDYEFVVHTPLMWIDKQQAWQLADELGKLDYIRNNTLTCYNGIKGDGCGQCPACVLRANGLNKYLEFR

SEQ ID NO: 38148 - protein, 273 aa, unidentified
  source 1..273: note = Epulopiscium sp.
  REGION 1..273: note = tr|A0A1V2M7A9|A0A1V2M7A9_9FIRM TIGR00268 family protein OS=Epulopiscium sp. SCG-C07WGA-EpuloA2 OX=1712378; GN = AN641_07625 PE=4 SV=1
MEQLENFIRRLIPKGVVIAFSGGVDSSLLLKVASIEGKKIGADVYAVTFETKLHPQADLEIAKQIAKNTEVIHDIIFIDELTKTEILKNPIDRCYHCKRFLFEELIKYAKQHNLKYIIDGTNVDDLSQYRPGIKALNELGIISPLAQLKIDKATVRKYAKKLGLNVHNRPSAPCLATRIPYNIKLDMEILKNIDKAETFLKELGFVKNRVRLHKNIIRIEVDRKDIYAIMECSDKIIKYFKGLGFLYITLDLEGFRSGSMDIHLLNGDKNGYK

SEQ ID NO: 38149 - protein, 422 aa, unidentified
  source 1..422: note = Ereboglobus luteus
  REGION 1..422: note = tr|A0A2U8E3P4|A0A2U8E3P4_9BACT Uncharacterized protein OS=Ereboglobus luteus OX=1796921 GN=CKA38_09890; PE = 4 SV=1
MEAFCFKELTVRDEELVCLAGIVAFADRLVRRKASLGWSRNLEIVMPVAEPRFWQQPEIVDTLLEALRYLTGDAWRFKFIKRAGRLPRVRQAEMDLGQGEFQVIPFSNGMDSFAQSRLLRKERPHISPIRVTAWNHGLAGSRTWLTDADGTRYRRVAVPIKFSFKGNADQTYRTRGFLFSVLAGLAAHMSGAKSIVIPEAGQGALGPSLVPVGAESPHRGSHPGFSRRMAAFFRAFWQKTISFEHPQLWHTKGEVLTMLKKENLHEGWEKTFSCSRGQRDIRTERHKKIHCGICSGCMLRRLAVFSADLPEPADTYMWPDLSASSLEESLCEDARRPVSTNDWDIAVHAVMAMEDLARLANTPITHPKMENALFDAFGNNPQQLAGGAEPLRRLLLAHQTEWRKFTQQLGPESWVNQQIAHL

SEQ ID NO: 38150 - protein, 231 aa, Erwinia amylovora
  REGION 1..231: note = tr|D4HY29|D4HY29_ERWAC 7-cyano-7-deazaguanine synthase OS=Erwinia amylovora (strain CFBP1430) OX=665029; GN = ybaX PE=3 SV=1
MKRAVVVFSGGQDSTTCLIQALQQYDEVHCVTFDYGQRHRAEIDVARQLSTLLGVRAHKVLDVTMLNELAVSSLTRDNIPVPAYNPAASGLPSTFVPGRNLVFFTFASIYAYQIEAQAIVTGACETDFSGYPDCRNEFVNALNQAINLGMARELRIETPLMWLNKAETWALADYWHQLPLIRHQTLTCYNGIIGDGCGDCAACHLRARGLSEYQQNPAAVTLELKRKTGLV

SEQ ID NO: 38151 - protein, 231 aa, Erwinia amylovora
  REGION 1..231: note = tr|E5B352|E5B352_ERWAM 7-cyano-7-deazaguanine synthase OS=Erwinia amylovora ATCC BAA-2158 OX=889211; GN = ybaX PE=3 SV=1
MKRAVVVFSGGQDSTTCLIQALQQYDEVHCVTFDYGQRHRAEIDVARQLSTSLGVRAHKVLDVTMLNELAVSSLTRDNIPVPAYNPAASGLPSTFVPGRNIVFFTFASIYAYQIEAQAIVTGACETDFSGYPDCRNEFVNALNQAINLGMARELRIETPLMWLNKAETWALADYWHQLPLIRHQTLTCYNGIIGDGCGDCAACHLRARGLSEYQQNPAAVTLELKRKTGLV

SEQ ID NO: 38152 - protein, 231 aa, Erwinia aphidicola; identical to SEQ ID NO: 36388
  REGION 1..231: note = tr|A0A4R6PGB4|A0A4R6PGB4_ERWAP 7-cyano-7-deazaguanine synthase OS=Erwinia aphidicola; OX = 68334 GN=queC PE=3 SV=1

SEQ ID NO: 38153 - protein, 231 aa, Erwinia billingiae
  REGION 1..231: note = tr|D8MNY9|D8MNY9_ERWBE 7-cyano-7-deazaguanine synthase OS=Erwinia billingiae (strain Eb661) OX=634500; GN = queC PE=3 SV=1
MRRAVVVFSGGQDSTTCLIQALQQYDEVHCITFDYGQRHRAEIDIARELSLSLGARAHKVLDVTMLNELAVSSLTRESIPVPAYDPDASGLPSTFVPGRNILFLTLASIYAYQVEAEAVITGVCETDFSGYPDCRDEFVKALNHAIELGMARSVRFETPLMWLNKAETWALADYWQQLPLVRNETLTCYNGEKGDGCGECAACHLRAKGLNEYQANGHAVMAEMKRKTGLR

SEQ ID NO: 38154 - protein, 231 aa, Erwinia billingiae; identical to SEQ ID NO: 38153
  REGION 1..231: note = tr|A0A5J6M3N9|A0A5J6M3N9_9GAMM 7-cyano-7-deazaguanine synthase QueC OS=Erwinia billingiae; OX = 182337 GN=queC PE=4 SV=1

SEQ ID NO: 38155 - protein, 231 aa, unidentified
  source 1..231: note = Erwinia citreus
  REGION 1..231: note = tr|A0A358L931|A0A358L931_ERWCI 7-cyano-7-deazaguanine synthase OS=Erwinia citreus OX=558; GN = queC PE=3 SV=1
MKRAVVVFSGGQDSTTCLIQALQQYDEVHCLTFDYGQRHRAEIEVARELAQSLGARAHKVLDVTLLNELAVSSLTRDSIPVPAWDPDASGLPSTFVPGRNILFLTLASIYAYQVEAEAVITGVCETDFSGYPDCRDEFVKALNHAVELGMARAVRFETPLMWLNKAETWALADYWQQLARVRNDTLTCYNGIKGDGCGECAACHLRANGLRDYQLNSAAVMQEMQHKTGLR

SEQ ID NO: 38156 - protein, 231 aa, unidentified
  source 1..231: note = Erwinia gerundensis
  REGION 1..231: note = tr|A0A0U5GK15|A0A0U5GK15_9GAMM 7-cyano-7-deazaguanine synthase OS=Erwinia gerundensis; OX = 1619313 GN=queC PE=3 SV=1
MKRAVVVFSGGQDSTTCLIQALQQYDEVHCVTFDYGQRHREEITVAQQLAKKLGARAHKVLDVNLLNELAISSLTRDNIPVPQWDPNASGLPSTFVPGRNILFLTLASVYAWQVEAEAVITGVCETDFSGYPDCRDEFVKALNHAITLGMARDIRFETPLMWLNKAETWALADYWQQLPLIRNETLTCYNGIQGDGCGECAACHLRARGLQEYQANQSTVMQTLKQKTGLQ

SEQ ID NO: 38157 - protein, 231 aa, unidentified
  source 1..231: note = Erwinia iniecta
  REGION 1..231: note = tr|A0A0L7T3Z5|A0A0L7T3Z5_9GAMM 7-cyano-7-deazaguanine synthase OS=Erwinia iniecta; OX = 1560201 GN=queC PE=3 SV=1
MKRAVVVFSGGQDSTTCLIQALQQYDEVHCVTFDYGQRHREEIEVAQTLSLQLGARAHKVLDVTLLNELAVSSLTRDNIPVPAFDPNASGLPSTFVPGRNILFLTLASIYAYQVEAEAVITGVCETDFSGYPDCRDEFVKALNHAIELGMARSVRFETPLMWLNKAETWALADYWQQLPLVRQQTLTCYNGIKGDGCGECAACHLRANGLNQYQADAAAVMASMQQKTGLI

SEQ ID NO: 38158 - protein, 231 aa, Erwinia mallotivora
  REGION 1..231: note = tr|A0A014NSZ4|A0A014NSZ4_9GAMM 7-cyano-7-deazaguanine synthase OS=Erwinia mallotivora; OX = 69222 GN=queC PE=3 SV=1
MKRAVMVFSGGQDSTTCLIQAVQQYEEVHCVTFDYGQRHRAEIEIAQQLSQKLGARAHKVLDVTLLNELAISSLTRDSIPVPAWNPDASGLPSTFVPGRNILFLTLASIYAYQVEAESVITGVCETDFSGYPDCRDEFVKALNQAVTLGMARQLRFETPLMWLNKAETWALADYWQQLPLVRDETLTCYNGIKGSGCGKCAACNLRANGLREYQNNTAAIMQSMQSKSGLD

SEQ ID NO: 38159 - protein, 231 aa, Erwinia persicina
  REGION 1..231: note = tr|A0A3S7S5Y6|A0A3S7S5Y6_9GAMM 7-cyano-7-deazaguanine synthase OS=Erwinia persicina; OX = 55211 GN=queC PE=3 SV=1
MKRAVVVFSGGQDSTTCLIQALQQYDEVHCVTFDYGQRHRAEIDVARELSHALGARAHKVLDVTMLNELAVSSLTRDNIPVPAYEPDASGLPSTFVPGRNILFLTLAAIYAWQIEAEAVITGVCETDFSGYPDCRDEFVKALNHAVSLGMARDIRFETPLMWLNKAETWALADYWQQLPLIRHQTLTCYNGIQGDGCGTCAACHLRANGLQAYQQHPATVMQAMKTKTGLV

SEQ ID NO: 38160 - protein, 231 aa, Erwinia piriflorinigrans
  REGION 1..231: note = tr|V5Z516|V5Z516_9GAMM 7-cyano-7-deazaguanine synthase OS=Erwinia piriflorinigrans CFBP 5888 OX=1161919; GN = ybaX PE=3 SV=1
MKRAVVVFSGGQDSTTCLIQALQQYDEVHCVTFDYGQRHRAEIDVAQQLSASLGARAHKVLDVTMLNELAVSSLTRDNIPVPAYDPAASGLPSTFVPGRNIVFFTFASIYAWQIEAEAIITGACETDFSGYPDCRDEFVKALNRAINLGMAREMRIETPLMWLNKAETWALADYWQQLPLIRHKTLTCYNGIIGDGCGDCAACHLRARGLNEYQQNLAAVMLEMKRKTGLM

SEQ ID NO: 38161 - protein, 231 aa, Erwinia psidii
  REGION 1..231: note = tr|A0A3N6S1I7|A0A3N6S1I7_9GAMM 7-cyano-7-deazaguanine synthase OS=Erwinia psidii OX=69224; GN = queC PE=3 SV=1
MKRAVVVFSGGQDSTTCLVQALQQYNEVDCITFDYGQRHRAEIDIARQLSQSLGARAHKTLDVTMLNELAISSLTRDSIPVPAYDPSASGLPSTFVPGRNILFLTLASIYAYQIEAEAVITGVCETDFSGYPDCRDEFVKSLNQAIVLGMAREVRFETPLMWLNKAETWALADYWHRLSLVRDETLTCYNGIKGEGCGECAACNLRANGLREYQSNPVDVMQSMQRKTGLS

SEQ ID NO: 38162 - protein, 231 aa, Erwinia pyrifoliae
  REGION 1..231: note = tr|D2T4J1|D2T4J1_ERWP6 7-cyano-7-deazaguanine synthase OS=Erwinia pyrifoliae (strain DSM 12163 / CIP 106111 / Ep16/96) OX=644651 GN=ybaX PE=3 SV=1
MKRAVVVFSGGQDSTTCLIQALQQYDEVHCVTFDYGQRHRAEIEVAQQLSTSLGVRAHKVLDVTMLNELAVSSLTRDNIPVPAYNPAASGLPSTFVPGRNIVFFTFASIYAYQIEAEAIVTGACETDFSGYPDCRDEFVKALNQAINLGMARELRIETPLMWLNKAETWALADYWQQLPLIRHQTLTCYNGIIGDGCGDCAACHLRARGLSEYQQNPAAITLELKRKTGLV

SEQ ID NO: 38163 - protein, 231 aa, Erwinia rhapontici
  REGION 1..231: note = tr|A0A4R7GLD8|A0A4R7GLD8_ERWRD 7-cyano-7-deazaguanine synthase OS=Erwinia rhapontici; OX = 55212 GN=queC PE=3 SV=1
MKRAVVVFSGGQDSTTCLIQALQQYDEVHCVTFDYGQRHRAEIDVARTLSLSLGARAHKVLDVTMLNELAVSSLTRDNIPVPAYDPTASGLPSTFVPGRNILFLTFAAIYAYQIEAEAVITGVCETDFSGYPDCRDEFVKALNHAVNLGMARDIRFETPLMWLNKAETWALADYWQQLPLIRHQTLTCYNGIQGDGCGECAACHLRANGLHDYQQNTAAVMQAMKTKTGLV

SEQ ID NO: 38164 - protein, 231 aa, Erwinia sp.
  REGION 1..231: note = tr|A0A3N1W3E4|A0A3N1W3E4_9GAMM 7-cyano-7-deazaguanine synthase OS=Erwinia sp. JUb26; OX = 2485126 GN=queC PE=3 SV=1
MKRAVVVFSGGQDSTTCLIQALKQYDEVHCVTFDYGQRHRAEIDVAQQLSVSLGARAHKVLDVTLLNELAVSSLTRDNIPVPTWDPASSGLPSTFVPGRNILFLTLAAIYAYQVEAEAVITGVCETDFSGYPDCRDEFVKALNQAVSLGMARDIRFETPLMWLNKAETWALADYWQQLKLVREQTLTCYNGIQGDGCGECAACHLRANGLQEYQHNATAVMQAMKTKTGLV

SEQ ID NO: 38165 - protein, 234 aa, Erwinia sp.
  REGION 1..234: note = tr|A0A0Q4MVQ4|A0A0Q4MVQ4_9GAMM 7-cyano-7-deazaguanine synthase OS=Erwinia sp. Leaf53; OX = 1736225 GN=queC PE=3 SV=1
MKRAVVVFSGGQDSTTCLIQALQQYDEVHCVTFDYGQRHRAEIDVAQQLSLQLGARAHKVLDVTLLNELAVSSLTRDNIPVPAYDPNASGLPSTFVPGRNILFLTLAAVYAYQVEAEAVITGVCETDFSGYPDCRDEFVKALNHAVTLGMARKVRFETPLMWLNKAETWALADYWQQLPLVRNETLTCYNAVKGDGCGECAACHLRANGLREYQQNPTAVMQAMKAKSASSDKT

SEQ ID NO: 38166 - protein, 231 aa, Erwinia tasmaniensis
  REGION 1..231: note = sp|B2VIU4|QUEC_ERWT9 7-cyano-7-deazaguanine synthase; OS = Erwinia tasmaniensis (strain DSM 17950 / CIP 109463 / Et1/99) OX=465817 GN=queC PE=3 SV=1
MKRAVVVFSGGQDSTTCLIQALEQYDEVHCVTFDYGQRHRAEIDVAQQLSASLGVRAHKVLDVTMLNELAASSLTRDNIPVPAYDPSASGLPSTFVPGRNIVFFTFASIYAFQIEAEAIITGACETDFSGYPDCRDEFVKALNRAVNLGMARELRIETPLMWLNKAETWALADYWQQLPLIRHQTLTCYNGIIGDGCGDCAACHLRARGLDQYQQNPTSVMLEMERKTGLA

SEQ ID NO: 38167 - protein, 231 aa, Erwinia tracheiphila
  REGION 1..231: note = tr|A0A0M2KBF7|A0A0M2KBF7_9GAMM 7-cyano-7-deazaguanine synthase OS=Erwinia tracheiphila; OX = 65700 GN=queC PE=3 SV=1
MKRAVVVFSGGQDSTTCLIQALQQYDEVHCVTFDYGQRHRAEIDIACHLSKLLGASAHKTLDVTLLNELAISSLTRDNIPVPAYNPAANGLPSTFVPGRNILFLTLASICAYQVEAETVITGVCETDFSGYPDCRDEFVKALNQAVTLGMAHPVRFVTPLMWLNKAEIWALADYWHQLSLVRNETLTCYNGIKGDGCGTCAACNLRANGLREYQSNAAGVMKNMQQKTGLT

SEQ ID NO: 38168 - protein, 231 aa, Erwinia tracheiphila
  REGION 1..231: note = tr|A0A345CZ08|A0A345CZ08_9GAMM 7-cyano-7-deazaguanine synthase OS=Erwinia tracheiphila; OX = 65700 GN=queC PE=3 SV=1
MKRAVVVFSGGQDSTTCLIQALQQYDEVHCVTFDYGQRHRAEIDIACHLSKLLGASAHKTLDVTLLNELAISSLTRDNIPVPAYNPAANGLPSTFVPGRNILFLTLASIYAYQVEAETVITGVCETDFSGYPDCRDEFVKALNQAVTLGMAHPVRFVTPLMWLNKAEIWALADYWHQLSLVRNETLTCYNGIKGDGCGTCAACNLRANGLREYQSNAAGVMKNMQQKTGLA

SEQ ID NO: 38169 - protein, 231 aa, Erwinia typographi
  REGION 1..231: note = tr|A0A0A3Z7V4|A0A0A3Z7V4_9GAMM 7-cyano-7-deazaguanine synthase OS=Erwinia typographi; OX = 371042 GN=queC PE=3 SV=1
MKRAVVVFSGGQDSTTCLIQALQQYDEVHCITFDYGQRHHAEIDVARQLSLSLGARAHKVLDVTLLNELAVSSLTRDSIPVPAYDANASGLPSTFVPGRNILFLTLASIYAYQVEAEAVITGVCETDFSGYPDCRDEFVKALNHAVALGMAREVRFETPLMWLNKAETWALADYWQQLPLVRNETLTCYNGIKGDGCGECAACHLRANGLTGYQADSDVVMAEMKRKTGLR

SEQ ID NO: 38170 - protein, 231 aa, unidentified
  source 1..231: note = Erwiniaceae bacterium
  REGION 1..231: note = tr|A0A3D5MBA1|A0A3D5MBA1_9GAMM 7-cyano-7-deazaguanine synthase OS=Erwiniaceae bacterium; OX = 2053552 GN=queC PE=3 SV=1
MKRAVVVFSGGQDSTTCLIQALAQYDEVHCVTFDYGQRHRQEIDVARKLSAQLGARAHKVLDVTLLNELAISSLTRDNIPVPDYDANATGLPSTFVPGRNILFLTLASIYAYQVEAEAVITGVCETDFSGYPDCRDEFVKALNHAVELGMARAVRFETPLMWLNKAETWALADYWQQLPLVRQQTLTCYNGIQGDGCGECAACHLRANGLKSYQDDMPGVMQSMKQKTGLR

SEQ ID NO: 38171 - protein, 227 aa, unidentified; identical to SEQ ID NO: 37609
  source 1..227: note = Erysipelatoclostridium ramosum
  REGION 1..227: note = tr|A0A3E3EI01|A0A3E3EI01_9FIRM 7-cyano-7-deazaguanine synthase OS=Erysipelatoclostridium ramosum OX=1547 GN=queC PE=3 SV=1

SEQ ID NO: 38172 - protein, 227 aa, unidentified
  source 1..227: note = Erysipelatoclostridium ramosum
  REGION 1..227: note = tr|B0N7Y1|B0N7Y1_9FIRM 7-cyano-7-deazaguanine synthase OS=Erysipelatoclostridium ramosum DSM 1402; OX = 445974 GN=queC PE=3 SV=1
MKVLVLFSGGVDSTTALALAIQEHGKDNVVALSISYGQKHTKEIEVANKIAQFYQVEHLYLDLAKIFTYSNCSLLQHSDNEIPHESYNEQLNKTDGNPVSTYVPFRNGLFLSSAASIALSKGCNIIYYGAHSDDAAGSAYPDCSKVFNNAMNQAIYEGSGHQLEIKAPFVEMTKADIVKIGLSLGVPYQLTWSCYEGNDTPCGTCGTCIDRQNAFLKNGIKDPLLGE

SEQ ID NO: 38173 - protein, 230 aa, unidentified
  source 1..230: note = Erysipelatoclostridium sp.
  REGION 1..230: note = tr|A0A1Y4MZH4|A0A1Y4MZH4_9FIRM 7-cyano-7-deazaguanine synthase OS=Erysipelatoclostridium sp. An173 OX=1965571 GN=queC PE=3 SV=1
MRVLVLFSGGVDSTTALALAINQYGHENVVALSISYGQKHDKEIQAANQIAKYYQVEHIFLDLAKIFEYSDCSLLNHSSKEIPHETYAKQLSKTDGKPVTTYVPFRNGLFLSSAASIALSKNCNLIYYGAHKDDAAGNAYPDCSEIFNNAMNQAIYEGSGHQLQIEAPFVNKSKADIVKIGLDLNVPYHLTWSCYEGNDKPCGKCGTCLDRQEAFLKNGVIDPLLGGNNG

SEQ ID NO: 38174 - protein, 230 aa, unidentified; identical to SEQ ID NO: 38173
  source 1..230: note = Erysipelatoclostridium sp.
  REGION 1..230: note = tr|A0A1Y4QQJ9|A0A1Y4QQJ9_9FIRM 7-cyano-7-deazaguanine synthase OS=Erysipelatoclostridium sp. An15 OX=1965566 GN=queC PE=3 SV=1

SEQ ID NO: 38175 - protein, 228 aa, unidentified
  source 1..228: note = Erysipelotrichaceae bacterium
  REGION 1..228: note = tr|A0A3G9J4U1|A0A3G9J4U1_9FIRM 7-cyano-7-deazaguanine synthase OS=Erysipelotrichaceae bacterium SG0102 OX=2487118 GN=queC PE=3 SV=1
MDNALVLVSGGVDSSTCLALAVEKYGHDHVKGLCLYYGQRHVKEMESAHKICDYYQVPLYECDLSRIFTYSSCNLLAHNEDTIPHRAYSEQVAESEGPVSTYVPFRNGLFLSTAASFALSLNCQVIYYGAHADDAAGNAYPDCSSVFNDAMNQAIVEGSGHQVRIEAPFVGVNKAEVVRQVLALKVPYELTWSCYEGGDTPCGVCGTCRDRALAFEKNGVTDPLLVKE

SEQ ID NO: 38176 - protein, 48 aa, unidentified
  source 1..48: note = Erysipelotrichaceae bacterium
  REGION 1..48: note = tr|A0A3C1N095|A0A3C1N095_9FIRM 7-cyano-7-deazaguanine synthase QueC (Fragment); OS = Erysipelotrichaceae bacterium OX=2049044 GN=DCQ45_01275; PE = 4 SV=1
MDNALVLVSGGVDSSTCLALAVEKYGHDHVKGLCLYYGQRHVKEMESA

SEQ ID NO: 38177 - protein, 234 aa, unidentified
  source 1..234: note = Erythrobacter aquimixticola
  REGION 1..234: note = tr|A0A419RV74|A0A419RV74_9SPHN 7-cyano-7-deazaguanine synthase OS=Erythrobacter aquimixticola OX=1958945 GN=queC PE=3 SV=1
MAQRMSTEKSIATILLSGGLDSMVSAALAREQGFRLHALTIDYGQRHVRELQSAKAIAERMGVERHVELPLDLRQFGGSALTDDIEVPKDGVGEDIPVTYVPARNLLFLALTTAFAESSGSTDLFIGVNALDYSGYPDCRPEFIASFAETARLGTKQGVEGQPFVIHAPLQHMTKAEIASECARLELDPAWSWSCYDPTDEGMACGRCDSCRLRRKGFAEAGVTDTAPYAADPD

SEQ ID NO: 38178 - protein, 233 aa, unidentified
  source 1..233: note = Erythrobacter atlanticus
  REGION 1..233: note = tr|A0A0H4VEG0|A0A0H4VEG0_9SPHN 7-cyano-7-deazaguanine synthase OS=Erythrobacter atlanticus OX=1648404 GN=queC PE=3 SV=1
MTQTDKIAVVLLSGGLDSMVTAAIARENGYRLQALSINYGQRHFCELNSASTIADKLGVERHVVLPLDLRQFGGSALTDDIDVPKAGVAQDEIPVTYVPARNLLFLALTTAFAESAGASDIFIGVNALDYSGYPDCRPEFIASFAETARLGTRQGVEGTPFVIHAPLQHFTKADIARECARLDLDPAWSWSCYDPTADGIACGLCDSCRLRRKGFAEAGVMDTTAYAAPFAAD

SEQ ID NO: 38179 - protein, 232 aa, Erythrobacter citreus
  REGION 1..232: note = tr|A0A0L1KG44|A0A0L1KG44_9SPHN 7-cyano-7-deazaguanine synthase OS=Erythrobacter citreus LAMA 915 OX=1306953 GN=queC PE=3 SV=1
MIADEKALVLFSGGQDSATCLAWALESFSAVETVGFDYGQRHRVELECRNELLSRIVEINPVWRERLGSDHTLDLSVLGQISETGLTRDAEIALREDGLPNTFVPGRNLLFFTLAAALAFRRKARHMVGGMCETDFSGYPDCRDDTLKALQVTLNLGMGSRSVIHTPLMWIDKAGTWALAQDLGGDPLVELITEHSHTCYLGERTIRHEWGFGCGTCPACELRIKGWEVFCA

SEQ ID NO: 38180 - protein, 233 aa, Erythrobacter flavus
  REGION 1..233: note = tr|A0A222ESG5|A0A222ESG5_9SPHN 7-cyano-7-deazaguanine synthase OS=Erythrobacter flavus; OX = 192812 GN=queC PE=3 SV=1
MSEAEIPRPAVILLSGGLDSMVSAALARERGHSLHALTIDYGQRHIRELQSARAIAEKLGVERHVELPLDLRQFGGSALTADIDVPKDGVAETIPVTYVPARNLVFLALTTAFAETSASRDIFIGVNALDYSGYPDCRPEFIASFAETARLGTKQGVEGDPFTIHAPLQNMTKADIARECHRLGLDPAWSWSCYDPTPDGFACGVCDSCRLRRKGFAEAELVDTTPYARDIDD

SEQ ID NO: 38181 - protein, 233 aa, Erythrobacter flavus
  REGION 1..233: note = tr|A0A3T1CEH8|A0A3T1CEH8_9SPHN 7-cyano-7-deazaguanine synthase OS=Erythrobacter flavus; OX = 192812 GN=queC PE=3 SV=1
MSEAEIPRPAVILLSGGLDSMVSAALARERGHSLHALTIDYGQRHIRELQSARAIAEKLGVERHVELPLDLRQFGGSALTADIDVPKDGVAETIPVTYVPARNLVFLALTTAFAETSASRDIFIGVNALDYSGYPDCRPEFIASFAETARLGTKQGVEGDPFAIHAPLQNMTKADIARECHRLGLDPAWSWSCYDPTPDGLACGVCDSCRLRRKGFAEAELVDTTPYARDIDD

SEQ ID NO: 38182 - protein, 232 aa, Erythrobacter gangjinensis
  REGION 1..232: note = tr|A0A0G9MQW1|A0A0G9MQW1_9SPHN 7-cyano-7-deazaguanine synthase OS=Erythrobacter gangjinensis OX=502682 GN=queC PE=3 SV=1
MTELAKIGVILLSGGLDSMVTAALAKEQGYRLHALTIDYGQRHVRELQSARAIADKLGVERHVSLPLDLRQFGKSALTDDIDVPKSGVGNDIPVTYVPARNLLFLALTTAFAESAGSSDIFIGVNALDYSGYPDCRPEFIASFAETARLGTKQGVEGSPFEIHAPLQHMTKAEIARECARLGLDASWSWSCYDPTADGLACGLCDSCRLRRKGLAEAGVVDSTRYAATPDRA

SEQ ID NO: 38183 - protein, 232 aa, Erythrobacter litoralis
  REGION 1..232: note = tr|A0A074MC65|A0A074MC65_9SPHN 7-cyano-7-deazaguanine synthase OS=Erythrobacter litoralis; OX = 39960 GN=queC PE=3 SV=1
MTIQQGEDTARRAVVLLSGGLDSMVTAAIARERGFAIHALTVDYGQRHRRELESARLIARRLQLTDQVEIQLDLRKFGGSALTDSIDVPKDGVGSDIPVTYVPARNLVFLALTTAFAEARRSSDIFIGVNALDYSGYPDCRPEFISAFTQAARLGTKAGVEGQGFTVHAPLQHMTKADIARECVRLGLDPAWSWSCYDPTEEGLACGACDSCRLRKKGFAEAGLVDSTRYAT

SEQ ID NO: 38184 - protein, 239 aa, Erythrobacter litoralis
  REGION 1..239: note = sp|Q2N612|QUEC_ERYLH 7-cyano-7-deazaguanine synthase; OS = Erythrobacter litoralis (strain HTCC2594) OX=314225; GN = queC PE=3 SV=1
MAANSRKAAAILLSGGLDSMVTAAIAQEQGYAVHALTIDYGQRHKVELQSARLIAAKIGAERHVEIEADLRALGGSALTDDIDVPKCGVGNDIPVTYVPARNLVFLSLTTAFAEASGARDIFIGVNALDYSGYPDCRPEFIESFAVTANLATKAGVEESAPFKIHAPLQHMTKADIARECARLGLESAWSWSCYDPLPGLKPCGACDSCRLRRKGFAEAGLADGLDYPADAPPIQGENA

SEQ ID NO: 38185 - protein, 232 aa, Erythrobacter longus
  REGION 1..232: note = tr|A0A074M000|A0A074M000_ERYLO 7-cyano-7-deazaguanine synthase OS=Erythrobacter longus; OX = 1044 GN=queC PE=3 SV=1
MSCARMASSKPSAIVLLSGGLDSMVSAAIALENGFAVHALTVNYGQRHRIELDRAKAIASKLQLESQTEIALDLRAFGGSALTDEIAVPKDGVGDDIPVTYVPARNLVFLALTTACAEAKSARDIFIGVNALDYSGYPDCRPEFIESFAETARLGTKAGVEGSPLKIHTPLQHMTKADIAIECARLGLDPSWSWSCYDPTVEGLPCGKCDSCRLRKKGFAEAGIVDSTSYAE

SEQ ID NO: 38186 - protein, 229 aa, unidentified
  source 1..229: note = Erythrobacter luteus
  REGION 1..229: note = tr|A0A0G9MYU6|A0A0G9MYU6_9SPHN 7-cyano-7-deazaguanine synthase OS=Erythrobacter luteus; OX = 1581420 GN=queC PE=3 SV=1
MSTTMPIAVVLLSGGLDSMVTAGLASEQGFALHALSIDYGQRHARELESAKAIADLLGVVRHVTLPLDLRQFGGSALTDDIAVPKTGVGDDIPVTYVPARNLLFLALTTAFAESSGSSDIFIGVNALDYSGYPDCRPEFIASFAETARLGTKQGVEGRPFTIHAPLQHMSKADIARECARLGFDPAWSWSCYDPAPGGEACGLCDSCRLRRQGFADAGVVDTTPYAADA

SEQ ID NO: 38187 - protein, 231 aa, unidentified
  source 1..231: note = Erythrobacter lutimaris
  REGION 1..231: note = tr|A0A395LI10|A0A395LI10_9SPHN 7-cyano-7-deazaguanine synthase OS=Erythrobacter lutimaris; OX = 1538146 GN=queC PE=3 SV=1
MPENSQEKAAVLLSGGLDSMVAAALAREKGHDVHALTIDYGQRHKRELEAARAIARALGLAGHSEIALDLRQFGGSALTADIDVPKDGVGETIPVTYVPARNLVFLALTTAFAESIGAGRIVIGVNALDYSGYPDCRPEFIAAFAEAARLGTKAGIEGQGFAIDAPLQFLSKADIAREADRLGLDTGLSWSCYDPRGDGLPCGLCDSCRLRMGGFAAAGLTDGLTYPPETE

SEQ ID NO: 38188 - protein, 231 aa, unidentified
  source 1..231: note = Erythrobacter marinus
  REGION 1..231: note = tr|A0A0H0XQJ7|A0A0H0XQJ7_9SPHN 7-cyano-7-deazaguanine synthase OS=Erythrobacter marinus; OX = 874156 GN=queC PE=3 SV=1
MSESGKIATVLLSGGLDSMVTAAIARESGFRLHALTIDYGQRHVRELKSASSIAKKLGVERHVTLPLDLREFGGSALTADIDVPKTGVADDIPVTYVPARNLLFLALTTAFAESSGSSDLFIGVNALDYSGYPDCRPEFIASFAETARLGTKQGVEGVPFQIHAPLQHMTKGDIARECIRLSLDPAWSWSCYDPSPQGIACGLCDSCRLRRKGFAEARVADSTPYAADTDD

SEQ ID NO: 38189 - protein, 238 aa, Erythrobacter nanhaisediminis
  REGION 1..238: note = tr|A0A1I5L2H3|A0A1I5L2H3_9SPHN 7-cyano-7-deazaguanine synthase OS=Erythrobacter nanhaisediminis OX=604088 GN=queC PE=3 SV=1
MNEVNNADSPPAVVLLSGGLDSMVSAALAREAGYAVHALTIDYGQRHIRELQSARKIAKLLGVSRHVELPLDLRRFGGSALTDDIDVPKEGVGDDIPVTYVPARNLVFLALTTAFAESVHSRDIFIGVNALDYSGYPDCRPEFIASFAETARLGTKQGVEGEPFSIHAPLQHMSKADIARECYRLDLDPSWSWSCYDPTEDGTACGACDSCRLRRKGFDEAGLIDTTAYAPGAPDLRE

SEQ ID NO: 38190 - protein, 232 aa, Erythrobacter sp.
  REGION 1..232: note = tr|A0A1E4AYB6|A0A1E4AYB6_9SPHN 7-cyano-7-deazaguanine synthase OS=Erythrobacter sp. SCN 62-14 OX=1660099 GN=queC PE=3 SV=1
MTVAEGVVTRPIAVVLLSGGLDSMVTAALAQEQGYAVHALSVDYGQRHRLELESARRIANKLGVARHVEIALDLRAFGGSALTDNIDVPKGGVTDHIPVTYVPARNLVFLALTTAFAEGSGARDVFIGVNALDYSGYPDCRPEFIASFAETARLGTKAGIEGSPFTIHAPLQHLTKADIARECARLRLDPAWSWSCYDPTPDGMACGLCDSCRLRKKGFAEAGIVDSTPYRA

SEQ ID NO: 38191 - protein, 232 aa, Erythrobacter sp.
  REGION 1..232: note = tr|A0A2Z4JWB3|A0A2Z4JWB3_9SPHN 7-cyano-7-deazaguanine synthase OS=Erythrobacter sp. KY5; OX = 2011159 GN=queC PE=3 SV=1
MTNQETQGGRAKAVVLLSGGLDSMVSAAIALEEGFAVHALTIDYGQRHRRELAAARAIAEKLELSSQTELALDLTAFGGSALTDEIDVPKDGVGDDIPVTYVPARNLVFLALTTACAEAAGASDIFIGVNALDYSGYPDCRTEFIASFAETARLGTKAGVEGKPFSIHAPLQHMTKADIARQCSRLGLDPSWSWSCYDPTSEGVACGLCDSCRLRRKGFEEAGLTDTTPYAS

SEQ ID NO: 38192 - protein, 234 aa, unidentified
  source 1..234: note = Erythrobacter xanthus
  REGION 1..234: note = tr|A0A3A1P7D2|A0A3A1P7D2_9SPHN 7-cyano-7-deazaguanine synthase OS=Erythrobacter xanthus; OX = 1784712 GN=queC PE=3 SV=1
MTSTTSDTGQKQAIVLLSGGLDSSLSAALAKEQGFAINALTIDYNQRHRRELDAARAVAQSLGAERHIILPLDLSQFGGSALTADIDVPKGGVAEEGIPITYVPARNLVFLSLTLAWAEVVGANDIFIGVNALDYSGYPDCRPEFIASFEETARLATREGQEGEGFRIQAPLQYWDKARIVSEALRVGLDLSLTWSCYDPQPDGTPCGLCDSCRLRAKGFAEAGALDPVASSAA

SEQ ID NO: 38193 - protein, 230 aa, unidentified
  source 1..230: note = Erythrobacter zhengii
  REGION 1..230: note = tr|A0A418NTE2|A0A418NTE2_9SPHN 7-cyano-7-deazaguanine synthase OS=Erythrobacter zhengii; OX = 2307003 GN=queC PE=3 SV=1
MTETAKIAVVLLSGGLDSMVTGALAREQGFRLHALSIDYGQRHRRELQSARAIAEKLEVERHVQLPLDLRQFGASALTADIDVPKDGVGDDIPVTYVPARNLLFLALTTAFAESAGASDIFIGVNALDYSGYPDCRPEFIASFAETARLGTRQGVEGRPFDIHAPLQHMTKADIARQCHRLGLDPAWSWSCYDPTPEGLACGLCDSCRLRLKGFAEAGVEDTTRYASKPS

SEQ ID NO: 38194 - protein, 238 aa, unidentified
  source 1..238: note = Erythrobacteraceae bacterium
  REGION 1..238: note = tr|A0A2D9P8M6|A0A2D9P8M6_9SPHN 7-cyano-7-deazaguanine synthase OS=Erythrobacteraceae bacterium OX=2026738 GN=queC PE=3 SV=1
  VARIANT 109: note = Xaa can be any naturally occurring amino acid
  VARIANT 124: note = Xaa can be any naturally occurring amino acid
MNETDTSGPAVVLLSGGLDSMVTAAIARERGMAVHALTIDYGQRHIRELQSARSIAEKLGVKRHVELPLDLRQFGGSALTDDIDVPKGGIGEGEDIPVTYVPARNLVFXALTTAFAETSNSRDXFIGVNALDYSGYPDCRPEFIASFAETARLGTKQGVAGRPFTIHAPLQHMSKADIARECDRLGLDPSWSWSCYDPTAEGEACGACDSCRLRRKGFAEAGLADTTTYSRDAPALTE

SEQ ID NO: 38195 - protein, 232 aa, unidentified
  source 1..232: note = Erythrobacteraceae bacterium
  REGION 1..232: note = tr|A0A0P7YYE5|A0A0P7YYE5_9SPHN 7-cyano-7-deazaguanine synthase OS=Erythrobacteraceae bacterium HL-111 OX=1666908 GN=queC PE=3 SV=1
MTKSGGDQERPAAVVLLSGGLDSMVTAAIARERGFAVHALTVDYGQRHRLELQSARRIAARLELAEQVEIALDLRKFGGSALTDAIEVPKDGVGSAIPVTYVPARNLVFLALTTAFAEARGSRDIFIGVNALDYSGYPDCRPEFIASFTETARLGTKAGVEGRPFTVHAPLQHLTKADIARECARLGLDPAWSWSCYDPTEEGLACGACDSCRLRKKGFAEAGLVDTTRYAT

SEQ ID NO: 38196 - protein, 231 aa, Escherichia albertii
  REGION 1..231: note = tr|A0A4Q9IYA9|A0A4Q9IYA9_9ESCH 7-cyano-7-deazaguanine synthase OS=Escherichia albertii; OX = 208962 GN=queC PE=3 SV=1
MKRAVVVFSGGQDSTTCLVQALQQYDEVHCVTFDYGQRHRAEIDVARELALKLGARAHKVLDVTLLNQLAVSSLTRDSIPVPDYEPDADGIPNTFVPGRNILFLTLAAIYAYQVKAEAVITGVCETDFSGYPDCRDEFVKALNHAVSLGMAKDIRFVTPLMWIDKAETWALADYYGKLDLVRSETLTCYNGVKGDGCGHCAACNLRANGLNHYLADKPAVMAAMKQKTGLK

SEQ ID NO: 38197 - protein, 231 aa, Escherichia albertii
  REGION 1..231: note = tr|A0A3W6DNW0|A0A3W6DNW0_9ESCH 7-cyano-7-deazaguanine synthase OS=Escherichia albertii; OX = 208962 GN=queC PE=3 SV=1
MKRAVVVFSGGQDSTTCLVQALQQYDEVHCVTFDYGQRHRAEIDVARELALKLGARAHKVLDVTLLNQLAVSSLTRDSIPVPDYEPDADGIPNTFVPGRNILFLTLAAIYAYQVKAEAVITGVCETDFSGYPDCRDEFVKALNHAVSLGMAKDIRFETPLMWIDKAETWALADYYGKLDLVRSETLTCYNGVKGDGCGHCAACNLRANGLNHYLVDKPAVMAAMKQKTGLK

SEQ ID NO: 38198 - protein, 231 aa, Escherichia fergusonii
  REGION 1..231: note = tr|F0JMB4|F0JMB4_ESCFE 7-cyano-7-deazaguanine synthase OS=Escherichia fergusonii ECD227 OX=981367; GN = queC PE=3 SV=1
MKRAVVVFSGGQDSTTCLVQALQQYDEVHCVTFDYGQRHRAEIDVARELALKLGARAHKVLDVTLLNELAVSSLTRDSIPVPDYEPEADGIPNTFVPGRNILFLTLAAIYAYQVKAEAVITGVCETDFSGYPDCRDEFVKALNHAVSLGMAKDIRFETPLMWIDKAETWALADYYGKLDLVRNETLTCYNGIKGDGCGHCAACNLRSNGLHHYLADKPTVMAAMKQKTGLK

SEQ ID NO: 38199 - protein, 231 aa, Escherichia fergusonii
  REGION 1..231: note = tr|A0A564SQE6|A0A564SQE6_ESCFE 7-cyano-7-deazaguanine synthase OS=Escherichia fergusonii; OX = 564 GN=queC PE=3 SV=1
MKRAVVVFSGGQDSTTCLVQALQQYDEVHCVTFDYGQRHRAEIDVARELALKLGARAHKVLDVTLLNELAVSSLTRDSIPVPDYEPEADGIPNTFVPGRNILFLTLAAIYAYQVKAEAVITGVCETDFSGYPDCRDEFVKALNHAVSLGMAKDIRFETPLMWIDKAETWALADYYGKLDLVRNETLTCYNGMKGDGCGHCAACNLRTNGLNHYLADKPTVMAAMKQKTGLK

SEQ ID NO: 38200 - protein, 231 aa, unidentified
  source 1..231: note = Escherichia marmotae
  REGION 1..231: note = tr|A0A2B7LX58|A0A2B7LX58_9ESCH 7-cyano-7-deazaguanine synthase OS=Escherichia marmotae; OX = 1499973 GN=queC PE=3 SV=1
MKRAVVVFSGGQDSTTCLVQALQQYDEVHCVTFDYGQRHRAEIDVARELALKLGARAHKVLDVTLLNELAVSSLTRDSIPVPDYEPEADGIPNTFVPGRNILFLTLAAIYAYQVKAEAVITGVCETDFSGYPDCRDEFVKALNHAVSLGMAKDIRFETPLMWIDKAETWALADYYGKLDLVRNETLTCYNGIKGDGCGHCAACNLRANGLNHYLADKSAVMTAMKQKTGLK

SEQ ID NO: 38201 - protein, 231 aa, Escherichia sp.
  REGION 1..231: note = tr|A0A4U6CMC0|A0A4U6CMC0_9ESCH 7-cyano-7-deazaguanine synthase OS=Escherichia sp. MR; OX = 2575922 GN=queC PE=3 SV=1
MRRAVVVFSGGQDSTTCLVQALQQYDEVHCVTFDYGQRHRAEIDVARELALKLGARAHKVLDVTLLNELAVSSLTRDSIPVPDYEPEADGIPNTFVPGRNILFLTLAAIYAYQVKAEAVITGVCETDFSGYPDCRDEFVKALNHAVSLGMAKDIRFETPLMWIDKAETWALADYYGKLDLVRNETLTCYNGIKGDGCGHCAACNLRANGLNHYLADKPTVMAAMKQKTGLK

SEQ ID NO: 38202 - protein, 231 aa, Escherichia sp.
  REGION 1..231: note = tr|A0A4Q9JTH7|A0A4Q9JTH7_9ESCH 7-cyano-7-deazaguanine synthase OS=Escherichia sp. E10V4; OX = 2478971 GN=queC PE=3 SV=1
MKRAVVVFSGGQDSTTCLVQALQQYDEVHCVTFDYGQRHRAEIDVARDLALKLGARAHKVLDVTLLNELAVSSLTRDSIPVPDYEPEADGIPNTFVPGRNILFLTLAAIYAYQVKAEAVITGVCETDFSGYPDCRDEFVKALNHAVSLGMAKEIRFETPLMWIDKAETWALADYYGKLDLVRNETLTCYNGIKGDGCGQCAACNLRSNGLNHYLSDKPAVMAAMKQKTGLK

SEQ ID NO: 38203 - protein, 918 aa, unidentified
  source 1..918: note = Estrella lausannensis
  REGION 1..918: note = tr|A0A0H5DRC2|A0A0H5DRC2_9BACT 7-cyano-7-deazaguanine synthase OS=Estrella lausannensis; OX = 483423 GN=queC PE=4 SV=1
MNITFPSANRSTIANLDNSRAIRMYENYATLPEAMEVPPGQLEYAKALCQHHGLPTENIIEGREMDATPRVVPLIKNRVIIPFSGGTDSTAALIWAKRQGMHIYPLHVYMLNPASGAREMTAVENICNALGLRDRLIVVKHPVNCRKIKGYREKIKNLQENPAKNQYIWLISLPYMQKHECGTILFAADKSPQAIHFSDTITAFNLFKQYAEKLIGPHNLCIPFDTKKQYVAELLSSEQAALSKLVSSCFASMQHFKHWQNTNRKKGEDTPDNECGSCQKCRTLKEIRAELLAPGPQKKQENSNPREVPPTVPYEKQNQINSHPREIPPTVAFEKQNQENTYPREIPPPVLQKRFVSTIGKSSLPAGAVPIFQNLLPPLRIYPYPTMMEICSPPLPARVRERDFAEEERASPLKRQKFDFSAAMHSECIEPRKFSAPIPRISSNALENQLPLRGFASLNLPQTQPLMGGMGPWRGLNPTALAGINPPPKTREVAQVFNSVEEKIEAMVKGFTFPKTKGDGVYSLDFDALKSWMQKKLNETLDVTQEEKEAFYERIGELLSDEITKHQYKLPHLHNGQCRSNPVITADVAAESFKLLLNLGNYDFTRTYTGMQAGLKMSAFYMNEERIKASTGIDKSPSKKWEDEKLRWKKITKIFKYHAQGKAPYLCLGLPLITNDFLMNAPGQFRPAAVFDVLNYLKQSNVAGNITRILDLCTGWGDRLVGAMAAAKQFKVVRYIGTDPNKDLTPRYKNIFDACLKVLDREMGEPYQFTCKLYDKPMEDLSEEELIVDGVPSDLMITSPPFFDYEKYKDHGNTQSTARYPEIDEWVNNFLYKLVDQAKKGVRNQGIVAIQFSTTKIGDKKICDLLKANMQSKLKHITDLSYVSKAIRGKRHGYEGEKFYIYQKVEASDNDEMDVDVG

SEQ ID NO: 38204 - protein, 220 aa, unidentified
  source 1..220: note = Estrella lausannensis
  REGION 1..220: note = tr|A0A0H5E506|A0A0H5E506_9BACT 7-cyano-7-deazaguanine synthase OS=Estrella lausannensis; OX = 483423 GN=queC1 PE=3 SV=1
MRAIVLLSGGLDSCVSLAYALQKQREVIALSFSYGQKHQIELTHAERIARHYGIRHKIIRFPDNLFTASSLVGDGEIPKGRTQEEISTGGIPSTYVPARNTVFLAHALSLAESEGAQEIYFGCNKQDRNGYPDCRPEFVEAFQHLISKATKVSTESHPPIIVTPLADLDKREIVELGAQLKAPIELSISCYSPNGKGEPCLACDACCLREEAFSAVFGKR

SEQ ID NO: 38205 - protein, 224 aa, unidentified
  source 1..224: note = Eubacteriaceae bacterium
  REGION 1..224: note = tr|A0A143XZG5|A0A143XZG5_9FIRM 7-cyano-7-deazaguanine synthase OS=Eubacteriaceae bacterium CHKCI004 OX=1780380 GN=queC PE=3 SV=1
MQELKNKKAAVVVFSGGQDSTTCLFWAIKRYETVIALSFDYHQKHALELECAKKICQDHGIEHHIMDMSLLNQLAPNSLTRSDIPVDEDAPSEGTPNSFVDGRNHLFLSYAAVFAKQRGITDIITGVSQSDFSGYPDCRDIFIKSLNTTLSLAMDYPFDIITPLMWLDKKETWALADELGVFDIIRYETLTCYNGVIGDGCGHCPSCKLRRKGLEEYLASKSVR

SEQ ID NO: 38206 - protein, 240 aa, unidentified
  source 1..240: note = Eubacteriaceae bacterium
  REGION 1..240: note = tr|A0A425W6L6|A0A425W6L6_9FIRM 7-cyano-7-deazaguanine synthase OS=Eubacteriaceae bacterium OX=2049045 GN=queC PE=3 SV=1
MKQLFDQYKKAMVLTSGGVDSTTALGLAVDRLGAENVIALSIQYGQKHDKEIEAAKAVAAHYGVEQLFLDLTPIFQYSDCALLKGSDQAIPEESYAEQIAATGGEKPVSTYVPFRNGLFLSSAASVALSKDCDVILYGAHADDSAGFAYPDCSPAFADAMNRAVYEGSGHQLEIAAPFVDIDKAAVVKLGLELGVPYELTWSCYEGGDRPCGKCGTCLDRAAAFAANGVADPAMAQYEKA

SEQ ID NO: 38207 - protein, 227 aa, unidentified
  source 1..227: note = [Eubacterium] cellulosolvens
  REGION 1..227: note = tr|I5AU67|I5AU67_EUBCE 7-cyano-7-deazaguanine synthase OS=[Eubacterium] cellulosolvens 6 OX=633697; GN = queC PE=3 SV=1
MKAMVLSSGGVDSTTALGLAIKKYGKENVIALSVSYGQKHDKEIQAARAVAEYYGIEQLFLDLSKIFSYSNCSLLKQSTEEIPEESYAEQIRETGGEKPVSTYVPFRNGLFLSSAASLALSKGCSVIYYGAHADDSAGFAYPDCSPVFNKAMNDAIWEGSGHQLRIEAPFVNMNKAGVVKMGLELGVPYELTWSCYEGGETPCGKCGTCIDRAAAFAANGVKDPALD

SEQ ID NO: 38208 - protein, 430 aa, unidentified
  source 1..430: note = [Eubacterium] cellulosolvens
  REGION 1..430: note = tr|I5AWU2|I5AWU2_EUBCE Putative PP-loop superfamily ATPase OS=[Eubacterium] cellulosolvens 6 OX=633697; GN = EubceDRAFT1_2547 PE=4 SV=1
MILNVKVNSDDDFSLDGQENKELELYNSNSFSYTFWQDKKIYKNIYNTNAIDLLNISFAVFACDRLELRDAADDCWSREFIIYMPVVNVEIWDTNKETLENMLSFLSGDSWKFIFRTRHLSKNEDEYKKLHARKEKEACDYDRLCMFSGGMDSYIGAINLLEENLGRTLFVSHYGGGKGTKEYQDYIKEKLIEKYSVEDRDFCQFYAKVVNGVEDTTRSRSFMFFSHAVALASALNKSVEVIIPENGLISLNIPLSYSRIGTSSTRTTHPYYMSLFQKLVDNLGLNVQFRNPYQFKTKGEMLLECKNQEFMKNHVHHTMSCSHPDAGRMQGEKTARHCGYCVPCVIRQAALKKAGINDISSYRDSTFSNMKVSKQIRNSYLLAIEKFNPKYAFMSIQLSGKITDHIDDYTDLYVRGMNEFKDYIEGIVNV

SEQ ID NO: 38209 - protein, 227 aa, unidentified
  source 1..227: note = [Eubacterium] eligens
  REGION 1..227: note = tr|A0A415PET2|A0A415PET2_9FIRM 7-cyano-7-deazaguanine synthase OS=[Eubacterium] eligens; OX = 39485 GN=queC PE=3 SV=1
MKALVLSSGGVDSTTALALAVSRYGKDNVIALSVSYGQKHDKEIQAAKAVSAFYGVEQLFLDLSKIFQYSNCSLLQQSTEEIPEESYARQIEKTEGEKPVSTYVPFRNGLFLSSAASIALSKDCSVILYGAHADDSAGFAYPDCSPMFNDAMNQAIFEGSGHQLKVEAPFVNMTKAEVVKMGLELNAPYELTWSCYEGKDVPCGKCGTCIDRAAVFAANGVSDPAIK

SEQ ID NO: 38210 - protein, 227 aa, unidentified
  source 1..227: note = [Eubacterium] eligens
  REGION 1..227: note = tr|A0A174ZWG1|A0A174ZWG1_9FIRM 7-cyano-7-deazaguanine synthase OS=[Eubacterium] eligens; OX = 39485 GN=queC PE=3 SV=1
MKALVLSSGGVDSTTALALAVSRYGKDNVIALSVSYGQKHDKEIQAAKAVSAFYGVEQLFLDLSKIFQYSNCSLLQQSTEEIPEESYAMQIEKTEGEKPVSTYVPFRNGLFLSSAASIALSKDCSVILYGAHADDSAGFAYPDCSPMFNDAMNQAIFEGSGHQLKVEAPFVNMTKAEVVKMGLELNAPYELTWSCYEGKDVPCGKCGTCIDRAAAFAANGVSDPAIK

SEQ ID NO: 38211 - protein, 227 aa, Eubacterium eligens
  REGION 1..227: note = tr|C4Z7K4|C4Z7K4_EUBE2 7-cyano-7-deazaguanine synthase OS=Eubacterium eligens (strain ATCC 27750 / VPI C15-48) OX=515620 GN=queC PE=3 SV=1
MKALVLSSGGVDSTTALALAVSRYGKDNVIALSVSYGQKHDKEIQAAKAVSAFYGVEQLFLDLSKIFQYSNCSLLQQSTEEIPEESYARQIEKTEGEKPVSTYVPFRNGLFLSSAASIALSKDCSVILYGAHADDSAGFAYPDCSPMFNDAMNQAIFEGSGHQLKVEAPFVNMTKAEVVKMGLELNAPYELTWSCYEGKDVPCGKCGTCIDRAAAFAANGVSDPAIK

SEQ ID NO: 38212 - protein, 227 aa, Eubacterium eligens; identical to SEQ ID NO: 38210
  REGION 1..227: note = tr|R5ZWW6|R5ZWW6_9FIRM 7-cyano-7-deazaguanine synthase OS=Eubacterium eligens CAG:72 OX=1263077 GN=queC; PE = 3 SV=1

SEQ ID NO: 38213 - protein, 221 aa, Eubacterium hallii; identical to SEQ ID NO: 35955
  REGION 1..221: note = tr|R6GWY2|R6GWY2_9FIRM 7-cyano-7-deazaguanine synthase OS=Eubacterium hallii CAG:12 OX=1263078 GN=queC; PE = 3 SV=1

SEQ ID NO: 38214 - protein, 228 aa, Eubacterium oxidoreducens
  REGION 1..228: note = tr|A0A1G6A5D4|A0A1G6A5D4_EUBOX 7-cyano-7-deazaguanine synthase OS=Eubacterium oxidoreducens OX=1732 GN=queC PE=3 SV=1
MKAMVLFSGGVDSTTALGMAVDKYGADNVIALSMSYGQKHDKEIQSSIAVANHYGVEHLFLDLSKIFQYSDCSLLKHSTQEVPKESYDEQIEETNGNQPVSTYVPFRNGLFLSTAASIALSKECGVIYYGVHADDAAGFAYPDCSDVFNNAMKEAIWEGSGHQVKIEAPFVNASKAQVVKKGLELKVPYELTWSCYEGGDVPCGKCGTCIDRAAAFAANHVKDPALKG

SEQ ID NO: 38215 - protein, 230 aa, Eubacterium plexicaudatum
  REGION 1..230: note = tr|N2AIT3|N2AIT3_9FIRM 7-cyano-7-deazaguanine synthase OS=Eubacterium plexicaudatum ASF492 OX=1235802; GN = queC PE=3 SV=1
MKILVLSSGGIDSTVCLALAVEKYGYENVLSLSVSYGQKHSNELKAARRIAQHYHVRHKELDMGMIFAGSDCTLLEGRGEIPKGTYASQLQESTGKPVSTYVPFRNGLFLAAAASVALADGCEKIYYGAHADDSAGNAYPDTSEAFHEAISRAVYEGSGKQLEIEAPFLYSHKADVVRTGIGLQVPFAFTWSCYEGGEKPCGKCATCMDRRKAFERNEIRDPAEYEEEKK

SEQ ID NO: 38216 - protein, 229 aa, Eubacterium pyruvativorans
  REGION 1..229: note = tr|A0A1I7FDP9|A0A1I7FDP9_9FIRM 7-cyano-7-deazaguanine synthase OS=Eubacterium pyruvativorans OX=155865 GN=queC PE=3 SV=1
MKKALVLSSGGVDSSTCVSVAVDELGAENVSTVSVFYGQKHRKELEAARQVAAFYGVQHYELDLSNVLQYSDCSLLAHSDQEIEHKSYAEQVKENGEGKVSTYVPFRNGLMLSAAASLAQSLYPDDLCDIYLGAHADDAAGNAYADCSVEFTDAMEQAISIGTYGNVHLRAPFVGLNKAGVVRRGLELGTPYELTWSCYEGGDKPCGTCGTCIDRAAAFAANGVKDPAL

SEQ ID NO: 38217 - protein, 228 aa, Eubacterium ramulus
  REGION 1..228: note = tr|U2PT13|U2PT13_EUBRA 7-cyano-7-deazaguanine synthase OS=Eubacterium ramulus ATCC 29099 OX=1256908; GN = queC PE=3 SV=1
MAEKALVLFSGGVDSTTCLGLAIERYGKENVIALSVSYGQKHEKEIEASKKIAQHYGVEHLYLDLGAIFQYSNCSLLSHSTEEIPEEAYVEQLTKTDGKPVSTYVPFRNGLFLSSAASIALSKDCNVIFYGAHSDDAAGSAYPDCSDAFNQAMKDAIYLGSGNQVTIEAPFVNWTKADVVKKGLELNVPYELTWSCYEGGEKPCGKCGTCIDRAAAFEKNGVKDPALD

SEQ ID NO: 38218 - protein, 228 aa, Eubacterium ramulus
  REGION 1..228: note = tr|A0A2V1JW70|A0A2V1JW70_EUBRA 7-cyano-7-deazaguanine synthase OS=Eubacterium ramulus; OX = 39490 GN=queC PE=3 SV=1
MSEKALVLFSGGVDSTTCLGLAIDRYGKENVIALSVSYGQKHEKEIEASRKIAEYYGVEHLYLDLGEIFQYSNCSLLSHSTDEIPEEAYAEQLSKTDGKPVSTYVPFRNGLFLSSAASIALSKECSVIYYGAHSDDAAGSAYPDCSDAFNNAMKDAIYLGSGKQVTIEAPFVNWTKADVVKTGLQLKVPYELTWSCYEGGEKPCGKCGTCIDRAAAFEKNGVKDPALD

SEQ ID NO: 38219 - protein, 220 aa, Eubacterium ruminantium
  REGION 1..220: note = tr|A0A1H5Y8K1|A0A1H5Y8K1_9FIRM 7-cyano-7-deazaguanine synthase OS=Eubacterium ruminantium; OX = 42322 GN=queC PE=3 SV=1
MKNRDTALVVLSGGQDSTTCLLWALKRYKTVEAVSFDYNQRHKKELECAAEICKKFGVRQKIMDMSLLSELAPNSLTRAEIKVDEEAPESGTPNSFVEGRNLLFLTYAAIYAKGLGINDIITGVSQSDFSGYPDCRNVFIKSLNTTLNLAMDYEFDLITPLMWIDKEETWELADSLGGLEIIRDMTLTCYNGIMGEGCGNCPACKLRKRGYDRYMARRKV

SEQ ID NO: 38220 - protein, 222 aa, Eubacterium ruminantium
  REGION 1..222: note = tr|A0A1T4Q8B8|A0A1T4Q8B8_9FIRM 7-cyano-7-deazaguanine synthase OS=Eubacterium ruminantium; OX = 42322 GN=queC PE=3 SV=1
MKNKDAALVVLSGGQDSTTCLLWALKNYKRVEAVSFDYNQRHVKELECAAKICEKFGVRQKIMDMSLLSELAPNSLTRAEIKVDEEAPKEGTPNSFVEGRNLLFLTYAAIYAKGLGINDIITGVSQSDFSGYPDCRNVFIKSLNATLNLAMDYEFEVITPLMWLDKEETWALADSLGGLEIIRDMTLTCYNGIMGEGCGHCPACKLRKRGYDRYMERRSQSK

SEQ ID NO: 38221 - protein, 226 aa, Eubacterium sp.
  REGION 1..226: note = tr|A0A413PAY8|A0A413PAY8_9FIRM 7-cyano-7-deazaguanine synthase OS=Eubacterium sp. AM49-13BH OX=2292351 GN=queC PE=3 SV=1
MKAMVLFSGGIDSTTCLGMAVEKYGPENVIALSISYGQKHTKEIEASDKIVKYYNVEHIYLDLAKIFQYSDCSLLSHSDKEIPKESYDEQIKSTNGSPVSTYVPFRNGLFLSSAASIAISKGCSEIYYGAHADDAAGSAYPDCSSDFNNAINEAIYLGSGKQIKVVAPFINATKDQVVKKGLELNVPYKYTWSCYEGSEKPCGKCGTCIDRARAFELNGINDPAME

SEQ ID NO: 38222 - protein, 227 aa, Eubacterium sp.; identical to SEQ ID NO: 38211
  REGION 1..227: note = tr|A0A351RGW8|A0A351RGW8_9FIRM 7-cyano-7-deazaguanine synthase OS=Eubacterium sp.; OX = 142586 GN=queC PE=3 SV=1

SEQ ID NO: 38223 - protein, 226 aa, Eubacterium ventriosum; identical to SEQ ID NO: 36677
  REGION 1..226: note = tr|A0A413S6I1|A0A413S6I1_9FIRM 7-cyano-7-deazaguanine synthase OS=Eubacterium ventriosum; OX = 39496 GN=queC PE=3 SV=1

SEQ ID NO: 38224 - protein, 228 aa, unidentified
  source 1..228: note = Euhalothece natronophila
  REGION 1..228: note = tr|A0A5B8NT07|A0A5B8NT07_9CHRO 7-cyano-7-deazaguanine synthase OS=Euhalothece natronophila Z-M001 OX=522448 GN=queC PE=3 SV=1
MKAVVLLSGGLDSSTVLYQAKADGCHCYALSFDYQQRHQRELEAAKAIALSAGVIQHQVINFDLGLWGGSALTDQQLEVPRDRDPSEMANSIPITYVPARNTIFLSFALAYAEALEAERVYMGANALDYSGYPDCRPDYIQAMQEVFKLGTKQGREGNPIKIITPLLDLKKTEIIELGNQLNVPWEKTWSCYQGGEKACGVCDACQLRLKAFQALGLTDPISYQESNE

SEQ ID NO: 38225 - protein, 225 aa, unidentified
  source 1..225: note = Euhalothece sp.
  REGION 1..225: note = tr|A0A2K3AH07|A0A2K3AH07_9CHRO 7-cyano-7-deazaguanine synthase OS=Euhalothece sp. KZN 001; OX = 1884791 GN=queC PE=3 SV=1
MTDKAVVLLSGGLDSSTVLYQGKADGYECYALSFNYQQRHQRELDAARDIAAAAGVTQQVINFDLGLWGGSALTDATINVPRDRAPEEMATEIPVTYVPARNTIFLSFGLAYAEALEAKRVYLGVNALDYSGYPDCRPDYINAMQQVFKLGTKQGREGRSIEIISPLIELKKTEIIQLGNQLNVPWEKTWSCYQGGEKACGVCDSCQLRLKAFQELGLTDPIPYV

SEQ ID NO: 38226 - protein, 236 aa, Euzebya sp.
  REGION 1..236: note = tr|A0A346XS55|A0A346XS55_9ACTN 7-cyano-7-deazaguanine synthase OS=Euzebya sp. DY32-46; OX = 1608957 GN=queC PE=3 SV=1
MDNMSYAVTVLSGGMDSTVLAHLSKGLNEKVDLVSVDYGQRHRTELEFAARTADKLGCRHDVVSLPIGEALSSALTDTDVDVPHGHYAEDNMAVTVVPNRNAILISVAYGIAVARGATTVQVGVHAGDHFVYPDCRPAFVDQLGVALKTGNEGFGQVELVAPFVHQSKTDICRLGDVLGVDWTDTWSCYEGGAVHCGRCGTCVERREAFRDAGVEDPTEYADPDYAFEVLARGSGS

SEQ ID NO: 38227 - protein, 1375 aa, unidentified
  source 1..1375: note = Euzebyella marina
  REGION 1..1375: note = tr|A0A3G2L822|A0A3G2L822_9FLAO Amino acid adenylation domain-containing protein OS=Euzebyella marina; OX = 1761453 GN=D1013_14065 PE=4 SV=1
MNNSNKTRLPLTQSQLSLWAGQRIYSEVPLHNVVYTFEIQGDIDVVIFKRSFEQLVEETDILRMTFSEIAGEPFQEINSTVPFQFECLDFTEKSQEEIDQWVRVNTRSPINLAEIVFDSRLLKCDESKFIWFLKIHHLVTDAVTYQLLFHRLSDIYQARLNNNDSKNVLYAYRSYLEYEREQVAEQELNSNREYWDKKTSEVNSRPALYGEKWSKNSTEAKRIEIALTPTQTEKLNNLCQKTAVRSWTKSATLYNLFVTVFATYLHRISGLSKFNIGSPAHNRSTLDFSKTAGLFIEVLPLTIEIDDDETFISLLDKIKLEGNSFLKNVHPSMVGCLNGEPPSNILNFINVEFKDFNGWPTQVRWVHNGHIDASHDIRCHVYDFKGESNYTVAFDINTSVCPQKDYDKVALHFNSILDSLLENLENAIDKKGLDPISQSTFLSGTHTPITDSFLKKFEEFAAKTPNKVAVQSSEQTLTYANLNKKANQLARYLAERGLENQSRVAVFLHRSPDYLISILAIMKLGGVFVPIASDQPVERVQYILRKADCSLIITEEKLSVGLDFEKENIVRTSHFSELENQNEFSSSGHEVENLCYIIFTSGSTGKPKGVGISNKSLNNYLNWARTAYSIDQNSVFPLFTSIGFDLTLTSVFLPLLCGGRIIVYQENPSGPDTSVLNVFSDNLVNKIKLTPSHLDLVKEHDFNPSILETMILGGEDLKTTSVSKIQSQFSEKIEIFNEYGPTEATVGCIVSKYDAKEHKGVSVPIGLPIDNTQLLLLDTHKNLVPQGVVGEIYLSGTCLANGYINDQELTNEKFLENPFSNQSKIYRTGDLGRLNSKGELEYHGRIDSQIKLRGYRIELNDIEANLSEFEGIDSCAVMLVDNKDQKTEEEVFNCTNCGLPSNYPSTDFDKNGVCHLCKAFENYEEKVHQYFKRDEELVRLLTSKRDINPNYDCISLLSGGKDSTYVLARLAGMGLRVLAFTMDNGYISEQAKENIDRIVKRLGVDHVYGKTPHMNAIFVDSLQRHHNVCNGCFKTIYTLSTKIAVEKQIPFIVTGLSRGQFFETRLTEELFWDQQLDSEKIDNTILEARKLYHQENDAVKELLDVSMFDSDEVFDQVQFVDFYRFSDVSLEEMLVYLKKHVGWKRPTDTGRSTNCLINQVGIYVHKKDLGYSNYSFPYSWDVRLGHKTRDESLEEINEVIDETEVKKIMNEIGYNPSAQQENDKKLVAYFTGAEGLSIEKLRKFMNQRVPSYMVPTLFHFVAEMPLTNNGKIDRAKLSENKIKPIPTDCPYVASSNEIEELVQKIWMDVLLLDRIGIKEDFISLGGHSLAAIRVTARINEEIETNFPLNKIFEYPTIESYSKYIEETLIELMNKN

SEQ ID NO: 38228 - protein, 236 aa, Ewingella americana
  REGION 1..236: note = tr|A0A085G783|A0A085G783_9GAMM 7-cyano-7-deazaguanine synthase OS=Ewingella americana ATCC 33852 OX=910964 GN=queC PE=3 SV=1
MDKNMKRAVVVFSGGQDSTTCLIQALTQYDEVHCITFDYGQRHRAEIDIAQKLSVELGAKAHKVLDVGLLNELAVSSLTRDNIPVPALGETEENGLPSTFVPGRNILFLTLAAIYAYQVQAEAVITGVCETDFSGYPDCRDEFVKALKHAVSLGIARDIRFDTPLMWLNKAETWALADYYQQLDLIRHHTLTCYNGIAGDGCGECAACNLRANGLQQYQQDKVGVMASLKQKTGLK

SEQ ID NO: 38229 - protein, 401 aa, Ewingella americana
  REGION 1..401: note = tr|A0A502GDA9|A0A502GDA9_9GAMM 7-cyano-7-deazaguanine synthase OS=Ewingella americana; OX = 41202 GN=EAH77_15220 PE=3 SV=1
MISKDKFMSLKRQINEIRSPLNLAYSALFSSCFPGGYLQALQKSSNETMYDIEERQILRHMDTQVEYLPKGFDLFVPDLTKNVDMLTRADDFFHREIVKAEHVVLDYILEPECGDILPQLKANPLNTAASFIRGVENEKTIVVCWSGGMDSLSAALHAITHKRAEKLVLIHTNYNGPYSPKESGRAYQTYEALIDLASNLRNNPKTKVALRKITYMELKIGIESMAESLLPLGYIMPGRNGFIATSILDVLQGLDVLHTLPEIYMTGHYRSVEGQYTGAVDKNYHFFGEMSNIYFWNKRFSSHVTSPFLSISKEEMLSYGYTYLMGKTQFSKEVEQAFFKCIDSTVSCYDPVYDRCGNCSSCYKRWQALKTLPAYKEVYNIPVEQAPRYQEFAARENKKGR

SEQ ID NO: 38230 - protein, 218 aa, Exiguobacterium antarcticum
  REGION 1..218: note = tr|K0AG32|K0AG32_EXIAB 7-cyano-7-deazaguanine synthase OS=Exiguobacterium antarcticum (strain B7); OX = 1087448 GN=queC PE=3 SV=1
MKNERALVVFSGGQDSTTCLFQAIKDYSEVEVVTFNYGQRHAAELDVARTIAAELGVKHHELDLSLLSQLTSNSLTDHSQSITTNEDGLPSTFVDGRNHLFLSFAAVLAKGRGIRHIITGVCETDFSGYPDCRDAFIKSLNVTLNLAMDYPFVIHTPLMWLDKKETWALADSLGAFDFVRERTLTCYNGIIGDGCGDCPACELRKKGLDAYIEEVQHT

SEQ ID NO: 38231 - protein, 214 aa, Exiguobacterium aurantiacum
  REGION 1..214: note = tr|A0A377FY84|A0A377FY84_9BACL 7-cyano-7-deazaguanine synthase OS=Exiguobacterium aurantiacum OX=33987 GN=queC PE=3 SV=1
MQHEKALVVFSGGQDSTTCLFWAKQQFSHVEAVTFAYGQRHDAEIEVAKEIAAELDVPHHILDLSLLGQLTSNALTRHDLDIDNADVPNTFVDGRNHLFLSFAAVMAKQLGMHHIVTGVCETDFSGYPDCRDQFIKSLNVTLNLAMDYPFVIDTPLMWLDKKQTWELADRLGAFDYVKERTLTCYNGILGSGCGECPACVLRQNGLEAYEGVRV

SEQ ID NO: 38232 - protein, 214 aa, unidentified
  source 1..214: note = Exiguobacterium chiriqhucha
  REGION 1..214: note = tr|U1LTL9|U1LTL9_9BACL 7-cyano-7-deazaguanine synthase OS=Exiguobacterium chiriqhucha RW-2 OX=1345023; GN = queC PE=3 SV=1
MQHEKALVVFSGGQDSTTCLFWAKQQFSHVEAVTFAYGQRHDAEIEVAKEIAAELDVPHHILDLSLLGQLTSNALTRHDLDIDNADVPNTFVDGRNHLFLSFAAVMAKQLGMHHIVTGVCETDFSGYPDCRDQFVKSLNVTLNLAMDYPFVIDTPLMWLDKKQTWELADQLGAFDYVKERTLTCYNGILGSGCGECPACVLRQNGLAAYEEVRV

SEQ ID NO: 38233 - protein, 218 aa, unidentified
  source 1..218: note = Exiguobacterium enclense
  REGION 1..218: note = tr|A0A0V8GDL1|A0A0V8GDL1_9BACL 7-cyano-7-deazaguanine synthase OS=Exiguobacterium enclense OX=1017277 GN=queC PE=3 SV=1
MKNERALVVFSGGQDSTTCLFQALKQYEEVEVVTFNYGQRHAQELEVARDIASELGVKHHELDLSLLSQLTSNALTDHSQTITTNEDGLPSTFVDGRNHLFLSFAAVLAKGRGIRHIVTGVCETDFSGYPDCRDAFIKSLNVTLNLAMDYPFVLHTPLMWLDKKETWALADSLGAFDFVRNRTLTCYNGVIGDGCGECPACELRKNGLDAYIKEVQHT

SEQ ID NO: 38234 - protein, 214 aa, Exiguobacterium mexicanum
  REGION 1..214: note = tr|A0A099DEU6|A0A099DEU6_9BACL 7-cyano-7-deazaguanine synthase OS=Exiguobacterium mexicanum OX=340146 GN=queC PE=3 SV=1
MQHEKALVVFSGGQDSTTCLFWAKQQFSHVEAVTFAYGQRHDAEIEVAKEIAAELDVPHHILDLSLLGQLTSNALTRHDLDIDNADVPNTFVDGRNHLFLSFAAVMAKQLGMHHIVTGVCETDFSGYPDCRDQFVKSLNVTLNLAMDYPFVIDTPLMWLDKKQTWELADRLGAFDYVKERTLTCYNGILGSGCGECPACVLRQNGLAAYEEVRV

SEQ ID NO: 38235 - protein, 218 aa, Exiguobacterium sibiricum
  REGION 1..218: note = sp|B1YFM6|QUEC_EXIS2 7-cyano-7-deazaguanine synthase; OS = Exiguobacterium sibiricum (strain DSM 17290 / JCM 13490 / 255-15) OX=262543 GN=queC PE=3 SV=1
MKNERALVVFSGGQDSTTCLFQALADYSEVEVVTFNYGQRHAAELDVAREITSELGVKHHELDLSLLSQLTSNSLTDHSQSITTNEDGLPSTFVDGRNHLFLSFAAVLAKGRGIRHIITGVCETDFSGYPDCRDSFIKSLNVTLNLAMDYPFVIHTPLMWLDKKETWALADSLGAFDFVRKRTLTCYNGIIGDGCGDCPACELRKKGLDAYIEEVQHT

SEQ ID NO: 38236 - protein, 214 aa, Exiguobacterium sp.
  REGION 1..214: note = sp|C4L0V4|QUEC_EXISA 7-cyano-7-deazaguanine synthase; OS = Exiguobacterium sp. (strain ATCC BAA-1283 / AT1b); OX = 360911 GN=queC PE=3 SV=1
MQHEKALVVFSGGQDSTTCLFWAKQQFSHVEAVTFAYGQRHDAEIEVAKEIAAELDVPHHILDLSLLGQLTSNALTRHDLDIDNADVPNTFVDGRNHLFLSFAAVMAKQLGMHHIVTGVCETDFSGYPDCRDQFIKSLNVTLNLAMDYPFVIDTPLMWLDKKETWALADELGAFDYVKERTLTCYNGVIGSGCGECPACKLRQNGLTAYEEVRV

SEQ ID NO: 38237 - protein, 218 aa, Exiguobacterium sp.
  REGION 1..218: note = tr|A0A419DN77|A0A419DN77_9BACL 7-cyano-7-deazaguanine synthase OS=Exiguobacterium sp. RIT452 OX=2315552 GN=queC PE=3 SV=1
MKNERALVVFSGGQDSTTCLFQALADYSQVEVVTFNYGQRHAAELDVARTIASELGVKHHELDLSLLSQLTSNSLTDHSQSITTNEDGLPSTFVDGRNHLFLSFAAVLAKGRGIRHIITGVCETDFSGYPDCRDSFIKSLNVTLNLAMDYPFVIHTPLMWLDKKETWALADSLGAFDFVRERTLTCYNGIIGDGCGDCPACELRKKGLDAYIEEVQHT

SEQ ID NO: 38238 - protein, 234 aa, unidentified
  source 1..234: note = Extensimonas vulgaris
  REGION 1..234: note = tr|A0A369AHB1|A0A369AHB1_9BURK 7-cyano-7-deazaguanine synthase OS=Extensimonas vulgaris; OX = 1031594 GN=queC PE=3 SV=1
MRTGHALVLFSGGQDSTTCLAWALERFALVETVGFNYGQRHHVEMHARTQVLGALRAQFPVWGARLGQDHVIDLSVLGRISDTALTRDVAIQMDAAGLPNTFVPGRNLLFFQLAAALGYRRGLHTLVGGMCETDYSGYPDCRDDTIKALQVAVSLGMGQHFTFDTPLMWLDKAQTWELAHALGGQALVDIVIEHTHTCYLGERGVRHAWGYGCGHCPACALRQAGYERWREQVA

SEQ ID NO: 38239 - protein, 221 aa, Falsibacillus pallidus
  REGION 1..221: note = tr|A0A370GIX2|A0A370GIX2_9BACI 7-cyano-7-deazaguanine synthase OS=Falsibacillus pallidus; OX = 493781 GN=queC PE=3 SV=1
MINQKAIVVFSGGQDSTTCLFWAMKRFEEVIAVTFDYGQRHNLELQCAKEIAQELNIEHHILDMSLLNQLAPNALTRTDIEIKESDGELPSTFVDGRNHLFLSFAAVLAKQKGAKHIITGVCETDFSGYPDCRDVFVKSLNVTLNLAMDYQFVLDTPLMWLDKAETWELADELGAFDYIREKTLTCYNGIKGDGCGECPACKLRARGLEQYLEKRQGGDAR

SEQ ID NO: 38240 - protein, 221 aa, Falsibacillus sp.
  REGION 1..221: note = tr|A0A3L7K0T1|A0A3L7K0T1_9BACI 7-cyano-7-deazaguanine synthase OS=Falsibacillus sp. GY 10110 OX=2478915 GN=queC PE=3 SV=1
MKKGKAIVVFSGGQDSTTCLFWALQRFEEVIAVTFDYGQRHNLELQCASEIAKDLNIEHHVLDMSLLNQLAPNALTRKDMEIKQDEGELPTTFVDGRNLLFLSFAAVLAKQKGAKHIVTGVCETDFSGYPDCRDVFVKSLNVTLNLAMDYEFVIDTPLMWLDKAETWQLSDQLDAFDYVRENTLTCYNGIKGDGCGECPACHLRKRGLDQYLAAKEGGMDS

SEQ ID NO: 38241 - protein, 196 aa, unidentified
  source 1..196: note = Falsochrobactrum sp.
  REGION 1..196: note = tr|A0A316JM47|A0A316JM47_9RHIZ 7-cyano-7-deazaguanine synthase OS=Falsochrobactrum sp. HN4 OX=2201899 GN=DKP76_18360 PE=3 SV=1
MSIVTLVSGGLDSTLVAKLAQEEGLSIHPLFIDYGQRSRDRELAACRGIMKRLGLPEPKIADLSGYGALIRSGLTDRSLHIVDDAFTPGRNMLFLLTAAAYAFQRNADAVSIGLLHEETSLFPDQTSAFLRDAEQMIARCLGRSIRVLAPLSQFHKIDVVELARQKGIVGTYSCHEGSEEACGVCIACNEFKFERA

SEQ ID NO: 38242 - protein, 232 aa, unidentified
  source 1..232: note = Falsochrobactrum sp.
  REGION 1..232: note = tr|A0A316JEG4|A0A316JEG4_9RHIZ 7-cyano-7-deazaguanine synthase OS=Falsochrobactrum sp. HN4 OX=2201899 GN=queC PE=3 SV=1
MKTLVICSGGLDSVSLAHKIAAEQTLTGLISFDYGQRHKKELDFAQACARRLEVPHQIIDISAIGASLTGSALTDNVAVPDGHYAEDTMKITVVPNRNAIMLAIAFGVAAAQKAEAVALAVHGGDHFIYPDCRPGFIDAFQTMQNHALEGYADIDLLAPYVHCSKSDIVVDGAKYRTPFAATWSCYKGGEQHCGRCGTCVERREAFHLAGIEDPTPYEDATFWRTAIEGRNR

SEQ ID NO: 38243 - protein, 220 aa, unidentified
  source 1..220: note = Fermentimonas caenicola
  REGION 1..220: note = tr|A0A098C0G7|A0A098C0G7_9PORP 7-cyano-7-deazaguanine synthase OS=Fermentimonas caenicola; OX = 1562970 GN=queC PE=3 SV=1
MKDYSNEDALVLFSGGQDSTTCLYWAKHNFRNVYALCFSYGQRHSQEIKNAERIAKMSDTPFQLLDTEIISQLAPNSLTNLSMQMDSEKPADSYPNTFVPGRNLLFLTFAATIAYAKNIRHIVTGVSEADYSGYPDCRDTFIRSANATLNLAMDKQFVIHTPLMWRNKKEVWQLADELGVFEIVRDETLTCYNGIIAEGCGHCPSCVLRNKGLKEYLEER

SEQ ID NO: 38244 - protein, 232 aa, Ferrimicrobium acidiphilum
  REGION 1..232: note = tr|A0A0D8FWP0|A0A0D8FWP0_9ACTN 7-cyano-7-deazaguanine synthase OS=Ferrimicrobium acidiphilum DSM 19497 OX=1121877 GN=queC PE=3 SV=1
MGNPPAVVLLSGGLDSTTVLAIAKHQGFEPHALSFDYGQRHGIELKAAQRVARSMGVSNHIVTTINLRSFGGSALTADIAVPHHESIEELSEAIPITYVPARNTIFLSFALALAETLGSGDIFIGVNALDYSGYPDCRPEYIRAYEAMANLATKAGVEGQHRLHIHTPLIELSKAEIIRLGLSLKVDYALTHSCYDPSPAGEPCGTCDSCLLREKGFREAGVDDPASKHWPT

SEQ ID NO: 38245 - protein, 220 aa, Ferrimonas balearica
  REGION 1..220: note = tr|E1SVZ3|E1SVZ3_FERBD 7-cyano-7-deazaguanine synthase OS=Ferrimonas balearica (strain DSM 9799 / CCM 4581 / PAT) OX=550540 GN=queC PE=3 SV=1
MEKKAVVIYSGGMDSFTVLHKVITEGYTPYAITFDYGQRHDKEVEYAKVVCSELGINHKIIDITAINQLISGSSLTRDSESDIPEGHYAEDNMKSTVVPNRNMILISLATGYAASIGAGKVFYGAHSGDHAIYPDCRPEFVEKINAATMIANYEPIEVVSPYLYQSKIEILKDGLEMGLDYGKTWTCYNGREKACGRCGSCVERLESFEMNGVSDPLLYE

SEQ ID NO: 38246 - protein, 233 aa, Ferrimonas balearica
  REGION 1..233: note = tr|E1SWF0|E1SWF0_FERBD 7-cyano-7-deazaguanine synthase OS=Ferrimonas balearica (strain DSM 9799 / CCM 4581 / PAT) OX=550540 GN=queC PE=3 SV=1
MSDKRIAVVVFSGGQDSTTCLVQALTHYDEVHAITFDYGQRHAQEIEVAKTLATELGVKAHKVMDVSLLGELAISALTRDNIAVANELMDNGLPNTFVPGRNILFLTLAGIYAYQVGAQTVITGVCETDFSGYPDCRNEFVQALEKALVLGMDRPLTLATPLMWLDKAQTWALADHYGTLELVRDRTLTCYNGVLGAGCGTCPACQLRARGLEQYLANRDTILDDVRGQCGLD

SEQ ID NO: 38247 - protein, 233 aa, Ferrimonas marina
  REGION 1..233: note = tr|A0A1M5Z6E1|A0A1M5Z6E1_9GAMM 7-cyano-7-deazaguanine synthase OS=Ferrimonas marina; OX = 299255 GN=queC PE=3 SV=1
MSKPSVAVVVFSGGQDSTTCLVQALKQFDEVHAITFDYGQRHSEEIAVAQTLAKQLGVKAHKVLDVGLLGELAISALTRDSIPVANELMDNGLPNTFVPGRNILFLTLAGIYAYQIGASTVITGVCETDYSGYPDCRNEFVQALQQALELGMDRPLTLSTPLMWLDKAETWALADHYDALALVRDHTLTCYNGVIGAGCGECPACQLRANGLNQYLGQQDHYQAQLRDRCQLD

SEQ ID NO: 38248 - protein, 232 aa, unidentified
  source 1..232: note = Ferrimonas sediminum
  REGION 1..232: note = tr|A0A1G9BR83|A0A1G9BR83_9GAMM 7-cyano-7-deazaguanine synthase OS=Ferrimonas sediminum; OX = 718193 GN=queC PE=3 SV=1
MSTTKAVVVFSGGQDSTTCLVQALQQYDEVHAITFDYGQRHRQEIDVAQELANQLGVTAHKILDVGLLNELAISALTRDEIQVDHALMDNGLPNTFVPGRNILFLTLAGIYAYQIGAEAVITGVCETDFSGYPDCRNDFVKAMESALVQGMDRPLKLVTPLMWLNKAETWAMADHYHSLELVRDHTLTCYNGIKGSGCGDCPACHLRSRGLEDYLSHRDTVLSDARQKAHLD

SEQ ID NO: 38249 - protein, 234 aa, Ferrimonas sp.
  REGION 1..234: note = tr|A0A4U1B657|A0A4U1B657_9GAMM 7-cyano-7-deazaguanine synthase OS=Ferrimonas sp. IMCC35001 OX=2569538 GN=queC PE=3 SV=1
MTAVVRKAVVVFSGGQDSTTCLVQALKKYDEVHAITFDYGQRHRLEIEIAQELGTRLGVAAHKVLDVGVLNELAISALTRDEIPVDHGLADNGLPNTFVPGRNILFLTLAGIYAYQIGAEAVITGVCETDFSGYPDCRNEFIQAMESALVKGMDRPLKLVTPLMWLNKAETWAMADHYGALELVRDDTLTCYNGLKGSGCGDCPACHLRSRGLQEYLANRDTILCGTREKAQLV

SEQ ID NO: 38250 - protein, 233 aa, Ferrimonas sp.
  REGION 1..233: note = tr|A0A4U1BMA8|A0A4U1BMA8_9GAMM 7-cyano-7-deazaguanine synthase OS=Ferrimonas sp. IMCC35002 OX=2569539 GN=queC PE=3 SV=1
MTKAKGTAVVVFSGGQDSTTCLVQALEQFEQVHAITFDYGQRHVKEIEIAQALTKKLGVTHKVMDVSLLNELAISSLTRDDIEVDGTLSEKGVPNTFVPGRNILFLTLAGIYAYQVGASTVITGVCETDYSGYPDCRNDFVKALEKALVLGMDRELTLSTPLMWLDKAETWALADHYNALELVRDHTLTCYNGIQGFGCGECPACELRSRGLENYLNDRDAILATTREKAQLG

SEQ ID NO: 38251 - protein, 226 aa, unidentified
  source 1..226: note = Ferriphaselus amnicola
  REGION 1..226: note = tr|A0A2Z6GB15|A0A2Z6GB15_9PROT 7-cyano-7-deazaguanine synthase OS=Ferriphaselus amnicola; OX = 1188319 GN=queC PE=3 SV=1
MRKALVLLSGGLDSATVLAIARAQGFSCYALSVDYGQRHHAELAAAQRVAQTLGASEHRIIHIDLTSFGGSALTDDTIAVPEHPSAGIPLTYVPARNTIMLSLALAWAEVLGSQDIFVGVNAVDYSGYPDCRPEYIKAFEDMANLATKAAVEGHRLTVHAPLIALSKAEIIQQGIALGVDYGTTVSCYQADEQGRACGVCDSCRLRAAGFQQAGVADATRYCSKSQ

SEQ ID NO: 38252 - protein, 225 aa, Ferrithrix thermotolerans
  REGION 1..225: note = tr|A0A1M4UL65|A0A1M4UL65_9ACTN 7-cyano-7-deazaguanine synthase OS=Ferrithrix thermotolerans DSM 19514 OX=1121881 GN=queC PE=3 SV=1
MSKAVVLLSGGLDSATVMALVGSEGYEIYALSFDYGQRHRVEIESARKLAQSYGALHVVVPLPSVSFQGSSLTTKELSVPKREKLGEGIPNTYVPARNTVFLSFALGFGETVGAFDIFIGANSIDYSGYPDCRYEYLTAYEQMANLALKETVEGRAKVKIHAPLLSLTKAEIVALGLSLGVDYSITHSCYDPDEEGRACARCDSCAIRLRAFAENNVVDPAPYRY

SEQ ID NO: 38253 - protein, 238 aa, unidentified
  source 1..238: note = Ferrovibrio sp.
  REGION 1..238: note = tr|A0A2M8UBW6|A0A2M8UBW6_9PROT 7-cyano-7-deazaguanine synthase OS=Ferrovibrio sp.; OX = 1917215 GN=queC PE=3 SV=1
MTGVVVLCSGGIDSATLAYKVAVERKLDRLISFDYGQRHRREIEHAARIAAALDVRHDVIDITALGQFLTSSSLISGGEAVPDGHYAQDNMKSTVVPNRNAIMLSIAFGIAAGAKADAVGIAVHGGDHFIYPDCRPGFIDAFRAMQDRALEDLWNVELYSPFTATDKAGIVAEGARLGVPFDLTWSCYKGGEMHCGRCGTCVERREAFHLSGIPDPTQYEDADYWLKAIQEMKAGKEK

SEQ ID NO: 38254 - protein, 238 aa, unidentified
  source 1..238: note = Ferrovibrio sp.
  REGION 1..238: note = tr|A0A516GXM0|A0A516GXM0_9PROT 7-cyano-7-deazaguanine synthase OS=Ferrovibrio sp. K5; OX = 2594003 GN=queC PE=3 SV=1
MSLTVVLCSGGIDSATLAYKVAVERKLDRLISFDYGQRHRREIEHAARIAAALGARHDVVDITALGKFLTSSSLISGGDAIPDGHYAQDNMKSTVVPNRNAIMLSIAFGIAAGAKADAVGIAVHSGDHFIYPDCRPAFIDAFRTMQQRALEDLWEVELYSPFTTTDKAGIVAEGARLGVPFHLTWSCYKGGEMHCGRCGTCVERREAFHLSGVPDPTQYEDADYWLQAIAEMKKTKGG

SEQ ID NO: 38255 - protein, 244 aa, unidentified
  source 1..244: note = Ferrovum sp.
  REGION 1..244: note = tr|A0A149VWR1|A0A149VWR1_9PROT 7-cyano-7-deazaguanine synthase OS=Ferrovum sp. Z-31; OX = 1789004 GN=queC PE=3 SV=1
MSGRSGTGTRLMAGRNAVILLSGGLDSATVLAMARQQGFGVYAMSFAYGQRHAHELDCARRLALQPGVIHHSVVNIDLRGIGGSALTTTQEVPKDRNLDQEQAIPVTYVPARNTIFLSFALAWAEVLEVSDLFIGVNALDYSGYPDCRPEYLSAFERMANLATRRAVEGAPLTLHAPLLNLTKADIIRQGLVLGVDYGLTTSCYDPGPEGKPCGHCDACLLRARGFAQVGVPDPLMVRYGSVTA

SEQ ID NO: 38256 - protein, 228 aa, unidentified
  source 1..228: note = Ferrovum sp.
  REGION 1..228: note = tr|A0A149VTK4|A0A149VTK4_9PROT 7-cyano-7-deazaguanine synthase OS=Ferrovum sp. PN-J185; OX = 1356306 GN=queC PE=3 SV=1
MKKPAVILLSGGLDSTTVLAIAKHQGYTPYAMSFDYGQRHKVELEAAKRIAQHFSVAQHSIVQFDLRQIGGSALTSNEPVPKHRSVEDIGEGIPVTYVPARNTIFLSFALAWAEVLGAQDIFIGVNALDYSGYPDCRPEYIKSYENMANLATRAGVEGSTRLTIHAPLIAMSKKQIIETGLSLGVDYSLTTSCYDPGVQGQPCGQCDACILRQKGFAELNMNDPVVNR

SEQ ID NO: 38257 - protein, 226 aa, Fervidicella metallireducens
  REGION 1..226: note = tr|A0A017RTR2|A0A017RTR2_9CLOT 7-cyano-7-deazaguanine synthase OS=Fervidicella metallireducens AeB OX=1403537 GN=queC PE=3 SV=1
MKKAVVLLSGGLDSTTAVYLAKSQGYEVYAISFDYGQRQKKELESAQKVALAAGVKEHIVVKTNMNAWGGSALTDTNIDVPLGDENRKEIPVTYVPARNMIFLSFAASYAEVIGAQDIFIGVSEVDYSGYVDCRKEFIVAMEAAINLGTVCAAEHGKNIKIHAPFMNMTKADEIRLGMDLGVDYSLTWTCYRGEESACGECDSCILRLKAFKEAGYIDPIPYAKKA

SEQ ID NO: 38258 - protein, 206 aa, Fibrisoma sp.
  REGION 1..206: note = tr|A0A418ME73|A0A418ME73_9BACT 7-cyano-7-deazaguanine synthase OS=Fibrisoma sp. HYT19; OX = 2305895 GN=DYU11_07315 PE=3 SV=1
MALNNSILLASGGLDSTTLAYWLRSNEIDFLPVFINYGQHCASTELETLRQVLPGKLAKKIEVIDVSAVYKYSQSLLIREPDLWNDKVDYKRLYLPYRSLLLLTVGASFAQSINCNNVYAAFINSNHAQEIDCSAQFFNSLETVFEDYGGVSIIMPFRYMSKYEVAQLGIELKAPIGKSFSCQASSDIPCGACPNCVDRLEAIQSL

SEQ ID NO: 38259 - protein, 217 aa, Fibrobacter sp.
  REGION 1..217: note = tr|A0A1M5GYW1|A0A1M5GYW1_9BACT 7-cyano-7-deazaguanine synthase OS=Fibrobacter sp. UWB8; OX = 1896207 GN=queC PE=3 SV=1
MKNALLVLSGGMDSTTLLYERADEIALAVSFDYGSNHNDQEIPFAKYHCEKLGIPHLTIPLKFMHDYFKSSLLEGADAIPEGSYDSENMKSTVVPFRNGIMLSVAAGLAESRDLTKVMMANHFGDHAIYPDCREEFVKNMSAAIAAGTYASITIDAPYTNISKADIARKGKALGIDYSQTWSCYKGGKIHCGKCGTCLERKEALVEAGIEDTTEYGA

SEQ ID NO: 38260 - protein, 219 aa, Fibrobacter sp.
  REGION 1..219: note = tr|A0A254T2F3|A0A254T2F3_9BACT 7-cyano-7-deazaguanine synthase OS=Fibrobacter sp. UWB1; OX = 1964355 GN=B7988_02940 PE=3 SV=1
MQKSRCDAILLLSGGIDSTTVLEQLTKQGKKVFCLIFDYKQSLHKEIAVAASNAKRLKQPYKIVSIDLGFTGSKCSLISKSRISENRSFEQIDSATPTSYVEFRNGILLSYAVMFAEVNGINDIYGGFNGLASGQYYDDTLAFIKSFEKAANVGTSPNFKVRIHAPFSTVSKAEIVKIGRKLGIDYERNTWSCYKNGSTHCGKCDSCKQRERALAQGGK

SEQ ID NO: 38261 - protein, 217 aa, Fibrobacter succinogenes
  REGION 1..217: note = tr|C9RPK1|C9RPK1_FIBSS 7-cyano-7-deazaguanine synthase OS=Fibrobacter succinogenes (strain ATCC 19169 / S85) OX=59374 GN=queC PE=3 SV=1
MKDALLVLSGGMDSVTLLYDRAADIALAVSFDYGSNHNDKEIPFARMHCEKLGIPHITIPLKFMHDYFTSSLLSGADAIPEGTYADENMKSTVVPFRNGIMLSVAAGLAESRDLKRVMMANHFGDHAIYPDCREEFVKNMSAAISAGTYANITIDAPYTNISKADIARKGKALGLDYSETWSCYKGGKIHCGKCATCLERKAALAEAGINDTTEYEA

SEQ ID NO: 38262 - protein, 217 aa, Fibrobacter succinogenes; identical to SEQ ID NO: 38261
  REGION 1..217: note = tr|A0A380RUV3|A0A380RUV3_FIBSU 7-cyano-7-deazaguanine synthase OS=Fibrobacter succinogenes OX=833 GN=queC PE=3 SV=1

SEQ ID NO: 38263 - protein, 36 aa, unidentified
  source 1..36: note = Fibrobacteres bacterium
  REGION 1..36: note = tr|A0A3C1WGW1|A0A3C1WGW1_9BACT 7-cyano-7-deazaguanine synthase (Fragment); OS = Fibrobacteres bacterium OX=2052160 GN=DCQ83_05190 PE=4; SV = 1
MDSPKTKLNRPSLVVFSGGQDSTTCLHWALRTFTAV

SEQ ID NO: 38264 - protein, 222 aa, unidentified
  source 1..222: note = Fictibacillus aquaticus
  REGION 1..222: note = tr|A0A235FAC4|A0A235FAC4_9BACI 7-cyano-7-deazaguanine synthase OS=Fictibacillus aquaticus; OX = 2021314 GN=queC PE=3 SV=1
MSKKAVIVLSGGLDSTTCMGIAKDAGYELYPITFHYGQRHNREVEQAVKVAEFYGVADHRIVDLDFLKQIGGSALTDEKIDVPETAEEGIPSTYVPARNMIFLSLASAYAEVIGAEAVYTGVSAVDYSGYPDCRPEFIASMESTVNLATKAGVTGARIQIATPLIDKTKKETIEWGLTLGVPYELTTSCYNGLEEACGVCDSCQLRLKGFREAGSEDPIIYR

SEQ ID NO: 38265 - protein, 223 aa, unidentified
  source 1..223: note = Fictibacillus arsenicus
  REGION 1..223: note = tr|A0A1B1Z799|A0A1B1Z799_9BACI 7-cyano-7-deazaguanine synthase OS=Fictibacillus arsenicus; OX = 255247 GN=queC PE=3 SV=1
MSKKAVIVLSGGLDSTTCMGIAKAEGYDLYPITFHYGQRHNREVEQAIEVGKYYGVADHRIVDLTFLKDIGGSALTDETLDVPTETEEGIPVTYVPARNMIFLALASAYAEVIGATAVYTGVSAVDYSGYPDCRPEFIHSMEETINLATKAGVTGKNILVKTPLINLSKKETIEAGLSLNVPYELTTSCYNGKESACGKCDSCLLRLKGFKEAGSFDPIAYEN

SEQ ID NO: 38266 - protein, 223 aa, unidentified
  source 1..223: note = Fictibacillus arsenicus
  REGION 1..223: note = tr|A0A1V3GAQ4|A0A1V3GAQ4_9BACI 7-cyano-7-deazaguanine synthase OS=Fictibacillus arsenicus; OX = 255247 GN=queC PE=3 SV=1
MSKKAVIVLSGGLDSTTCMGIAKAEGYDLYPITFHYGQRHNREVEQAIEVGKYYKVADHRIVDLTFLKDIGGSALTDETLDVPTEAEEGIPVTYVPARNMIFLALASAYAEVIGATAVYTGVSAVDYSGYPDCRPEFIHSMEETINLATKAGVTGKNILVKTPLINLSKKETIEAGLSLNVPYELTTSCYNGKESACGKCDSCLLRLKGFKEAGSFDPIVYEN

SEQ ID NO: 38267 - protein, 223 aa, unidentified
  source 1..223: note = Fictibacillus enclensis
  REGION 1..223: note = tr|A0A0V8J9R3|A0A0V8J9R3_9BACI 7-cyano-7-deazaguanine synthase OS=Fictibacillus enclensis; OX = 1017270 GN=queC PE=3 SV=1
MKKAVIVLSGGLDSTTCMGIAKHEGYELYPLTFNYGQRHSREVNQAKKVAEYFDVKEHRIVDIAFLNQIGGSALTDASIDVPTEKEDKEEIPSTYVPARNMIFLSLASAYAEVIGAEAVFIGVSAVDYSGYPDCRPEFIKSMNETINLATKAGTTGEQIAICAPLMHLTKKETIQKGLELEVPYHLTTSCYNGEEEACGECDSCKLRLKGFEEAGAKDPIPYK

SEQ ID NO: 38268 - protein, 225 aa, unidentified
  source 1..225: note = Fictibacillus macauensis
  REGION 1..225: note = tr|I8AJ43|I8AJ43_9BACI 7-cyano-7-deazaguanine synthase OS=Fictibacillus macauensis ZFHKF-1 OX=1196324; GN = queC PE=3 SV=1
MKKAVIVLSGGLDSTTCMGIAAEQGYALYPLTFHYGQKHNREVEQAKKVAAHYQVSEHRIVDIAFLNQIGGSALTDSSIAVPSEQDDKEEIPATYVPARNMIFLSLASAYAEVIGAQAVFIGVSAVDYSGYPDCRPEFIQSMDETINLATKAGTTGERISIVAPLMHLTKKETIEEGLALGVPYELTTSCYNGEEEACGTCDSCLLRLKGFEEAGGRDPIAYASR

SEQ ID NO: 38269 - protein, 223 aa, unidentified
  source 1..223: note = Fictibacillus phosphorivorans
  REGION 1..223: note = tr|A0A160IP65|A0A160IP65_9BACI 7-cyano-7-deazaguanine synthase OS=Fictibacillus phosphorivorans OX=1221500 GN=queC PE=3 SV=1
MNKKAVIVLSGGLDSTTCMGIAKAEGYDLYPITFHYGQRHNREVEQAIEVGKYYGVADHRIVDLTFLKDIGGSALTDEKVEVPTEAEEGIPVTYVPARNMIFLSLASAYAEVIGATAVYTGVSAVDYSGYPDCRPEFIQSMEETINLATKAGVTGKNISVETPLISLSKKETIEKGLSLEVPYDLTTSCYNGKEAACGKCDSCVLRLKGFNEAGAVDPIAYEI

SEQ ID NO: 38270 - protein, 223 aa, unidentified
  source 1..223: note = Fictibacillus phosphorivorans
  REGION 1..223: note = tr|A0A163Q6C9|A0A163Q6C9_9BACI 7-cyano-7-deazaguanine synthase OS=Fictibacillus phosphorivorans OX=1221500 GN=queC PE=3 SV=1
MSKKAVIVLSGGLDSTTCMGIAKGEGYDLYPITFHYGQRHNREVEQAIEVGKFYNVEDHRIVDLTFLKDIGGSALTDEKVEVPTEAEEGIPVTYVPARNMIFLSLASAYAEVIGATAVYTGVSAVDFSGYPDCRPEFIKSMEETINLATKAGVTGKNISVETPLIHLSKKETIEKGLSLDVPYELTTSCYNGKETACGKCDSCVLRLKGFKEAGSADPIPYEV

SEQ ID NO: 38271 - protein, 223 aa, unidentified
  source 1..223: note = Fictibacillus solisalsi
  REGION 1..223: note = tr|A0A1G9X1Y7|A0A1G9X1Y7_9BACI 7-cyano-7-deazaguanine synthase OS=Fictibacillus solisalsi; OX = 459525 GN=queC PE=3 SV=1
MKKAVIVLSGGLDSTTCMGIAKHEGYELYPLTFNYGQRHSREVNQAKKVAEYFGVNEHRIVDIAFLNQIGGSALTDASIDVPTEKEDKEEIPSTYVPARNMIFLSLASAYAEVIGAEAVFIGVSAVDYSGYPDCRPEFIKSMNETINLATKAGTTGERIAICAPLMHLTKKETIEKGLELKVPYHLTTSCYNGEEEACGECDSCQLRLKGFEEAGAKDPIPYK

SEQ ID NO: 38272 - protein, 223 aa, unidentified
  source 1..223: note = Fictibacillus sp.
  REGION 1..223: note = tr|A0A4Q2I1J6|A0A4Q2I1J6_9BACI 7-cyano-7-deazaguanine synthase OS=Fictibacillus sp. S7; OX = 2212476 GN=queC PE=3 SV=1
MKKAVIVLSGGLDSTTCMGIAKHEGYELYPLTFNYGQRHSREVNQAKKVAEYFEVKEHRIVDIAFLNQIGGSALTDASIDVPTEKEDKEEIPSTYVPARNMIFLSLASAYAEVIGAEAVFIGVSAVDYSGYPDCRPEFIKSMNETINLATKAGTTGEQIAICAPLMHLTKKETIQKGLELEVPYHLTTSCYNGEEEACGECDSCKLRLKGFEEAGAKDPIPYK

SEQ ID NO: 38273 - protein, 223 aa, unidentified
  source 1..223: note = Fictibacillus sp.
  REGION 1..223: note = tr|A0A4Q7QPK7|A0A4Q7QPK7_9BACI 7-cyano-7-deazaguanine synthase OS=Fictibacillus sp. BK138; OX = 2512121 GN=queC PE=3 SV=1
MSKKAVIVLSGGLDSTTCMGIAKAEGYDLYPITFHYGQRHNREVEQAIEVGKYYDVADHRIVDLTFLKDIGGSALTDETLDVPTEAEDGIPVTYVPARNMIFLALASAYAEVIGATAVYTGVSAVDYSGYPDCRPEFIQSMEETINLATKAGVTGKNILVKTPLINLSKKETIEAGLSLNVPYELTTSCYNGKESACGKCDSCLLRLKGFKEAGSFDPIVYEN

SEQ ID NO: 38274 - protein, 261 aa, unidentified
  source 1..261: note = Unknown
  REGION 1..261: note = tr|A0A2T1DPE0|A0A2T1DPE0_9CYAN 7-cyano-7-deazaguanine synthase OS=filamentous cyanobacterium CCP2 OX=2107700 GN=queC PE=3 SV=1
MNSGSPNSGGVNPGGVNPGSPNSKGKNAKAVVLLSGGLDSATAAAQAIADGYDLIALSFRYGQRHERELQAAQQVAQHLGIAEHHTIAVNLAQWGGSTLTEDSGEIPLDGVKPNQIPSTYVPGRNTVFIAIALSLAEAKQAEAIYLGINAVDYSGYPDCRPEYLEAFQHLASLSSKAGLNGQAPVLVAPLVTDSKVDIVHRALRLNVPIPLTWSCYQGQAEPCGLCDSCRIRDRALIEAGKPEWATSIGRDLYFRETQYTT

SEQ ID NO: 38275 - protein, 223 aa, unidentified
  source 1..223: note = Unknown
  REGION 1..223: note = tr|A0A2P8VRU7|A0A2P8VRU7_9CYAN 7-cyano-7-deazaguanine synthase OS=filamentous cyanobacterium CCT1 OX=2107702 GN=queC PE=3 SV=1
MSQPRAIVLLSGGLDSATAAAQAIADGYDLVALSFNYGQRHQRELEAAKSVAEHLAIADHHFIDVNLAQWGASSLTDLAQPLPQDGIEAGIPSTYVPGRNTVFIALALALAEAKGAEAVYLGINAVDYSGYPDCRPEYLAAFQQLAQLSSKVGLEGHAPKLVAPLVLDSKVDIVRRAVALGVPIAQTWSCYQGGAVPCGRCDSCRIRDRALVEAGYPELATAN

SEQ ID NO: 38276 - protein, 221 aa, Filibacter sp.
  REGION 1..221: note = tr|A0A3P5X4R4|A0A3P5X4R4_9BACL 7-cyano-7-deazaguanine synthase OS=Filibacter sp. TB-66; OX = 2483811 GN=queC PE=3 SV=1
MKQEKAVVVFSGGQDSTTCLFWALKNFKGVATVTFDYGQRHHAEIECARQIASELDVSFKVLDMQLINQLSANALTRDDIEVSEKEGQLPSTFVPGRNHLFLSFAAVYAQAIGSRHLITGVSETDFSGYPDCRDTFIKSLNVTVNLAMDAQFVIHTPLMWLDKAEVWALADELGAFNFVQEKTLTCYNGIPSTGCEECPACLLRNKGLASYLDSKVVSINN

SEQ ID NO: 38277 - protein, 222 aa, Filobacillus milosensis
  REGION 1..222: note = tr|A0A4Y8IF66|A0A4Y8IF66_9BACI 7-cyano-7-deazaguanine synthase OS=Filobacillus milosensis; OX = 94137 GN=queC PE=3 SV=1
MEKNNKAVVVFSGGQDSTTCLFWALKKYDDVEVVTFNYGQRHDEEIEVAKEIANDLNIRHHILDMSLLNQLAPNALTRDDIEVTDGEDGELPSTFVPGRNLLFVSFATILAKQIGAKHIITGVCETDYSGYPDCRDVFIKSLNVSLNLSMDDDFVVHTPLMWLDKAETWKLADQLGAFDYVREKTLSCYHGVRGDGCGECPACHLRQNGLETYLKQLKEVKA

SEQ ID NO: 38278 - protein, 579 aa, unidentified
  source 1..579: note = Fimbriiglobus ruber
  REGION 1..579: note = tr|A0A225DWS0|A0A225DWS0_9BACT Uncharacterized protein OS=Fimbriiglobus ruber OX=1908690 GN=FRUB_03623; PE = 4 SV=1
MTRSTVSTLSSALSFASDDDYRFKFVSLRKEQPLQPSLDFDSTMYDGLVEEVVMFSGGLDSLAGAVQESVLGRRRVLLVNHRSTPKVSNRYKDLLAGLKRHAGDASPLNIYVRVNKDSDLGNEYTQRTRSFLFAAIGSLFAAMIGLDRLRFYENGVVSLNLPMSAQVVGARASRTTHPRVLSEYSEILSAVAGRPFRIENPFLWRTKTDMVRLVAQAGCAELIRLSSSCAHTWAQTIEHPHCGDCSQCIDRRFAVLAAGQEEHDPRMGYGVDLLTGQRSDGVSRGLLSAYLETANQVGRMSPTQFFGKFGEAARVFRHIDGRADVAANNIYDLYQRHARDVNAVVDHAIADNATAIRQRELPPSCLVRLVSDSGERPDRLDNPSATAFDPRPPFEVTDYTFRKWDSVWLLRFAGGSNIVLRPSIGAAYLNILLSRPNSPISAVDLFCKVSRRSQDFAIESKGKRADGDAVAAYMARLSELKADREKATKDNDTVVLEELDKEYQEIEKEIRRVVTPKGRIRREVGISEKIRKSVGIAIRRAVADIRRYVGTEAADHIKSRIRGGQRVMYTATQGIEWQT

SEQ ID NO: 38279 - protein, 692 aa, unidentified
  source 1..692: note = Fimbriiglobus ruber
  REGION 1..692: note = tr|A0A225DIK6|A0A225DIK6_9BACT Uncharacterized protein OS=Fimbriiglobus ruber OX=1908690 GN=FRUB_04644; PE = 4 SV=1
MPPELHVICGPSFEADRRTDPSALRLNRTGPDSNVFLTIEDMRQRMYQDPPDRFLDLLDIAAYVYAADQATPRKGGRVEDFEQHWRRHFLFHIPVRDPDFWRSASTCDRLASVLNFASDDDFRFEFVPLRTSPLLRNCIQFDGTMYDGVVDEVVMFSGGLDSLAGAVQESVLDQRKVLLVNHRSTPKVAQRYRNLLAGLRTHAGDANPLNLYVRVNKDSDLGREYTQRTRSFLFAALGATFAAMIGLNRLRFYENGVISLNLPLSAQVLGARASRTTHPRVLRGYAELMSAVAGRPFAIENPFLWRTKTDVVRLIADAGCGDLLRLSTSCAHTWAQTKDHPHCGDCSQCIDRRFATLAAGQEALDPGSEYGVDLLTGERADGISRGLLAGYLETANQVGRMSPIQFFSKFGEATRVFRHVEGGAETVAHQVYDLYQRHAREVNGVVDRAIAANATAIRQRELPQSCLVRLVSDSGERPDRVDPPSATAFDPRPPFEETDYVFRRWNSVWAVRFAGGPYILLRPSRGAAYLNILLSRPNTPVSAIELFCTVSRRGTEFAIETTGPRADKDAVAAYKARLIELQAIREKAEEENDTLVLEEVDRDFRDIESEIKRVMTPRGRIRQDAGTWEKIRKSVGIAIRRVVEEIRVNRGSEVAEHLRSSIRGGQRVIYAASPRIEWQAGNNEKSFPLHEK

SEQ ID NO: 38280 - protein, 205 aa, unidentified
  source 1..205: note = Fimbriimonas ginsengisoli
  REGION 1..205: note = tr|A0A068NTT9|A0A068NTT9_9BACT 7-cyano-7-deazaguanine synthase OS=Fimbriimonas ginsengisoli Gsoil 348 OX=661478 GN=queC PE=3 SV=1
MAIARGDGTEPYALTVLYGQRHLEEVEASKRVAAQLGAVEHKFVRVELDAIGGSALTDAIEVPKDRDESKMTDIPVTYVPARNTVMLSLALGYAEVVGAEAIYAGVNAVDYSGYPDCRPEYIAAFQTLARLATKAGVEGRPIEIRTPLIQLTKPQIIQRGLELGVDYALTHSCYDPADGRPCGHCDACLIRLKAFESLGMKDPAL

SEQ ID NO: 38281 - protein, 430 aa, Finegoldia magna
  REGION 1..430: note = tr|A0A010NKS3|A0A010NKS3_FINMA 7-cyano-7-deazaguanine synthase OS=Finegoldia magna ALB8; OX = 1459804 GN=BA93_04230 PE=3 SV=1
MRIYCTNESIDNIPEGFDEKLDITNKKDIGFNFWDNYIKLEKEFSKLAIDLLYLSIFVFVADRIVKRDTQNDGWTRTIKLNIPVSDIDFWNSQKVLVTDMLNFLSGDNWTFEFRPKTVYQEQIYYSSKKYKELNKRSYDKICMFSGGLDSFIGAIDLLEDSTSSILLVSHYGGGKGTKSYQDDIFKAVKNKYKLDDRDQVQSYVVAKNGKEDTTRTRSFMFFSHAIVYASAFGRKTQLYIPENGYISLNVPLSGSRFGSSSTRTTHPYYMKKLQTLINNMNLDIRIINPYQFKTKGEMMKECKNSSFLKEQYVNTMSCSHPDNGRFKKEKTSKHCGDCIPCIVRKAAIISAYGKDETEYRHKNLEKSEAGILNRNAFLQMLEKHNPKKAVFEIQKSGPLTDNLFEFADVYNRSIEELNKIFNEVDMNEVD

SEQ ID NO: 38282 - protein, 226 aa, unidentified
  source 1..226: note = Firmicutes bacterium
  REGION 1..226: note = tr|A0A2N2A822|A0A2N2A822_9FIRM 7-cyano-7-deazaguanine synthase OS=Firmicutes bacterium HGW-Firmicutes-8 OX=2013789 GN=queC PE=3 SV=1
MKAVVLLSGGLDSTVCMSVAEAAGYELFPMSFKYGQRHDREIVSAQNIANYYGVKKHLIITTNMDDIGGSALTADIDVPAGDENRGDIPVTYVPARNLIFLSYALGYAEVLDARKIYIGVNALDYSGYPDCRPEFIERFQHLADYTTKAAVQDKRVIKVETPLINMTKADIIQLGQKNNAPLHLTTSCYRGGEQACGTCDSCLLRLRGFKQAGCKDPIEYGVRSTE

SEQ ID NO: 38283 - protein, 219 aa, unidentified
  source 1..219: note = Firmicutes bacterium
  REGION 1..219: note = tr|A0A2N2EHZ1|A0A2N2EHZ1_9FIRM 7-cyano-7-deazaguanine synthase OS=Firmicutes bacterium HGW-Firmicutes-1 OX=2013770 GN=queC PE=3 SV=1
MKKENAVIIFSGGQDSTTCLFWAKERFHEVIAISFDYGQKHSLELNCATDICREQGIEHHILDMSLLNQLAPNSLTRSDIKVDTDAPDVGTPNTFVDGRNLLFITFGAIFAKQRDIHHIVTGVSQSDYSGYPDCRDIFIKSLNVTLELSMNYQFVIHTPLMWIDKAETWEMAYDLGVLDIIKDETLTCYNGIKGQGCGECPACKLRSKGYHLFMEGLNK

SEQ ID NO: 38284 - protein, 226 aa, Fischerella major
  REGION 1..226: note = tr|A0A1U7H027|A0A1U7H027_9CYAN 7-cyano-7-deazaguanine synthase OS=Fischerella major NIES-592 OX=210994 GN=queC PE=3 SV=1
MKAVILLSGGLDSSTVLYQALADGCECYTISFDYQQRHKRELRSALAIAKTAGVVQNQIVTFDLRQWGGSALTDDTIDLPQMRSLEEMSQNIPITYVPARNTIFLSFALAYAETITAECVYIGINALDYSGYPDCRPDYIQAMQEVFRLGTKQGREGKTINIVAPLLHLKKTEIIQLGNKLGVPWELTWSCYAGDDVACGVCDACQLRLAAFAELGLKDPLAYSQK

SEQ ID NO: 38285 - protein, 224 aa, unidentified
  source 1..224: note = Fischerella muscicola
  REGION 1..224: note = tr|A0A2N6JW19|A0A2N6JW19_FISMU 7-cyano-7-deazaguanine synthase OS=Fischerella muscicola CCMEE 5323 OX=2019572 GN=queC PE=3 SV=1
MKAVILLSGGLDSSTVLYQALADGCECYAISFDYQQRHKRELHSALAIAKTAGVVQNQIVTFDLRQWGGSALTDDTIDLPQKRSLEDMSQNIPVTYVPARNTIFLSFALAYAETIAAERVYIGINALDYSGYPDCRPDYIQAMQEVFRLGTKQGREGKTITIVAPLLHLKKTEIIQLGNKLGVPWELTWSCYAGGDIACGVCDACQLRLAAFVELGLKDPLAYR

SEQ ID NO: 38286 - protein, 234 aa, Fischerella sp.
  REGION 1..234: note = tr|A0A0S3TRT6|A0A0S3TRT6_9CYAN 7-cyano-7-deazaguanine synthase OS=Fischerella sp. NIES-3754 OX=1752063 GN=queC PE=3 SV=1
MSLHPSVNMKAVILLSGGLDSSTVLYQALADGCECYTISFDYQQRHKRELRSALAIAKTAGVVQNQIVTFDLRQWGGSALTDDTIDLPQMRSLEEMSQNIPITYVPARNTIFLSFALAYAETITAECVYIGINALDYSGYPDCRPDYIQAMQEVFRLGTKQGREGKTINIVAPLLHLKKTEIIQLGNKLGVPWELTWSCYAGDDVACGVCDACQLRLAAFAELGLKDPLAYSQK

SEQ ID NO: 38287 - protein, 227 aa, Fischerella sp.
  REGION 1..227: note = tr|A0A1Z4TSF5|A0A1Z4TSF5_9CYAN 7-cyano-7-deazaguanine synthase OS=Fischerella sp. NIES-4106 OX=2005456 GN=queC PE=3 SV=1
MKAVILLSGGLDSSTVLYQALVDGCECYAISFDYQQRHRRELHSALAIAQKAGIVQNQIVTFDLRQWGGSALTDDTIDLPQKRSLEEMSQNIPVTYVPARNTIFLSFALAYAETIAAERVYIGVNALDYSGYPDCRPDYIQAMQEVFRLGTKQGREGKPITIVAPLLELKKTDIIQLGNKLGVPWELTWSCYAGDEMACGVCDSCRLRLAAFAELGLKDPLNYASPC

SEQ ID NO: 38288 - protein, 83 aa, Fischerella thermalis
  REGION 1..83: note = tr|A0A2N6LU94|A0A2N6LU94_9CYAN 7-cyano-7-deazaguanine synthase (Fragment) OS=Fischerella thermalis CCMEE 5319 OX=2019665 GN=CEN47_07210 PE=3 SV=1
MKAVILLSGGLDSSTVLYQALADGCECYTISFDYQQRHKRELRSALAIAKTAGVVQNQIVTFDLRQWGGSALTDDTIDLPQMR

SEQ ID NO: 38289 - protein, 226 aa, Fischerella thermalis
  REGION 1..226: note = tr|A0A2N6N2P4|A0A2N6N2P4_9CYAN 7-cyano-7-deazaguanine synthase OS=Fischerella thermalis CCMEE 5201 OX=2019672 GN=queC PE=3 SV=1
MKAVILLSGGLDSSTVLYQALADGCECYAISFDYQQRHKRELHSALAIAKTAGVVQNQIVTFDLRQWGGSALTDDTIDLPQMRSLEEMSQNIPVTYVPARNTIFLSFALAYAETITAERVYIGINALDYSGYPDCRPDYIQAMQEVFRLGTKQGREGKTINIVAPLLHLKKTEIIQLGNKLGVPWELTWSCYAGDDVACGVCDACQLRLAAFAELGLKDPLAYSQK

SEQ ID NO: 38290 - protein, 221 aa, unidentified
  source 1..221: note = Flammeovirgaceae bacterium
  REGION 1..221: note = tr|A0A3R7UYU4|A0A3R7UYU4_9BACT 7-cyano-7-deazaguanine synthase OS=Flammeovirgaceae bacterium TMED290 OX=1986700 GN=queC PE=3 SV=1
MKKALVLLSGGQDSTTCLYWALENFSYVEAVGFDYGQRHSLELKFAKKTALIANVNFEIILINNLFKNSALINKTQDLNASHPNNKKLPSSFVPGRNILFISLASSIAYNKKIDNIVTGVCETDYSGYPDCRKEFINSMKKSISIGLDYNIDIHAPLMNLDKAKIWKLAQELGCVEIIINNTMTDYNGSLKKNEWGYGELDNPASKIRSQGYYTAKKNKWI

SEQ ID NO: 38291 - protein, 221 aa, unidentified
  source 1..221: note = Flammeovirgaceae bacterium
  REGION 1..221: note = tr|A0A1Z9SE91|A0A1Z9SE91_9BACT 7-cyano-7-deazaguanine synthase OS=Flammeovirgaceae bacterium TMED262 OX=1986699 GN=queC PE=3 SV=1
MRKALVLLSGGQDSTTCLYWAKNKFDYVEAIGFDYGQRHGSELEFAKKTALISNINFEIISINNIFKNSALINKSEDLNAVHPNNKNLPSSFVPGRNILFISLASSYAYNKKIDNIVTGVCETDYSGYPDCRKEFINSMKKSVSIGLDYNIDIHTPLMNLDKAKIWKLAKELGCIEIIINNTMTDYNGSQKKNEWGFGKLDNPASKLRSQGYYTAKKNKWI

SEQ ID NO: 38292 - protein, 389 aa, unidentified
  source 1..389: note = Flaviaesturariibacter sp.
  REGION 1..389: note = tr|A0A4R4E2K9|A0A4R4E2K9_9BACT N-acetyl sugar amidotransferase OS=Flaviaesturariibacter sp. 17J68-15; OX = 2545761 GN=E0486_07175 PE=4 SV=1
MFHWSYNEENLRQNPVVNGGRPYQQCTKTVMDTIMDPDITFDEDGVCNYYHNYMNQVDKVVFKGAEGDRRIEEMVRTLKANQKGKYDSIIGLSGGVDSTYMVYKAKEWGINPLVVHFDYGWNLELAVQNIEQTLKHAGLELYTYVMNWEDFKHLQRAYFKAGVLDLDVPADHLIFAALNMVAKKFNIKYLLKGYNFQSEAILPRTWNYNRKFDLKNLQDINRQFGERKLKDLPKLGLWQQIYYERIYNLKSFSPLNNFDYNKEACKKELIEKIGWVDYGGKHFENVFTRFYQGYILPTRFAIDKRKAHLSTLICSGQATREEALTELQRPPYDLKVMQEDYVYVSKKLGFSEAEFDQCLTGPIRRHDEFKEEVKLQNFLSKAAKLIIRK

SEQ ID NO: 38293 - protein, 617 aa, unidentified
  source 1..617: note = Flavimaricola marinus
  REGION 1..617: note = tr|A0A238LBQ4|A0A238LBQ4_9RHOB 7-cyano-7-deazaguanine synthase OS=Flavimaricola marinus; OX = 1819565 GN=queC PE=4 SV=1
MAGAAPPSEHIVTCFAPLADRDGDEQLRFEIDGKVKSVSIRIGQLSRQLVAQLPEMAIDLIELAAFVYAIDSSVSRGGLADQQMGAKWHRRFCVEVPVRELDRWSDPDLKRELEEALMFLSGDRFEFSFVPMDGDDRGQTKYFEFGPEGSWVPDSLLMFSGGLDSFAGALEEIIERKHKVGLISHFSATKIAPIQRDLQKHLALKLGSQTLRHIPMRVQLRGGTNAEGTHRARSFLFAALGMATAVAFGKDRVSFYENGVVSLNLPSVGNVLGTRATRTTHPQTLRRFQSLFSRIFETPLRVDNPFFWRTKTDVIETIARLGMADQIAFTRSCADVHNQTKQFAHCGLCSQCIDRRFAVLAAGLERFDPPEAYRVDLMTGIRARVQDKEAALSYVRAALGYEMIAGADLLTRYPAILNAVDHLGEPSDSSLRRIAGLLQRHGQAVVSVMRKELGVRRPDEFPADSLPHLFGRIQNAQAWPEGPSLSPEHDPVETKEAFELVIDRKRQLVVINGIISIKGAAYRLLSVLADEHLVGAGQGLDPLDYPTLSGGVLADRLGLLDDAAVRQSVNRSRSQLAQRFGSADFEAEDGKVLIENIPWSGYRLAPDRVTVRVQSPK

SEQ ID NO: 38294 - protein, 227 aa, unidentified
  source 1..227: note = Flavisolibacter tropicus
  REGION 1..227: note = tr|A0A172TWB3|A0A172TWB3_9BACT 7-cyano-7-deazaguanine synthase OS=Flavisolibacter tropicus OX=1492898 GN=queC PE=3 SV=1
MTESPLSALVLFSGGQDSTTCLFWAKQQFEKVVALGFRYGQKHDVELKQASLIAEKANVPFHVIDITGMLKGSALTEHNKDVSAQHELNPELPASFVPGRNAVFLTIATSYAYTHGITDIVGGMCQADYSGYPDCRRVFVDSLQTSMTLALDNDVRIHTPLMYKSKAEAWKLAYELGVLEIVRDLSHTDYNGDRTTYNEWGYGRLDNPASILRAKGYEEAKQKGWLG

SEQ ID NO: 38295 - protein, 264 aa, unidentified
  source 1..264: note = Flavobacteriaceae bacterium
  REGION 1..264: note = tr|A0A349NVR8|A0A349NVR8_9FLAO 7-cyano-7-deazaguanine synthase OS=Flavobacteriaceae bacterium OX=1871037 GN=DCS66_20210 PE=3 SV=1
MSNKNKSVMIFSGGMDSAAMLRMAQFNSGELHCITFDYGQRHKREIECAKIQIEHAKLVSFSHNFEDTEIYHKIIDVTFLKELITTSSLTNEEIDNPDVKDMVGEAQPVSYVPFRNQIFLSIACAHAESIGADTVYHGATQVDSLAGYWDGSEQFREQFQALIDLNRKEQIKLMCPLLAMDKKAIVEFGASSRVDYKYTYTCYSGDEIADVTTPSSSLRIKGFADAGYIDPQPYNQDLTEFWKENKCVPFPEEVFLNKEGTRGP

SEQ ID NO: 38296 - protein, 199 aa, unidentified
  source 1..199: note = Flavobacteriaceae bacterium
  REGION 1..199: note = tr|A0A5K0USR9|A0A5K0USR9_9FLAO 7-cyano-7-deazaguanine synthase OS=Flavobacteriaceae bacterium OX=1871037 GN=queC PE=4 SV=1
MQKNNLAILLSGGMDSIALAYWKKPAHSITIDYGQKAANAEIKAAAQISKYLNIEHHILKVDCSALGSGDMNGSKSLGISPITEWWPYRNQLLVTLACMKGVSIGIKELIIGSVSTDNAHKDGTRTFYDYLSKLIEYQEGQIKITCPGIEMSTVDLIKKAKLPISLLYWAHSCHTANEPCMNCNGCKKYLYTLQMLGLD

SEQ ID NO: 38297 - protein, 356 aa, unidentified
  source 1..356: note = Flavobacteriales bacterium
  REGION 1..356: note = tr|A0A0F2NYB7|A0A0F2NYB7_9FLAO Uncharacterized protein OS=Flavobacteriales bacterium BRH_c54 OX=1629721; GN = VR77_02290 PE=4 SV=1
MDTSDSEITFDENGFCNHCTNFLEHTAKQMFQGTSSDQQLNEIIEKIKSAGKNLKYDCVVGISGGIDSCYVAYKAKALGLKPLAVHLDNGWNSELAVSNIEKILHKLDIDLHTHVLDWEEFKDLQLSFLRASVPEIETPTDIAILAVLHKVAAKHNIKYILSGGNFATEGILPKSWHYDAKDEKYLYAIQKQFGNKPLKTFPTFGFLKEMYYKFFKGIKIIYFLNYLPYSKKEAVALLENELNWKYYGGKHYESRYTRFVQSYILPEKFNIDYRKSTSSSLICSGEITREEALEELKGKSYDINLVNEDKEYLCKKLELSITEFDAIMDTPPKTHNDYPNNKKLLEFIYNAYRKFF

SEQ ID NO: 38298 - protein, 369 aa, unidentified
  source 1..369: note = Flavobacteriales bacterium
  REGION 1..369: note = tr|A0A2A5HP38|A0A2A5HP38_9FLAO N-acetyl sugar amidotransferase OS=Flavobacteriales bacterium OX=2021391; GN = COA31_03125 PE=4 SV=1
MKKDIYQQCNRCVMDTSDSEITFDENGFCNHCTNFLEHTAKQMYQGTSSDQQLNEIIEKIKSVGKNLKYDCVVGISGGIDSCYVAYKAKALGLKPLAVHLDNGWNSELAVSNIEKILHKLDIDLHTHVLDWEEFKDLQLSFLRASVPEIETPTDIAILAILHKVAAKHNIKYILSGGNFATEGILPKSWHYDAKDEKYLYAIQKQFGNKPLKTFPTFGFLKEMYYKFFKGIKIIYFLNYLPYSKKEAVALLENELNWKYYGGKHYESRYTRFVQSYILPEKFNIDYRKSTSSSLICSGEITREEALEELKGKSYDINLVNEDKEYLCKKLELSITEFDAIMDTPPKTHNDYPNNKKLLEFIYNAYRKFF

SEQ ID NO: 38299 - protein, 196 aa, unidentified
  source 1..196: note = Flavobacteriia bacterium
  REGION 1..196: note = tr|A0A1Q3ZHK2|A0A1Q3ZHK2_9BACT 7-cyano-7-deazaguanine synthase OS=Flavobacteriia bacterium 40-80 OX=1895763 GN=BGO87_07515 PE=3 SV=1
MKKAVLLSGGIDSICLTYGIKPQIAYTIDYGQTVAEREIYVSEFICKELGIQHKCIKVDCRNLGTGTLANSKEHKLSPSVEWWPYRNQLLITLACMQGIKDEVQEIYLASVKSDCFHKDGTQEFYNFINTLVEYQEGKIKIFCPTLEFYSHELASIYDVPIELLTIAHSCHISNIACGRCSGCTKQLKVRHELKME

SEQ ID NO: 38300 - protein, 383 aa, Flavobacterium branchiophilum
  REGION 1..383: note = tr|A0A2H3KKH8|A0A2H3KKH8_9FLAO N-acetyl sugar amidotransferase OS=Flavobacterium branchiophilum OX=55197; GN = B0A77_11585 PE=4 SV=1
MQNFKYQADKICSRCIMDDTVEGITFNEKGECTFCEIHDELEMQFALNDHSKKELEKIVAKIKQDGKGKPYDCIVGVSGGRDSTYTLYETVKLGLRPLAVHFDNGWNTEHAVNNIKNVCKKLNVDLYTHVAVWEEFKDLQRAFLEASVPDAEVPTDWVIFSVLFKEAAKENLKYIIHGHSFRTEGTTPISWTYMDGRYVNDIHKKFGKLKIKSFPIMNMSDYLYYSFIRKIKQVRLLYYLPYDEQEVLKSLTSEVDWHNYGGKHHESKYTGFFQSYILTRKFNIDKRKLHYSALLRNGQITRNEALLIVKKDPFTEGIETINYCQKKLGYSAEEFDSIMKSPVKSYKDYNSYFNIIKKLKKPIFWATKLGIVPDTVYRKFFKF

SEQ ID NO: 38301 - protein, 383 aa, Flavobacterium branchiophilum; identical to SEQ ID NO: 38300
  REGION 1..383: note = tr|G2Z7L8|G2Z7L8_FLABF Probable LPS biosynthesis protein WbpG OS=Flavobacterium branchiophilum (strain FL-15) OX=1034807 GN=wbpG PE=4 SV=1

SEQ ID NO: 38302 - protein, 199 aa, Flavobacterium sp.
  REGION 1..199: note = tr|A0A0Q4SUF7|A0A0Q4SUF7_9FLAO 7-cyano-7-deazaguanine synthase OS=Flavobacterium sp. Leaf82 OX=1736238 GN=ASF10_19090 PE=3 SV=1
MESVKKAILLSGGIDSICLTYDLKPDIAYTIDYGQTVAEREIYVSDFVCQKLKIQHKVIRVDCKSLGSGTLANSENLSISPSEEWWPFRNQLLITLASMQAIKDGISEIYLASVKSDNFHKDGTKDFYKLSDELVSYQEGKIRILCPTLEYFSHELVSKFNVPLELLSIAHSCHISNIACGKCSGCRKQLKVRHEINLE

SEQ ID NO: 38303 - protein, 196 aa, Flavobacterium sp.
  REGION 1..196: note = tr|A0A4V6N0D0|A0A4V6N0D0_9FLAO 7-cyano-7-deazaguanine synthase OS=Flavobacterium sp. RD-2-33 OX=2529433 GN=EZL74_07010 PE=3 SV=1
MKKGVLLSGGIDSICLTYGIRPEIAYTIDYGQTVAEREIYVSKYICKELNIQHKIIKVDCKNLGSGTLANSENLSFSPSEEWWPYRNQLIITLALMQGIKDNIKELHLATVKSDEFHKDGTKQFYEYINKLVSFQEGEISVKCETTDYFSHELANKYSVPLELLSIAHSCHVSNIACGNCSGCIKQMRVRFELNID

SEQ ID NO: 38304 - protein, 196 aa, unidentified
  source 1..196: note = Flavobacterium spartansii
  REGION 1..196: note = tr|A0A1S1J8Y8|A0A1S1J8Y8_9FLAO 7-cyano-7-deazaguanine synthase OS=Flavobacterium spartansii OX=1278819 GN=BHE19_07410 PE=3 SV=1
MKKALLLSGGIDSICLAYDLKPDIAYTIDYGQTVAEREIYVSDFVCQKLGIQHKVIRVDCRNLGTGTLANSENLSISPSEEWWPFRNQLLITLASMQGIKDGISELYLASVKSDNFHKDGTEDFYKLSDKLVSFQEGKIRVLCPTLDFFSHELVNKFNVPLELLSIAHSCHISNIACGKCSGCIKQLKVRYEINLE

SEQ ID NO: 38305 - protein, 223 aa, unidentified
  source 1..223: note = [Flavobacterium] thermophilum
  REGION 1..223: note = tr|A0A377FYG1|A0A377FYG1_9BACL 7-cyano-7-deazaguanine synthase OS=[Flavobacterium] thermophilum OX=1414643 GN=queC PE=3 SV=1
MKMKEEKAVVVFSGGQDSTTCLFWAKKQFGEVEAVTFDYGQRHRREIDVAQAIAAELGVRHTVLDLSLLGQLAPNALTRRDIAIEQKKGELPTTFVDGRNLLFLSFAAVFAKQRGARHIVTGVCETDFSGYPDCRDVFIKSLNVTLNLAMDYEFVIHTPLMWLTKAETWKLADELGAFEFIRTKTLTCYNGIIADGCGECPACVLRKRGLDDYLREKAGVERP

SEQ ID NO: 38306 - protein, 243 aa, unidentified
  source 1..243: note = Flavobacterium tibetense
  REGION 1..243: note = tr|A0A365P0P7|A0A365P0P7_9FLAO Uncharacterized protein OS=Flavobacterium tibetense OX=2233533; GN = DPN68_09035 PE=4 SV=1
MEIDKKNVNLLLWTSGWDSTFRLLQIILMEKKSVQPIYIVDKNRKSLKNELEAIQKIQDKIKDEFPEAIDLIQPIWFVEKENLTENDEIGFAFQQLSSMRKIGSQYEWLAQFSHHYDLKNVEISVEKNLDLNSFGNFIKQNYLEVNPSECSDKKLYYTIDTVFKYFHFPVIYLLKTKMLSIAKENNWLNIMNLTWFCHKPKNNLPCGKCNPCMATIEKGLSYRVPLTNRILGYIKIYKNKLKG

SEQ ID NO: 38307 - protein, 348 aa, Flavonifractor sp.
  REGION 1..348: note = tr|A0A1Y4WMW0|A0A1Y4WMW0_9FIRM 7-cyano-7-deazaguanine synthase OS=Flavonifractor sp. An10; OX = 1965537 GN=B5E42_03905 PE=3 SV=1
MKNITTKLRSSGLLLKAPIYNAENIHAKNRKNAIVMFSGGMDSTVSLWWALDNYENVEILIVDYNQPHSIEIDKAIKIAKMVGAKYQKIKVDFPTSFWGIENHLTRGQACLMTSLAALNISHDGADIVMGILSTDNYGDCDRDFLDHIASVLFHPNDWSDIGIATPLRAVKNKSDVIALGYQYGAPLSLSWTCRDPINDKPCHNCMQCRQRDEALVSFYREYGISKDQYDKWSLVCASPYHPYFRDVSYDIHIVVEAFLQAGGFKHGKRCYVYTSPDGKQRVSTHISSIESLEEAGTGSFMDLIHIHGYLHNNYRWELCVSPNGAIAATDVLPNVSVIEEELIKKAEF

SEQ ID NO: 38308 - protein, 247 aa, Flavonifractor sp.
  REGION 1..247: note = tr|A0A1Y4BYR5|A0A1Y4BYR5_9FIRM TIGR00268 family protein OS=Flavonifractor sp. An306 OX=1965629; GN = B5F88_13205 PE=4 SV=1
MTLEEFFTQHPRTAVAFSGGTDSALVLWAAGRYGREVRAYYVHTVFQPAFELADAKRLAEELEVPLTVVEADVLAVPEAAANGPRRCYYCKKALFTTLWQRARADGYTVLLDGTNASDDAGDRPGMQALRELEVRSPLRECGITKAEVRRMSKEAGLFTWDKPAYACLATRVPTGTAITREALEKVERGENALFRLGFSDFRVRLMGDAARIQVPADQMERALALRGEINQALEADFSAVLLDLAGR

SEQ ID NO: 38309 - protein, 228 aa, Flexistipes sinusarabici
  REGION 1..228: note = tr|F8E633|F8E633_FLESM 7-cyano-7-deazaguanine synthase OS=Flexistipes sinusarabici (strain DSM 4947 / MAS 10) OX=717231 GN=queC PE=3 SV=1
MKKAVVLMSGGLDSCVTAGIASLDYELYFLHVNYGQKTEKRELKSFNDLYKHFNGRDKLIVDIGYLKKIGGSSLVDDKENIEAGNVERKDIPRTYVPFRNGNILSIGVSWAEVIGAQKIFIGAVAEDSSGYPDCRKEFYDAFNEVLKVGLKPETELSIETPIIDMTKSEIVKIGSELNVPFHLTWSCYKNETKACGVCDSCLLRLRGFEKAGIKDPIPYDKVNSSVED

SEQ ID NO: 38310 - protein, 228 aa, Flexistipes sinusarabici
  REGION 1..228: note = tr|A0A3D5QDT5|A0A3D5QDT5_FLESI 7-cyano-7-deazaguanine synthase OS=Flexistipes sinusarabici OX=2352 GN=queC PE=3 SV=1
MKKAVVLMSGGLDSCVTAGIASLDYELYFLHVNYGQKTEKRELKSFNDLYKHFNGRDKLTVDIGYLKKIGGSSLVDDKENIEAGNVERKDIPRTYVPFRNGNILSIGVSWAEVIGAQKIFIGAVAEDSSGYPDCRKEFYDAFNEVLKVGLKPETELSIETPIIDMTKSEIVKIGSELNVPFHLTWSCYKNETKACGVCDSCLLRLRGFEKAGIKDPIPYDKVNSSVED

SEQ ID NO: 38311 - protein, 227 aa, Fluoribacter bozemanae
  REGION 1..227: note = tr|A0A0W0RYP2|A0A0W0RYP2_FLUBO 7-cyano-7-deazaguanine synthase OS=Fluoribacter bozemanae; OX = 447 GN=queC PE=3 SV=1
MKKAVVLLSGGLDSTTCLALARSKGFSCYTISFSYGQRHSAELLAAQRIAQYYNVATHHIVTLDTALFRNSALTDSNIEVPSFQGGSDIPVTYVPARNTIFLAMALGFAESIGAREIFIGASSVDYSHYPDCRPEFIQSFQNLANLATKAGISGDQFTIHAPLQHLSKIETIQLGVSLGVDYSLTVSCYQANDAGEACGQCDSCTFRKRGFLGAGIDDPTLYRRSDH

SEQ ID NO: 38312 - protein, 228 aa, Fluoribacter dumoffii
  REGION 1..228: note = tr|A0A377G5L1|A0A377G5L1_9GAMM 7-cyano-7-deazaguanine synthase OS=Fluoribacter dumoffii; OX = 463 GN=queC PE=3 SV=1
MKKAVVLLSGGLDSTTCLAFAAAKGFSCYALSFSYGQRHSFELNAAQRIAKHYNVVKHHIATLDTELFQNSALTDSTIEVPAFEGSTEIPVTYVPARNTIFLAMALGLAESIGARDIFIGASSIDYSHYPDCRPEFIEAFQKLANLATKAGVMGNRFSIHAPLQHLSKAQTIQLGVSLGVDYSLTVSCYQANEAGAACGECDSCTFRRRGFKEAGVADPTLYYPSTRK

SEQ ID NO: 38313 - protein, 229 aa, Fluoribacter gormanii
  REGION 1..229: note = tr|A0A377GEW1|A0A377GEW1_9GAMM 7-cyano-7-deazaguanine synthase OS=Fluoribacter gormanii; OX = 464 GN=queC PE=3 SV=1
MKKKAVVLLSGGLDSTTCLALAASKGFSCYAMSFSYGQRHSAELLAAERIAQHYNVVKHQIVSLDTELFRNSALTDSTLEVPAFQGGADIPVTYVPARNTIFLAMALGFAESIGAREIFIGASSVDYSHYPDCRPEFIDAFQTLANLATKAGVTGDRFTIHAPLQHLSKVQTIQLGVSLGVDYSLTVSCYQANDTGEACGQCDSCTFRRRGFIGAGVDDPTLYRSSESK

SEQ ID NO: 38314 - protein, 616 aa, unidentified
  source 1..616: note = Fluviibacterium aquatile
  REGION 1..616: note = tr|A0A4R6B4K5|A0A4R6B4K5_9RHOB Uncharacterized protein OS=Fluviibacterium aquatile OX=2552766; GN = E2L05_00205 PE=4 SV=1
MGGGAIPFEHRVRCLPPLTKSGGDAQLCLEIDGQPVGVKVCISHLNAQLVAELPDRTLDLLEVAAVVYGADAGVSRGGTADQHMGARWNRHFEVEMPVRDHDFWNCTEVVSALEEMLMFLSGDRFAFRFVAKEDGEAERSLFFKFDEGSAWRATRVMMFSGGLDSFAGALEEVAEQGERVALVSHFSASKIAPVQRQLHKALASRFGENSCRHIPVQVQMVGRGLKEGTHRARSFLFAALGAVTAKAFGLNRVSFYENGVVSLNLSPVGNVLGTRATRTTHPQTLSRFSDFLSRVFTSETRIDNPFFWRTKREVVEAVARLGMSELIAQTRSCADVHNQTKQHIHCGRCSQCIDRRFAVLAAGLTRFDPEEAYRVALMDDARNDLRDREIALSYLRSAHAYEHVTPSELERALPAVVSAVAHLEQPTETALEMIARLLKRHGTGVSDVMRATLKAKDAVDFPDGSLPRLYGEAQRPELLPHMPVPSRPIAKPSNLMVMEVNTKRRRVVIDERIFVERNATADLLIALADKWLEGAGQGMTPLDYPLASSAFLANALKLEGDEAVRQRVNRAKTVLKKKMASSGREQQEAEAIIENVPWHGYRLTPDRVAVRKVKSE

SEQ ID NO: 38315 - protein, 206 aa, unidentified
  source 1..206: note = Fluviicoccus keumensis
  REGION 1..206: note = tr|A0A4Q7ZDF6|A0A4Q7ZDF6_9GAMM 7-cyano-7-deazaguanine synthase OS=Fluviicoccus keumensis; OX = 1435465 GN=EV700_0887 PE=3 SV=1
MKKALLLASGGLDSTTVGYKLMAAGVEVVPIFFDYGQHCADIEWGRVNEVLPSNMQRPERFNISDIFRGSQSRLIREADLWTEEVKDDDLYIPYRTMLFFAVAAARAQTVGILDVYTGFINSNHAKEIDCTAAFMNSLDGLTENIGPVRFHSPFRNSSKADVARSAAELGVPIGRTYSCQASAKFPCGACPNCVERLNALKEANLV

SEQ ID NO: 38316 - protein, 229 aa, unidentified
  source 1..229: note = Fluviicoccus keumensis
  REGION 1..229: note = tr|A0A4Q7ZBB5|A0A4Q7ZBB5_9GAMM 7-cyano-7-deazaguanine synthase OS=Fluviicoccus keumensis; OX = 1435465 GN=queC PE=3 SV=1
MSRHTRPRAVVLLSGGLDSATCLAMASEKYDCYALSFAYGQRHSSELLAAARLAAAMKAVEHRVIRLDLGMIGGSALTDSSIAVPEEESVGIPVTYVPARNTVFLAFALGYAEVTDADAIVIGVNAVDYSGYPDCRPEFIEAFAKMAALATKGGVEGHPVRIEAPLLHLTKGEIIHAGLALGVDYGLTVSCYQADEDGRACGKCDSCRLRAAGFRAAGVPDPTRYATSP

SEQ ID NO: 38317 - protein, 374 aa, Fluviicola sp.
  REGION 1..374: note = tr|A0A1G0CIJ4|A0A1G0CIJ4_9FLAO Uncharacterized protein OS=Fluviicola sp. RIFCSPHIGHO2_12_FULL_43_24; OX = 1798019 GN=A3E30_06485 PE=4 SV=1
MQDNENRPYQQCTRCIMDTTDPEISFDEKGQCNHCTEYFRLAPLYIYNGEETDRAREALIAKIKEAGKNSDYDCMVGVSGGVDSTYVAYMAKKFGLRILAFHFDNGWNSELAVKNVENIVKKLDIDYQTWVVDWEEFRDLQISFLKASVANAEIPSDHAFLAATYHLCSKYNIKYFLSGSNFATEGILPKSWGYNAKDVKHLKGIHKLFGKTKFKTYPLLGFNREFYYTYVKKIKMVRLLNYIPYVKEDAMKVIQDELGWVYYGGKHYESVFTRFFQAYYLPHKFGYDKRLAHLSTLICSGQMTREQALEEMKKDTYPPELLAEDKEYVIKKLGMNAEEFEAILNAPPKSYKEYPNDEKRLKFIYKVYNKLRGR

SEQ ID NO: 38318 - protein, 223 aa, Fontibacillus panacisegetis
  REGION 1..223: note = tr|A0A1G7Q0J8|A0A1G7Q0J8_9BACL 7-cyano-7-deazaguanine synthase OS=Fontibacillus panacisegetis OX=670482 GN=queC PE=3 SV=1
MLKNETAVVVFSGGQDSTTCLFWAMKQFKEVEAVTFDYGQRHRLEIECAKSIANDLGIKLTVLDMSLLGQLTQNALTRSDIPIVHEEGSLPSTFVEGRNHLFLSFAAVLAKGVGARHLVTGVCETDFSGYPDCRDAFVKSLNVTLNLAMDYDFVIHTPLMWIDKAETWKLADDLGAFDFVRERTLTCYNGIIGDGCGECPACNLRRAGMETFLQKYRNKEVQS

SEQ ID NO: 38319 - protein, 227 aa, Fontibacillus panacisegetis
  REGION 1..227: note = tr|A0A1G7GVH6|A0A1G7GVH6_9BACL 7-cyano-7-deazaguanine synthase OS=Fontibacillus panacisegetis OX=670482 GN=queC PE=3 SV=1
MGKIMEQKNRKAVVVFSGGQDSTTCLFWAMKHFDEVEAITFNYGQRHALEIECAKKIADELGVKWTLLDMSLLGQLTQNALTRNDLQIVHNDGELPSTFVEGRNHLFLSFAAVFAKGVDARHIVTGVCETDFSGYPDCRDDFIKSLNVTLNLAMDHNFIIHTPLMWIDKAETWEMADQLGAFEFVRQKTLTCYNGIIGDGCGTCPACQLRKAGLDRFLQGRNPEQML

SEQ ID NO: 38320 - protein, 231 aa, unidentified
  source 1..231: note = Fontibacillus phaseoli
  REGION 1..231: note = tr|A0A369BFM4|A0A369BFM4_9BACL 7-cyano-7-deazaguanine synthase OS=Fontibacillus phaseoli; OX = 1416533 GN=queC PE=3 SV=1
MLKNEKAVVVFSGGQDSTTCLFWALKLFREVEAVTFDYGQRHSLEIECAKGIAAELGVQLTVLDMSLLGQLTQNALTRTDIPIVHVEGELPSTFVDGRNHLFLSFAAVLAKGVGARHLVTGVCETDFSGYPDCRDAFVKSLNVTLNLAMDYEFVIHTPLMWIDKAQTWQMADELGAFDFVRERTLTCYNGIIGDGCGECPACKLRRAGMESYLHMRGEAGDSQASGMEGQE

SEQ ID NO: 38321 - protein, 112 aa, unidentified
  source 1..112: note = Fonticella tunisiensis
  REGION 1..112: note = tr|A0A4R7KV14|A0A4R7KV14_9CLOT 7-cyano-7-deazaguanine synthase OS=Fonticella tunisiensis; OX = 1096341 GN=EDD71_10118 PE=3 SV=1
MKKAVVLLSGGLDSSAALYLAKSEGYEVYAISFDYGQRHNKELLCAAKLAEKTGVKQHIIVKTNMDAWGGSALTDKNIDVPEGDENRKDIPITYVPARNMISFRMQHLMPRQ

SEQ ID NO: 38322 - protein, 88 aa, unidentified
  source 1..88: note = Fonticella tunisiensis
  REGION 1..88: note = tr|A0A4R7KU57|A0A4R7KU57_9CLOT 7-cyano-7-deazaguanine synthase OS=Fonticella tunisiensis; OX = 1096341 GN=EDD71_10117 PE=3 SV=1
MENAINMGTVFAVEHGKKIKIHAPFIHMKKSEEIKLGMKLGVDYSLTWSCYRGEELACGVCDSCLLRLRAFHEAGYEDPIKYEVNNNG

SEQ ID NO: 38323 - protein, 232 aa, unidentified
  source 1..232: note = Fontimonas thermophila
  REGION 1..232: note = tr|A0A1I2HRQ0|A0A1I2HRQ0_9GAMM 7-cyano-7-deazaguanine synthase OS=Fontimonas thermophila; OX = 1076937 GN=queC PE=3 SV=1
MTMSTTSGDKAVVLLSGGLDSATVLAIARAQGFEVFALSVAYGQRHDAELAAAARMAAAFGVRRHQRVSVNLDAFGGSALTDHAIAVPEAPSAGIPVTYVPARNTLFLSLALGWAEVIGARDIFIGVNAVDYSGYPDCRPAFIEAFERLAMVATKAGVEGARLRIHAPLLYMSKAEIIREGVRLGVDYSLTVSCYQADADGRACGRCDACRLRREGFKAAGLADPTRYVMTR

SEQ ID NO: 38324 - protein, 224 aa, Formivibrio citricus
  REGION 1..224: note = tr|A0A1I4ZIF4|A0A1I4ZIF4_9NEIS 7-cyano-7-deazaguanine synthase OS=Formivibrio citricus; OX = 83765 GN=queC PE=3 SV=1
MKKAVILLSGGLDSATCLAIAKSKGFELYCMSFDYGQRHNAELEAAARLAKSMGAVEHRIVNIDLAAFGGSALTDKRIAVPTGGVKDDAIPVTYVPARNTILLSYALAWAEVLGASDIFIGVNSVDYSGYPDCRPEFISSFQVMARLATRAGVEGAPMHIHTPLIFLTKAQIIERGVALGVDYGMTVSCYQADDQGRACGVCDSCRLRKSGFEAAGVPDPTHYR

SEQ ID NO: 38325 - protein, 223 aa, Formosa sp.
  REGION 1..223: note = tr|A0A5D0G4U2|A0A5D0G4U2_9FLAO Uncharacterized protein OS=Formosa sp. 1494 OX=2592046 GN=FVF61_09710 PE=4; SV = 1
MKKINYVLWTGGWDSTFRVIQLYRLGANIQPIYIHDQCRKSSKKELELIHNLSIEIPSRFKQSKGKILPIIIINRKEIPYNLFLKLIIKVLKIKINLGKQYYWLATVAKKYKNLELSAHKEDRDRLFYEDQLIEIKDEQIGLNWRINPKKLDFFRRHLFKNMTFPLITISKPEMKNIAEENNFIDLMEKTWFCHKSNIKPCGKCVPCKQYIRDGFGYRLENYE

SEQ ID NO: 38326 - protein, 258 aa, unidentified
  source 1..258: note = Francisella adeliensis
  REGION 1..258: note = tr|A0A2Z4XW34|A0A2Z4XW34_9GAMM 7-cyano-7-deazaguanine synthase OS=Francisella adeliensis; OX = 2007306 GN=CDH04_00830 PE=3 SV=1
MNAVLSLSGGLDSSTVLLDLIDKGYNITCFTFNYGQKHYQEIQKACNLIEFLNSKGHEISHKVLDMSFMQDILYSSLITGNSEVPEGRYDEANMRDTVVPNRNKVFASIIQAAALSIYEKTRVKTVIALGIHAGDHAVYRDCTPEFRQKDYDAFIEGNYDAENVSYYTPFINTPKDELLAKGLDILNKMGVDYKDYYYHTLTSYKPMEIDSVVYSDYKSASSIERIESFVKNNAVDPIKYADGQKEVSWDFVKKEVCK

SEQ ID NO: 38327 - protein, 226 aa, Francisella sp.
  REGION 1..226: note = tr|A0A2W6RW21|A0A2W6RW21_9GAMM 7-cyano-7-deazaguanine synthase OS=Francisella sp.; OX = 2047875 GN=queC PE=3 SV=1
MSSKTLDQQSAVVIFSGGQDSTTCLVQAIAQYGLEQVHAVSFRYGQRHEIELRCSLNICQKLGIKYHRMIILEELSGLTENALMNQEIKISQSQEADYPNTFVPGRNALFILYTAIYAYQMNITNIIIGVSQADYSGYPDCREGFIRSINTSINLAMDQAFTIQTPLMYLDKAAVWELSDRLGYMEFVRKYSHSCYEGKEGGCKRCPSCLLREQGLKKYLAKKLNK

SEQ ID NO: 38328 - protein, 231 aa, unidentified
  source 1..231: note = Franconibacter pulveris
  REGION 1..231: note = tr|A0A0J8VRZ4|A0A0J8VRZ4_9ENTR 7-cyano-7-deazaguanine synthase OS=Franconibacter pulveris; OX = 435910 GN=queC PE=3 SV=1
MKRAVVVFSGGQDSTTCLIQALQQYDEVHCVTFDYGQRHRAEIDIARELASRLGARAHKVLDVTLLNELAVSSLTRDSIPVPDYDPQASGIPSTFVPGRNILFLTLAAIYAYQVQAEAVITGVCETDFSGYPDCRDEFVKALNHAVSLGMARDVRFETPLMWLDKAETWALADYWGKLELVRHDTLTCYNGIKGEGCGECAACNLRANGLNRYLGDKAGIMAALKQKTGLR

SEQ ID NO: 38329 - protein, 236 aa, unidentified
  source 1..236: note = Frankia casuarinae
  REGION 1..236: note = sp|Q2J7K8|QUEC_FRACC 7-cyano-7-deazaguanine synthase; OS = Frankia casuarinae (strain DSM 45818 / CECT 9043 / CcI3) OX=106370 GN=queC PE=3 SV=1
MNPTRGAVGGTDPRPAAVVLLSGGLDSATVLAIANQQGFACHALSFRYGQRHEVELAAARRVASALGVVRHVVVDIDLGVFGGSALTDPTIAVPAAGTAEEIPVTYVPARNTIFLSFGLALAETAGAWDVFIGASSVDYSGYPDCRPEYLAAYQAMANLATKATVSGERTLSVHAPLMHLSKADTIRLGLSLGVDYGLTHSCYDPGPDGRPCGRCDSCSLRERGFTEVGVPDPAGG

SEQ ID NO: 38330 - protein, 194 aa, unidentified
  source 1..194: note = Frankia casuarinae
  REGION 1..194: note = tr|A0A1X1PXZ3|A0A1X1PXZ3_FRACC 7-cyano-7-deazaguanine synthase (Fragment) OS=Frankia casuarinae (strain DSM 45818 / CECT 9043 / CcI3) OX=106370; GN = UK99_08875 PE=3 SV =1
MNPTRGAVGGTDPRPAAVVLLSGGLDSATVLAIANQQGFACHALSFRYGQRHEVELAAARRVASALGVVRHVVVDIDLGVFGGSALTDPTIAVPAAGTAEEIPVTYVPARNTIFLSFGLALAETAGAWDVFIGASSVDYSGYPDCRPEYLAAYQAMANLATKATVSGERTLSVHAPLMHLSKADTIRLGLSLGV

SEQ ID NO: 38331 - protein, 233 aa, Frankia sp.
  REGION 1..233: note = tr|A0A0N8HCH1|A0A0N8HCH1_9ACTN 7-cyano-7-deazaguanine synthase OS=Frankia sp. R43; OX = 269536 GN=queC PE=3 SV=1
MPRDLVLLSGGLDSSTLLAERAKENTARLALSVDYGQRHARELRAAAEVAAHYAVPHLVLDLTAWGSLLVGSALTDPAVGVPNGHYAAESMRATVVPNRNATLLMAAAGVALAHGCDRVLTAVHTGDHPIYPDCRPEFIAAASEATQRGTDSAVTVEAPYVHTSKADIARIAGLVGLPVALTWSCYEGGERHCGRCGTCVERAEALHLAGVLDPTEYADPNFWRSAVGAAEGR

SEQ ID NO: 38332 - protein, 238 aa, Frankia sp.
  REGION 1..238: note = tr|A0A062WR29|A0A062WR29_9ACTN 7-cyano-7-deazaguanine synthase OS=Frankia sp. BMG5.23; OX = 683305 GN=queC PE=3 SV=1
MTVNPTRGAVGGTDPRPAAVVLLSGGLDSATVLAIANQQGFACHALSFRYGQRHEVELAAARRVASALGVVRHVVVDIDLGVFGGSALTDPTIAVPAAGTAEEIPVTYVPARNTIFLSFGLALAETAGAWDVFIGASSVDYSGYPDCRPEYLAAYQAMANLATKATVSGERTLSIHAPLMRLSKADTIRLGLSLGVDYGLTHSCYDPGPDGRPCGRCDSCSLRERGFTEVGVPDPAGG

SEQ ID NO: 38333 - protein, 227 aa, Frateuria aurantia
  REGION 1..227: note = tr|H8L143|H8L143_FRAAD 7-cyano-7-deazaguanine synthase OS=Frateuria aurantia (strain ATCC 33424 / DSM 6220 / NBRC 3245 / NCIMB 13370) OX=767434 GN=queC PE=3 SV=1
MNDIRADKKAVILVSGGMDSAVTIALAREQGYRVYALSVAYGQRHSSELEASARVARDLGAEVHKTVHVDLRSIGGSALTDDIGVPEQADDGIPVTYVPARNTIMLSIALGWAEVLGAREIWCGVNAVDYSGYPDCRPAFVESFQQLANVATKAGVEGLGLSVKAPLMAMSKADIAREGQRLGVDFATTVSCYQADEEGRACGRCDACRLRAQGFHDAGLPDPTRYR

SEQ ID NO: 38334 - protein, 229 aa, Frateuria sp.
  REGION 1..229: note = tr|A0A0Q9PDB6|A0A0Q9PDB6_9GAMM 7-cyano-7-deazaguanine synthase OS=Frateuria sp. Soil773; OX = 1736407 GN=queC PE=3 SV=1
MSDTSPRKAVVLVSGGMDSAVTIAIAREQGYQVHALSVAYGQRHNSELEAAARVADMLGAAEHKTVHVDLRSIGGSALTADIDVPLDAGQDEGAIPVTYVPARNTIMLSIALGWAEVLGSADIWCGVNAVDYSGYPDCRPAFVEAFGQLANVATKAGVEGAGIRIHAPLMQMSKADIAREGQRLGIDFAATVSCYQADAQGRACGHCDACRLRAQGFREAGLADPTRYA

SEQ ID NO: 38335 - protein, 201 aa, Frateuria sp.
  REGION 1..201: note = tr|A0A0Q9QCE0|A0A0Q9QCE0_9GAMM 7-cyano-7-deazaguanine synthase OS=Frateuria sp. Soil773; OX = 1736407 GN=ASG87_12985 PE=3 SV=1
MKTALLLSGGMDSIALAWWKRPELAFTVDYGQLAATAEISASAAICSALDIPHTVLRFDAKALGSGDMAGTAADPNAPASDWWPYRNQLLVTLVAMKAVATGVQRLWLGTVASDGIHKDGTPEFFENINRLLSHQEGGIVVEAPAIGLRTVDLIRQSDIPRSMLAWAHSCHKADVPCCNCRGCNKHFETLQELDTDVATGD

SEQ ID NO: 38336 - protein, 226 aa, Frateuria terrea
  REGION 1..226: note = tr|A0A1H6YQ06|A0A1H6YQ06_9GAMM 7-cyano-7-deazaguanine synthase OS=Frateuria terrea; OX = 529704 GN=queC PE=3 SV=1
MSQTPSRKAVVLVSGGMDSAVTLAIAREQGFAIHALSVAYGQRHGSELEAAARVARTLGALEHKTVQVDLRSIGGSALTADIDVPEQGGAGIPVTYVPARNTIMLSIALGWAEVLGASDIFCGVNAVDYSGYPDCRPAFIDAFEQLANVATKAGVEGAGLRIHAPLMRMSKADIAREGQRLGVDFAQTVSCYQADAQGRACGHCDACHLRAEGFRAAGLPDPTHYA

SEQ ID NO: 38337 - protein, 219 aa, unidentified
  source 1..219: note = Frederiksenia canicola
  REGION 1..219: note = tr|A0A3N4WG50|A0A3N4WG50_9PAST 7-cyano-7-deazaguanine synthase OS=Frederiksenia canicola; OX = 123824 GN=queC PE=3 SV=1
MTNQAKAAVIFSGGQDSTTCLFLAIQEFGRENVEVVTFQYGQRHAIELDKAKWIADDLGVKQTLIDTSVIKAITTNALMDAQAEIEQNGSTPNTFVDGRNALFLLYTAIYSKSQGIQTIFTGVCETDFSGYPDCRDVFVKSMNVTLNLAMDYNFNIRTPLMYLTKKETWKLADDLGAFDYIRQHTHTCYLGVEGGCHRCPSCVLREKGLNEYLAERENV

SEQ ID NO: 38338 - protein, 249 aa, unidentified
  source 1..249: note = Fremyella diplosiphon
  REGION 1..249: note = tr|A0A1Z4MKM2|A0A1Z4MKM2_MICDP 7-cyano-7-deazaguanine synthase OS=Fremyella diplosiphon NIES-3275 OX=1973485 GN=queC PE=3 SV=1
MRSPTGVQRLKQSDLAIENLKIKSTMKAVILLSGGLDSSTILYQAKADGYECHALSFDYQQRHQRELESARLVAQKAGVAKHQVVNFDLRQWGGSALTDSSIDLPEERSLDEMSQSIPVTYVPARNTIFLSFALAYAEAIAAERVYIGVNALDYSGYPDCRPDYIQAMQEVFRLGTKQGREGEPITIAAPLINLKKTEIIQLGNQLGVPWELTWSCYAGADIACGVCDSCRLRLAAFAELGLKDPVAYV

SEQ ID NO: 38339 - protein, 221 aa, unidentified
  source 1..221: note = Frischella perrara
  REGION 1..221: note = tr|A0A0A7RZ70|A0A0A7RZ70_FRIPE 7-cyano-7-deazaguanine synthase OS=Frischella perrara; OX = 1267021 GN=queC PE=3 SV=1
MQKINKALVIFSGGQDSTTCLIQAINRYGVENVETISFNYGQRHAIELEKAKFIAEDLGVLHTIVDTSVIKQTTHNALIDSTMAVEFAKDSQSYPNTFVDGRNALFLLLAGCYAKSRGIKDIITGVCETDFSGYPDCRDVFIKSMNVTMNLAMDYAFNIITPLMYLTKAETWALADELGCLDYIRQYTHTCYNGVEKGCGECPSCVLREKGLNEYLTNKKC

SEQ ID NO: 38340 - protein, 230 aa, unidentified
  source 1..230: note = Fuerstia marisgermanicae
  REGION 1..230: note = tr|A0A1P8WNK5|A0A1P8WNK5_9PLAN 7-cyano-7-deazaguanine synthase OS=Fuerstia marisgermanicae OX=1891926 GN=queC PE=3 SV=1
MSSRKKAVVLISGGLDSATIMAFARSEGYELHGISFDYGQRHHFELQAAEKVCAANNVASHVVFPVDTAIFRGSALTNDIDVPHNRSDDEMSGSIPVTYVPARNTIFLSIALGLAESLGAHDLFIGVNAVDYSGYPDCRPEFVAAFEAMANLATKAGVEGQKIKVHAPLITMTKAQIIQRGVELGVDYSLTHSCYDPSPDGISCGECDSCLLRLKGFADAGAIDPIAYQN

SEQ ID NO: 38341 - protein, 232 aa, unidentified
  source 1..232: note = Fulvimarina manganoxydans
  REGION 1..232: note = tr|A0A1W2AD39|A0A1W2AD39_9RHIZ 7-cyano-7-deazaguanine synthase OS=Fulvimarina manganoxydans OX=937218 GN=queC PE=3 SV=1
MNTALVCSGGLDSVSLAHILASKGTLARIVSFDYGQRHRKELEFARAAAERLDVPFHLVDLSGLGAALTGSALTDEIDVPDGHYAEETMRVTVVPNRNAIMLTIGFAIAAAQGDEAVAAAVHGGDHFIYPDCRPAFTDAFAAMQRAALDGYANVALHVPFVHRTKADIVLEGARLGTPFAETWSCYKGGDRHCGRCGTCVERREAFHLAGVDDPTAYEDPDYWRSALKAHGS

SEQ ID NO: 38342 - protein, 239 aa, Fulvimarina sp.
  REGION 1..239: note = tr|A0A2E1HA83|A0A2E1HA83_9RHIZ 7-cyano-7-deazaguanine synthase OS=Fulvimarina sp.; OX = 1969479 GN=queC PE=3 SV=1
MTADDSALVLFSGGQDSTTCLAVALERFARVETIGFDYGQRHRVELDVRPRILAALRASFPHWAERLGPDHMIDMGVLGQISDTALTGDAAIAMQDDGLPNTFVPGRNLLFLGFAGALAYRRGLKHILTGVCETDYSGYPDCRDDTIKAMQLALNLGMEARFVVDTPLMFIDKAATFALAETLGGEALVDLVVEETHSCYEGDRTHRHPFGYGCGTCPACELRAKGFERYRAAKAAGAG

SEQ ID NO: 38343 - protein, 246 aa, Fulvimarina sp.
  REGION 1..246: note = tr|A0A371WYI5|A0A371WYI5_9RHIZ 7-cyano-7-deazaguanine synthase OS=Fulvimarina sp. 85; OX = 2293836 GN=queC PE=3 SV=1
MTSSEGALVLFSGGQDSTTSLAWALDRFSRVETIGFNYGQRHAIELAVRPLVRDRLSAAFPHWAERLGEDHLLDMGLLGQISETALTGEMEIAMQENGLPNTFVPGRNLVFLAFAATIAYRRGLKHIVTGVCETDYSGYPDCRDDTMKAMQLALNLGMEARYVIETPLMFIDKAETWEMAERLGGEALVDLVREETHTCYHGDRDHRHAWGYGCGACPACDLRARGYEAYLDRRARGTGDTKAGPT

SEQ ID NO: 38344 - protein, 227 aa, Fulvimonas soli
  REGION 1..227: note = tr|A0A316I6P2|A0A316I6P2_9GAMM 7-cyano-7-deazaguanine synthase OS=Fulvimonas soli; OX = 155197 GN=queC PE=3 SV=1
MSETSPRKAVVLVSGGMDSAVTIAIAREQGYAVHALSVAYGQRHDSELDAAARVARMLGAAEHKTVRVDLRSIGGSALTADIDVPLDGAGQGIPVTYVPARNTIMLSIALGWAEVLGSADIWCGVNAVDYSGYPDCRPAFVEAFERLANVATKAGVEGAGIRIHAPLMRMSKADIAREGARLGVDFAATVSCYQADAEGRACGHCDACRLRAEGFRAAGLPDPTRYA

SEQ ID NO: 38345 - protein, 221 aa, Fusibacter sp.
  REGION 1..221: note = tr|A0A1B6BAH1|A0A1B6BAH1_9FIRM 7-cyano-7-deazaguanine synthase OS=Fusibacter sp. 3D3; OX = 1048380 GN=queC PE=3 SV=1
MNEKLKRKAVVVFSGGQDSTTCLFWALKAYDEVIAISFDYGQKHIFELTCAEKICKNNNVEFHVLDMSLLNQLAPNSLTRRDIEVCKEKPEGELPNSFVDGRNLIFLTFAAVFAKQRDIHHIITGVSQSDFSGYPDCRDVFIKSTHVTLNLAMDYPFVIHTPLMWLDKAQTWKMAYDLGVLETIKNETLTCYNGIIGEGCGACPSCELRNKGYREFEANYL

SEQ ID NO: 38346 - protein, 284 aa, Fusibacter sp.
  REGION 1..284: note = tr|A0A1B6BER3|A0A1B6BER3_9FIRM ATP-utilizing enzyme of the PP-loop superfamily OS=Fusibacter sp. 3D3; OX = 1048380 GN=F3D3_2779 PE=4 SV=1
MNIEESTMNINQAIEKLRKVEPKFEILCKTLEETPSIVVAFSGGVDSTFLVAVASVVARRVMALTVRSPYIATWEIEEAVDLTKVLNLEHHILEATIPETIKYNPSDRCYLCKREIFSKIKKIAEKAHYNTVCDGSNYDDLGDYRPGMRALKELEIKSPLLECQVTKAEIRSWSKTLGLETWDKPPYACLLTRMPYDTLVEPEALKMIEKAEAFIIDMGIRAIRVRKHNDLARIEVDAKEMSKMLNLKVISKVVEALKSYGFNYVTLDLAGYKMGSFNDTLEKE

SEQ ID NO: 38347 - protein, 225 aa, unidentified
  source 1..225: note = Fusobacteriia bacterium
  REGION 1..225: note = tr|A0A1W9W0P6|A0A1W9W0P6_9BACT 7-cyano-7-deazaguanine synthase OS=Fusobacteriia bacterium 4572_74 OX=1972457 GN=queC PE=3 SV=1
MKDKINKNSCVLVFSGGQDSTTLLFRAKKLYKEVIAISFDYGQKHSLELECAKELCKKNEVEHHILDMGLLNQLAPNSLTRSDLEVAKGEVTKGEVPNTFVDGRNMIFLTFAGIFAKQRDINIIMTGVSQSDFSGYPDCRDVFIKSLNTTLNLAMDYTFVLETPLMWLDKAETWNMAYELGVLDIIKNETLTCYNGIVGNGCGECPACTLRKNGYLEFKEKFLKL

SEQ ID NO: 38348 - protein, 223 aa, unidentified
  source 1..223: note = Fusobacteriia bacterium
  REGION 1..223: note = tr|A0A1W9TLM2|A0A1W9TLM2_9BACT 7-cyano-7-deazaguanine synthase OS=Fusobacteriia bacterium 4572_132 OX=1971640 GN=queC PE=3 SV=1
MNKKAVILLSGGLDSTTAVYLAKSRGYEVYTLAFDYGQRHDKELNLAKEISKKVGAKEHKVVKLNMNAWGGSALTDENIEVPDFAGEGEIPVTYVPARNMIFLSIAASYAEALGAQSIFIGVSEVDYSGYVDCRQEFLEAMEVAINKGTVMGAEKGKKIKIEAPFIDMTKTEEIELGIKLGVNYGMTWSCYKGGEKACGVCDSCQLRLNAFKKAGLEDPIEYE

SEQ ID NO: 38349 - protein, 231 aa, Fusobacterium equinum
  REGION 1..231: note = tr|A0A133N8A3|A0A133N8A3_9FUSO 7-cyano-7-deazaguanine synthase OS=Fusobacterium equinum; OX = 134605 GN=queC PE=3 SV=1
MKVLVLLSGGLDSTTCLAIAVDKYGADQVVALSASYGQKHTKEILSARAIAKYYQVELLELNLSKIFSYSNCSLLSHSTEEVPHHSYAEQLNQQEEEILSTYVPFRNGLFLSTAASIALSKECSIILYGAHSDDAAGNAYPDCSPAFNEAMNTAIYEGSGRQVKVEAPFIGLHKKDIVKLGLTLQVPYELTWSCYEGKEHSCGECGTCIDREKAFEENGTIDPLVKIRGGK

SEQ ID NO: 38350 - protein, 435 aa, Fusobacterium equinum
  REGION 1..435: note = tr|A0A133NK34|A0A133NK34_9FUSO Uncharacterized protein OS=Fusobacterium equinum OX=134605; GN = HMPREF3206_00401 PE=4 SV=1
MLRNNGGIKMRIFCSNDRKSNLPEGYDEHIDIKCRSDIGFNFWDKDFKFDGEFSSLAIDLLYISIFVFVMDRKVLRNKQNDNWSRTFELNIPVWDVEFWNSQKDLLHDMVSFLSGDSWQFTFRKKEILDENDYYKSSKYKKAETKSYDTVCMLSGGLDSYIGAIDLLEKRKNKILFVSHYGGGKGTKEYQDMVFESLKKEYLLEDRDYIQFYATCKNGMEDTTRTRSFMFFSHAIALASAFNTDTEMYIPENGFISLNIPLTGARFGSSSTRTTHPYYMKMLRRLIKNMKLEISILNPYQLKTKGEMVSECKNLSLLKANYINTMSCSHPDVGRYEKESEPMHCGSCIPCIIRRAAIFKGLGVDETKFRDNKLNKTETAKLNKSAFLQKLRRFNENSAILEIQKSGTIEENLDEISEMYCRGMVEIEKFFKEVIR

SEQ ID NO: 38351 - protein, 231 aa, Fusobacterium gonidiaformans; identical to SEQ ID NO: 38349
  REGION 1..231: note = tr|E5BED7|E5BED7_9FUSO 7-cyano-7-deazaguanine synthase OS=Fusobacterium gonidiaformans 3-1-5R OX=469605; GN = queC PE=3 SV=1

SEQ ID NO: 38352 - protein, 232 aa, Fusobacterium mortiferum
  REGION 1..232: note = tr|C3WEG0|C3WEG0_FUSMR 7-cyano-7-deazaguanine synthase OS=Fusobacterium mortiferum ATCC 9817 OX=469616; GN = queC PE=3 SV=1
MRVLVLLSGGVDSSTCLAMAVDRYGKDNVVALSASYGQKHTKELESARKIASYYQIELIEINLGKIFSFSNCSLLSHSDKEIPQGSYDEQLRNIDGEKLSTYVPFRNGLFLSTAASIALSKNCQVIYYGAHSDDSAGDAYPDCSPEFNEAMNRAIYLGSGKELKIEAPFVNMHKSDIVKKGLELNLPYELTWSCYEGGEYPCGKCGTCIDREKAFEINNSIDPLVKLRKGDK

SEQ ID NO: 38353 - protein, 232 aa, Fusobacterium mortiferum; identical to SEQ ID NO: 38352
  REGION 1..232: note = tr|A0A414PUU9|A0A414PUU9_FUSMR 7-cyano-7-deazaguanine synthase OS=Fusobacterium mortiferum OX=850 GN=queC PE=3 SV=1

SEQ ID NO: 38354 - protein, 232 aa, Fusobacterium necrogenes
  REGION 1..232: note = tr|A0A377GWP5|A0A377GWP5_9FUSO 7-cyano-7-deazaguanine synthase OS=Fusobacterium necrogenes OX=858 GN=queC PE=3 SV=1
MRVLVLLSGGVDSSTCLAMAVDRYGKDNVVALSASYGQKHTKELESARKIADYYQVELIEINLGKIFSFSNCSLLSHSDKEIPQGSYDEQLKNIDGEKLSTYVPFRNGLFLSTAASIALSKNCQVIYYGAHSDDSVGDAYPDCSPEFNEAMNRAIYLGSGKELKIEAPFVNMHKSDIVKKGLELNLPYELTWSCYEGGEYPCGKCGTCIDREKAFEINNSIDPLVKLRKGDK

SEQ ID NO: 38355 - protein, 231 aa, Fusobacterium necrophorum
  REGION 1..231: note = tr|A0A0E2UZY8|A0A0E2UZY8_9FUSO 7-cyano-7-deazaguanine synthase OS=Fusobacterium necrophorum DJ-2 OX=1441737 GN=queC PE=3 SV=1
MKVLVLLSGGIDSTTCLAMAIEKYGVEQVVALSAFYGQKHNKELQAARNIANYYRVELIELNLSKIFAYSNSSLLKHSGKEIPHCSYVEQLAERKEKTLSTYIPFRNGLFLSTAASIAISKNCSIIFYGAHSDDAAGNAYPDCSPAFHEAMNTAIYEGSGRQVRVEAPFLKLHKKEIVKLGLDLKLPYELTWSCYEGGEYPCGQCGTCIDREKAFEENGHIDPLVIGRGGN

SEQ ID NO: 38356 - protein, 231 aa, Fusobacterium necrophorum
  REGION 1..231: note = tr|A0A017H4E0|A0A017H4E0_9FUSO 7-cyano-7-deazaguanine synthase OS=Fusobacterium necrophorum subsp. funduliforme B35 OX=1226633 GN=queC; PE = 3 SV=1
MKVLVLLSGGIDSTTCLAMAIEKYGVEQVVALSAFYGQKHNKELQAARNIANYYRVELIELNLSKIFAYSNSSLLEHSGKEIPHCSYVEQLAERKEKTLSTYIPFRNGLFLSTAASIAISKNCSIIFYGAHSDDAAGNAYPDCSPAFHEAMNTAIYEGSGRQVRVEAPFLKLHKKEIVKLGLDLKLPYELTWSCYEGGEYPCGQCGTCIDREKAFEENGHIDPLVIGRGGN

SEQ ID NO: 38357 - protein, 229 aa, Fusobacterium nucleatum
  REGION 1..229: note = tr|A0A2B7YH53|A0A2B7YH53_FUSNP 7-cyano-7-deazaguanine synthase OS=Fusobacterium nucleatum subsp. polymorphum OX=76857 GN=queC PE=3 SV=1
MKALVLSSGGIDSTTCLALAIKKYGVNNVISVSIDYGQKHNKELICAEEIGRFYRIKHITLNLKEIFKYSNNALMQDSTKEVPKDSYAEQLRKTEIVDTYVPFRNGLFLSAISSLALAINNNERTDIYIGVHLDDAAGRAYADCTKEFIETISKAISLGTYEKIKIITPFVYSNKAEIVKVGLNLKAPYHLTWSCYQGGEKQCGECATCIDRKNAFKINEAIDPVRYKR

SEQ ID NO: 38358 - protein, 44 aa, Fusobacterium nucleatum
  REGION 1..44: note = tr|F9EQA4|F9EQA4_FUSNU ThiI family protein; OS = Fusobacterium nucleatum subsp. animalis ATCC 51191; OX = 997347 GN=HMPREF9094_2109 PE=4 SV=1
MEKIKALALFSGGLDSALAIKVVQEQGIEVIALNFVSHFFWWKK

SEQ ID NO: 38359 - protein, 229 aa, Fusobacterium periodonticum
  REGION 1..229: note = tr|A0A2D3P4A4|A0A2D3P4A4_9FUSO 7-cyano-7-deazaguanine synthase OS=Fusobacterium periodonticum OX=860 GN=queC PE=3 SV=1
MKALVLSSGGIDSTTCLALAIKKYGVNNVISVSVDYGQKHNKELICAEEIAKFYGIKHITLNLKEIFKYSNNALMQNSTKEIPKDSYAEQLKETEIVDTYVPFRNGLFLSAISSLALAINNNEKAEIYIGVHLDDAAGRAYADCTKEFIETISKAISLGTYEKIKIITPFVYSNKAEIVRVGLNLKAPYHLTWSCYQGGERQCGECATCIDRKEAFKKNEAIDPVAYKR

SEQ ID NO: 38360 - protein, 222 aa, Fusobacterium sp.
  REGION 1..222: note = tr|R7LU43|R7LU43_9FUSO 7-cyano-7-deazaguanine synthase OS=Fusobacterium sp. CAG:815 OX=1262901 GN=queC; PE = 3 SV=1
MTKSIILLSGGLDSLVSLGLKREELNITLALTFDYGQKSAIKEIEASRKICEYYNVEHKVIKLDWLKQITNTSLVSEQIVPTGKALDNPEKSAKSVWVPNRNGLFLNIAASFADSQDYDYILIGANREEGQTFPDNTQDFIDSLNKEFEYSTQKKPKVVAPLINYVKNDIVMLALQYKIPLELTQSCYQDSAKHCGICESCTRLRHALEANHDTHYIKLLFG

SEQ ID NO: 38361 - protein, 348 aa, Fusobacterium sp.
  REGION 1..348: note = tr|W3Z514|W3Z514_9FUSO Queuosine biosynthesis protein QueC-like protein OS=Fusobacterium sp. CM21; OX = 936562 GN=HMPREF1497_1567 PE=4 SV=1
MMISKKICKICLKPLPTDKHGNLLNTGNICHECLRKQKNINKIDWNRKKEEFENIINSIKNKHNFDALVMLSGGKDSVYVAYLLSKIYKLKVIGITIDNGFEYASTFENSSKIAEKLGISHFIYRLPENDMKEYYKVLIGNKELKMNDGSQLCFFCGRMLKSFSVDIAKRLDVGVVASGHTLEQVRALGNEQGNDRSFEIRMRYIQNYEKNKYLKLEKILKDNNLEYIHYLIKDNIDNNKFNNFIYPLSYFEYKPLEIVDLLKRELEWEPDSNFTRKYISSGCKLAKVMEYIANKNGVETYVEKEFSDQIRRGSMSKEEVQEIKKSQIRDQKIILELINRLNLSIDTI

SEQ ID NO: 38362 - protein, 222 aa, Gallaecimonas pentaromativorans
  REGION 1..222: note = tr|A0A3N1PPX3|A0A3N1PPX3_9GAMM 7-cyano-7-deazaguanine synthase OS=Gallaecimonas pentaromativorans OX=584787 GN=queC PE=3 SV=1
MSKVVVIYSGGMDSFTLLHKAINDGHEVHALSFNYGQRHVKELQVAAKVTAALGIAHEVVDISAIQSLIANSALTSDIAMPEGHYHEDNMKQTVVPNRNMILLSLAIGKAVSIGADKVYYGAHGGDHAIYPDCRPEFVNAMNAVSQVANYEPVSIETPYLLATKGEILTDGLKMGLSYENTWTCYQGGEAACGRCGACQERLEAFRENHLEDPLPYLTREML

SEQ ID NO: 38363 - protein, 222 aa, unidentified
  source 1..222: note = Gallaecimonas xiamenensis
  REGION 1..222: note = tr|K2JU48|K2JU48_9GAMM 7-cyano-7-deazaguanine synthase OS=Gallaecimonas xiamenensis 3-C-1 OX=745411; GN = queC PE=3 SV=1
MSKVVVIYSGGMDSFTLLHKAIKDGHEVHALSFNYGQRHVKELQVAAKVTAELGIAHEVVDISAIQSLIANSALTSDIAMPEGHYQENNMKQTVVPNRNMILLSLAIGKAVSIGADKVYYGAHGGDHAIYPDCRPEFVKAMNAVSQVANYEPVSIESPYLMATKGEILTDGLKMGLSYEQTWTCYQGGEAACGRCGACQERLEAFRENQLEDPLPYLTREIL

SEQ ID NO: 38364 - protein, 224 aa, Gallibacterium anatis
  REGION 1..224: note = tr|A0A0A2YYA6|A0A0A2YYA6_9PAST 7-cyano-7-deazaguanine synthase OS=Gallibacterium anatis; OX = 750 GN=queC PE=3 SV=1
MQNKKAIVIFSGGQDSTTCLLQALQTYGDGNVEAITFHYGQRHSIELEKSRWIADDLGVKQTIFDLSLMKSITHNALMDSNETIQQKQGKLPNTFVDGRNALFLLYAAIYAKGQGISDIITGVCETDFSGYPDCRDVFIKSMNVTLNLAMDYSFNIITPLMWLTKKETWALADQLGRLEYVMQHTHTCYEGVEGGCHHCPSCLLREKGLNEYLAGKEAKNVESR

SEQ ID NO: 38365 - protein, 224 aa, Gallibacterium anatis
  REGION 1..224: note = tr|A0A0A2YTM0|A0A0A2YTM0_9PAST 7-cyano-7-deazaguanine synthase OS=Gallibacterium anatis; OX = 750 GN=queC PE=3 SV=1
MQNKKAIVIFSGGQDSTTCLLQALQTYGNGNVEAITFHYGQRHNIELEKSRWIADDLGVKQTILDLSLMQSITHNALMDSNETIQQKQGKLPNTFVDGRNALFLLYAAIYAKGQGISDIITGVCETDFSGYPDCRDVFIKSMNVTLNLAMDYRFNIITPLMWLTKKETWALADQLGRLEYVMQHTHTCYEGVEGGCHHCPSCLLREKGLNEYLAGKEAKNVESR

SEQ ID NO: 38366 - protein, 224 aa, unidentified
  source 1..224: note = Gallibacterium genomosp.
  REGION 1..224: note = tr|A0A1A7P5E7|A0A1A7P5E7_9PAST 7-cyano-7-deazaguanine synthase OS=Gallibacterium genomosp. 1 OX=155515 GN=queC PE=3 SV=1
MQNKKAIVIFSGGQDSTTCLLQALQTYGNGNVEAITFHYGQRHSIELDKSRWIANDLGVKQTILDLSLMQSITHNALMDNNETIQQKQGELPNTFVDGRNALFLLYAAIYAKGQGISDIITGVCETDFSGYPDCRDVFIKSMNVTLNLAMDYSFNIITPLMWLTKKETWALADQLGRLEYVMQHTHTCYEGVEGGCHHCPSCLLREKGLNEYLAEKEAKNVESR

SEQ ID NO: 38367 - protein, 221 aa, unidentified
  source 1..221: note = Gallibacterium genomosp.
  REGION 1..221: note = tr|A0A1A7Q0M9|A0A1A7Q0M9_9PAST 7-cyano-7-deazaguanine synthase OS=Gallibacterium genomosp. 3 OX=505345 GN=queC PE=3 SV=1
MQNKKAVVIFSGGQDSTTCLLQALQTYGKDNVETITFQYGQRHHIELEKARWIANDLGVKQTIIDTSVITAITHNALLDAEQTISQKQGELPNTFVDGRNALFLLYAAIYAKSQGISDIITGVCETDFSGYPDCRDIFIKSMNVTLNLAMDYQFNLITPLMWLTKKETWALADQLGKLDYVLQHTHTCYEGVEGGCHHCPSCLLREKGLNEYLASKGQSDV

SEQ ID NO: 38368 - protein, 218 aa, Gallibacterium salpingitidis
  REGION 1..218: note = tr|A0A1A7P1T5|A0A1A7P1T5_9PAST 7-cyano-7-deazaguanine synthase OS=Gallibacterium salpingitidis OX=505341 GN=queC PE=3 SV=1
MQNKKAVVIFSGGQDSTTCLLQALQTYGNGNVEAITFKYGQRHSIELEKAQWIANDLGVKQTIIDTSVITSITHNALLDSQQTIEQQQGELPNTFVDGRNALFLLYAAIYAKGQGISDIITGVCETDFSGYPDCRDIFIKSMNVTLNLAMDYHFNLITPLMWLTKKETWALADQLGKLDYVIQHTHTCYEGVEGGCHQCPSCLLREKGLKEYLASKKQ

SEQ ID NO: 38369 - protein, 216 aa, Gallibacterium salpingitidis
  REGION 1..216: note = tr|A0A1A7Q708|A0A1A7Q708_9PAST 7-cyano-7-deazaguanine synthase OS=Gallibacterium salpingitidis OX=505341 GN=queC PE=3 SV=1
MQNKKAVVIFSGGQDSTTCLLQALQTYGNGNVEAITFKYGQRHSIELEKAQWIANDLGVKQTIIDTSVITSITHNALLDSQQTIEQQQGELPNTFVDGRNALFLLYAAIYAKGQGISDIITGVCETDFSGYPDCRDIFIKSMNVTLNLAMDYHFNLITPLMWLTKKETWALADQLGKLDYVIQHTHTCYEGVEGGCHQCPSCLLREKGLKEYLASK

SEQ ID NO: 38370 - protein, 225 aa, unidentified
  source 1..225: note = Gallionella capsiferriformans
  REGION 1..225: note = tr|D9SCJ6|D9SCJ6_GALCS 7-cyano-7-deazaguanine synthase OS=Gallionella capsiferriformans (strain ES-2); OX = 395494 GN=queC PE=3 SV=1
MKNAVVLLSGGLDSATVLAMARAQGYTCYALSVDYGQRHHSELAAAQRVAETLGAREHRVVNIDLTGFGGSALTDNNIAVPEHASAGIPLTYVPARNTIMLSLALAWAEVLRAQDIFIGVNAVDYSGYPDCRPAYIEAFERMANLATQAAVEGHPLTLHAPLLHLSKADIIKSGSLLSVDYAATVSCYQADDLGRACGVCDSCRLRSAGFAAAGVSDPTRYRKLN

SEQ ID NO: 38371 - protein, 225 aa, Gallionella sp.
  REGION 1..225: note = tr|A0A3D2HAH6|A0A3D2HAH6_9PROT 7-cyano-7-deazaguanine synthase OS=Gallionella sp.; OX = 2052161 GN=queC PE=3 SV=1
MKNAVVLLSGGLDSATVLAMAHAQGYTCYALSVDYGQRHHSELAAAQRVAETLGAREHRVVNIDLTGFGGSALTDNNIDVPEHASAGIPLTYVPARNTIMLSLALAWAEVLRAQDIFIGVNAVDYSGYPDCRPAYIDAFERMANLATQAAVEGHPLTLHAPLLHLSKAEIIQKGSSLGVDYAATVSCYQADDLGQACGVCDSCRLRSAGFSAAGVSDPTRYRKIN

SEQ ID NO: 38372 - protein, 232 aa, Gallionella sp.
  REGION 1..232: note = tr|A0A3D2NR61|A0A3D2NR61_9PROT 7-cyano-7-deazaguanine synthase OS=Gallionella sp.; OX = 2052161 GN=queC PE=3 SV=1
MKNAVVLLSGGLDSATVLAMARAEGYVCYALSVDYGQRHHSELDAAQRVARTLGAHEHRVINIDLTAFGGSALTDNNIAVPQHESAGIPLTYVPARNTIMLSLALAWAEVLHAQDIFIGVNAVDYSGYPDCRPAFIEAFERMGNLATQAAIEGHPLTLHAPLLHLSKAEIIRQGNKLGVDYAATVSCYQADAQGRACGLCDSCRLRRAGFEAAGIVDPTRYRNAPDSFNNPV

SEQ ID NO: 38373 - protein, 224 aa, unidentified
  source 1..224: note = Gallionellaceae bacterium
  REGION 1..224: note = tr|A0A1J4TEI4|A0A1J4TEI4_9PROT 7-cyano-7-deazaguanine synthase OS=Gallionellaceae bacterium CG1_02_60_325 OX=1805162 GN=queC PE=3 SV=1
MKRAVVLLSGGLDSATVLAMAGAQGFQCRALSVDYGQRHHAELAAAQRVARALGVHEHRVINIDLAAFGGSALTDANIAVPEQETSGIPLTYVPARNTIMLSLALAWAEVLQARDIFIGVNAVDYSGYPDCRPAFIAAFEQMANLATKAAAEGKQLKLHAPLMDMSKAEIIRQGTQLGVDYAQTVSCYQADEQGQACGRCDSCRLRREGFRAAGIPDPTAYRAV

SEQ ID NO: 38374 - protein, 224 aa, unidentified
  source 1..224: note = Gallionellaceae bacterium
  REGION 1..224: note = tr|A0A521QEN5|A0A521QEN5_9PROT 7-cyano-7-deazaguanine synthase OS=Gallionellaceae bacterium OX=2052162 GN=queC PE=3 SV=1
MKNAVVLLSGGLDSATVLAMARQQGYACHALSVDYGQRHHAELAAAQRVAKTLGATEHRNISIDLTAFGGSALTDSNIAVPEQLSTGIPLTYVPARNTIMLSLALAWAEVLQAQDIFFGVNAVDYSGYPDCRPEYVEAFERMANLATKAAVEGKPLTLHAPLLHLSKAEIIQQGIKLGVDYSLTVSCYQADAQGRACGVCDSCRLRRAGFELAGIPDSTRYRNA

SEQ ID NO: 38375 - protein, 225 aa, unidentified
  source 1..225: note = Gallionellales bacterium
  REGION 1..225: note = tr|A0A1G0DVW5|A0A1G0DVW5_9PROT 7-cyano-7-deazaguanine synthase OS=Gallionellales bacterium RIFCSPLOWO2_02_58_13 OX=1798252 GN=queC PE=3 SV=1
MMKNAVVLLSGGLDSATVLAMARAQGFICYALSVDYGQRHHAELAAAQRVAQMLGAHEQRVIDIDLTGFGGSALTDNNIAVPQQPSAGIPPTYVPARNTIMLSLALAWAEVLQAQDIFIGVNAVDYSGYPDCRPAYIEAFERMANLATRAAVEGSSLAIHAPLLHLSKAEIIRQGIALGVDYAQTVSCYQADESGRACGVCDSCRLRRAGFAAAGVADQTAYRAI

SEQ ID NO: 38376 - protein, 232 aa, unidentified; identical to SEQ ID NO: 38372
  source 1..232: note = Gallionellales bacterium
  REGION 1..232: note = tr|A0A2M8DY77|A0A2M8DY77_9PROT 7-cyano-7-deazaguanine synthase OS=Gallionellales bacterium CG_4_9_14_0_8_um_filter_55_61 OX=1974015 GN=queC; PE = 3 SV=1

SEQ ID NO: 38377 - protein, 233 aa, unidentified
  source 1..233: note = Unknown
  REGION 1..233: note = tr|E1VPX8|E1VPX8_9GAMM 7-cyano-7-deazaguanine synthase OS=gamma proteobacterium HdN1 OX=83406 GN=exsB; PE = 3 SV=1
MSNHRAAIVLLSGGLDSATCLALARQQGFDVYALSFSYGQRHSVELEASRRVAHALGATAHRIANIDLAAFGGSALTDLSIDVPVAAPNAPVDHSEEIPITYVPARNTIFLSYALAWAEVLESDDIFIGVNAVDYSGYPDCRLEFINAFETMANLATRRAVEGAKLHIHAPLMKMSKAQIIEVGVSLGVDYGATISCYQADDQGAACGACDSCRLRREGFLQAGVPDPTLYQG

SEQ ID NO: 38378 - protein, 226 aa, unidentified
  source 1..226: note = Unknown
  REGION 1..226: note = tr|A0A2T9ZYJ6|A0A2T9ZYJ6_9GAMM 7-cyano-7-deazaguanine synthase OS=gamma proteobacterium symbiont of Ctena orbiculata OX=1968598 GN=queC PE=3 SV=1
MSRRAVVLLSGGLDSATVLALASNQGYACHALSMAYGQRHAAELAAASRVAASLKAEAHKLVHIGLDDIGGSALTDRSIQVPEEMGNGIPVTYVPARNTVFLSLALGWAEVLDAQDIFIGVNAVDYSGYPDCRPQFIEAFQSLANLATKAADEGGTYKIHTPLINLTKAEIIRRGVELGVDYSMTVSCYQASEAGEACGVCDSCRLRAKGFEDAGIVDPTRYLNSD

SEQ ID NO: 38379 - protein, 231 aa, unidentified
  source 1..231: note = Gammaproteobacteria bacterium
  REGION 1..231: note = tr|A0A1G0GAD4|A0A1G0GAD4_9GAMM 7-cyano-7-deazaguanine synthase OS=Gammaproteobacteria bacterium RIFCSPHIGHO2_02_FULL_39_13 OX=1798270 GN=queC; PE = 3 SV=1
MSEKTAKAVILLSGGLDSTTCLAIAKKQGYDCYALSINYGQKQCIELAAARKIAAVFQVKKHHVVTLSIGEFGGSALTDKNMIIPAFRSSENKLTVIPTTYVPARNTIFLSVALGFAETVDADAIFIGANAVDYSGYPDCRPEYFEAFQIMANIATKSAVCGKKIKIETPILHLSKADIIALGTTLGVDYGLTISCYQANESGLACGICDACAFRKMGFEKNNMVDPTRYA

SEQ ID NO: 38380 - protein, 226 aa, unidentified
  source 1..226: note = Gammaproteobacteria bacterium
  REGION 1..226: note = tr|A0A1G0J2G4|A0A1G0J2G4_9GAMM 7-cyano-7-deazaguanine synthase OS=Gammaproteobacteria bacterium RIFCSPLOWO2_02_FULL_38_11 OX=1798293 GN=queC; PE = 3 SV=1
MRKAIILLSGGLDSTTCLAYAKHQGFECYALSFAYGQRHVFELEAAKRIAEHYAVKKHLIFPLSVDVFQGSSLTDVSKVVPGYSGLVEIPVTYVPARNTVFLSIGLAWAEVLGAENIFIGASSIDYSHYPDCRPAFFEAFQALVRLATKEGVEEGLSFRIETPLLHLTKAQTINLGRELGVDYSMTVSCYQLNERGEACASCDSCTLRKKGFLESGVTDPTHYERK

SEQ ID NO: 38381 - protein, 232 aa, unidentified
  source 1..232: note = Geitlerinema sp.
  REGION 1..232: note = tr|K9SC87|K9SC87_9CYAN 7-cyano-7-deazaguanine synthase OS=Geitlerinema sp. PCC 7407 OX=1173025 GN=queC; PE = 3 SV=1
MKAVILLSGGLDSSTVIYQAKADGCDCYALSFDYRQRHRRELAAAAAIAQAAGAADHQVIRFDLRQWGGSALTDDALDLPQHRSLESMAAEVPITYVPARNMIFLSFASAYAEVLGAERVYIGVNALDYSGYPDCRPDFIEAMQEVFRLGTQQGREGKPIEIVTPLLTLRKTEIIELGDRLGVPWELTWSCYDGGEKACGVCDACQLRLAAFAELGRPDPVAYAENSEDLRG

SEQ ID NO: 38382 - protein, 240 aa, unidentified
  source 1..240: note = Geitlerinema sp.
  REGION 1..240: note = tr|K9SC01|K9SC01_9CYAN 7-cyano-7-deazaguanine synthase OS=Geitlerinema sp. PCC 7407 OX=1173025 GN=queC; PE = 3 SV=1
MNAPKAIVLLSGGLDSSTSAAQAIADGYELIALSLHYGQRHDRELIAAKRVAEHLGIKEHFVVDVNLAQWGGSALTDQAVDVPTDGVKPGVIPITYVPGRNTVFLAIALSLAEAKGAEAIYLGINAVDYSGYPDCRPEYLEAVQHLATLSSKTGLEGHAPKLVAPLVMDSKVDIVHRALQLGVPIHLTWSCYQGEDEPCGLCDSCRIRDRALIDAGRPDLATLVGRELYEQENRCATPVS

SEQ ID NO: 38383 - protein, 1375 aa, Gelidibacter algens
  REGION 1..1375: note = tr|A0A1A7R6X0|A0A1A7R6X0_9FLAO Amino acid adenylation domain-containing protein OS=Gelidibacter algens OX=49280 GN=A9996_00555 PE=4 SV=1
MKLKLTASQMSLWVGQKMNPDVPLYNTAYSYEISGAIDKQIFEKAFQLLIDTTDALRIRFYEEDGIPYQEAKDKLDYNIEVIDFSSDPEFNMISDWLLNRSLKKLDLSQQVFDTVLIKKSENTYIWFMNMHHLITDGVSRKIIFDRMNKYYEALSGHHDGIQPVDSASYLDYVKSELDAASSKTHEDSYWSSKVRDIEKIHSFYGIHPKPDATEASRVFLHLGRERSQKLQLFLQRPEVKGWTAQLALFNVMSTLLFIFMYRVSGQKKLSIGAPLHNRISRKFHHTVGYFLEIFPMLTEIDDADSFKTLLQRVKLENSDNLKHALQDTVTSEISNSFNVVLNYIHTGFSNFNGFKTTSEWIYTGHIDSNHQMRCHVMVPETNGEYKIMLDLNHGTFDHELQQKVPNHLLSLLDAMLQDIEMDISVPSLVTPKEQKLLIDPDFKIVEPTTTALTYFEENALKRPNSVALQGDKQTLTYSELNKKANQLAHYLYEKKILENQKVALHFYRNPEYIIAVLAVLKLGATFIPIPSDQPSERIRFIIGNSDASLVLTESGLIKNLDIDSNRLCDITKERSEISKQPFTAIQSDLKKNDMAYILYTSGSTGKPKGVRISHSALSNYLGWAKAAYNINEKSIFPLFSSIGFDLTITSTLLPLISGGRIITYKENTFGADMSLMQVFEDNMVNTIKLTPSHLALVQEKKISSSYIHTMIIGGEDLKIALAKSMQSAFPNPLRIFNEYGPTEATIGCIVSEFDSQKHLGTSVPIGTPIANMQAYVLDSHNNIVPQGVVGELYLSGIGLAEGYVDAPEMTEAKFVANPFFKDSKMYRSGDLCRINGNGEFEYLGRTDDQVKLRGYRIELSDIESNLVNYPEIDLCAVVLIEDKTSIPEEDVVNCIECGLPSNYPNTDFNENGVCHLCTAFESYKVKAERYFKNDDELLQVLTSKRNQNPNYDCISLLSGGKDSTYVLARLVNMGLRVLAFTMDNGYISDQAKANIDTIIKKLGVDHVYGETPHMNDIFVDSLHRHHNVCNGCFKTIYTLSTQIALEKEIPFIVTGLSRGQFFETRLTEELFWDEALDTKKIDQTILEARKLYHQEDDAVKKLLDVSMFDDDKLYEKVEFVDFYRFSDVSLEELLVYLKENVGWVRPTDTGRSTNCLINQVGIYVHKKEMGYSNYSFPYSWDVRLGHKTRDESLEEINEVIDETEVKRIMKEIGYDKSDDDWQNSDKLVAYYTGNPNLSLKDIREFAEQRLPSYMVPTVFKHLNEIPLTKNGKVDKKALKNLTSVQLELDTPYAAPRNEIEEILERIWQEVLQLKKVGIYDNFIALGGHSLAAIRATARINDEIELNFPLNKIFELPTIAEYSAYIEQTLMALLEE

SEQ ID NO: 38384 - protein, 1375 aa, Gelidibacter salicanalis
  REGION 1..1375: note = tr|A0A5C7AHD6|A0A5C7AHD6_9FLAO Amino acid adenylation domain-containing protein OS=Gelidibacter salicanalis OX=291193 GN=ES711_14150 PE=4 SV=1
MKLKLTASQLSLWIGQKINPDIPLYNTAYTYEISGPIDQNIFKNAFQFLINATDALRIRFYEEDGIPFQEAKDSLKYDIEYLDFSLDSESDVITDWLLNRSLEKLNLSQQVFDAVLIKKSENSYIWFMNMHHLVTDGVSRKIVFDRMNSYYKAIINDFNSFQPEYSVTYLDYVTSELQAASSKIDDDSYWSSKVHEVEKLPSFYGIHPKPNATEASRIYIPLGADRSQKLHVFLQRPEVKGWTAQLALFNVLSSLLFIYMYRVSDQKKLAIGAPLHNRIQRKFHNTVGYFLEIFPMMTEIEETDSFKSILQRVKLENNNNLKHALQDTITSEISNSFNVVLNYIHTGFSNFNGFPTTSEWIYTGHIDSNHQMRCHVMVPDSNGEFKIMLDLNHGTFNSNLRERVSGHLLSLLDAMLDDIETCISVPSLVSPTEQKSLIDPNFKIVEPTGTAITYFEEHALNRPNAVAIQGGRRTLTYSELNKKANQLAHYLHEKGIRKNQKIALHFYRNPDYIIGVLAVLKLGATFIPIPTDQAPERISFILKNANASLVLTESGLTKNLDLSANQVCDINKESSEIFNQPFSTIQNDVKTSDLAYILYTSGSTGVPKGVCISHRALTNYLLWSKTNYTINEKSIVPLFSSIGFDLTITSTLLPLISGGRIITYKENTSGPDVSLLQVFEDNLVNIIKLTPSHLALVQEKKLSSSNIDTMIIGGEDLKVALAQSIQSLFLNPIKIYNEYGPTEATVGCIVSEYDAQMHLGSSVPIGKPIDNMQVYVLDSYKNSVPQGVIGELYLSGIGLAEGYISSPEMTAAKFVENPFFEGSKMYKSGDLGRINNDGELEYLGRTDDQVKLRGYRIELSDIESNLVHHPEVDNCAVVLIKDDIHIPEDDIVNCIKCGLPSNYPNTDFNQYGICHLCTSFEDYKTKVERYFKNDDELVKLLTSKRDENPNYDCISLLSGGKDSTYVLSRLVNMGLRVLAFTMDNGYISDQAKANITTIVKKLGVDHVYGETPHMNDIFVDSLHRHHNVCNGCFKTIYTISTQIALKKEIPYIVTGLSRGQFFETRLTEELFSDDTLDSKVIDQTILEARKLYHQEDDAVKRLLDVSIFEDDRVFEKVEFVDFYRFSDVSLEDMLVYLKENVGWVRPTDTGRSTNCLINQVGIYVHKKEMGYSNYSFPYSWDVRLGHKTRDESLEEINEVIDEAEAKRILKEIGYDKSEEDWQNTDKLVAYYTGNPNLSLKDIREFAALRLPSYMVPTVFKHLNKIPLTKNGKVDKKALQNLTSVQLELETPYAAPRNEIEEILERIWQDVLQLKKVGIYDNFIALGGHSLAAIRVTARINDEIELNLPLNKIFELPTIAEYSRYIENTLMALLEE

SEQ ID NO: 38385 - protein, 218 aa, unidentified
  source 1..218: note = Geminocystis sp.
  REGION 1..218: note = tr|A0A0D6AT62|A0A0D6AT62_9CHRO 7-cyano-7-deazaguanine synthase OS=Geminocystis sp. NIES-3709 OX=1617448 GN=queC PE=3 SV=1
MSKKAIVLLSGGLDSATSAAIAKKEGYETIALSFRYGQRHAKELEIAQKLAPKLGIEKHYIIDVNLSLWGGSSLTDDNLSIPQDGLKPDEIPSTYVPGRNTVFIAIALSLAEATQAEAIYLGINAVDYSGYPDCRPEYLQAFQQLANLSSKVGIEGNPPQLIAPLVTLSKVEIVKKAIKLGVPIDETWSCYQGDEIPCGICDSCRIRDQALLQAGYVQ

SEQ ID NO: 38386 - protein, 224 aa, unidentified
  source 1..224: note = Geminocystis sp.
  REGION 1..224: note = tr|A0A0D6AC51|A0A0D6AC51_9CHRO 7-cyano-7-deazaguanine synthase OS=Geminocystis sp. NIES-3708 OX=1615909 GN=queC PE=3 SV=1
MSQKKAIVLFSGGLDSATSAAIAIQAGYDTIALSFRYGQKHARELEIAHKLAPKLGIKEHYIIDVNLSLWGGSSLTDEKMNIPEDGVKPDEIPSTYVPGRNTVFVAIALSLAEAKEAEAIYLGINAVDYSGYPDCRPEYLKTFQELANLSSKVGVEGKPPQLIAPLIHLSKEDIVKKAITLNVPIQETWSCYQGGQKPCGVCDSCRIRNEALIKAGYAHLAQFN

SEQ ID NO: 38387 - protein, 219 aa, Gemmata obscuriglobus
  REGION 1..219: note = tr|A0A2Z3H9P3|A0A2Z3H9P3_9BACT 7-cyano-7-deazaguanine synthase OS=Gemmata obscuriglobus; OX = 114 GN=C1280_29875 PE=3 SV=1
MPDAPLAVLVSGGLDSAILLAEAVRACPVVFPLYVRSGLHWEAVERAYLERFLAAIAAPNLRPLRVLDQPTADVYGAHWSTTGEGVPGADSADEAVFLPGRNVLLLAKPLIWCHLNAVPFVATAPLGTNPFPDATPAFYDGFAGIVSSAVRGDVRVLRPYAALHKVDVMRRGRGRPLEHTFSCIRPVRGLHCGTCNKCAERRQAFRDAHMTDPTEYAEK

SEQ ID NO: 38388 - protein, 230 aa, Gemmata obscuriglobus
  REGION 1..230: note = tr|A0A2Z3H2M7|A0A2Z3H2M7_9BACT 7-cyano-7-deazaguanine synthase OS=Gemmata obscuriglobus; OX = 114 GN=queC PE=3 SV=1
MSKAVVLLSGGLDSTTALAVARGQGFECYALSVDYGQRHRVELERAAVVAKALGVIEHRTVKLDLREIGGSALTSDLAVPKDRSDGEMGHGVPVTYVPARNTILLGVALGFAEVVGAFDIFIGANVLDYSGYPDCRPEFLSAFEALANLATKAGTEGAGRFRVHSPLLKLTKAEIIREGVKLGVDYAQTLSCYDPDAAGRACGRCDSCLLRKKGFAEAGVPDPTHYAVGG

SEQ ID NO: 38389 - protein, 238 aa, Gemmata sp.
  REGION 1..238: note = tr|A0A142XTB4|A0A142XTB4_9BACT 7-cyano-7-deazaguanine synthase OS=Gemmata sp. SH-PL17; OX = 1630693 GN=queC_3 PE=3 SV=1
MGVSVTAVSDQHSTAPWPPSNPRGALAVLVSGGSDSAILLAEAVRAYPAVFPLYVRTGLHWEEVEREHLDRFLEAVRAPALRPLRVLDEPIRDVYGAHWSVSGEGAPDADSPDEAVFLPGRNVLLLAKPLLWCHLNGVPEIATAPLGANPFPDATPQFYDNFAAIVSSAVNGSVRVLRPFAALHKVDVLRRGRGLPLEHTFSCLRPVNGLHCGACNKCAERQRGFRDAEMPDPTRYAG

SEQ ID NO: 38390 - protein, 593 aa, Gemmata sp.
  REGION 1..593: note = tr|A0A142XDR9|A0A142XDR9_9BACT 7-cyano-7-deazaguanine synthase OS=Gemmata sp. SH-PL17; OX = 1630693 GN=queC_2 PE=4 SV=1
MADPQLVLCGGVRAAHAPRPWRAAARTHALAIGPGPRDVHLEINQLSRAMGRGLSDLDADLLEVAAYVYTIDQVVSRGGTVAIDYGARWRRHLRCVVPVRCPELWNQPRALGALRRVLLFMTDDAEWEFAFVRAPAPAPRARYLLDLVDPPDGTEFEEVVLFSGGLDSLCGAVEEVLIGQRPVVLVSHRPVSRTQARQGAVLDALRARLPRRELGPLHVGASINKGEQLNNEFTQRARSFLFAAVAAVVARLVGRRRIRFYENGVTSLNLPGSRELVGARASRTTHPQVLHGLGELFALLFGGPFEVQNPFQWTTKAGMLRRLKAQGHADLCALTYSCGHVWGRPERTPHCGRCSQCVDRRLTALGAGLGDAEDPPHRYESDVLTGERTGPELTLSERYVGSALDMEGIGDPVTFGLRYAELNDALPFTGLPAGDAARAAFALYRDHAAEVRGALREILGTRAVEILRQEYPAQSLLGVIVGRRDRGPAPARPAPGPGWVVDRSQFSVFLSGRGCFLGNTNEFRVVARLSESPGRYVSVEDLQDDVWRGAHVSRNAVQQTMTNIRRLFRDSELTEIRLDGSQAGHYRLVLGAE

SEQ ID NO: 38391 - protein, 227 aa, unidentified
  source 1..227: note = Gemmataceae bacterium
  REGION 1..227: note = tr|A0A5C1A4X9|A0A5C1A4X9_9BACT 7-cyano-7-deazaguanine synthase OS=Gemmataceae bacterium PX52 OX=2598579 GN=queC_1 PE=3 SV=1
MARAVVLLSGGLDSTTTLAVAKDQGYELYALSVDYGQRHKVELARAATVARQFGVANHRTVTLDLRAIGGSALTADVAVPKDRTDAAMGHGVPITYVPARNTILLGVALGYAETVGAFDLFIGANVLDYSGYPDCRPEFLTAFESLANLATKAGVEGTGRFRVHAPLLKLTKAEIIREGTRLGVDFGQTLSCYDPDAAGKACGHCDSCLLRKKGFAEAGVPDPTAYQ

SEQ ID NO: 38392 - protein, 227 aa, unidentified
  source 1..227: note = Gemmataceae bacterium
  REGION 1..227: note = tr|A0A4V0HSU3|A0A4V0HSU3_9BACT 7-cyano-7-deazaguanine synthase OS=Gemmataceae bacterium; OX = 2052164 GN=queC PE=3 SV=1
MSKAVVLLSGGLDSTTALAVAKSQGFTTYALSVDYGQRHRVELRRAVAVAHALGVADHRVVVLDLRAIGGSALTADLEVPKGRTADEMGRGVPVTYVPARNTILLGLALGYAETVGAFDLFIGANVLDYSGYPDCRPEFLTAFENLANLATRAGTEGAGRFRVHSPLLKMTKAEIIREGTRLGVDHALTLSCYDPDGEGRACGRCDSCVLRARGFDEAGVPDPTAYQ

SEQ ID NO: 38393 - protein, 231 aa, unidentified
  source 1..231: note = Gemmatimonadaceae bacterium
  REGION 1..231: note = tr|A0A2E8H3T1|A0A2E8H3T1_9BACT 7-cyano-7-deazaguanine synthase OS=Gemmatimonadaceae bacterium OX=2026741 GN=queC PE=3 SV=1
MPPHPTPPAILLLSGGMDSTTLLFHLRQTAPNTPLHTISIDYGQRHRIELDFAARLSDLAGAASHRVLPLDLTSIGGSPLTDPDLRIPASADDEQITTVVPFRNMLFVTLASACGETLGARDLYLSPVRDDYDAYRDCRREFYDSLEGTLRLGATRETDFRIHTPFVDHTKVDVVAMGLQLEVPYELTHTCYEGRRPACGICDACVERLHAFDANGVADPLDYENTPGGHS

SEQ ID NO: 38394 - protein, 1479 aa, unidentified
  source 1..1479: note = Gemmatimonadaceae bacterium
  REGION 1..1479: note = tr|A0A2E5W983|A0A2E5W983_9BACT Carrier domain-containing protein OS=Gemmatimonadaceae bacterium; OX = 2026741 GN=CME05_00355 PE=4 SV=1
  VARIANT 505: note = Xaa can be any naturally occurring amino acid
  VARIANT 508: note = Xaa can be any naturally occurring amino acid
  VARIANT 570: note = Xaa can be any naturally occurring amino acid
  VARIANT 590: note = Xaa can be any naturally occurring amino acid
  VARIANT 592..593: note = Xaa can be any naturally occurring amino acid
  VARIANT 625: note = Xaa can be any naturally occurring amino acid
MSERSTIEQFLSQLRRADVYITVRGDRLVVDAPEGTLTDDLRARIAARKDEILQFLAEAVDSDGEVIVATPGSEPILSFAQQRMWFLDQLQKGTSAFNSPMQVRFRGPLNVEALAQGVAEIHRRHDVLRMSFPVRDGKPVARIRPPSPIDLPLIDCSGATADERARIRHEHARAIATAPFDLAVDDLVRMELLRLEENDHLFLFTMHHIVSDGWSIGLFLHEFSDLYRIFDQGRPERLPGLQLQYADFARWQATTLAKTKHARDLAYWRSILKGAPDLLSLPTDRPRPAIYRFEGGKVPFTIGQDQTDDLRRLCEQEGVTAFMVLLAAYSAVLSKMSGLKDIVVGYPIAGRRHNQLESIIGCFVNTLLLRCELTDDLTFRQLIAHVRTASSQAYEHQDLPFEKLVDEVQPERNLSHNPLFQVAFVFQNVPFGLPDFPGMEVLPRDDEQFTPGATFDMTLVMEEVEDALRGELEYNRVLFDHETAQRVAAVFTALLDAAIREPDQXVLXLEVLDPSTRRDLIWGRNKTGVDYPKTTTVSRLFESVVEETPDVVAIECDDATVTYRELNERXNRLARWLQSRGAGRGTIVGXMXXHSVDLLVGLLGVMKSGAAYLPIDPSHPAGRVXGIIQDANLQLLLTPRELIADLTQIAPDVHILDVADAAVAEVAADNLNNQIQTSDVAYVIYTSGSSGRPKGVVVEHGALTNYIWWARQQYLADDKLDFALHTSVAFDLTVTSLYVPLISGSRLVVYGESGEHRVPPILRIVQEGTADIVKLTPSHLALLRDLDLKDSRVRKLVVGGENLRTELARRIHDVFGGNIEIYNEYGPTEATVGCMIHRYDPEQDTATSVPIGVPADNLRIYLLRDDYEPVPAGAIGEMYIAGDGVARGYLHQEELTRERFLPDPFVQGARMYRTGDLARWRNEHVMEYHGRTDHQVKIRGHRVELGEIETQICTHAGVRECVVNVAQTGLTSQDEGELEHCVECGLPSNYPGTTFDEQGRCNQCTAYERYRRKVEPYFKDIGKFEAIFNATRQARQGEYDCIVLLSGGKDSTYVLARLVDMGLDVLAYTLDNGYISDQAKENIRRVVEALGVDHIFGTTPHMPAIFADSLARHSNVCNGCFKALYTLSMSLARQKRIPCIVTGLSRGQQFETRLSNFYRADDFCVDTVDRSITEARKVYHRLDDEVSRRLDVEIFRDESIFDEIQILDFYRYCDVSLDEMYSYLDTRVPWVRPSDTGRSTNCTINDVGIYIHKKQREYHNYAMPYAWDVRMGHKQRDAALQELEDEIDVDAVRQMLTEIGYDERQHSTRRTQDVLVAYFVGDGAVAEEELRAHLGHRLPVAMIPAVFVPVDEIPLTPNGKVDNTALAQISIARTGTDLDYVPPRTAVEQQLVSIWADILGLHRISVQDSFFRLGGHSLLAAQVVSRIAQDLHVELPVATLFDHVTIEELAIAIDESRSVLGVDDADVEDILAEVEGMTD

SEQ ID NO: 38395 - protein, 230 aa, unidentified
  source 1..230: note = Gemmatimonadales bacterium
  REGION 1..230: note = tr|A0A524GYG9|A0A524GYG9_9BACT 7-cyano-7-deazaguanine synthase OS=Gemmatimonadales bacterium OX=2448054 GN=queC PE=3 SV=1
MPPAPAVVLLSGGLDSATTLAIARAEGFDCHALSFRYGQRHAVELASASAVAQHLGAVSHRIIEIDPRAFGGSALTDDIPVPKDRDEAARAGGIPITYVPARNTIFLAYALGCAEVLGANDIFLGINAVDYSGYPDCRPEFVEAFERMAHLATRAGVEGHRLTIHAPLLTMGKSAIIARGLELGVDFGMTLSCYDPEADGASCGRCDACQLRLEGFQKIGRPDPARYQSA

SEQ ID NO: 38396 - protein, 234 aa, unidentified
  source 1..234: note = Gemmatimonadales bacterium
  REGION 1..234: note = tr|A0A524R2P3|A0A524R2P3_9BACT Uncharacterized protein OS=Gemmatimonadales bacterium OX=2448054; GN = E4G90_00440 PE=4 SV=1
MKTCALLFSGGLDSVSLAILLERQGLGGLEVLPVYMAHRPGGNVTKKELEAAGPLAEEITGHELLIVKAKPKGNDDWYRKLGQVCYSRRLPVSKANKKRRNRTFLKVAKDLGLDQCDRIALGVFGPSANANVPEADVCYDQLVKRTPWLKRGQLVTFESMGIFDKTAMLKAVGRGALNRGRVYASESCLMYFNTHCGECISCHQRADAFMEAWGQDKTRYRKGTYADRRKRRRR

SEQ ID NO: 38397 - protein, 32 aa, unidentified
  source 1..32: note = Gemmatimonadetes bacterium
  REGION 1..32: note = tr|A0A2V7SEA3|A0A2V7SEA3_9BACT 7-cyano-7-deazaguanine synthase (Fragment); OS = Gemmatimonadetes bacterium OX=2026742 GN=DMD36_00645; PE = 4 SV=1
MTNPKPKGIVLLSGGIDSTTTLALAQRQGFEV

SEQ ID NO: 38398 - protein, 228 aa, unidentified
  source 1..228: note = Gemmatimonadetes bacterium
  REGION 1..228: note = tr|A0A2E9MFF6|A0A2E9MFF6_9BACT 7-cyano-7-deazaguanine synthase OS=Gemmatimonadetes bacterium OX=2026742 GN=queC PE=3 SV=1
MTDTGSSPSLVLLSGGMDSTTCLWWVRANTQGPVHSVSIDYGQRHRVELEFAQQLSTLAGVATHRQIQVDLRSIGGSPLTDPDLAVPAAVEDRQTATVVPFRNLLFVTLAAGVAEVEDVHDLYIAPVRDDQAAYRDCRREFYDSLESTLGLGATKEADFRIHTPLVEYSKKRVVQLGLELGVPYELTHTCYEGRRPACGVCDACSERLAAFAAHDVDDPIDYEEQAAR

SEQ ID NO: 38399 - protein, 238 aa, Gemmatimonas aurantiaca
  REGION 1..238: note = tr|A0A3D4VC55|A0A3D4VC55_9BACT 7-cyano-7-deazaguanine synthase OS=Gemmatimonas aurantiaca; OX = 173480 GN=queC PE=3 SV=1
MTSDPHSPAPERPAVVLLSGGLDSATALAVARRDGFTPYAMTFRYGQRHAGEIEAARRVAAAQQAARHVVVDIDLRQWGGSALTSDVEVPKDRDVDEVTDEIPVTYVPARNTIFLSFALAWAETLGADAIFIGVNALDYSGYPDCRPEYVAAFETMANLATRAGVEGTQRLTIHAPLQHLTKAQIVTLGRSLGVDYSLTTSCYDPAPDGTACGHCDACQLRLRGFAEAGAADPIAYAG

SEQ ID NO: 38400 - protein, 238 aa, Gemmatimonas aurantiaca; identical to SEQ ID NO: 38399
  REGION 1..238: note = tr|C1AA81|C1AA81_GEMAT 7-cyano-7-deazaguanine synthase OS=Gemmatimonas aurantiaca (strain T-27 / DSM 14586 / JCM 11422 / NBRC 100505) OX=379066 GN=queC PE=3; SV = 1

SEQ ID NO: 38401 - protein, 243 aa, unidentified
  source 1..243: note = Gemmatimonas phototrophica
  REGION 1..243: note = tr|A0A143BM37|A0A143BM37_9BACT 7-cyano-7-deazaguanine synthase OS=Gemmatimonas phototrophica OX=1379270 GN=queC PE=3 SV=1
MTGEPNTSPAGFPATSKPAVVLLSGGLDSTTVLAVAKRDGYTPFAMTFRYGQRHSVEIDAARRVAQAMGVAKHVVVDIDLRQWGGSALTADVDVPKDRDVDHAVDEIPVTYVPARNTIFMSFALAWAEVLGADAIFIGVNALDYSGYPDCRPEYVAAFETMANLATAAGVQGTHRLRIHAPLQHLTKAQIVALGHDLGVDYSITTSCYDPAPDGTACGHCDACQLRLRGFAEAGARDPIAYAD

SEQ ID NO: 38402 - protein, 248 aa, Gemmatimonas sp.
  REGION 1..248: note = tr|A0A0S8AL39|A0A0S8AL39_9BACT 7-cyano-7-deazaguanine synthase OS=Gemmatimonas sp. SG8_28; OX = 1703357 GN=queC PE=3 SV=1
MSTRPTTRHRTRSAAPPRKAVVLLSGGVDSSTTLAIARSEGFEPYALTLAYGQRHAGEIDAARRVARSMGVAHHVVTTIDLRAFGGSALTADIAVPKDRSAAEIGEGIPVTYVPARNTIFLSFALAWAETLGARDIFIGVNALDYSGYPDCRPAFIEAFERMANLATRAGVEDGEGFRIHTPLIALSKAEIIRRGLELGVDYARTTSCYDPAPDGAACAHCDACLLRLRGFAEAGVPDPIRYREEPRP

SEQ ID NO: 38403 - protein, 237 aa, Gemmatimonas sp.
  REGION 1..237: note = tr|A0A0S7ZK38|A0A0S7ZK38_9BACT 7-cyano-7-deazaguanine synthase OS=Gemmatimonas sp. SG8_17; OX = 1703355 GN=queC PE=3 SV=1
MTDAPKAVVLLSGGLDSATTLAIAQADGFEPYALTFRYGQRHALEVAAARRVAQQLGAADHVILDIDLRTFGASALTDDIPVPKDRSEPELGGGVPVTYVPARNTIFLSFALGWAEVLRAGDIFIGVNALDYSGYPDCREEYIVAFQRMADLATRAGTEEGRRIEIHTPLIGMTKQEIVRKGVELGVDYSLTVSCYDPAPDGAACGHCDACLLRLRGFAAAGVADPIRYSAGTEIGR

SEQ ID NO: 38404 - protein, 227 aa, unidentified
  source 1..227: note = Gemmatirosa kalamazoonesis
  REGION 1..227: note = tr|W0RN93|W0RN93_9BACT 7-cyano-7-deazaguanine synthase OS=Gemmatirosa kalamazoonesis OX=861299 GN=queC; PE = 3 SV=1
MLLSGGLDSTTCLAVAVREGFAVHALSFRYGQRHAHEVDAARRIAARWGVARHVVVDIDLRVFGGSALTADIAVPKDRPAASLATDGVPITYVPARNTIFLSYALALAEVSDARDVFIGVNAYDYSGYPDCRPEYVRAFERMANLATRAGVEAAARGETALRIRTPLLDLTKADIVRLGLSLGVDYADTTSCYDPTPDGAACGHCDACQLRLKGFAEAGATDPIRYA

SEQ ID NO: 38405 - protein, 224 aa, Geoalkalibacter ferrihydriticus
  REGION 1..224: note = tr|A0A1G9MD89|A0A1G9MD89_9DELT 7-cyano-7-deazaguanine synthase OS=Geoalkalibacter ferrihydriticus OX=392333 GN=queC PE=3 SV=1
MKKAVILYSGGLDSTTCMALAGRAGFASYALSFAYGQRHSIELDKAREYAPRIGAAEHLVVEVDMRRIGGSALTAEGQVPKDGIEEGAIPVTYVPARNTLFLSFALSWAEVLGAFDIFIGVNALDYSGYPDCRPEYIAAFEQLANLATRAAVEGQGRYRIHTPLIDLTKAQIIQRGLALGVDYALTHSCYDPLPEGLACGRCDSCRLRLKGFAEAGVEDPLKYA

SEQ ID NO: 38406 - protein, 224 aa, Geoalkalibacter ferrihydriticus; identical to SEQ ID NO: 38405
  REGION 1..224: note = tr|A0A0C2EGB9|A0A0C2EGB9_9DELT 7-cyano-7-deazaguanine synthase OS=Geoalkalibacter ferrihydriticus DSM 17813 OX=1121915 GN=queC PE=3 SV=1

SEQ ID NO: 38407 - protein, 700 aa, Geoalkalibacter subterraneus
  REGION 1..700: note = tr|A0A0B5FRS1|A0A0B5FRS1_9DELT Uncharacterized protein OS=Geoalkalibacter subterraneus OX=483547; GN = GSUB_10200 PE=4 SV=1
MQDKRYIICGNAPTDGIEENPDRDLRLRLWGKDGPDKITLRIEDIHKKMSKDVPDSFQDLLEIATYVYSADQAIPRGADDVDSFGHGWRRDLHFIIPVRKPDFWNGDDIHQALRSTLGFLSDDNYHFEFVKLKEAQAFQGYLDFNDDGRLLGYPEQVVMFSGGLDSLAGAIDEVLNEKHRVVLVTHKSTPKLNKRHRRLEKMIADKAGENAPLHIGVRVNKNKGLNYEYTQRSRSFLYVSIGATIAKMLNLKSVRFYENGVISLNLPVCAQVVGGRATRTTHPRVIRGFQEIISLVAGEPFTIENPYIWKTKAGVIEVITKAGCQDMIAASTTCTHTWEMTNHHTHCGTCSQCIDRRFAMIAAKADQHDPVEDYKADIFTQSRSKDEDKIMAAAYLERANQVRDQDDITQFIARFSEVSRVFRYLNGNPGSVAQKVYDLYKRHAKEVCEAMDTMVARNITAIRQRTLPGDCLLRTVYESGSVISVPAIPVEQKQPDNYFRKRGGVWAARFNGNAEVLVTGVDKGAEYINFLLARPNKETSVYEIVCGLAINTCNTFLNSDETEDGFQVTQGVPLGDTGFVADRKAIEQYREAAHDLLREIEDARAENNAAEIQRLEEEMAKVTTAINEAVGLGGKLRKSNDKRKNIRDAFRNAVNRAITYLEKYDKPLAAHLKESIKCGNEPVYRTEEEIVWEVRPIVNE

SEQ ID NO: 38408 - protein, 224 aa, Geoalkalibacter subterraneus
  REGION 1..224: note = tr|A0A0B5FNV3|A0A0B5FNV3_9DELT 7-cyano-7-deazaguanine synthase OS=Geoalkalibacter subterraneus OX=483547 GN=queC PE=3 SV=1
MKKAVVLYSGGLDSTTCMAIARSEGFTPYALSFAYGQRHSIELQKAREYAPRIGAADHLVVEVDLRRIGGSALTTDLEVPKAGVEPDEIPVTYVPARNTVFLSFALGWAEVLGAFDIFIGVNALDYSGYPDCRPEYIASFEQTANLATRAAVQGEGRYRIHAPLIDLTKGEIIRRGMELGVDYSLTHSCYDPTPEGLACGTCDSCRLRLKGFAEAGVSDPVTYR

SEQ ID NO: 38409 - protein, 221 aa, Geobacillus galactosidasius
  REGION 1..221: note = tr|A0A226QQT5|A0A226QQT5_9BACI 7-cyano-7-deazaguanine synthase OS=Geobacillus galactosidasius OX=883812 GN=queC PE=3 SV=1
MKKEKAIVVFSGGQDSTTCLFWALKQFDEVEAVTFDYGQRHRLEIEVAASIAKELGVPHTVLDMSLLNQLAPNALTRSDIAIEQNEGQLPSTFVDGRNLLFLSFAAVLAKQKGARHLVTGVCETDFSGYPDCRDIFIKSLNVTLNLAMDYQFVIHTPLMWLTKAKTWKLADELGAFDFVRTKTLTCYNGIIADGCGECPACVLRRRGLEEYMKEKEGANQL

SEQ ID NO: 38410 - protein, 221 aa, Geobacillus kaustophilus
  REGION 1..221: note = sp|Q5L1C0|QUEC_GEOKA 7-cyano-7-deazaguanine synthase; OS = Geobacillus kaustophilus (strain HTA426) OX=235909; GN = queC PE=3 SV=2
MNEEKAVVVFSGGQDSTTCLFWAKKQFGEVEAVTFDYGQRHRREIDVAQAIADELGVRHTVLDLSLLGQLAPNALTRRDIAIEQKKGELPTTFVDGRNLLFLSFAAVFAKQRGARHIVTGVCETDFSGYPDCRDVFIKSLNVTLNLAMDYEFVIHTPLMWLTKAETWKLADELGALEFIRTKTLTCYNGIIADGCGECPACALRKRGLDEYLREKAEVESR

SEQ ID NO: 38411 - protein, 224 aa, Geobacillus kaustophilus
  REGION 1..224: note = tr|A0A0N9HMW6|A0A0N9HMW6_GEOKU 7-cyano-7-deazaguanine synthase OS=Geobacillus kaustophilus NBRC 102445 OX=1220595 GN=queC PE=3 SV=1
MMKMNEEKAVVVFSGGQDSTTCLFWAKKQFGEVEAVTFDYGQRHRREIDVAQAIADELGVRHTVLDLSLLGQLAPNALTRRDIAIEQKKGELPTTFVDGRNLLFLSFAAVFAKQRGARHIVTGVCETDFSGYPDCRDVFIKSLNVTLNLAMDYEFVIHTPLMWLTKAETWKLADELGALEFIRTKTLTCYNGIIADGCGECPACALRKRGLDDYLREKAEVESR

SEQ ID NO: 38412 - protein, 223 aa, Geobacillus lituanicus
  REGION 1..223: note = tr|A0A223DZ77|A0A223DZ77_9BACI 7-cyano-7-deazaguanine synthase OS=Geobacillus lituanicus; OX = 169283 GN=queC PE=3 SV=1
MKMKEEKAVVVFSGGQDSTTCLVWAKEQFGEVEAVTFDYGQRHRREIEVAQAIAAELGVRHTVLDMSLLGQLAPNALTRDDIAIEQKEGGLPTTFVDGRNLLFLSFAAVFAKQRGARHLVTGVCETDFSGYPDCRDVFIKSLNVTLNLAMDYEFVIHTPLMWLTKAETWKLADELGALEFIRTKTLTCYNGIIADGCGECPACVLRKRGLDDYLREKAGVEAQ

SEQ ID NO: 38413 - protein, 224 aa, unidentified
  source 1..224: note = Geobacillus proteiniphilus
  REGION 1..224: note = tr|A0A1Q5T7Q4|A0A1Q5T7Q4_9BACI 7-cyano-7-deazaguanine synthase OS=Geobacillus proteiniphilus OX=860353 GN=queC PE=3 SV=1
MMKMNEEKAVVVFSGGQDSTTCLFWAKKQFGEVEAVTFDYGQRHRREIDVAQAIADELGVRHTVLDLSLLGQLAPNALTRRDVAIEQKKGELPTTFVDGRNLLFLSFAAVFAKQRGARHIVTGVCETDFSGYPDCRDVFIKSLNVTLNLAMDYEFVIHTPLMWLTKAETWKLADELGALEFIRTKTLTCYNGIIADGCGECPACVLRKRGLDEYLREKAGDKVR

SEQ ID NO: 38414 - protein, 221 aa, Geobacillus sp.; identical to SEQ ID NO: 38409
  REGION 1..221: note = sp|C5D7Y2|QUEC_GEOSW 7-cyano-7-deazaguanine synthase; OS = Geobacillus sp. (strain WCH70) OX=471223 GN=queC PE=3; SV = 1

SEQ ID NO: 38415 - protein, 221 aa, Geobacillus sp.
  REGION 1..221: note = tr|A0A1V9B1H1|A0A1V9B1H1_9BACI 7-cyano-7-deazaguanine synthase OS=Geobacillus sp. 44B; OX = 1963023 GN=queC PE=3 SV=1
MKMEKAVVVFSGGQDSTTCLFWALKQFAEVEAVTFDYGQRHRLEIEVASAIAKELHVPHTVLDMSLLNQLAPNALTRSEIAIEQKEGQLPSTFVDGRNLLFLSFAAVLAKQKGARHLVTGVCETDFSGYPDCRDIFIKSLNVTLNLAMDYQFVIHTPLMWLTKAQTWKLADELGAFEFVRTKTLTCYNGIIADGCGECPACVLRRRGLEEYMKEKEGITQL

SEQ ID NO: 38416 - protein, 223 aa, Geobacillus stearothermophilus
  REGION 1..223: note = tr|A0A0K2HB48|A0A0K2HB48_GEOSE 7-cyano-7-deazaguanine synthase OS=Geobacillus stearothermophilus 10 OX=272567 GN=queC PE=3 SV=1
MKMNEEKAVVVFSGGQDSTTCLFWAKKQFGEVEAVTFDYGQRHRREIDVAQAIADELGVRHTVLDLSLLGQLAPNALTRRDIAIEQKEGELPTTFVDGRNLLFLSFAAVFAKQRGARHIVTGVCETDFSGYPDCRDVFIKSLNVTLNLAMDYEFVIHTPLMWLTKAETWKLADELGALEFIRTKTLTCYNGIIADGCGECPACVLRKRGLDEYLREKEGVESR

SEQ ID NO: 38417 - protein, 223 aa, Geobacillus stearothermophilus
  REGION 1..223: note = tr|A0A0K9I190|A0A0K9I190_GEOSE 7-cyano-7-deazaguanine synthase OS=Geobacillus stearothermophilus OX=1422 GN=queC PE=3 SV=1
MKMKEEKAVVVFSGGQDSTTCLVWAKEQFGEVEAVTFDYGQRHRREIEVAQAIAAELGVRHTVLDMSLLGQLAPNALTRDDIAIEQKEGELPTTFVDGRNLLFLSFAAVFAKQRGARHLVTGVCETDFSGYPDCRDVFIKSLNVTLNLAMDYEFVIHTPLMWLTKAETWKLADELGALEFIRTKTLTCYNGIIADGCGECPACVLRKRGLDDYLREKAGVEAQ

SEQ ID NO: 38418 - protein, 223 aa, Geobacillus subterraneus
  REGION 1..223: note = tr|A0A143MJQ3|A0A143MJQ3_9BACI 7-cyano-7-deazaguanine synthase OS=Geobacillus subterraneus OX=129338 GN=queC PE=3 SV=1
MKMKEEKAVVVFSGGQDSTTCLFWAKKQFAEVEAVTFDYGQRHRREIDVAASIADELGVRHTVLDMSLLGQLAPNALTRGEIAIEQKEGELPTTFVDGRNLLFLSFAAVLAKQRGARHLVTGVCETDFSGYPDCRDIFIKSLNVTLNLAMDYPFVIHTPLMWLTKAETWKLADELGALEFVRTKTLTCYNGVIADGCGECPACVLRKRGLDEYLRGKAEVEAR

SEQ ID NO: 38419 - protein, 223 aa, Geobacillus thermocatenulatus
  REGION 1..223: note = tr|A0A226Q3R2|A0A226Q3R2_9BACI 7-cyano-7-deazaguanine synthase OS=Geobacillus thermocatenulatus OX=33938 GN=queC PE=3 SV=1
MKMKEEKAVVVFSGGQDSTTCLFWAKQQFGAVEAVTFDYGQRHRREIEVAQAIAAELGVRHTVLDMSLLGQLAPNALTRDDIAIEQKEGELPTTFVDGRNLLFLSFAAVLAKQRGARHIVTGVCETDFSGYPDCRDVFIKSLNVTLNLAMDYEFVIHTPLMWLTKAETWQLADELGALEFIRTKTLTCYNGIIADGCGECPACVLRKRGLDDYLREKAGVERP

SEQ ID NO: 38420 - protein, 221 aa, Geobacillus thermodenitrificans
  REGION 1..221: note = sp|A4ILN7|QUEC_GEOTN 7-cyano-7-deazaguanine synthase; OS = Geobacillus thermodenitrificans (strain NG80-2); OX = 420246 GN=queC PE=3 SV=2
MNEEKAVVVFSGGQDSTTCLFWAKKQFAEVEAVTFDYGQRHRREIEVAASIADELGVRHTVLDMSLLGQLAPNALTRGEIAIEQKEGELPTTFVDGRNLLFLSFAAVLAKQRGARHIVTGVCETDFSGYPDCRDIFIKSLNVTLNLAMDYPFVIHTPLMWLTKAETWKLADELGALEFVRTKTLTCYNGVIADGCGECPACVLRKRGLEEYLQEKAGVKAR

SEQ ID NO: 38421 - protein, 223 aa, Geobacillus thermodenitrificans
  REGION 1..223: note = tr|A0A1W6VPZ8|A0A1W6VPZ8_GEOTD 7-cyano-7-deazaguanine synthase OS=Geobacillus thermodenitrificans OX=33940 GN=queC PE=3 SV=1
MKMNEEKAVVVFSGGQDSTTCLFWAKKQFAEVEAVTFDYGQRHRREIEVAASIADELGVRHTVLDMSLLGQLAPNALTRGEIAIEQKEGELPTTFVDGRNLLFLSFAAVLAKQRGARHIVTGVCETDFSGYPDCRDIFIKSLNVTLNLAMDYPFVIYTPLMWLTKAETWKLADELGALEFVRTKTLTCYNGVIADGCGECPACVLRKRGLEEYLQEKAGVKAR

SEQ ID NO: 38422 - protein, 224 aa, Geobacillus thermoleovorans
  REGION 1..224: note = tr|G8MYS8|G8MYS8_GEOTH 7-cyano-7-deazaguanine synthase OS=Geobacillus thermoleovorans CCB_US3_UF5; OX = 1111068 GN=queC PE=3 SV=1
MMKMNEEKAVVVFSGGQDSTTCLFWAKKQFGEVEAVTFDYGQRHRREIDVAQAIADELGVRHTVLDLSLLGQLAPNALTRRDIAIEQKKGELPTTFVDGRNLLFLSFAAVFAKQRGARHIVTGVCETDFSGYPDCRDVFIKSLNVTLNLAMDYEFVIHTPLMWLTKAETWKLADELGALEFIRTKTLTCYNGIIADGCGECPACALRKRGLDEYLREKAEVESR

SEQ ID NO: 38423 - protein, 224 aa, Geobacillus thermoleovorans; identical to SEQ ID NO: 38422
  REGION 1..224: note = tr|A0A098L5Y2|A0A098L5Y2_GEOTH 7-cyano-7-deazaguanine synthase OS=Geobacillus thermoleovorans B23 OX=1406857 GN=queC PE=3 SV=1

SEQ ID NO: 38424 - protein, 223 aa, unidentified
  source 1..223: note = Geobacillus zalihae
  REGION 1..223: note = tr|A0A1V9CQG4|A0A1V9CQG4_9BACI 7-cyano-7-deazaguanine synthase OS=Geobacillus zalihae; OX = 213419 GN=queC PE=3 SV=1
MKMNEEKAVVVFSGGQDSTTCLVWAKEQFGEVEAVTFDYGQRHRREIEVAQAIAAELGVRHTVLDMSLLGQLAPNALTRRDIAIEQKEGELPTTFVDGRNLLFLSFAAVFAKQRGARHLVTGVCETDFSGYPDCRDVFIKSLNVTLNLAMDYEFVIHTPLMWLTKAETWKLADELGALEFIRTKTLTCYNGIIADGCGECPACLLRKRGLDEYLREKAGVERP

SEQ ID NO: 38425 - protein, 228 aa, Geobacter argillaceus
  REGION 1..228: note = tr|A0A562WSW3|A0A562WSW3_9DELT 7-cyano-7-deazaguanine synthase OS=Geobacter argillaceus; OX = 345631 GN=queC PE=3 SV=1
MKKKAVVLYSGGLDSTTCMAIARIEGFEPYAISFAYGQRHSVELELAKKNARPMGAKDHLVVDFDYRRIGGSALTADIAVPKEGVGSDIPVTYVPARNTIFLSFALGWAEVLSAFDIYIGVNALDYSGYPDCRPEYIAAFEAMANLGTKAAVEGKGQYTIHTPLIHLTKAEIITRGLSLGVDYGRTHSCYDPTPEGFACGLCDSCRLRLKGFIEAGVPDPVKYVRRDT

SEQ ID NO: 38426 - protein, 225 aa, Geobacter bemidjiensis
  REGION 1..225: note = sp|B5EDQ7|QUEC_GEOBB 7-cyano-7-deazaguanine synthase; OS = Geobacter bemidjiensis (strain Bem / ATCC BAA-1014 / DSM 16622) OX=404380 GN=queC PE=3 SV=1
MQKKAVILYSGGLDSTTCLAIAKEQGFAPYALSFSYGQRHQQELEVAKLNARPMGAVDHLLVEFDLRKMGGSALTSDIEVPKEGVGEEIPVTYVPARNTIFLSFALGWAETLDCFDIFIGVNALDYSGYPDCRPEFISAYETMANLATKAGVEGKRLKIHTPLISLTKAEIIQKGLSLGVDYSKTHSCYDPAEDGAACGRCDSCRLRLKGFAEAGVTDPVKYQKL

SEQ ID NO: 38427 - protein, 229 aa, Geobacter daltonii
  REGION 1..229: note = sp|B9M0M7|QUEC_GEODF 7-cyano-7-deazaguanine synthase; OS = Geobacter daltonii (strain DSM 22248 / JCM 15807 / FRC-32) OX=316067 GN=queC PE=3 SV=1
MKKKAVILYSGGLDSTTCMAIAREEGFEPYAMSFDYGQRHSVELATAKANAKTMGASEHLVVSFDLRKVGGSALTADLDVPKEGIGAGIPVTYVPARNTIFLSFALGWAEVLGAFDIFIGVNALDYSGYPDCRPEYIAAFEATANLATRAGVEGTGRFVIHAPLIAMTKAEIIRKGLALGVDYGRTHSCYDPTPEGLACGLCDSCRLRLKGFAEAGVTDPVPYAVRSKK

SEQ ID NO: 38428 - protein, 196 aa, Geobacter daltonii
  REGION 1..196: note = tr|B9M1I5|B9M1I5_GEODF 7-cyano-7-deazaguanine synthase OS=Geobacter daltonii (strain DSM 22248 / JCM 15807 / FRC-32) OX=316067 GN=Geob_2717 PE=3 SV=1
MSIVTLVSGGLDSTLIAKLAQEEGLIQHPLFVDYGQRARDQELAACRRGMSELGLPEPRVADLSGFGALIHSGLTDSSLDIVKDAFTPGRNMLFLLIAAAYAVQVKADAISIGLLHESTSLFPDQTSAFLRDAEVLIRRCMNRDIKLLAPLASFLKTDVVALAKLKRIGATYSCHTGNEETCGTCIACREFETVEV

SEQ ID NO: 38429 - protein, 223 aa, Geobacter lovleyi
  REGION 1..223: note = tr|B3E749|B3E749_GEOLS 7-cyano-7-deazaguanine synthase OS=Geobacter lovleyi (strain ATCC BAA-1151 / DSM 17278 / SZ) OX=398767 GN=queC PE=3 SV=1
MRKAVILYSSGLDSTTCLAIARDQGFAPYAISFDYGQRHRHELDLARANARKLGAVEHLVVAFDLRQVGGSALTSEIDVPKEGVADDIPVTYVPARNTIFLSFALGWAEVLGAYDIFIGVNALDYSGYPDCRPEYIDAYQRMANLATKAGVEGTGHFTIHTPLINLTKAEIIKQGTALGVDYSQTHSCYDPTPDGLSCGQCDSCRLRLKGFSEAGLRDPLRYA

SEQ ID NO: 38430 - protein, 237 aa, Geobacter metallireducens
  REGION 1..237: note = sp|Q39R35|QUEC_GEOMG 7-cyano-7-deazaguanine synthase; OS = Geobacter metallireducens (strain GS-15 / ATCC 53774 / DSM 7210) OX=269799 GN=queC PE=3 SV=1
MHKKAVVLYSGGLDSTTCLAIARAEGYEPYAMSFSYGQRHSVELEQAKRNARPMGAVDHLVVEFDYRQVGGSALTSDIAVPKEGVGSDIPVTYVPARNTVFLSFALGWAEVLGAFDIFIGVNALDYSGYPDCRPEYIAAFEAMANLATKAGVEGKGRFRIHTPLIHLTKAEIIRKGLSLGVDYGRTHSCYDPTPEGLACGLCDSCRLRLKGFAEAGVADPVAYATIKNPEVRSQESE

SEQ ID NO: 38431 - protein, 225 aa, Geobacter pelophilus
  REGION 1..225: note = tr|A0A1W7QXN8|A0A1W7QXN8_9DELT 7-cyano-7-deazaguanine synthase OS=Geobacter pelophilus; OX = 60036 GN=queC PE=3 SV=1
MQKKAVILYSGGLDSTTCLAIAKEQGFAPYALSFSYGQRHQQELEVAKRNARPMGAVDHLLVEFDLRKMGGSALTSDIEVPKEGVGEEIPVTYVPARNTIFLSFALGWAETLDCFDIFIGVNALDYSGYPDCRPEFIAAYETMANLATKAGVEGRRLKIHTPLISLTKAEIIQKGLSLGVDYSRTHSCYDPAEDGAACGRCDSCRLRLKGFTEAGVTDPVRYQKF

SEQ ID NO: 38432 - protein, 226 aa, Geobacter pickeringii
  REGION 1..226: note = tr|A0A0B5BGM0|A0A0B5BGM0_9DELT 7-cyano-7-deazaguanine synthase OS=Geobacter pickeringii; OX = 345632 GN=queC PE=3 SV=1
MSKKAVVLYSGGLDSTTCLAIARTEGFEPYAMSFSYGQRHTHELEVAKANARPLGAVDHMVVEFDLRKVGGSALTADIAVPKEGVGDEIPVTYVPARNTIFLSFALGWAEVLGAFDIFIGVNALDYSGYPDCRPAYITAYETMANLATRAGVEGMGRFQIHTPLISLTKAEIIRKGLELGVDYGRTHSCYDPTPEGFACGLCDSCRLRLKGFAEAGVADPVPYVTR

SEQ ID NO: 38433 - protein, 237 aa, unidentified
  source 1..237: note = Geobacter soli
  REGION 1..237: note = tr|A0A0C1QSD9|A0A0C1QSD9_9DELT 7-cyano-7-deazaguanine synthase OS=Geobacter soli; OX = 1510391 GN=queC PE=3 SV=1
MTRKAVVLYSGGLDSTTCLAIARAEGFEPHAMSFSYGQRHSVELELAKRNARPAGAVEHMVVEFDLRKVGGSALTADIAVPKEGVGDDIPVTYVPARNTIFLSFALGWAEVLGAFDIFIGVNALDYSGYPDCRPDYISAFETMANLATRAGVEGTDRFRIHAPLMSLTKAEIIRKGLALGVDYGLTHSCYDPSPAGVACGLCDSCRLRLKGFAEAGVADPVNYATVDQGTGAGKETA

SEQ ID NO: 38434 - protein, 380 aa, Geobacter sp.
  REGION 1..380: note = tr|A0A212PDU7|A0A212PDU7_9DELT N-acetyl sugar amidotransferase OS=Geobacter sp. DSM 9736 OX=1277350; GN = SAMN06269301_0452 PE=4 SV=1
MNARNQLTREYRICSRCVMDTSDRGILFDENGVCNHCHNYEIISKRVLLPPEIAQEKLLQIIEKIKRDGEKQEYDCIIGLSGGIDSSYLALQAKNFGLRPLAVHFDNGWNSEISVKNIENIVKKLGFDLFTYVIDWEEFKDLQRSFFKASVVDIELLTDNAIFTSLYKLARQHKIKYSLEGHNIVTESIMGKDWNYWKFDLKNIKAIQKEFGTLKIKSFPTMGPWKRLFLQVMKIIEPVYILNFLEYDKKKAMETLEKELEWKYYGGKHYESVFTKFYQAYVLPTKFGIDKRRAHLSNLICSGQLTREEAVVELEREIYPQDELRKDKEYVVKKLGFSEEEFDDIMQQSPKSHMDYPNDWESYHRIVDSIKNLKCSVRRR

SEQ ID NO: 38435 - protein, 225 aa, Geobacter sp.
  REGION 1..225: note = sp|C6E7E7|QUEC_GEOSM 7-cyano-7-deazaguanine synthase; OS = Geobacter sp. (strain M21) OX=443144 GN=queC PE=3 SV=1
MQKKAVILYSGGLDSTTCLAIAKKQGFAPYALSFSYGQRHQQELEVAKLNARPMGAVDHLLVEFDLRKMGGSALTSDIEVPKEGVGEEIPVTYVPARNTIFLSFALGWAETLDCFDIFIGVNALDYSGYPDCRPEFISAYETMANLATKAGVEGKRLQIHTPLISLTKAEIIQKGISLGVDYSKTHSCYDPAEDGAACGRCDSCRLRLKGFAEAGVTDPVRYQKL

SEQ ID NO: 38436 - protein, 237 aa, Geobacter sulfurreducens
  REGION 1..237: note = sp|Q74FW9|QUEC_GEOSL 7-cyano-7-deazaguanine synthase; OS = Geobacter sulfurreducens (strain ATCC 51573 / DSM 12127 / PCA) OX=243231 GN=queC PE=3 SV=1
MTRKAVVLYSGGLDSTTCLAIARAEGFEPHAMSFSYGQRHSVELELAKRNARPAGAVEHMVVEFDLRKVGGSALTADIAVPKEGVGDDIPVTYVPARNTIFLSFALGWAEVLGAFDIFIGVNALDYSGYPDCRPEYISAFETMANLATRVGVEGTGRFRIHAPLMRLTKAEIIRKGLALGVDYGLTHSCYDPSPAGVACGLCDSCRLRLKGFAEVGVADPVPYVTGGQGLGGGKETP

SEQ ID NO: 38437 - protein, 237 aa, Geobacter sulfurreducens
  REGION 1..237: note = tr|A0A2Z5SS05|A0A2Z5SS05_GEOSN 7-cyano-7-deazaguanine synthase OS=Geobacter sulfurreducens OX=35554 GN=queC PE=3 SV=1
MTRKAVVLYSGGLDSTTCLAIARAEGFEPHAMSFSYGQRHSVELELAKKNARPAGAVEHMVVEFDLRKVGGSALTADIAVPKKGVGDDIPVTYVPARNTIFLSFALGWAEVLGAFDIFIGVNALDYSGYPDCRPEYISAYETMANLATRAGVEGTGRFRIHAPLMRLTKAEIIRKGLVLGVDYGLTHSCYDPTPAGVACGLCDSCRLRLKGFAEVGVADPVPYVTGGQGLGGGKETP

SEQ ID NO: 38438 - protein, 223 aa, Geobacter thiogenes
  REGION 1..223: note = tr|A0A1T4PPZ9|A0A1T4PPZ9_9DELT 7-cyano-7-deazaguanine synthase OS=Geobacter thiogenes; OX = 115783 GN=queC PE=3 SV=1
MRKAVILYSSGLDSTTCLAIAQDQGFTPYAISFDYGQRHRHELDLARANAKKLGAVEHLVVAFDLRQVGGSALTSEIEVPKEGVGNDIPVTYVPARNTIFLSFALGWAEVLGAYDIFIGVNALDYSGYPDCRPEYIEAYQRMANLATKAGVEGTGHFTIHTPLINLTKAEIIKQGTALGVDYSQTHSCYDPTPEGLSCGTCDSCRLRLKGFSEAGLSDPLRYA

SEQ ID NO: 38439 - protein, 228 aa, Geobacter uraniireducens
  REGION 1..228: note = sp|A5G8S2|QUEC_GEOUR 7-cyano-7-deazaguanine synthase; OS = Geobacter uraniireducens (strain Rf4) OX=351605 GN=queC; PE = 3 SV=1
MPKKAVILYSGGLDSTTCMAIAKAEGFEPYAMSFAYGQRHKAELELAKGNAKPMGAVEHMVVEFDLRKMGGSALTAEIDVPKEGVGNDIPVTYVPARNTIFLSFALGWAETLGAFDIFIGVNALDYSGYPDCRPEYIAAFETMANLATKAGVEGAGRFTIHTPLIHLTKAEIIRKGLSLGVDYGRTHSCYDPTADELACGRCDSCRLRLKGFAEAGMTDPVKYVKGEK

SEQ ID NO: 38440 - protein, 224 aa, unidentified
  source 1..224: note = Geobacteraceae bacterium
  REGION 1..224: note = tr|A0A1G0LT63|A0A1G0LT63_9DELT 7-cyano-7-deazaguanine synthase OS=Geobacteraceae bacterium GWC2_55_20 OX=1798317 GN=queC PE=3 SV=1
MQQKAVVLYSGGLDSSTCMAMAAAEGFTPYAISFSYGQRHGHELTVAKANAVRLGAAEHLVVDFDLRLMGGSALTAEIDVPKQGVGNDIPVTYVPARNTIFLSFALGWAEVLGAADIYIGVNALDYSGYPDCRPEYIEAYQKMANLATRAGVEGTSRFKIHTPLISMTKAGIIKAGLALGVDYSLTHSCYDPTPTGLSCGECDSCRLRLKGFAEAGLKDPLQYS

SEQ ID NO: 38441 - protein, 224 aa, unidentified
  source 1..224: note = Geobacteraceae bacterium
  REGION 1..224: note = tr|A0A1G0MGJ6|A0A1G0MGJ6_9DELT 7-cyano-7-deazaguanine synthase OS=Geobacteraceae bacterium GWC2_58_44 OX=1798318 GN=queC PE=3 SV=1
MQKKAVILYSGGLDSTTCLAIAREQGYAPYALSFSYGQRHQQELEVAKRNARPMGALDHLLVEFDLRKIGGSALTSDIAVPKDGVEDEIPVTYVPARNTIFLSFALGWAETLGSFDIFIGVNALDYSGYPDCRPEFIAAYEAMANLATKAGVEGRERMKIHTPLISLSKADIIRKGLSLGVDYSLTHSCYDPAEDGAACGLCDSCRLRLKGFAEAGVVDPVRYA

SEQ ID NO: 38442 - protein, 230 aa, unidentified
  source 1..230: note = Geodermatophilus aquaeductus
  REGION 1..230: note = tr|A0A521EYC3|A0A521EYC3_9ACTN 7-cyano-7-deazaguanine synthase OS=Geodermatophilus aquaeductus OX=1564161 GN=queC PE=3 SV=1
MSKPAVVLLSGGLDSTTVLAIARDRGFEPCALSFDYGQKHEVELRSASAVAAAMGVKRHEVLHVGLSEFGGSSLTDDAMEVPVGRTHDDIGEGIPSTYVPARNTVFLACALGYAEVLGAEHIFIGVNALDYSGYPDCRPEFIEAFERLANLATAAAVEGRQHISVHAPLMTMTKADIVREGTRLGVDYSMTVSCYRADERGSCGECDSCTLRLRGFAEAGLVDPTPYWPR

SEQ ID NO: 38443 - protein, 224 aa, Geofilum rubicundum
  REGION 1..224: note = tr|A0A0E9M213|A0A0E9M213_9BACT 7-cyano-7-deazaguanine synthase OS=Geofilum rubicundum JCM 15548 OX=1236989 GN=queC PE=3 SV=1
MKRAVVLLSGGLDSAVALWLAKSEGYELYTLSFDYGQRHNKEIMAAAKIAELAEVKSHRLVTINMDQWGGSSLTDKSMEVEDGDVDRTDIPVTYVPARNMVFLSIAASFAEAVEAQNIFIGVSQVDYSGYVDCRETFITAMENAINQGTVMAAEHHKPIKVHAPFIYKTKTEEILLGAQLGVPFEHTWSCYRGGEKPCGTCDSCLLRAKAFREAGVIDGAADQQ

SEQ ID NO: 38444 - protein, 220 aa, Geomicrobium sp.
  REGION 1..220: note = tr|A0A061N783|A0A061N783_9BACL 7-cyano-7-deazaguanine synthase OS=Geomicrobium sp. JCM 19055 OX=1460649 GN=queC PE=3 SV=1
MKRDKAVVVFSGGQDSTTCLFWALERFETVYAVTFSYGQRHSQEVEVAKSIANDVGVEHHVLDMDLLNQLAPNALTRSDIEVTDGGEGELPSTFVPGRNLLFLTFATIFGQQRGAFDIITGVCETDYSGYPDCRDGFVKSLNVTLNLAIDNTFVIHTPLMWLDKEATWKLADDLGKLDYVRERTLTCYHGVQGDGCGECPACELRMQGLQKYLDHKGRDD

SEQ ID NO: 38445 - protein, 220 aa, Geomicrobium sp.
  REGION 1..220: note = tr|A0A061NHS2|A0A061NHS2_9BACL 7-cyano-7-deazaguanine synthase OS=Geomicrobium sp. JCM 19037 OX=1460634 GN=queC PE=3 SV=1
MKREKAVVVFSGGQDSTTCLFWALERFETVYAVTFAYGQRHSEELNVAKAIAKDVGVEHHILDMDLLNQLAPNALTRSDIDVTDGGEGELPSTFVPGRNLLFLTFATIFGQQRGANHIITGVCETDYSGYPDCRDGFVKSLNVTLNLAIDDTFVIHTPLMWLDKEATWKLADDLGRLDYVRERTLTCYHGVQGDGCGECPACELRQLGLNKYLERKGSDR

SEQ ID NO: 38446 - protein, 225 aa, unidentified
  source 1..225: note = Geomonas terrae
  REGION 1..225: note = tr|A0A4S1CMG8|A0A4S1CMG8_9DELT 7-cyano-7-deazaguanine synthase OS=Geomonas terrae; OX = 2562681 GN=queC PE=3 SV=1
MKKKAVILYSGGLDSTTCMAIARHQGFEPYAMSFSYGQRHQHELAVCKQNARPMGAVDHMLVEFDLRMMGGSALTSDIAVPKEGVGEEIPVTYVPARNTIFLSFALGWAETLGAFDIFIGVNALDYSGYPDCRPEYIAAYETMANLATKAGVEGKKMTIHTPLISLSKAEIIRTGLTLGVDYGKTHSCYDPTEDGASCGLCDSCRLRLKGFAELGVTDPVRYAKR

SEQ ID NO: 38447 - protein, 254 aa, Georgenia sp.
  REGION 1..254: note = tr|A0A5B8AW61|A0A5B8AW61_9MICO Uncharacterized protein OS=Georgenia sp. Z294 OX=2585135 GN=FE251_11460; PE = 4 SV=1
MTAAANVLWTAGWDSTYRVADLVFTYRKPVRPHYVKDWRRASTRLEMLRQQEIREEIARIDPDAARLLLPTVVHHYDDIPADPAARKQHEGARQLGFLGTQYLFLTAMARSSGLTNLEIVAHRDDNAVRLLEGNVRFQDDDAGGYHELVPQPTKPALELFRPFRFPVFDMTKIEMGERAAAAGFGQVMELTWFCHYPTLGGKPCGVCNPCRYTREEGLGRRVPGATRARLVAHMVNRKTGAVARRIGHKIGRCT

SEQ ID NO: 38448 - protein, 229 aa, Geothermobacter ehrlichii
  REGION 1..229: note = tr|A0A5D3WGT5|A0A5D3WGT5_9DELT 7-cyano-7-deazaguanine synthase OS=Geothermobacter ehrlichii OX=213224 GN=queC PE=3 SV=1
MKKKAVVLYSGGLDSTTCLAIARDQGFAPHALSFSYGQRHTVELEKARRYAPLVGAVEHRVVDIDLRAFGGSALTDAIEVPKDRPLEAGIPVTYVPARNTIFLSFALAWAEVLGAFDIFIGVNALDYSGYPDCRPDYIAAWERLANLATAAAVEGKGRYRIHAPLLHLSKAEIIRRGLELGVDYGLTHSCYDPDPQGRACGRCDSCRLRLKGFAEAGAEDPVAYLRQDQ

SEQ ID NO: 38449 - protein, 225 aa, Geothermobacter sp.
  REGION 1..225: note = tr|A0A1X0XZG3|A0A1X0XZG3_9DELT 7-cyano-7-deazaguanine synthase OS=Geothermobacter sp. EPR-M OX=1969733 GN=queC PE=3 SV=1
MKKKAVVLYSGGLDSTTCLAIARDQGFAPYALSFAYGQRHTVELEKAKTYAPQIGAVAHRVADIDLRAFGGSALTADIEVPKDRPLDEEIPVTYVPARNTIFLSFALGWAEVLGAFDIFIGVNALDYSGYPDCRPEYIAAWQKLANLATAAAVEGKGEYRIHSPLLELTKADIIRRGLDLGVDYSLTHSCYDPTPEGLACGRCDSCRLRLKGFAEVGLQDPVAYA

SEQ ID NO: 38450 - protein, 225 aa, Geothermobacter sp.
  REGION 1..225: note = tr|A0A2K2HAT9|A0A2K2HAT9_9DELT 7-cyano-7-deazaguanine synthase OS=Geothermobacter sp. HR-1 OX=654845 GN=queC PE=3 SV=1
MKKKAVVLYSGGLDSTTCLAIARDQGFAPYALSFAYGQRHTVELEKAKTYAPQIGAVAHQVADIDLRAFGGSALTADIEVPKDRPLDEEIPVTYVPARNTIFLSFALGWAEVLGAFDIFIGVNALDYSGYPDCRPEYIAAWQKLANLATAAAVEGKGEYRIHSPLLELTKADIIRRGLDLGVDYSLTHSCYDPTPEGLACGRCDSCRLRLKGFAEVGLQDPVAYA

SEQ ID NO: 38451 - protein, 224 aa, Geovibrio thiophilus
  REGION 1..224: note = tr|A0A3R5YZC4|A0A3R5YZC4_9BACT 7-cyano-7-deazaguanine synthase OS=Geovibrio thiophilus; OX = 139438 GN=queC PE=3 SV=1
MSKKKAVVLVSGGMDSCVTAAVAAQNYEPCFLHVNYGQKTENRESKAFEALCLAYGIKRKLVVDISYLREIGGSSLTDDAIEVEEGELDRQGIPKTYVPFRNANILSIAASWAEVLEASAIFIGAVEEDGSGYPDCRRVFYDAFEAAIDAGTRPETKIKIETPLISMKKCDIVKLGKELGAPLELSWSCYKSEDEACGECDSCLLRLRGFKQAGYEDPIPYKKR

SEQ ID NO: 38452 - protein, 232 aa, Gibbsiella quercinecans
  REGION 1..232: note = tr|A0A250AYQ6|A0A250AYQ6_9ENTR 7-cyano-7-deazaguanine synthase OS=Gibbsiella quercinecans; OX = 929813 GN=queC PE=3 SV=1
MKRAVVVFSGGQDSTTCLIQALQHYDEVHCITFDYGQRHRAEIEVAQRLAHRLGAKAHKVLDVNLLNELAISSLTRDNIPVPAYGSEQPDALPSTFVPGRNILFLTLAAIYAYQVEAEAVITGVCETDFSGYPDCRDAFVKALNHAVVLGIARDIRFETPLMWLNKAETWALADYYHQLALVRQETLTCYNGIQGDGCGECAACNLRANGLRQYQENQAAVLASLKQKAGLA

SEQ ID NO: 38453 - protein, 235 aa, Giesbergeria anulus
  REGION 1..235: note = tr|A0A1H9RU43|A0A1H9RU43_9BURK 7-cyano-7-deazaguanine synthase OS=Giesbergeria anulus; OX = 180197 GN=queC PE=3 SV=1
MRDGKALVLFSGGQDSTTCLAWALEQFAHVETIGFDYGQRHQVELQARQDVLQALRAQFPHWGARLGEDHMVDLAVLGQISDTALTRDTEIAMTAAGLPNTFVPGRNLLFFQLAAAVGYRRGLHILVGGMCETDFSGYPDCRDDTIKALQVAVSLGMGQRFTFETPLMWLDKEQTWALAQTLGGTALIDILIEQSHTCYHGTRELRHPWGYGCGHCPACALRQRGFESWQAALNS

SEQ ID NO: 38454 - protein, 421 aa, Giesbergeria anulus
  REGION 1..421: note = tr|A0A1H9RHR9|A0A1H9RHR9_9BURK Queuosine biosynthesis protein QueC OS=Giesbergeria anulus OX=180197; GN = SAMN02982919_02884 PE=4 SV=1
MMKVLCTSIDHLPATLADGERAFTLFKSAKRAGIGTIAKGWRGSLRRKGFAPSAQTWDFVQFCLSACAADLCCPRNTSADGWTRTIELTVALHEPLRWTPWKVHAEALLKVLTGDYWTLNFVDGGVAPPNGKPQPLVHDCVSLLSGGLDSLVGGINLVSEGRRPAFVSQLAHEDSERQRRYAAMLGGGATHMQWSHGISFSGRREPSTRGRSLAFYAFAVLAASRIAGAPVQVFIPENGLICINPPLVPGRVASLSTRTTHPLFIAKLQELLDGLNIGVHLELPYQFKTKGEMLQECADQALLSNVASDSTSCGRYRTYNRIHCGRCVPCMIRRAAFLAWGPGRDATQYVYQSVVGSDKSSGPDDPMAAALAVLLAKEKGLNRFLGGTLAFASLAERPAYRRVLQAGFDELENLLRGDGLL

SEQ ID NO: 38455 - protein, 218 aa, unidentified
  source 1..218: note = Gilliamella apicola
  REGION 1..218: note = tr|A0A1B9MZ20|A0A1B9MZ20_9GAMM 7-cyano-7-deazaguanine synthase OS=Gilliamella apicola; OX = 1196095 GN=queC PE=3 SV=1
MQTRKALVIFSGGQDSTTCLLQAITDYGRENVETISFQYGQRHAIELEKAKWIAEDLGVKQTVVDTSVIKQTTNNALIDDSQKITAAKEGDYPNTFVDGRNMLFLLLAGCHAKQHGISDIIIGVCETDFSGYPDCRDIFIKSMNVSMNLAMDYNFNLITPLMYLTKAQTWEMADKLGYLGYVRDHTHTCYYGIDGGCGKCPSCILRDKGLTEYLNHSN

SEQ ID NO: 38456 - protein, 217 aa, unidentified
  source 1..217: note = Gilliamella apicola
  REGION 1..217: note = tr|A0A081Y0T1|A0A081Y0T1_9GAMM 7-cyano-7-deazaguanine synthase OS=Gilliamella apicola SCGC AB-598-B02 OX=1445513 GN=queC PE=3 SV=1
MKNRKALVIFSGGQDSTTCLLQAIADYGLENVETISFQYGQRHSIELDKAKWIAEDLGVKQTVIDTSVIKQTTNNALIDDSQEIKAAQDGDYPNTFVDGRNMLFLLLAGCYAKQQDIQDIIIGVCETDFSGYPDCRDIFIKSMNVSMNLAMDYAFNIKTPLMYLTKAQTWEMADKLGYLDYVRQNTHTCYYGVEGGCGKCPSCMLRDKGLQEYLAKT

SEQ ID NO: 38457 - protein, 218 aa, unidentified
  source 1..218: note = Gilliamella apis
  REGION 1..218: note = tr|A0A242P8H5|A0A242P8H5_9GAMM 7-cyano-7-deazaguanine synthase OS=Gilliamella apis; OX = 1970738 GN=queC PE=3 SV=1
MQNRKALVIFSGGQDSTTCLLQAIADYGRENVETISFQYGQRHAIELKKAKWIAEDLGVKQTVIDTSVIKQTTNNALIDDSQEIKAAKEGDYPNTFVDGRNMLFLLLAGCYAKQQDICDIIIGVCETDFSGYPDCRDIFIKSMNVSMNLAMDYNFNLITPLMYLTKAQTWEMADKLGYLDYVRKYTHTCYYGVDGGCGKCPSCILREKGLNEYFNHSN

SEQ ID NO: 38458 - protein, 218 aa, unidentified
  source 1..218: note = Gilliamella apis
  REGION 1..218: note = tr|A0A242NV39|A0A242NV39_9GAMM 7-cyano-7-deazaguanine synthase OS=Gilliamella apis; OX = 1970738 GN=queC PE=3 SV=1
MQNRKALVIFSGGQDSTTCLLQAIADYGRENVETISFQYGQRHAIELEKAKWIAEDLGVKQTVIDTSVIKQTTNNALIDDSQEIKAAKEGDYPNTFVDGRNMLFLLLAGCYAKQQDICDIIIGVCETDFSGYPDCRDIFIKSMNVSMNLAMDYNFNLITPLMYLTKAQTWEMADKLGYLDYVRKYTHTCYYGVDGGCGKCPSCILREKGLNEYLNHSN

SEQ ID NO: 38459 - protein, 218 aa, unidentified
  source 1..218: note = Gilliamella bombicola
  REGION 1..218: note = tr|A0A1C3YNQ5|A0A1C3YNQ5_9GAMM 7-cyano-7-deazaguanine synthase OS=Gilliamella bombicola; OX = 1798182 GN=queC PE=3 SV=1
MQTRKALVIFSGGQDSTTCLLQAIADYGRENVQAISFHYGQRHAIELEKAKWIAKDLGIKQTVIDTSVIKQTTNNALIDDSQEIQAAQDGDYPNTFVDGRNMLFLLLAGCHAKQQGIADIIIGVCETDFSGYPDCRDIFIKSMNVSMNLAMDYAFNLITPLMYLTKAQTWEMADKLGYLDYVQQHTHTCYYGVDGGCGKCPSCLLRDKGLQEYMARAR

SEQ ID NO: 38460 - protein, 218 aa, unidentified
  source 1..218: note = Gilliamella intestini
  REGION 1..218: note = tr|A0A1C3YXE4|A0A1C3YXE4_9GAMM 7-cyano-7-deazaguanine synthase OS=Gilliamella intestini; OX = 1798183 GN=queC PE=3 SV=1
MQTRKALVIFSGGQDSTTCLLQAIADYGRENVQAISFHYGQRHAIELEKAKWIADDLGIEQTVIDTSVIKQTTNNALIDDAQEIKAAQDGDYPNTFVDGRNMLFLLLAGCHAKQQGISDIIIGVCETDFSGYPDCRDVFIKSMNVSMNLAMDYTFNLITPLMYLTKAQTWEMADKLGYLDYVQKHTHTCYYGVEGGCGKCPSCLLRNKGLQEYMAQDK

SEQ ID NO: 38461 - protein, 218 aa, unidentified
  source 1..218: note = Gilliamella sp.
  REGION 1..218: note = tr|A0A242PFD8|A0A242PFD8_9GAMM 7-cyano-7-deazaguanine synthase OS=Gilliamella sp. N-G2; OX = 1970471 GN=queC PE=3 SV=1
MQNRKALVIFSGGQDSTTCLLQAIADYGRENVETISFQYGQRHVIELEKAKWIAEDLGVKQTVIDTSVIKQTTNNALIDDSQEIKAAKEGDYPNTFVDGRNMLFLLLAGCYAKQQGIPNVIIGVCETDFSGYPDCRDIFIKSMNVSMNLAMDYNFNLITPLMYLTKAQTWEIADKLGCLAYVRKHTHTCYYGVDGGCGQCPSCILREKGLNEYLNHSN

SEQ ID NO: 38462 - protein, 218 aa, unidentified
  source 1..218: note = Gilliamella sp.
  REGION 1..218: note = tr|A0A242P1P2|A0A242P1P2_9GAMM 7-cyano-7-deazaguanine synthase OS=Gilliamella sp. A7; OX = 1970465 GN=queC PE=3 SV=1
MQNRKALVIFSGGQDSTTCLLQAIADYGRENVETISFQYGQRHAIELEKAKWIAEDLGVKQTVIDTSVIKQTTNNALIDDSQEITATKETDYPNTFVDGRNMLFLLLAGCYAKQHDICDIIIGVCETDFSGYPDCRDIFIKSMNVSMNLAMDYHFNIITPLMYLTKAQTWEIADKLGYLDYVRKYTHTCYYGVDGGCGKCPSCILRDKGLTDYLRHSN

SEQ ID NO: 38463 - protein, 233 aa, unidentified
  source 1..233: note = Gimesia maris
  REGION 1..233: note = tr|A0A3D3R5A2|A0A3D3R5A2_9PLAN 7-cyano-7-deazaguanine synthase OS=Gimesia maris OX=122; GN = queC PE=3 SV=1
MTTEVPKAVVLVSGGLDSATTLAIAADAGFELYALSFDYGQRHRHELEAAKKVCQAFDVKKFVIFPLDLRVFGGSALTADIDVPKDRSEHDLETGIPITYVPARNTVFLSLALAWAETLNAYDLFIGVNAVDYSGYPDCRPEFISAFQTVASLATKTGVEHSGHWKIHTPLISLKKADIIKTGMELGVDYGLTHSCYDPLSDGTPCGHCDSCQLRAKGFAEAGFADPALKADR

SEQ ID NO: 38464 - protein, 233 aa, unidentified
  source 1..233: note = Gimesia maris
  REGION 1..233: note = tr|A6C4N4|A6C4N4_9PLAN 7-cyano-7-deazaguanine synthase OS=Gimesia maris DSM 8797 OX=344747 GN=queC PE=3; SV = 1
MTTEVPKAVVLVSGGLDSATTLAIAADAGFELYALSFDYGQRHRHELEAAKKVCQAFDVKKFVIFPLDLRVFGGSALTADIDVPKDRSEHDLETGIPITYVPARNTVFLSLALAWAETLNAYDLFIGVNAVDYSGYPDCRPEFISAFQTVASLATKTGVEHSGHWKIHTPLISLKKADIIKTGMELGVDYGLTHSCYDPLPDGTPCGHCDSCQLRAKGFAEAGFADPALKADS

SEQ ID NO: 38465 - protein, 232 aa, unidentified
  source 1..232: note = Gimesia sp.
  REGION 1..232: note = tr|A0A2E2C107|A0A2E2C107_9PLAN 7-cyano-7-deazaguanine synthase OS=Gimesia sp. OX=2024833; GN = queC PE=3 SV=1
MTTVAPKAVVLVSGGLDSATTLAIAAHAGFELYALSFDYGQRHRQELEAAKKVCQAFDVKKFVTFPLDLRVFGGSALTADIDVPKDRTEHDLETGIPITYVPARNTVFLSIALAWAETLNAYDLFIGVNAVDYSGYPDCRPEFISAFQTVASLATKTGVEHSGHWKIHTPLISLTKADIIRTGMELGVDYGLTHSCYDPLPDGTPCGHCDSCQLRIKGFQEAGFADPALKTD

SEQ ID NO: 38466 - protein, 231 aa, unidentified
  source 1..231: note = Gimesia sp.
  REGION 1..231: note = tr|A0A2E7KIH8|A0A2E7KIH8_9PLAN 7-cyano-7-deazaguanine synthase OS=Gimesia sp. OX=2024833; GN = queC PE=3 SV=1
MSSAAPRAVVLVSGGLDSATTLAIAADAGFELYALSFDYGQRHRHELDAAKKVCQAFDAQHFVTFPLDLRVFGGSALTADIEVPKDRSDDDLEAGIPITYVPARNTVFLSLALAWAETLNAFDLFIGVNAVDYSGYPDCRPEFIESFEKMANLATKSGVEHSGTWKVHTPLISLTKAEIIQKGMELGVDYGLTHSCYDPLPDGTPCGHCDSCQLRAKGFAEAGFDDPALKS

SEQ ID NO: 38467 - protein, 219 aa, Glaciecola nitratireducens
  REGION 1..219: note = tr|G4QKN8|G4QKN8_GLANF 7-cyano-7-deazaguanine synthase OS=Glaciecola nitratireducens (strain JCM 12485 / KCTC 12276 / FR1064) OX=1085623 GN=queC PE=3 SV=1
MSAKVVVIYSGGMDSYTVLNKAMQQGYDVHAVSFNYGQRHSKELLFAKKVCEQHKIEHKIVDISSINQLIGGSALTDDIDVPEGHYEEESMKTTVVPNRNMIMLSMAVGYAVSIEAEAVYFGAHSGDHAIYPDCRTEFVDAMNDVCKIANYQAVEVRAPYLAASKIDILRDGLAMNLDYADTWTCYNGQERACGRCGACQERLEAFAENNTVDPIAYQD

SEQ ID NO: 38468 - protein, 219 aa, Glaciecola pallidula
  REGION 1..219: note = tr|K7A4G3|K7A4G3_9ALTE 7-cyano-7-deazaguanine synthase OS=Glaciecola pallidula DSM 14239 = ACAM 615; OX = 1121922 GN=queC PE=3 SV=1
MSAKVVVIYSGGMDSYTVLNKAMQQGYDVHAVSFNYGQRHSKELLFAKKVCEQHNIEHKVVDISSINQLIGGSALTDDIDVPQGHYQEESMKTTVVPNRNMIMLSMAVGYAVSIEAEAVYFGAHSGDHAIYPDCRTEFVDAMNDVCKIANYQAVEVRAPYLAASKTDILREGLAMDLDYNDTWTCYNGQDKACGKCGACQERLEAFSENNTIDPIDYQN

SEQ ID NO: 38469 - protein, 219 aa, Glaciecola punicea
  REGION 1..219: note = tr|H5T8R2|H5T8R2_9ALTE 7-cyano-7-deazaguanine synthase OS=Glaciecola punicea ACAM 611 OX=1121923; GN = queC1 PE=3 SV=1
MSTKKVVIIYSGGMDSYTVLHLAKHEGYEVHAVSFNYGQRHSKELLYAEKVTRKFNIPHKIVDISSINQLIAGSSLTSNIDVPQGHYEEASMKQTVVPNRNMILLSLAVGYAVSIKAEAVYFGAHSGDHAIYPDCRTEFVSTMNEVCKIANYEAVEVRAPFLKSDKIEILARGLALNLDYNDTWTCYNGREKACGKCGACQERLEAFAGNNMTDPLEYE

SEQ ID NO: 38470 - protein, 219 aa, Glaciecola sp.
  REGION 1..219: note = tr|A0A2N1HPU8|A0A2N1HPU8_9ALTE 7-cyano-7-deazaguanine synthase OS=Glaciecola sp. 33A; OX = 2057807 GN=queC PE=3 SV=1
MSAKVVVIYSGGMDSYTVLNKAMQQGYDVHAVSFNYGQRHSKELLFAKKVCEQHDIEHKVVDISSINQLIGGSALTDDIDVPEGHYQEESMKTTVVPNRNMIMLSMAVGYAVSIEAEAVYFGAHSGDHAIYPDCRTEFVDAMNDVCKIANYQAVEVRAPYLAASKTDILREGLVMNLDYNDTWTCYNGQEKACGRCGACQERLEAFSENNTIDPIDYQN

SEQ ID NO: 38471 - protein, 218 aa, Glaciecola sp.
  REGION 1..218: note = tr|A0A2Z6UEP3|A0A2Z6UEP3_GLASK 7-cyano-7-deazaguanine synthase OS=Glaciecola sp. (strain KUL10) OX=2161813 GN=queC PE=3 SV=1
MGKKVVVIYSGGMDSFTVLNKALQQGYEVHATSFNYGQRHSKELEFAKRVTEKLNIPHKIVDISAINQLILGSALTDDIDVPEGHYEEQSMQQTVVPNRNMIMLSLAVGYAVSVEAEAVYFGAHSGDHAIYPDCRTEFVDAMNEVCKIANYQAVEVRAPYLQSDKIEILADGLAMDLDYADTWTCYNGREKACGKCGACQERLEAFEKNGIKDPLAYE

SEQ ID NO: 38472 - protein, 233 aa, Glaciimonas sp.
  REGION 1..233: note = tr|A0A2T6F576|A0A2T6F576_9BURK 7-cyano-7-deazaguanine synthase OS=Glaciimonas sp. PCH181; OX = 2133943 GN=queC PE=3 SV=1
MTISSGALVLFSGGQDSTTCLAWALSRYDRVETIGFDYGQRHAIELTQRPILLEKLRSQSAEWDEKLDEDHVIDLSIISKISSTAMTEDVEIVMQENGLPNTFVPGRNLLFMTVAATVAYRRGLDVLVGGMCETDFSGYPDCRDDTMKALQVALNLGMATRLKLETPLMWIDKSETWKMAQDLGGDALVDLIRADTHTCYLGDRGMLHDWGYGCGTCPACALRARGYQQFASS

SEQ ID NO: 38473 - protein, 219 aa, unidentified
  source 1..219: note = Glaesserella parasuis
  REGION 1..219: note = tr|U4SHT2|U4SHT2_HAEPR 7-cyano-7-deazaguanine synthase OS=Glaesserella parasuis D74 OX=1275971 GN=queC; PE = 3 SV=1
MKPTPKAAVIFSGGQDSTTCLFLAIKEFGKENVEAVTFQYGQRHAIELDKARWIAQDLGVKQTLIDTSVIKAITANALMDDQAEIKQIGNTPNTFVDGRNALFLLYTAIYAKSQGIQTIYTGVCETDFSSYPDCRDVFIKSMNVTLNLAMDYNFNIRTPLMYLTKKETWALADQLGAFDYIRTHTHTCYLGVEGGCHTCPSCLLREKGLNEYLEEKSNV

SEQ ID NO: 38474 - protein, 219 aa, unidentified
  source 1..219: note = Glaesserella parasuis
  REGION 1..219: note = tr|U4RUH5|U4RUH5_HAEPR 7-cyano-7-deazaguanine synthase OS=Glaesserella parasuis str. Nagasaki OX=1117322; GN = queC PE=3 SV=1
MKPTPKAVVIFSGGQDSTTCLFLAIEEFGKENVEVVTFQYGQRHAIELDKARWIAQDLGVKQTLIDTSVIKAITTNALMDDQAEIKQTGNTPNTFVDGRNALFLLYTAIYAKSQGIQTIYTGVCETDFSGYPDCRDVFIKSMNVTLNLATDYNFNIRTPLMYLTKKETWALADQLGAFDYIRTHTHTCYLGVEGGCHTCPSCLLREKGLNEYLEEKSNV

SEQ ID NO: 38475 - protein, 219 aa, unidentified
  source 1..219: note = Glaesserella sp.
  REGION 1..219: note = tr|A0A328BVY4|A0A328BVY4_9PAST 7-cyano-7-deazaguanine synthase OS=Glaesserella sp. HHC-2018 OX=2094024 GN=queC PE=3 SV=1
MNTTPKAAVIFSGGQDSTTCLFLAIQEFGKENVEVVTFQYGQRHAIELEKARWIAQDLGVKQTVIDTSVIKAITTNALMDDNAEIKQTGATPNTFVDGRNALFLLYTAIYAKSQGIQTLYTGVCETDFSGYPDCRDVFIKSMNVTLNLAMDYNFNIRTPLMYLTKKETWALADKLEAFDYIREHTHTCYLGVEGGCHTCPSCLLREKGLNEYLEEKGNV

SEQ ID NO: 38476 - protein, 229 aa, unidentified
  source 1..229: note = Gloeobacter kilaueensis
  REGION 1..229: note = tr|U5QCG5|U5QCG5_9CYAN 7-cyano-7-deazaguanine synthase OS=Gloeobacter kilaueensis JS1 OX=1183438 GN=queC; PE = 3 SV=1
MVLSGGQDSTTCAALACRQFDAVYAVTFEYNQRHAIELESAQAVSEALALAGQEVIRLGPVLKGTSPLVSDAPVGEYDSPEQLPGGVEPTFIPGRNILFLTIAANRAYCLGCRDIFIGVCEADFAGYWDCRQLFIDAMAKALGEGIYGDPAALRIHAPLMHLSKAQTVRLSAEVLGERFEEVLEQTHTCYQGIRGGCGRCHACILRDRGFREAKIADPIWKYRKEPIKL

SEQ ID NO: 38477 - protein, 234 aa, unidentified
  source 1..234: note = Gloeobacter violaceus
  REGION 1..234: note = sp|Q7NCE2|QUEC_GLOVI 7-cyano-7-deazaguanine synthase; OS = Gloeobacter violaceus (strain ATCC 29082 / PCC 7421); OX = 251221 GN=queC PE=3 SV=1
MKKALVVFSGGQDSTTCAALACREYDEVHAVTFEYNQRHAIELESARAVGQALGLTGHEFIRLGPLLKGTSPLVSDAPLGQYASAAELPAGVEPTFVPGRNILFLTLAANRAFCLGTGDIVIGVCEADFAGYWDCRQVFVEAMARALGEGIYGDANAIRIHTPLMRLTKAETVKLSVEVLGERFEEVLALSHTCYAGVRGGCGRCHACILRDRGFREAGVPDPIWKFRKEPVSL

SEQ ID NO: 38478 - protein, 227 aa, Gloeocapsa sp.
  REGION 1..227: note = tr|K9X863|K9X863_9CHRO 7-cyano-7-deazaguanine synthase OS=Gloeocapsa sp. PCC 7428 OX=1173026 GN=queC; PE = 3 SV=1
MKAVILLSGGLDSSTVLYQAVADGYKCYAISFDYQQRHQRELKAAIAIAQSTQVLVHKVVNFDLRSWGGSALTDTSIELPSDRAVSEMSQNVPVTYVPARNTIFLSFALAYAETIAAQRVYIGVNALDYSGYPDCRPDYIQAMQEVFRLGTKLGREGQPIAIETPLINLKKTEIIQLGNQLGVPWEKTWSCYAGGAIACGVCDACRLRLAAFAELGLEDPILYRTRI

SEQ ID NO: 38479 - protein, 223 aa, Gloeocapsa sp.
  REGION 1..223: note = tr|L8LM79|L8LM79_9CHRO 7-cyano-7-deazaguanine synthase OS=Gloeocapsa sp. PCC 73106 OX=102232 GN=queC; PE = 3 SV=1
MRQAVVLLSGGLDSATTTAIALKDGYQVIALSFRYGQRHERELKAAVKIAQTLGIQEHYIIDVNLAQWGGSSLTDVHLALPQEGVKPGIIPSTYVPGRNTVFISIALSLAEAKQAEAIYLGINAVDYSGYPDCRPEYLEAYQKLANLSSKAGIEGKAPQLIAPLVHLTKVDIVKSAIALGVPIEDTWSCYLGGDTPCGLCDSCRIRDQALIAAGYPYLASSKV

SEQ ID NO: 38480 - protein, 228 aa, unidentified
  source 1..228: note = Gloeomargarita lithophora
  REGION 1..228: note = tr|A0A1J0AH30|A0A1J0AH30_9CYAN 7-cyano-7-deazaguanine synthase OS=Gloeomargarita lithophora Alchichica-D10 OX=1188229 GN=queC PE=3 SV=1
MNQRAIVLLSGGLDSATVLYHAQAAGDECYALSFDYQQRHRRELHSAQAIAHSAAVHGHEIIPLDLGRWGGSALTQRDLDLPRQRHPAAMTQGIPITYVPARNTIFLSLALAWAEVLGAKRVYLGANALDYSGYPDCREDYLLAMQQVYTLGTKRGREGQPIELAAPLLHLHKGEIIQLGQELGVPWELTWSCYQGEEMACGMCDSCILRREGFRQAGIEDPLPYAGT

SEQ ID NO: 38481 - protein, 230 aa, unidentified
  source 1..230: note = Gloeothece citriformis
  REGION 1..230: note = sp|B7K7J4|QUEC_GLOC7 7-cyano-7-deazaguanine synthase; OS = Gloeothece citriformis (strain PCC 7424) OX=65393; GN = queC PE=3 SV=1
MNQPKAVILLSGGLDSATTAAIALASGYEAIALSLFYGQRHHKEIEAAQKIVQVLGIKEHYSLEVNLSQWGGSALTDQSIEVPKAGLNPHLIPITYVPGRNTVFIAIALSLAEAKGAQAIYLGINAIDYSGYPDCRPEYLEAFQKLANLSSKIGVEGKTIQLIAPLVKDSKVDIVRRAVRLGVPIADTWSCYQGEDEPCGLCDSCRIRDRALIEAGYPELATEIGRKLSH

SEQ ID NO: 38482 - protein, 227 aa, unidentified
  source 1..227: note = Gloeothece verrucosa
  REGION 1..227: note = tr|E0UJP7|E0UJP7_GLOV7 7-cyano-7-deazaguanine synthase OS=Gloeothece verrucosa (strain PCC 7822); OX = 497965 GN=queC PE=3 SV=1
MNQPLAVVLLSGGLDSATSAAIALADGYEVIALSLSYGQRHQRELQAAKKVVAALDIKSHYIMDVNLSQWGGSSLTDELIDMPTDGVKPNLIPNTYVPGRNTVFIAIALSLAEAKGAEAIYLGINAVDYSGYPDCRPEYIEAFQKLASLSSKVGVEGKAIQLMAPLVKDSKADIVRRAMSLEVPIADTWSCYQGGDEPCGLCDSCRIRNRALIEAGYPELATPVLKS

SEQ ID NO: 38483 - protein, 245 aa, Gluconacetobacter diazotrophicus
  REGION 1..245: note = sp|A9HRF6|QUEC_GLUDA 7-cyano-7-deazaguanine synthase; OS = Gluconacetobacter diazotrophicus (strain ATCC 49037 / DSM 5601 / PAl5) OX=272568 GN=queC PE=3 SV=1
MATSLTPADPLQEAAIVLFSGGQDSATCLAWALSRFGRVETVGFDYGQRHAVELACRARLRDGMAALDPDWATRLGQDHTLALDALGTVSDTALTRDAAITMNENGLPSTFVPGRNLIFLTFAAALAARRGARHIVGGMCETDYSGYPDCRDDTIKAMQVALNLGMASRYVLHTPLMWIDKAETWRMAEGLGGADLVELINRESHSCYLGVRDVMHPWGHGCGTCPACMLRRAGWERYVADGADA

SEQ ID NO: 38484 - protein, 246 aa, Gluconacetobacter entanii
  REGION 1..246: note = tr|A0A318PZK3|A0A318PZK3_9PROT 7-cyano-7-deazaguanine synthase OS=Gluconacetobacter entanii OX=108528 GN=queC PE=3 SV=1
MTIPAPSCAGPSGESALVVFSGGQDSATCLAWALSRFAHVETLGFDYGQRHSVELSCLEKLRDGMAALDPAWGARLGPDHTLSLDALGAVSDTALTREAEITLGENGLPTTFVPGRNIIFLTFAAALAARRNARHIITGVCETDYSGYPDCRDDTIKALQVTLNLGMASRLVLHTPLMWIDKAQTWMMARELGGDALVDLINRESHSCYLGTRGVMHPWGHGCGTCPACQLRRAGWERFEAMTSDA

SEQ ID NO: 38485 - protein, 245 aa, Gluconacetobacter liquefaciens
  REGION 1..245: note = tr|A0A370G309|A0A370G309_GLULI 7-cyano-7-deazaguanine synthase OS=Gluconacetobacter liquefaciens OX=89584 GN=queC PE=3 SV=1
MAASLTPADPKQESAIVLFSGGQDSATCLAWALSRFGRVETLGFAYGQRHAVELECRDTLRAGMAAHDPAWAARLGEDHTLALDALGAVSDTALTRDAAITMNENGLPSTFVPGRNLIFLTFAAALAARRGARHIIGGMCETDYSGYPDCRDDTIKAMQVALNLGMASRLVLHTPLMWIDKADTWRLAESLGGPDLVALINRESHSCYLGTRETMHPWGHGCGTCPACDLRRNGWERYMAGRKNA

SEQ ID NO: 38486 - protein, 245 aa, Gluconacetobacter sp.
  REGION 1..245: note = tr|F3SDH6|F3SDH6_9PROT 7-cyano-7-deazaguanine synthase OS=Gluconacetobacter sp. SXCC-1 OX=1004836; GN = queC PE=3 SV=1
MSVSPPPSTPAREAALVLFSGGQDSATCLAWALARFGRVETLGFDYGQRHAVELECRATLREGMATENPQWAARLGADHTLDLAVLGTLSDTALTREAEITLNENGLPNTFVPGRNLLFLTFAAALAARRNIRHIITGVCETDYSGYPDCRDDTIKSLQVTLNLGMASHYVLHTPLMWLDKARTWELARTLGGDALVGLINRESHSCYLGTRGTLHPWGHGCGTCPACQLRKAGWERFLAECCHV

SEQ ID NO: 38487 - protein, 243 aa, Gluconobacter albidus
  REGION 1..243: note = tr|A0A1U9KW92|A0A1U9KW92_9PROT 7-cyano-7-deazaguanine synthase OS=Gluconobacter albidus; OX = 318683 GN=queC PE=3 SV=1
MSTTISSNTALVLFSGGQDSATCLAWALSRFDRVETVGYAYGQRHAIELECRDTLREQMAAFSPDCKARLGDDHTIDLASLGALSETALTREAEIGLSENGLPNTFVPGRNIIFLTFAAALAVRRNARHIVTGVCETDYSGYPDCRDDTIKALQVALNLGMDQRFVLHTPLMWIDKAQTWDLTEQLGGQTLVDVINRDSHSCYMGDRTHQHDWGYGCGTCPACNLRADGWRRYQQNRHHGGAA

SEQ ID NO: 38488 - protein, 245 aa, Gluconobacter albidus
  REGION 1..245: note = tr|A0A149TH11|A0A149TH11_9PROT 7-cyano-7-deazaguanine synthase OS=Gluconobacter albidus; OX = 318683 GN=queC PE=3 SV=1
MSTNPAISSNTALVLFSGGQDSTTCLAWALSRFDRVETVGYAYGQRHAIELECRDTLREQMAAFSPEWKARLGDDHTIDLASLGSLSETALTREAEIGLSENGLPNTFVPGRNIIFLTFAAALAVRRNARHIVTGVCETDYSGYPDCRDDTIKALQVALNLGMDQRFVLHTPLMWIDKAQTWDLTEQLGGQTLVDVINRDSHSCYMGDRTHQHDWGYGCGTCPACNLRADGWRRYQQSRHHGGAA

SEQ ID NO: 38489 - protein, 233 aa, Gluconobacter cerinus
  REGION 1..233: note = tr|A0A1B6VLK8|A0A1B6VLK8_9PROT 7-cyano-7-deazaguanine synthase OS=Gluconobacter cerinus; OX = 38307 GN=queC PE=3 SV=1
MSNAALVLFSGGQDSATCLAWALSRFDRVETVGYAYGQRHLVELECRDTLRAQMAAHSAEWKARLGEDHTIDLASLGALSETALTREAEIGFNESGLPNTFVPGRNLIFLTFAAALAYRRNVKHIVTGVCETDYSGYPDCRDDTIKALQVALNLGMDQRFVLHTPLMWIDKAQTWDLTEELGGKALVDLINQESHSCYMGDRTHQHAWGYGCGTCPACQLRAEGWRRYCESKA

SEQ ID NO: 38490 - protein, 233 aa, Gluconobacter frateurii
  REGION 1..233: note = tr|A0A0D6PKL4|A0A0D6PKL4_9PROT 7-cyano-7-deazaguanine synthase OS=Gluconobacter frateurii M-2 OX=1231354 GN=queC PE=3 SV=1
MSNAALVLFSGGQDSATCLAWALSRFDRVETVGYAYGQRHLVELECRDTLRTRIAEHSPEWKARLGEDHTIDLASLGALSETALTREAEIGFNESGLPNTFVPGRNLIFLTFAAALAYRRNVKHIVTGVCETDYSGYPDCRDDTIKALQVALNLGMDQRFVLHTPLMWIDKAQTWDLTEELGGKTLVDLINHESHSCYMGDRTHHHAWGYGCGTCPACELRADGWRRYCESQA

SEQ ID NO: 38491 - protein, 233 aa, Gluconobacter frateurii
  REGION 1..233: note = tr|A0A0K8N4C1|A0A0K8N4C1_9PROT 7-cyano-7-deazaguanine synthase OS=Gluconobacter frateurii NBRC 101659 OX=1104996 GN=queC PE=3 SV=1
MSNAALVLFSGGQDSATCLAWALSRFDRVETVGYAYGQRHLVELECRDTLRARMAEHSPEWKARLGEDHTIDLASLGALSETALTREAEIGFSESGLPNTFVPGRNLIFLTFAAALAYRRNVKHIVTGVCETDYSGYPDCRDDTIKALQVALNLGMDQRFVLHTPLMWIDKAQTWDLTEELGGKTLVDLINHESHSCYMGDRTHHHAWGYGCGTCPACELRAEGWRRYCENKA

SEQ ID NO: 38492 - protein, 233 aa, Gluconobacter japonicus
  REGION 1..233: note = tr|A0A149TMF1|A0A149TMF1_GLUJA 7-cyano-7-deazaguanine synthase OS=Gluconobacter japonicus; OX = 376620 GN=queC PE=3 SV=1
MSNAALVLFSGGQDSATCLAWALSRFDRVETVGYAYGQRHLVELECRDTLRARMAEHSSEWKARLGEDHTIDLASLGALSETALTREAEIGFSESGLPNTFVPGRNLIFLTFAAALAYRRNVKHIVTGVCETDYSGYPDCRDDTIKALQVALNLGMDQRFVLHTPLMWIDKAQTWDLTEELGGKTLVDLINHESHSCYMGDRTHHHTWGYGCGTCPACELRAEGWRRYCESKA

SEQ ID NO: 38493 - protein, 233 aa, Gluconobacter japonicus
  REGION 1..233: note = tr|A0A149SG99|A0A149SG99_GLUJA 7-cyano-7-deazaguanine synthase OS=Gluconobacter japonicus; OX = 376620 GN=queC PE=3 SV=1
MSNAALVLFSGGQDSATCLAWALSRFDRVETVGYAYGQRHLVELECRDTLRARMAEHSPEWKARLGEDHTIDLASLGALSETALTREAEIGFSESGLPNTFVPGRNLIFLTFAAALAYRRNVKHIVTGVCETDYSGYPDCRDDTIKALQVALNLGMDQRFVLHTPLMWIDKAQTWDLTEELGGKTLVDLINHESHSCYMGDRTHHHAWGYGCGTCPACELRAEGWRRYCESKA

SEQ ID NO: 38494 - protein, 244 aa, Gluconobacter kanchanaburiensis
  REGION 1..244: note = tr|A0A511B8I9|A0A511B8I9_9PROT 7-cyano-7-deazaguanine synthase OS=Gluconobacter kanchanaburiensis NBRC 103587 OX=1307948 GN=queC PE=3 SV=1
MSTNTAISSNTALVLFSGGQDSATCLAWALSRFDRVETVGYAYGQRHAIELECRDTLREQMAAFSPEWTARLGDDHTIDLASLGALSETALTREAEIGLSESGLPNTFVPGRNIIFLTFAAALAVRRNARHIVTGVCETDYSGYPDCRDDTIKALQVALNLGMDQRFVLHTPLMWIDKAQTWDLTEQLGGQKLVDVINRDSHSCYMGDRTHQHDWGYGCGTCPACDLRADGWRRYQQSRHGGAL

SEQ ID NO: 38495 - protein, 238 aa, unidentified
  source 1..238: note = Gluconobacter morbifer
  REGION 1..238: note = tr|G6XFJ6|G6XFJ6_9PROT 7-cyano-7-deazaguanine synthase OS=Gluconobacter morbifer G707 OX=1088869 GN=queC; PE = 3 SV=1
MSNTALVLFSGGQDSATCLAWALSRFDRVETVGYAYGQRHAVELDCRETLRHEMAAFSPEWKARLGEDHTIDLASLGALSDTALTREAEIGFSESGLPNTFVPGRNLIFLTFAAALAYRRGAKHIVTGVCETDYSGYPDCRDDTIKALQVALNLGMDSRFVLHTPLMWIDKAQTWDLTEALGGAPLVDLINRDSHSCYMGDRTHRHDWGYGCGACPACNLRAEGWRRYREGSARKDPA

SEQ ID NO: 38496 - protein, 233 aa, Gluconobacter oxydans
  REGION 1..233: note = tr|K7S9X4|K7S9X4_GLUOY 7-cyano-7-deazaguanine synthase OS=Gluconobacter oxydans H24 OX=1224746 GN=queC; PE = 3 SV=1
MSNAALVLFSGGQDSATCLAWALSRFDRVETVGYAYGQRHLVELECRDTLRTRMAEHSPEWKARLGEDHTIDLASLGALSETALTREAEIGFNESGLPNTFVPGRNLIFLTFAAALAYRRNVKHIVTGVCETDYSGYPDCRDDTIKALQVALNLGMDQRFVLHTPLMWIDKAQTWDLTEELGGKALVDLINHESHSCYMGDRTHHHAWGYGCGTCPACELRADGWRRYCESQA

SEQ ID NO: 38497 - protein, 242 aa, Gluconobacter oxydans
  REGION 1..242: note = sp|Q5FQR2|QUEC_GLUOX 7-cyano-7-deazaguanine synthase; OS = Gluconobacter oxydans (strain 621H) OX=290633 GN=queC; PE = 3 SV=1
MTISSNTALVLFSGGQDSATCLAWALSRFDRVETVGYAYGQRHAIELECRETLRNEMAAFSPDWKARLGEDHTIDLASLGALSETALTREAEIGLSENGLPNTFVPGRNIIFLTFAAALAARRNARHIVTGVCETDYSGYPDCRDDTIKALQVTLNLGMDQRFVLHTPLMWIDKAQTWDLTEELGGQKLVNLINRDSHSCYMGDRTHQHDWGYGCGTCPACNLRADGWRRYQQSRPSHGGAA

SEQ ID NO: 38498 - protein, 241 aa, Gluconobacter roseus
  REGION 1..241: note = tr|A0A4Y3M2R7|A0A4Y3M2R7_9PROT 7-cyano-7-deazaguanine synthase OS=Gluconobacter roseus NBRC 3990 OX=1307950 GN=queC PE=3 SV=1
MTISSNTALVLFSGGQDSATCLAWALSRFDRIETVGYAYGQRHAIELECRETLRNEMAAFSPDWKARLGEDHTIDLASLGALSETALTREAEIGLSENGLPNTFVPGRNIIFLTFAAALAVRRNARHIVTGVCETDYSGYPDCRDDTIKALQVALNLGMDQRFVLHTPLMWIDKAQTWDLTEELGGQKLVDVINRDSHSCYMGDRTHRHDWGYGCGTCPACNLRAEGWRRYQQNRSEGGAA

SEQ ID NO: 38499 - protein, 233 aa, Gluconobacter sp.
  REGION 1..233: note = tr|A0A252BMP7|A0A252BMP7_9PROT 7-cyano-7-deazaguanine synthase OS=Gluconobacter sp. DsW_058 OX=1511210 GN=queC PE=3 SV=1
MSNAALVLFSGGQDSATCLAWALSRFDRVETVGYAYGQRHLVELECRDTLRAQMAAHSAEWKARLGEDHTIGLASLGALSETALTREAEIGFNESGLPNTFVPGRNLIFLTFAAALAYRRNVKHIVTGVCETDYSGYPDCRDDTIKALQVALNLGMDRRFVLHTPLMWIDKAQTWDLTEELGGKALVDLINQESHSCYMGDRTHQHAWGYGCGTCPACQLRAEGWRRYCESKA

SEQ ID NO: 38500 - protein, 242 aa, Gluconobacter sphaericus
  REGION 1..242: note = tr|A0A4Y3Q8C0|A0A4Y3Q8C0_9PROT 7-cyano-7-deazaguanine synthase OS=Gluconobacter sphaericus NBRC 12467 OX=1307951 GN=queC PE=3 SV=1
MTISSNTALVLFSGGQDSATCLAWALSRFDRVETVGYAYGQRHAIELECRETLREQMAAFSSDWKSRLGEDHTIDLASLGALSETALTREAEIGLNESGLPNTFVPGRNIIFLTFAAALAVRRNARHIVTGVCETDYSGYPDCRDDTIKALQVALNLGMDQRFVLHTPLMWIDKAQTWDLTEQLGGQKLVNLINRESHSCYMGDRTHQHEWGYGCGSCPACNLRADGWRRYQQSRHSHGGAT

SEQ ID NO: 38501 - protein, 233 aa, Gluconobacter thailandicus
  REGION 1..233: note = tr|M9MAH6|M9MAH6_GLUTH 7-cyano-7-deazaguanine synthase OS=Gluconobacter thailandicus NBRC 3255; OX = 1291534 GN=queC PE=3 SV=1
MSNAALVLFSGGQDSATCLAWALSRFDRVETVGYAYGQRHLVELECRDTLRTRMAEHSPEWKARLGEDHTIDLASLGALSETALTREAEIGFNESGLPNTFVPGRNLIFLTFAAALAYRRNVKHIVTGVCETDYSGYPDCRDDTIKALQVALNLGMDQRFVLHTPLMWIDKAQTWDLTEELGGKTLVDLINHESHSCYMGDRTHHHAWGYGCGTCPACELRADGWRRYCESQV

SEQ ID NO: 38502 - protein, 233 aa, Gluconobacter thailandicus
  REGION 1..233: note = tr|A0A149SM53|A0A149SM53_GLUTH 7-cyano-7-deazaguanine synthase OS=Gluconobacter thailandicus OX=257438 GN=queC PE=3 SV=1
MSNAALVLFSGGQDSATCLAWALSRFDRVETVGYAYGQRHLVELECRDTLRTRMAEHSPEWKARLGEDHTIDLASLGALSETALTREAEIGFNESGLPNTFVPGRNLIFLTFAAALAYRRNVKHIVTGVCETDYSGYPDCRDDTIKALQVALNLGMDQRFVLHTPLMWIDKAQTWDLTEELGGKALVDLINQESHSCYMGDRTHHHAWGYGCGTCPACELRADGWRRYCESKA

SEQ ID NO: 38503 - protein, 232 aa, Gluconobacter wancherniae
  REGION 1..232: note = tr|A0A511B106|A0A511B106_9PROT 7-cyano-7-deazaguanine synthase OS=Gluconobacter wancherniae NBRC 103581 OX=656744 GN=queC PE=3 SV=1
MSTALVLFSGGQDSATCLAWALSRFERVETVGYAYGQRHAVELECRNVLREKMTAIHPQWSSRLGEDHTIDLASLGALSDTALTREASIGFAENGLPNTFVPGRNLIFLTFAAALAFRRGAKHIVTGVCETDYSGYPDCRDDTIKALQVALNLGMDKRFVLHTPLMWIDKAQTWDLTEELGGESLVNLIREDSHSCYLGDRTHLHPWGYGCGTCPACELRADGWRRYCESHS

SEQ ID NO: 38504 - protein, 242 aa, unidentified
  source 1..242: note = Glycocaulis alkaliphilus
  REGION 1..242: note = tr|A0A3T0E809|A0A3T0E809_9RHOB 7-cyano-7-deazaguanine synthase OS=Glycocaulis alkaliphilus OX=1434191 GN=queC PE=3 SV=1
MAVQASKPAAQDAKGALVLFSGGQDSAVCLAHALTHYDRVETIGFDYGQRHRVELEARVRVRQAMTALDPAWAEKLGGDVLVDISGYGQLAESALTYERVIEMGESGLPTSFVPGRNLVFLVMAAAHAWRRGLDVLVGGMCQTDYSGYPDCREDTLKAQERALSLGLDMPVTIDTPLMFLTKGETWELADGLGGKPLVDLIVEHSHTCYMGDREHRHDWGYGCGTCPACELRAAGWKEWAGA

SEQ ID NO: 38505 - protein, 239 aa, unidentified
  source 1..239: note = Glycocaulis sp.
  REGION 1..239: note = tr|A0A550JZT2|A0A550JZT2_9RHOB 7-cyano-7-deazaguanine synthase OS=Glycocaulis sp. ZYF765; OX = 2518983 GN=queC PE=3 SV=1
MALKSDKALVLFSGGQDSATCLAWALDRFGEVETIGFDYGQRHRVELEARLAVREAVAARFPAWGAKLGPDRMVDLSGYGALAESALTGGDDASVSETGESGLPKTFVPGRNLVFLTVAGAHAWLRKAGTLVTGVCQTDYSGYPDCRQDTIDAQARALSLGLDVNLPVQTPLMHLTKAETWALAHDLGGDALVDLIVEESHTCYRGTRGARHDWGHGCGACPACELRAKGWTEWREGRA

SEQ ID NO: 38506 - protein, 188 aa, Gordonia alkanivorans
  REGION 1..188: note = tr|F9W271|F9W271_9ACTN 7-cyano-7-deazaguanine synthase OS=Gordonia alkanivorans NBRC 16433 OX=1027371; GN = queC PE=3 SV=1
MILIPDAPHIRSVGLMLSGGLDSSVCAAWLTAQSIAVFAIQLHHPRRPRREVTAADTVIALLGLERRDICVPPPNASAHIPRTVQLSVGLTEARGLGVERLVLADLRSDLPRIGTSVHRLTAEADYIENGSRGPEMWLPFWDVPKLGVKSLADDLAFPVGLTWSCDLDREAQCGACGGCLSRRSAGIA

SEQ ID NO: 38507 - protein, 232 aa, Gordonia paraffinivorans
  REGION 1..232: note = tr|M3VJV3|M3VJV3_9ACTN 7-cyano-7-deazaguanine synthase OS=Gordonia paraffinivorans NBRC 108238; OX = 1223543 GN=queC PE=3 SV=1
MIKPPAVVLLSGGLDSTTVLAIANDLGYLAYALSFRYGQRHSVELEASKRVAESLGVERHEIVDIDLRPFGGSSLTADIPVPKHDSVDDVEPSIPNTYVPARNTIFLSFALAYAEVVGARDIFLGVNALDYSGYPDCRPEYIEAFQNMANLATRAGVDGQNLQIHTPLISMTKAEIVKKGVELGVDYSVTSSCYDPDPDGRACGHCDSCLLRLRGFEGAGFTDPIEYQGSHV

SEQ ID NO: 38508 - protein, 216 aa, Gordonia polyisoprenivorans
  REGION 1..216: note = tr|H0RJ69|H0RJ69_9ACTN 7-cyano-7-deazaguanine synthase OS=Gordonia polyisoprenivorans NBRC 16320 = JCM 10675 OX=1077976 GN=GOPIP_077_00460 PE=3 SV=1
MTVAADTTPPETPGVLLLSGGLDSTALAAILRPTLCLAIAYGQRPAAAETRAATAVCRELDLVCATITLDLAAIGSGLLLDDGPAPPDAASPEWWPFRNQLLVTAAAAVALNNGLHDVYIGTVAGDGERHADGTQAFYDALNTVMAVQEGAVKVHTPAIGCSTTDLLRRSGLGPSQLGWTTSCHRSDTPCGACPGCWKRRRVLAELQILDERDERS

SEQ ID NO: 38509 - protein, 216 aa, Gordonia sp.
  REGION 1..216: note = tr|A0A1V4Q2G5|A0A1V4Q2G5_9ACTN 7-cyano-7-deazaguanine synthase OS=Gordonia sp. i37; OX = 1961707 GN=B1964_19730 PE=3 SV=1
MTVAADTTPPGTSGVLLLSGGLDSTALAAILRPTLCLAIAYGQRPAAAETRAAAAVCRELDLDCATITLDLAAIGSGLLLDDGPAPPDAASPEWWPFRNQLLVTAAAAVALNHGLHDVYIGTVAGDGERHADGTQAFYDALNTVMAVQEGAVKVHTPAIGCSTTDLLRRSGLGPSQLGWTTSCHRSDTPCGACPGCWKRHRVLADLQILDQRDERS

SEQ ID NO: 38510 - protein, 424 aa, Gordonia sp.
  REGION 1..424: note = tr|A0A1A0L4Q6|A0A1A0L4Q6_9ACTN Queuosine biosynthesis protein queC OS=Gordonia sp. 852002-10350_SCH5691597 OX=1834085 GN=A5777_15940 PE=4 SV=1
MTASGAYVVRAQGDKKSRLQGYDTLKWPTAPGHTKSVVSDLAWNLAPLQDVAPAVADLVHIAAGAYMADRSTRRGARFSRDIALHVTVVAPELWTEELLDTTSELLGWLTGDTWNLTVAGGAEVDFEETLKVGENGSVALLSGGLDSFLGAIQLLMSGAETIFVGHKDSATSIRGAQSTVGTWLGQSFAPAPSYTRVQLAQAIRRREPSSRSRAFMFLSLGVAVASSLGSRSLIIPENGYTGINLPLRPNRGGALSTRSTHPETFRRVAEILTALNIDVTVTNPFEWMTKGEMMQSIRGLRPPSGWQETAAATLSCSKLGGNWFGGSPNLNCGLCVPCMVRRATFIKAEVPDKTQYLCHAISGTHLAELIDARRGDIEAVRYAIEAGADADAIDSGTWPPDYDLDRVEGLVQRGLDELAMLELP

SEQ ID NO: 38511 - protein, 218 aa, unidentified
  source 1..218: note = Gottschalkia acidurici
  REGION 1..218: note = tr|K0B4U8|K0B4U8_GOTA9 7-cyano-7-deazaguanine synthase OS=Gottschalkia acidurici (strain ATCC 7906 / DSM 604 / BCRC 14475 / CIP 104303 / NCIMB 10678 / 9a); OX = 1128398GN=queC PE=3 SV=1
MKNESAVVVFSGGQDSTTCLFWAKERFKEVIAVSFDYNQRHSEELECAKEICKKHNFEHHILDMSLLNQLAPNSLTRTDIKVDKEASEGEVPNSCVDGRNMLFLTFVAVFAKQRDIKHIITGVSQSDFSGYPDCRDVFIKSLNVTLNLSMDYEYVVHTPLMWIDKEETWKMADDLGVLEVIKNETLTCYNGIKGSGCGECPSCTLRNRGYENYINSFK

SEQ ID NO: 38512 - protein, 212 aa, unidentified
  source 1..212: note = Gottschalkiaceae bacterium
  REGION 1..212: note = tr|A0A521IYP3|A0A521IYP3_9FIRM 7-cyano-7-deazaguanine synthase OS=Gottschalkiaceae bacterium OX=2527676 GN=EWM50_06365 PE=3 SV=1
MQENRKVVLLLSGGIDSTVLLYWLIEKNYEVFPLIINYGQVTFEGEYKSAASILYDLGMENIFTVDISEISKLGKGTLIGQYPKDVTSYNGWYNTEFFPNRNIMLLILATSYAYKINASNIAIGVVGASYKDTSLSFLNSFMKCIEISLMPINIIAPFADRQRDEVIKQAIRLNVPIEKTFSCNALSERHCQLCSSCHDREMAFNLMSRLLL

SEQ ID NO: 38513 - protein, 204 aa, Gracilibacillus boraciitolerans
  REGION 1..204: note = tr|W4VP69|W4VP69_9BACI 7-cyano-7-deazaguanine synthase OS=Gracilibacillus boraciitolerans JCM 21714; OX = 1298598 GN=queC PE=3 SV=1
MDKNKRAVVVFSGGQDSTTCLFWTLEKFDHVELVTFDYNQRHKEEIEVAKAIASEQGLTHHILDMTLLNQLAPNALTRKDIEVEAGEDGGLPNTFVPGRNLLFLSFATILAKQINAKHIITGVCETDFSGYPDCRDIFIKSLNVSLNLSMDDDFVLHTPLMWLDKAQTWEMADQLGVFEYVRENTLTCYNGIKGTGCGNVLHVS

SEQ ID NO: 38514 - protein, 221 aa, Gracilibacillus dipsosauri
  REGION 1..221: note = tr|A0A317L1T5|A0A317L1T5_9BACI 7-cyano-7-deazaguanine synthase OS=Gracilibacillus dipsosauri OX=178340 GN=queC PE=3 SV=1
MKQDKAIVVFSGGQDSTTCLFWAKDRFKEVEAVTFDYGQRHALEIECAKEIAEELGIKHHILDMSLLNQLAPNALTRESMEVAEGEEGELPSTFVPGRNLLFLSFAGVLASQVGAKHLVTGVCETDFSGYPDCRDVFIKSLNVTLNLSMDDNFVIHTPLMWLDKAETWELADQHGALSFVREKTLTCYNGIKADGCGECPACKLRNKGLEQYLEAKKTEEL

SEQ ID NO: 38515 - protein, 222 aa, Gracilibacillus halophilus
  REGION 1..222: note = tr|N4WPC2|N4WPC2_9BACI 7-cyano-7-deazaguanine synthase OS=Gracilibacillus halophilus YIM-C55.5; OX = 1308866 GN=queC PE=3 SV=1
MNTNQKAVVVFSGGQDSTTCLFWALERFEEVELVTFDYNQRHKEEIKVAKEIANDQNLAHHILDMSLLNQLAPNALTRNDMEVEEGEDGELPNTFVPGRNLLFLSFASILAKQIGAKHIVTGVCETDYSGYPDCRDIFIKSLNVTLNLSMEDDFVVHTPLMWLDKAETWELADQLQAFDYVREHTLTCYNGVRGDGCGECPACQLRQKGLETYVDKRNGGGS

SEQ ID NO: 38516 - protein, 222 aa, Gracilibacillus kekensis
  REGION 1..222: note = tr|A0A1M7IEV1|A0A1M7IEV1_9BACI 7-cyano-7-deazaguanine synthase OS=Gracilibacillus kekensis OX=1027249 GN=queC PE=3 SV=1
MNKNNRAVVVFSGGQDSTTCLFWALERFDHVELVTFDYNQRHKEEIEVAKEIATNQNLKHHILDMSLLNQLAPNALTRSDMEVEEGKDGALPNTFVPGRNLLFLSFATILAKQINAKHIITGVCETDFSGYPDCRDVFIKSLNVTLNLSMDDDFVVHTPLMWLDKAQTWQLADQLGSFNYVREKTLTCYNGVRGAGCGECPACELRQKGLDLYLEQRAEENN

SEQ ID NO: 38517 - protein, 248 aa, Gracilibacillus orientalis
  REGION 1..248: note = tr|A0A1I4GZY3|A0A1I4GZY3_9BACI 7-cyano-7-deazaguanine synthase OS=Gracilibacillus orientalis OX=334253 GN=queC PE=3 SV=1
MPSLRYDFFVFGCIEFSFFSVKGDFFMDKNKRAVVVFSGGQDSTTCLFWALEKFDHVELVTFDYNQRHQQEIEVATEIAAEQGLKHHILDMSLLNQLAPNALTRDDIEVADGEDGELPNTFVPGRNLLFLSFATILAKQIDAKHIITGVCETDFSGYPDCRDIFIKSLNVTLNLSMDDDFVVHTPLMWMDKAETWELADQLDAFDYIREKTLTCYNGVRGTGCGECPACHLRQNGLDTYLAKRNGVNN

SEQ ID NO: 38518 - protein, 222 aa, Gracilibacillus ureilyticus
  REGION 1..222: note = tr|A0A1H9P840|A0A1H9P840_9BACI 7-cyano-7-deazaguanine synthase OS=Gracilibacillus ureilyticus OX=531814 GN=queC PE=3 SV=1
MEKNKRAVVVFSGGQDSTTCLFWALKKFKHVELVTFDYDQRHKEEITVAKEIAEEQGLRHHILDMALLNQLAPNALTRESIDVTHGENGDLPSTFVPGRNLLFLSFAAILAKQIDARHIITGVCETDFSGYPDCRGIFVKSLNVTLNLSMDNDFVLHTPLMWLDKAETWKLAEELGAFDYIREKTLTCYNGIRGSGCGECPSCELRQKGLEKYIRLRSEGEM

SEQ ID NO: 38519 - protein, 252 aa, Granulibacter bethesdensis
  REGION 1..252: note = sp|Q0BQ87|QUEC_GRABC 7-cyano-7-deazaguanine synthase; OS = Granulibacter bethesdensis (strain ATCC BAA-1260 / CGDNIH1) OX=391165 GN=queC PE=3 SV=1
MIETKPIPGLALPRHDHALVLFSGGQDSTTCLAWALERFAHVETIGFTYGQRHSVEMECRGRVRQVLAHMSGRSGADWGSRLGDDHVLDLGNALHHVGQSALTGRSPIEIGQGGLPTSFVPGRNLIFLTYAAALGWRRGLRRMVGGMCETDYSGYPDCRDDTIKAMQLALNTGMEAHFVLETPLMWLTKAETWALADSLGGPALVALIEEETHTCYLGDRSQRHPWGYGCGECPACSLRAEGWREWQTASSA

SEQ ID NO: 38520 - protein, 265 aa, Granulibacter bethesdensis
  REGION 1..265: note = tr|A0A1L3S0X4|A0A1L3S0X4_9PROT 7-cyano-7-deazaguanine synthase OS=Granulibacter bethesdensis OX=364410 GN=queC PE=3 SV=1
MLIIGTAIGQRESMTETKPIPGLALPRNDHALVLFSGGQDSTTCLAWALERFAHVETIGFTYGQRHSVEMECRGQVRKALAQMSGLSGAEWGSRLGEDHVLDLGNALHHVGQSALTGRSPIEIGQGGLPTSFVPGRNLIFLTYAAALGWRRGLRRIVGGMCETDYSGYPDCRDDTIKAMQLALNTGMEAHFVLETPLMWLTKAETWSLAHSLGGPTLVALIEEETHTCYLGDRSQRHPWGYGCGECPACALRAEGWREWQAASSA

SEQ ID NO: 38521 - protein, 214 aa, Granulicatella elegans
  REGION 1..214: note = tr|D0BNU5|D0BNU5_9LACT 7-cyano-7-deazaguanine synthase OS=Granulicatella elegans ATCC 700633 OX=626369; GN = queC PE=3 SV=1
MKLVLLSGGVDSSTALSLALSQDPQVEAISFSYNQKHKELELEAARKIAAYYKVPHQILEVSSIFSGSKSSLNAGNDIEVSTGDYATQTEANTEVEFRNGIFISILAGIAMQKGASEIYFGAHLDDSGVIYPDCSPEFIEAMNQAVQLGSGGKVRLTAPFGQVKKKDIVAKGVELGVPYELTYSCYNGVYPPCGKCGTCIDRNKAFLANGLEIL

SEQ ID NO: 38522 - protein, 214 aa, Granulicatella sp.
  REGION 1..214: note = tr|A0A420YUI8|A0A420YUI8_9LACT 7-cyano-7-deazaguanine synthase OS=Granulicatella sp.; OX = 2049028 GN=queC PE=3 SV=1
MKLVLLSGGVDSSTALALALSQDPQVEAISFSYNQKHKELELEAARKIAAYYKVPHQILEVSSVFSGSKSSLNAGNDIEVSTGDYAIQTEANTEVEFRNGIFISILAGIAMQKGASEIYFGAHLDDSGVIYPDCSPEFIEAMNQAVQLGSGGKVRLTAPFGQVKKKDIVAKGVELGVPYELTYSCYNGVYPPCGKCGTCIDRNKAFLANGLEIL

SEQ ID NO: 38523 - protein, 236 aa, unidentified
  source 1..236: note = Granulicella mallensis
  REGION 1..236: note = tr|G8NPF1|G8NPF1_GRAMM 7-cyano-7-deazaguanine synthase OS=Granulicella mallensis (strain ATCC BAA-1857 / DSM 23137 / MP5ACTX8) OX=682795 GN=queC PE=3 SV=1
MSRPKAVVCLSGGMDSTVCAALAARDYESYGLHFSYGQRTEARELASARAVAAAVGLHDLLELKTDLFRRIGGSALTDSSIAVPEAGDENADETSHRTGSEVPVTYVPFRNAHFLSAAVSWAEVLGATTVFIGAVEQDSSGYPDCRPAYYEAFNQLIRTGTKEGEIAVVTPLIRLRKSEIVRLGVELGAPLHVSWSCYSGETEACGVCESCVLRLRAFAEAGAVDPIPYAEPKRSN

SEQ ID NO: 38524 - protein, 230 aa, Granulicella pectinivorans
  REGION 1..230: note = tr|A0A1I6MZ14|A0A1I6MZ14_9BACT 7-cyano-7-deazaguanine synthase OS=Granulicella pectinivorans OX=474950 GN=queC PE=3 SV=1
MSKPKAVLCLSGGMDSCVCAALAARDYEVYALHFSYGQRTELRELQSAREIVRLTNAKELMHLTIDLFRKIGGSALTDEAIAVPDAVEHVDGSDRVGDEVPVTYVPFRNAHFLSAAVSWAEVLGAETILIGAVEQDSSGYPDCRPSYYAAFNELIKMGTKDGTIRVETPLIAMRKREIVALGVELGAPFHVSWSCYASGTEACGVCESCALRLKAFEEAGAVDPIVYSRR

SEQ ID NO: 38525 - protein, 232 aa, Granulicella rosea
  REGION 1..232: note = tr|A0A239JMT7|A0A239JMT7_9BACT 7-cyano-7-deazaguanine synthase OS=Granulicella rosea; OX = 474952 GN=queC PE=3 SV=1
MTTKPKAVLCLSGGMDSCVCAALAARDHEVYALHFSYGQRTEARELRAATDIARLIGAKEFMHLKIDLFRRIGGSALTDANIAVPDAAEDETQIGAEVPVTYVPFRNAHFLSAAVSWAEVIGAKKVLIGAVEQDSSGYPDCRPAYYAAFNELIRQGTKEGDIQVETPLIALRKKEIVELGVEVGAPFHVSWSCYAGEREACGACESCALRLRAFREAGGVDPIPYASGAGRI

SEQ ID NO: 38526 - protein, 238 aa, unidentified
  source 1..238: note = Granulicella sibirica
  REGION 1..238: note = tr|A0A4Q0T2K9|A0A4Q0T2K9_9BACT 7-cyano-7-deazaguanine synthase OS=Granulicella sibirica; OX = 2479048 GN=queC PE=3 SV=1
MSSDLVRPRAVVCLSGGMDSCVCATLAARDFDVFAVHFSYGQRTEAREQWSAEEVARITGAQELMHLKIDLFRMIGGSALTDEGIAVPSAKDDESEMAGGSLRTGHQVPVTYVPFRNAHFLSAAVSWAEVLGARTIFIGAVEQDSSGYPDCRPAYYDAFNELIRTGTKDGDIRVETPLIAMRKSEIVRLGVELGAPFHVSWSCYASESEACGVCESCVLRLRAFREAGAVDPIPYIQR

SEQ ID NO: 38527 - protein, 232 aa, Granulicella sp.
  REGION 1..232: note = tr|A0A3N1JKW0|A0A3N1JKW0_9BACT 7-cyano-7-deazaguanine synthase OS=Granulicella sp. GAS466; OX = 2485170 GN=queC PE=3 SV=1
MTNREQSRPRAVVCLSGGMDSCVCAALAARDYDVYAVHFSYGQRTEARERRSAEEVARIVGARELMPLKIDLFRQIGGSALTDAGIAVPAAPAEEASIGAEVPVTYVPFRNAHFLSAAVSWAEVLGARTVFIGAVEQDSSGYPDCRPAYYAAFNELIRTGTKEGDIRVATPLIAMRKSEIVRLGVELGAPFHVSWSCYSGETEACGVCESCVLRLRAFREAGAIDPIPYAVS

SEQ ID NO: 38528 - protein, 214 aa, Granulicella sp.
  REGION 1..214: note = tr|A0A1D2UEY2|A0A1D2UEY2_9BACT 7-cyano-7-deazaguanine synthase OS=Granulicella sp. SCN 62-9 OX=1660100 GN=queC PE=3 SV=1
MDSAVCATLAARDFDVYALHFGYGQRTEARELRSAQDVARIVGVRELLPLRMDLFRKIGGSALTDPGIAVPAAGDEASIGVEVPVTYVPFRNAHFLSAAVSWAEVLGAKTVFIGAVEQDSSGYPDCRPAYYEAFNRLIQTGTKEGDIRIHTPLIGLRKSEIVRLGVELGAPFHVSWSCYSAEKVACGVCESCVLRLRAFHDAGATDPIPYAVAG

SEQ ID NO: 38529 - protein, 231 aa, unidentified
  source 1..231: note = Granulicella tundricola
  REGION 1..231: note = tr|E8X137|E8X137_GRATM 7-cyano-7-deazaguanine synthase OS=Granulicella tundricola (strain ATCC BAA-1859 / DSM 23138 / MP5ACTX9) OX=1198114 GN=queC PE=3 SV=1
MSKAVLCLSGGMDSCVCAALAARDHELYAVHFSYGQRTEARELRSAEAIAKLVGAKDFLHLKIELFRRIGGSALTDRSIAVPDAVAEEAMHGRTGDEVPVTYVPFRNAHFLSAAVSWAEVLGAKVVTIGAVEQDSSGYPDCRPAYYDAFNELIRQGTKEGEIRVETPLIRMRKNEIVRLGVELGAPLHVSWSCYSGEDEACGVCESCALRLRAFREAGATDPVPYAAGTIR

SEQ ID NO: 38530 - protein, 229 aa, Granulosicoccus antarcticus
  REGION 1..229: note = tr|A0A2Z2NWD2|A0A2Z2NWD2_9GAMM 7-cyano-7-deazaguanine synthase OS=Granulosicoccus antarcticus IMCC3135 OX=1192854 GN=queC PE=3 SV=1
MNTLVICSGGLDSVTLAWKVASEAKLAGLISFNYGQRHLRELDAAASCAQQLDVPHDIVDLRALASLLPGSALTDPDIDVPLGHYQEQSMRSTVVPNRNPIMMSIAFGVASARALDAVALAVHGGDHFIYPDCRPGFIHAFAQMEQQALEGVHCPQLQAPFVNGSKADIVRIGYDLKVPFADTWSCYAGNDVHCGRCGTCVERREAFQLADVTDPTTYADPHSAIPSQP

SEQ ID NO: 38531 - protein, 231 aa, unidentified
  source 1..231: note = Grimontella sp.
  REGION 1..231: note = tr|A0A318G6F6|A0A318G6F6_9GAMM 7-cyano-7-deazaguanine synthase OS=Grimontella sp. AG753; OX = 2183905 GN=queC PE=3 SV=1
MKRAVVVFSGGQDSTTCLVQALQQYDEVHCVTFDYGQRHRAEIDVARELALQLGARAHKVLDVTLLNELAVSSLTRDSIPVPDYQPDASGIPNTFVPGRNILFLTLTAIYAYQVQAEAVITGVCETDFSGYPDCRDEFVKALNHAVNLGMAKDIRFETPLMWIDKAETWALADYWGKLELVRNETLTCYNGIKGDGCGQCAACNLRANGLSHYLADKTAVMAAMKKKTGLK

SEQ ID NO: 38532 - protein, 228 aa, unidentified
  source 1..228: note = Grimontia celer
  REGION 1..228: note = tr|A0A128ESQ1|A0A128ESQ1_9GAMM 7-cyano-7-deazaguanine synthase OS=Grimontia celer; OX = 1796497 GN=queC PE=3 SV=1
MKKAVVVFSGGQDSTTCLIQALSEFDEVHCITFDYNQRHKQEIDVARDVANALGATSHKVMDVGLLNELAISSLTRDNIPVSHELQENGLPNSFVPGRNILFLTLAGIYAYQLGAQTVITGVCETDFSGYPDCRNDFVQAMNKSLVLGMDRELEIRTPLMWLNKAETWALADKYGKLEFVRDHTLTCYNGVIGKGCGDCPACDLRQKGLDSYLEDKENVMASLDSKSA

SEQ ID NO: 38533 - protein, 232 aa, Grimontia hollisae
  REGION 1..232: note = tr|A0A377HPJ3|A0A377HPJ3_GRIHO 7-cyano-7-deazaguanine synthase OS=Grimontia hollisae; OX = 673 GN=queC PE=3 SV=1
MKKAVVVFSGGQDSTTCLIQALSEFDEVHCITFDYNQRHKQEIEVACDVAKTLGVTSHKVMDVGLLNELAISSLTRDNIPVSHELQENGLPNSFVPGRNILFLTLAGIYAYQLGVQTVITGVCETDFSGYPDCRNDFVQAMNKSLVLGMDRELEIRTPLMWLNKAETWALADKYGKLEYVRDNTLTCYNGVIGRGCGDCPACDLRQKGLDGYLSDKENVTASLNHKSLFVAR

SEQ ID NO: 38534 - protein, 232 aa, Grimontia hollisae
  REGION 1..232: note = tr|D0I7A2|D0I7A2_GRIHO 7-cyano-7-deazaguanine synthase OS=Grimontia hollisae CIP 101886 OX=675812; GN = queC PE=3 SV=1
MKKAVVVFSGGQDSTTCLIQALSEFDEVHCITFDYNQRHKQEIEVACDVAKTLGVTSHKVMDVGLLNELAISSLTRDNIPVSHELQENGLPNSFVPGRNILFLTLAGIYAYQLGAQTVITGVCETDFSGYPDCRNDFVQSMNKSLVLGMDRELEIRTPLMWLNKAETWALADKYGKLEYVRDNTLTCYNGVIGRGCGDCPACDLRQKGLDDYLSDKENVTASLNHKSLFVAR

SEQ ID NO: 38535 - protein, 228 aa, unidentified
  source 1..228: note = Grimontia indica
  REGION 1..228: note = tr|R1IRZ8|R1IRZ8_9GAMM 7-cyano-7-deazaguanine synthase OS=Grimontia indica OX=1056512 GN=queC PE=3 SV=1
MKKAVVVFSGGQDSTTCLIQALSEFDEVHCITFDYNQRHKQEIDVARDVANTLGATSHKVMDVGLLNELAISSLTRDNIPVSHELQENGLPNSFVPGRNILFLTLAGIYAYQLGAQTVITGVCETDFSGYPDCRNDFVQAMNKSLVLGMDRELEIRTPLMWLNKAETWALADKYGKLEFVRDHTLTCYNGVIGKGCGDCPACDLRQKGLDSYLEDKKNVMASLDSKSV

SEQ ID NO: 38536 - protein, 228 aa, unidentified
  source 1..228: note = Grimontia marina
  REGION 1..228: note = tr|A0A128FAT7|A0A128FAT7_9GAMM 7-cyano-7-deazaguanine synthase OS=Grimontia marina; OX = 646534 GN=queC PE=3 SV=1
MKKAVVVFSGGQDSTTCLIQALSEFDEVHCITFDYNQRHKQEIDVARDVANALGATSHKVMDVGLLNELAISSLTRDNIPVSHELQENGLPNSFVPGRNILFLTLAGIYAYQLGAQTVITGVCETDFSGYPDCRNDFVQAMNKSLVLGMDRELEIQTPLMWLNKAETWALADKYGKLEFVRDHTLTCYNGVIGKGCGDCPACDLRQKGLDSYLEDKEHVMASLDRKSV

SEQ ID NO: 38537 - protein, 228 aa, Grimontia sp.
  REGION 1..228: note = tr|A0A0F5ZXS9|A0A0F5ZXS9_9GAMM 7-cyano-7-deazaguanine synthase OS=Grimontia sp. AD028; OX = 1581149 GN=queC PE=3 SV=1
MKKAVVVFSGGQDSTTCLIQALSEFDEVHCITFDYNQRHKQEIDVARDVASALGATSRKVMDVGLLNELAISSLTRDNIPVSHELQENGLPNSFVPGRNILFLTLAGIYAYQLGAQTVITGVCETDFSGYPDCRNDFVQAMNKSLVLGMDRELEIRTPLMWLNKAETWALADKYGKLEFVRDHTLTCYNGVIGKGCGDCPACDLRQKGLDSYLEDKENVMASLDSKSV

SEQ ID NO: 38538 - protein, 231 aa, Gulbenkiania indica
  REGION 1..231: note = tr|A0A0K6GRV6|A0A0K6GRV6_9NEIS 7-cyano-7-deazaguanine synthase OS=Gulbenkiania indica; OX = 375574 GN=queC PE=3 SV=1
MNQQDKALVVLSGGQDSTTCLYWALERFGGPSNVEAVTFDYGQRHRVELEAAEHIARMAGVHHTVLPIDTFAAIGGNALTDASITPETEGPAEGALPNTFVPGRNLIFLTFAAALAYTRGARHLVTGVAQTDYSGYPDCRENTLKALELALRLGMDSRVVLHAPLMYLTKAETVHLARSVGAMEALAYSHTCYNGTVPPCGHCASCELRAKGFAEAGEPDPLVVRCAGRPQ

SEQ ID NO: 38539 - protein, 236 aa, unidentified
  source 1..236: note = Guyparkeria sp.
  REGION 1..236: note = tr|A0A426QEP1|A0A426QEP1_9GAMM 7-cyano-7-deazaguanine synthase OS=Guyparkeria sp. SCN-R1; OX = 2341113 GN=queC PE=3 SV=1
MTNRVARVAESSNKPAVVLLSGGLDSATLAWQARADGYAVHALSFDYGQRHRVELEAADRVARAVGATAHRTIRIDMGGLSGSSLTDQDRSVPDYSPDNTAIPSTYVPARNLTFLSFALGWAEMLGAERIYIGVNAVDYSGYPDCRPEFIEAFQKLANVATAADHPFEIHAPLLYMTKAEIIAHGSALGVDYGLTVSCYRADAQGRACGTCDSCHYRRQGFVEAGVSDPTDYVGGS

SEQ ID NO: 38540 - protein, 225 aa, unidentified
  source 1..225: note = Gynuella sunshinyii
  REGION 1..225: note = tr|A0A0C5VMQ6|A0A0C5VMQ6_9GAMM 7-cyano-7-deazaguanine synthase OS=Gynuella sunshinyii YC6258 OX=1445510 GN=queC PE=3 SV=1
MKKAVILLSGGLDSATTLYMAKDQGFDCYALSFDYGQKHSSELSAAKAIAESAGVIEHKIIPLNLRLIGGSALTDDSFSVPTDSDLTSSDIPVTYVPARNTVFLSIAMGYAEVIGSQNIFIGVNAVDYSGYPDCRPEFIHAFEVMANLATKASVEGQKLKINTPLIDLTKAEIVTQGTKLGLDYALTVSCYQADAAGKACGVCDSCRLRAQGFADAGLSDPTIYS

SEQ ID NO: 38541 - protein, 227 aa, unidentified
  source 1..227: note = Gynuella sunshinyii
  REGION 1..227: note = tr|A0A0C5VET2|A0A0C5VET2_9GAMM 7-cyano-7-deazaguanine synthase OS=Gynuella sunshinyii YC6258 OX=1445510 GN=queC PE=3 SV=1
MTKKTKALVVLSGGQDSTTCLYWAKENFDEVLCITFDYNQRHSIELDCAKKISEIAGVEQEVIRMGEIFKGLSPLTDKTKSVEQYESADTLPGGLENTFVPGRNMMFLTVAANRAYVHECDTIVIGVSQEDYGGYPDCRSEYIEQMEKAIEFALDKKIKIATPLINLNKKQTVEMAKEFSGCMDALSYSHTCYNGVFPPCGKCHSCLLRLRGFEQAGETDPIYRRVS

SEQ ID NO: 38542 - protein, 236 aa, unidentified
  source 1..236: note = Haematospirillum jordaniae
  REGION 1..236: note = tr|A0A143DBT8|A0A143DBT8_9PROT 7-cyano-7-deazaguanine synthase OS=Haematospirillum jordaniae OX=1549855 GN=queC PE=3 SV=1
MLDHDAALVLFSGGQDSATCLAWALERYTRVETVGFDYRQRHAIELEVRHSFRESIAHLHNHWGNRLGVDHRIDARSLADISQTAMTETVAFRTGSDGLPNTFVPGRNLLFLTYAAAIAYRRGIRTLVTGVCETDFSGYPDCRDDTLKAMQVALNLGMDCRFVVETPLMWIDKAGTWAMAHDLGGDKLVDLILEKTHTCYAGDRDHRHPWGYGCGTCQACELRARGWDAWQQAVHQ

SEQ ID NO: 38543 - protein, 227 aa, Haemophilus aegyptius
  REGION 1..227: note = tr|A0A3S5ERR7|A0A3S5ERR7_HAEAE 7-cyano-7-deazaguanine synthase OS=Haemophilus aegyptius; OX = 197575 GN=queC PE=3 SV=1
MNIFNPNHDRKAIVIFSGGQDSTTCLFQAIAEYGKENVEAITFQYGQRHAIELEKARSIAQDLGIKQTLIDTSVMKAITHNALMDEQAHIEQKESELPNTFVDGRNALFLLYAAIYAKGQGIQDIITGVCETDFSGYPDCRDVFIKSMNVTLNLAMDYQFNIKTPLMYLTKAQTWQLADELGVLDYVQKHTHTCYEGIEGGCGKCPSCILRNKGLKKYLTQKGRKNV

SEQ ID NO: 38544 - protein, 224 aa, Haemophilus ducreyi
  REGION 1..224: note = tr|A0A448KIK6|A0A448KIK6_HAEDC 7-cyano-7-deazaguanine synthase OS=Haemophilus ducreyi; OX = 730 GN=queC PE=3 SV=1
MNRSTRSHKAIVIFSGGQDSTTCLFQAIQEFKRENVEVITFQYGQRHSIELEKAAWIAQDLGIKQTVIDTSVIKAITTNALITEATIKQDGDKPNTFVDGRNALFLLYTAIYAKGQGIQTIFTGVCETDFSGYPDCRDIFIKSMNVTLNLAMDYNFNIRTPLMYLTKKQTWTLADQLGAFEYVRKHTHTCYLGVEGGCHTCPSCLLREKGLNEYLAEKSGEKNV

SEQ ID NO: 38545 - protein, 224 aa, Haemophilus ducreyi
  REGION 1..224: note = sp|Q7VNH6|QUEC_HAEDU 7-cyano-7-deazaguanine synthase; OS = Haemophilus ducreyi (strain 35000HP / ATCC 700724); OX = 233412 GN=queC PE=3 SV=1
MNRSTRSHKAIVIFSGGQDSTTCLFQAIQEFKRENVEVITFQYGQRHSIELEKAAWIAQNLGIKQTVIDTSVIKAITTNALITEATIKQDGDKPNTFVDGRNALFLLYTAIYAKGQGIQTIFTGVCETDFSGYPDCRDIFIKSMNVTLNLAMDYNFNIRTPLMYLTKKQTWALADQLGAFEYVREHTHTCYLGVEGGCHTCPSCLLREKGLNEYLAEKSGEKNV

SEQ ID NO: 38546 - protein, 224 aa, unidentified
  source 1..224: note = [Haemophilus] felis
  REGION 1..224: note = tr|A0A1T0BAU3|A0A1T0BAU3_9PAST 7-cyano-7-deazaguanine synthase OS=[Haemophilus] felis; OX = 123822 GN=queC PE=3 SV=1
MKNQPKAAVIFSGGQDSTTCLFLAIQEFGKENVEVITFQYGQRHAIELEKAAWIAKDLGVKQTLIDTSVIKSITTNALMDDTAEIQENGNTPNTFVDGRNALFLLYAAIYAKSQGIQTIFTGVCETDFSGYPDCRDVFVKSMNVTLNLAMDYNFNIRTPLMYLTKKETWKLADELGAFDYIREHTHTCYLGVEGGCHTCPSCVLREKGLNEYLAERACLEKDDV

SEQ ID NO: 38547 - protein, 227 aa, Haemophilus haemolyticus
  REGION 1..227: note = tr|A0A502LG59|A0A502LG59_HAEHA 7-cyano-7-deazaguanine synthase OS=Haemophilus haemolyticus OX=726 GN=queC PE=3 SV=1
MNISNPNYNRKAIVIFSGGQDSTTCLFQAIAEYGKENVETMTFQYGQRHSIELEKAKWIAQDLGVKQTFIDTSVIKAITHNALMDENVHIEQKDNKLPNTFVDGRNALFLLYAAIYAKGQGIQDIITGVCETDFSGYPDCRDVFIKSMNVTLNLAMDYQFNIKTPLMYLTKAQTWQLADELGVLDYVRNYTHTCYEGVDGGCSQCPSCILRDKGLKEYLAQKGGKNV

SEQ ID NO: 38548 - protein, 227 aa, Haemophilus haemolyticus
  REGION 1..227: note = tr|A0A502JMS5|A0A502JMS5_HAEHA 7-cyano-7-deazaguanine synthase OS=Haemophilus haemolyticus OX=726 GN=queC PE=3 SV=1
MNISNPNYNRKAIVIFSGGQDSTTCLFQAIAEYGKENVETMTFQYGQRHSIELEKAKWIAQDLGVKQTFIDTSVIKAITHNALMDENMHIEQKDNKLPNTFVDGRNALFLLYAAIYAKGQGIQDIITGVCETDFSGYPDCRDVFIKSMNVTLNLAMDYQFNIKTPLMYLTKAQTWQLADELGVLDYVRNYTHTCYEGVDGGCSQCPSCILRGKGLKEYLAQKGGKNV

SEQ ID NO: 38549 - protein, 228 aa, Haemophilus influenzae
  REGION 1..228: note = sp|P44124|QUEC_HAEIN 7-cyano-7-deazaguanine synthase; OS = Haemophilus influenzae (strain ATCC 51907 / DSM 11121 / KW20 / Rd) OX=71421 GN=queC PE=3 SV=2
MNIFNPNHDRKAIVIFSGGQDSTTCLFQAIAEYGKENIEAITFQYGQRHAIELEKARTIAQDLGIKQTLIDTSVMKAITHNALMDEQAHIEQKENELPNTFVDGRNALFLLYAAIYAKGQGIQDIITGVCETDFSGYPDCRDVFIKSMNVTLNLAMDYPIPISKTPLMYLTKAQTWQLADELGVLDYVQKHTHTCYEGIEGGCRKCPSCILRNKGLKKYLTQKGRKNV

SEQ ID NO: 38550 - protein, 227 aa, Haemophilus influenzae
  REGION 1..227: note = sp|A5UCR9|QUEC_HAEIE 7-cyano-7-deazaguanine synthase; OS = Haemophilus influenzae (strain PittEE) OX=374930; GN = queC PE=3 SV=1
MNIFNPNHDRKAIVIFSGGQDSTTCLFQAIAEYGKENIEAITFQYGQRHAIELEKARAIVQDLGIKQTLIDTSVMKAITHNALMDEQAHIEQKENELPNTFVDGRNALFLLYAAIYAKGQGIQDIITGVCETDFSGYPDCRDVFIKSMNVTLNLAMDYQFNIKTPLMYLTKAQTWQLADELGVLNYVQKHTHTCYEGIEGGCGKCPSCILRNKGLKKYLTQKGRKNV

SEQ ID NO: 38551 - protein, 221 aa, Haemophilus paracuniculus
  REGION 1..221: note = tr|A0A1T0ARN5|A0A1T0ARN5_9PAST 7-cyano-7-deazaguanine synthase OS=Haemophilus paracuniculus OX=734 GN=queC PE=3 SV=1
MSYSKKAVVIFSGGQDSTTCLFLAIQEFGRENVEVVTFQYGQRHHIELDKAKWIAQDLGVKQTVIDTSVIKAITTNALMDDNAQIEQQGDKPNTFVDGRNALFLLYTAIYAKSQGIQTIFTGVCETDFSGYPDCRDVFIKSMNVTLNLAMDYNFNIRTPLMYLTKKETWALADQLGAFDYVRTHTHTCYLGVEGGCHTCPSCVLREKGLNEYLAEKGESNV

SEQ ID NO: 38552 - protein, 224 aa, Haemophilus parahaemolyticus
  REGION 1..224: note = tr|A0A377I2I4|A0A377I2I4_HAEPH 7-cyano-7-deazaguanine synthase OS=Haemophilus parahaemolyticus OX=735 GN=queC PE=3 SV=1
MNLSQQPKKALVIFSGGQDSTTCLFQAIKEFGKENVEVVTFQYGQRHAIELEKAEWIAKDVGVKQTLIDTSVIKAITTNALMQEAAEIQQEGDKPNTFVDGRNALFLLYAGIYAKGQGISTIYTGVCETDFSGYPDCRDVFVKSMNVTMNLAMDYNFNIRTPLMYLTKKETWKLADELGVFDYILEHTHTCYLGVEGGCHTCPSCVLREKGLNEYLAEREKKDV

SEQ ID NO: 38553 - protein, 224 aa, Haemophilus parahaemolyticus
  REGION 1..224: note = tr|A0A377JDL7|A0A377JDL7_HAEPH 7-cyano-7-deazaguanine synthase OS=Haemophilus parahaemolyticus OX=735 GN=queC PE=3 SV=1
MNLSEQPQKALVIFSGGQDSTTCLFQAIKEFGKENVEVVTFQYGQRHAIELEKAEWIAKDVGVKQTLIDTSVIKAITTNALMQEGAEIQQEGNKPNTFVDGRNALFLLYACIYAKGQDISTIYTGVCETDFSGYPDCRDVFVKSMNVTMNLAMDYNFNIRTPLMYLTKKETWKLADELGVFDYIREHTHTCYLGVEGGCHTCPSCVLREKGLNEYLAEREKKDV

SEQ ID NO: 38554 - protein, 225 aa, Haemophilus parainfluenzae
  REGION 1..225: note = tr|A0A369YX22|A0A369YX22_HAEPA 7-cyano-7-deazaguanine synthase OS=Haemophilus parainfluenzae OX=729 GN=queC PE=3 SV=1
MNISNPNHNRKALVIFSGGQDSTTCLIQAIAEYGVENVEAVTFQYGQRHAIELEKARWIAKDLGVKQTLIDTSVIKSITHNALIDGNAAIEQKDGELPNTFVDGRNALFLLYAAIYAKGQEIHDIITGVCETDFSGYPDCRDVFVKSMNVTLNLAMDYQFNLKTPLMYLTKAQTWALADELDTLDYIRQHSHTCYEGVEGGCGECPSCKLRDKGLQEYLSTKAKA

SEQ ID NO: 38555 - protein, 225 aa, Haemophilus parainfluenzae
  REGION 1..225: note = tr|F0EUB3|F0EUB3_HAEPA 7-cyano-7-deazaguanine synthase OS=Haemophilus parainfluenzae ATCC 33392; OX = 888828 GN=exsB PE=3 SV=1
MNISNPNHNRKALVIFSGGQDSTTCLIQAIAEYGVENVETVTFQYGQRHSIELEKARWIAKDLGVKQTLIDTSVIKSITHNALMDANADIEQKDGELPNTFVDGRNALFLLYAAIYAKGQGINDIITGVCETDFSGYPDCRDVFIKSMNVTLNLAMDYPFNLKTPLMYLTKAQTWALADELGTLDYIRQHTHTCYEGVEGGCRECPSCKLRDKGLLEYLATKVKA

SEQ ID NO: 38556 - protein, 224 aa, Haemophilus paraphrohaemolyticus
  REGION 1..224: note = tr|A0A369ZU33|A0A369ZU33_9PAST 7-cyano-7-deazaguanine synthase OS=Haemophilus paraphrohaemolyticus OX=736 GN=queC PE=3 SV=1
MNLSEQPQKALVIFSGGQDSTTCLFQAIKEFGKENVEVVTFQYGQRHAIELEKAEWIAKDVGVKQTLIDTSVIKAITTNALMQEGAEIQQEGDKPNTFVDGRNALFLLYAGIYAKGQDISTIYTGVCETDFSGYPDCRDVFVKSMNVTMNLAMDYNFNIRTPLMYLTKKETWKLADELGVFDYIREHTHTCYLGVERGCHTCPSCVLREKGLNEYLAEREKKDV

SEQ ID NO: 38557 - protein, 224 aa, Haemophilus paraphrohaemolyticus; identical to SEQ ID NO: 38553
  REGION 1..224: note = tr|I2NFN6|I2NFN6_9PAST 7-cyano-7-deazaguanine synthase OS=Haemophilus paraphrohaemolyticus HK411; OX = 1095743 GN=queC PE=3 SV=1

SEQ ID NO: 38558 - protein, 219 aa, Haemophilus parasuis
  REGION 1..219: note = tr|A0A143CH34|A0A143CH34_HAEPR 7-cyano-7-deazaguanine synthase OS=Haemophilus parasuis; OX = 738 GN=queC PE=3 SV=1
MKPTPKAAVIFSGGQDSTTCLFLAIKEFGKENVEAVTFQYGQRHAIELDKARWIAQDLGVKQTLIDTSVIKAITANALMDDQAEIKQTGNTPNTFVDGRNALFLLYTAIYAKSQGIQTIYTGVCETDFSSYPDCRDVFIKSMNVTLNLAMDYNFNIRTPLMYLTKKETWALADQLGAFDYIRTHTHTCYLGVEGGCHTCPSCLLREKGLNKYLEEKSNV

SEQ ID NO: 38559 - protein, 219 aa, Haemophilus parasuis
  REGION 1..219: note = sp|B8F6L5|QUEC_HAEPS 7-cyano-7-deazaguanine synthase; OS = Haemophilus parasuis serovar 5 (strain SH0165); OX = 557723 GN=queC PE=3 SV=1
MKPTPKAVVIFSGGQDSTTCLFLAIKEFGKENVEVVTFQYGQRHAIELDKARWIAQDLGVKQTLIDTSVIKAITTNALMDDQAEIKQTGNTPNTFVDGRNALFLLYTAIYAKSQGIQTIYTGVCETDFSGYPDCRDVFIKSMNVTLNLAMDYNFNIRTPLMYLTKKETWALADQLGAFDYIRTHTHTCYLGVEGGCHTCPSCLLREKGLNEYLEEKGNV

SEQ ID NO: 38560 - protein, 228 aa, Haemophilus pittmaniae
  REGION 1..228: note = tr|F9Q7R4|F9Q7R4_9PAST 7-cyano-7-deazaguanine synthase OS=Haemophilus pittmaniae HK 85 OX=1035188; GN = queC PE=3 SV=1
MNIANPNRNRKALVIFSGGQDSTTCLIQAIAEYGVENVETVTFQYGQRHAIELAKARWIAQDLGVKQTLIDTSVIKSITHNALMDENATIEQKDGELPNTFVDGRNALFLLYAAIYAKGQGIHDIITGVCETDFSGYPDCRDVFVKSMNVTLNLAMDYPFNLKTPLMYLTKAQTWALADELGALDYVRQHSHTCYEGVEGGCGECPSCKLRDNGLQEYLATKAEANCV

SEQ ID NO: 38561 - protein, 228 aa, Haemophilus pittmaniae
  REGION 1..228: note = tr|A0A377IZZ8|A0A377IZZ8_9PAST 7-cyano-7-deazaguanine synthase OS=Haemophilus pittmaniae; OX = 249188 GN=queC PE=3 SV=1
MNIANPNRNRKALVIFSGGQDSTTCLIQAIAEYGVENVETVTFQYGQRHAIELAKARWIAQDLGVKQTLIDTSVIKSITHNALMDENATIEQKDGELPNTFVDGRNALFLLYAAIYAKGQGIHDIITGVCETDFSGYPDCRDVFVKSMNVALNLAMDYPFNLKTPLMYLTKAQTWALADELGALDYVRQHSHTCYEGVEGGCGECPSCKLRDNGLQEYLAAKAEANCV

SEQ ID NO: 38562 - protein, 228 aa, Haemophilus sp.
  REGION 1..228: note = tr|A0A1S1FMU9|A0A1S1FMU9_9PAST 7-cyano-7-deazaguanine synthase OS=Haemophilus sp. HMSC61B11 OX=1608882 GN=queC PE=3 SV=1
MNISNPNHNRKALVIFSGGQDSTTCLIQAIAEYGVENVEAVTFQYGQRHAIELEKARWIAKDLGVKQTLIDTSVIKSITHNALMDANTNIEQKDGELPNTFVDGRNALFLLYAAIYAKGQEIHDIITGVCETDFSGYPDCRDVFVKSMNVTLNLAMDYPFNLKTPLMYLTKAQTWALADELDALDYVRQHSHTCYEGVEGGCGECPSCQLRHKGLQEYLSIKAENKNV

SEQ ID NO: 38563 - protein, 225 aa, Haemophilus sp.
  REGION 1..225: note = tr|A0A1F0UEM0|A0A1F0UEM0_9PAST 7-cyano-7-deazaguanine synthase OS=Haemophilus sp. HMSC073C03 OX=1739452 GN=queC PE=3 SV=1
MNISNPNHNRKALVIFSGGQDSTTCLIQAIAEYGVENVETVTFQYGQRHAIELEKARWIAQDLGVKQTLIDTSFIKSITHNALMDANADIEQKNGELPNTFVDGRNALFLLYAAIYAKGQGINDIITGVCETDFSGYPDCRDVFIKSMNVTLNLAMDYPFNLKTPLMYLTKAQTWALADELGALDYVRQHTHTCYEGIEGGCGECPSCKLRDKGLQEYLATKAKA

SEQ ID NO: 38564 - protein, 438 aa, unidentified
  source 1..438: note = Haemophilus sputorum
  REGION 1..438: note = tr|J5HH07|J5HH07_9PAST 7-cyano-7-deazaguanine synthase OS=Haemophilus sputorum HK 2154 OX=1078483; GN = HMPREF1128_0217 PE=3 SV=1
MTQLVFHHDINQLNNLQNGTIPVHLYGMGNKNLQIAHIGNMVLDRVRRLGIRLNNQVMDFLTIAMAVTAADTFVLRKDTANGWCRSFSITLPLCQPAIWQANKVHLEHILHFLSGDIWQFDFQENGQNPTQPYSQNGRTKLVDLRNKDCVCLFSGGLDSSIGAIDLLEQGHSPVLVSHSYKGDKSRQQAIIQQLNQNGYINQFSQFNAIAQPHLNNGRATEITMRTRSLNFLAFAIVSAYALQDVVQKEIDIFVPENGVISINAPLTVRRVGTLSTRTTHPYFIQEIQKLFTAVNIPFTLKNPYQFKTKGQMIAECKNLPLLQQIIPDTVSCSHWKRKNQQCGVCVPCLIRRASLHYAGITHDAGYEFNDIRQILTNRDRKDDLFALINAIHQKNHRNMNQWVLQSGSLPTQQLNQFANVLMNGLDEVEKLLMVNQIL

SEQ ID NO: 38565 - protein, 221 aa, unidentified
  source 1..221: note = Haemophilus sputorum
  REGION 1..221: note = tr|A0A369YPX5|A0A369YPX5_9PAST 7-cyano-7-deazaguanine synthase OS=Haemophilus sputorum; OX = 1078480 GN=queC PE=3 SV=1
MQQNKKAVVIFSGGQDSTTCLFQAIEEFGKENVEVVTFQYGQRHAIELEKAAWIAQDLGVKQTLIDTSLIKAITTNALMQDGAEIKQQGDTPNTFVDGRNALFLLYAAIYAKGQGIQTIFTGVCETDFSGYPDCRDVFVKSMNVTLNLAMDYNFNIRTPLMYLTKKETWALADKLGAFDYIRTHTHTCYLGVEGGCHTCPSCLLREKGLNEYLAEKGMANV

SEQ ID NO: 38566 - protein, 228 aa, Hafnia alvei
  REGION 1..228: note = tr|A0A0K0HWF1|A0A0K0HWF1_HAFAL 7-cyano-7-deazaguanine synthase OS=Hafnia alvei OX=569; GN = queC PE=3 SV=1
MKRAVVVFSGGQDSTTCLIQALERYDEVHCITFDYGQRHRAEIDVARDLAIKLGASAHKVLDVGLLNELAISSLTRDNIPVPTESEDGIPNTFVPGRNILFLTLAAIYAYQVQAEAVITGVCETDFSGYPDCRDEFVKALNKAIVLGMARDVRFETPLMWLNKAETWALADHYQKLDLVRQETLTCYNGIQGDGCGECAACHLRSHGLNDYLANRAAVSASLKEKTGL

SEQ ID NO: 38567 - protein, 228 aa, Hafnia alvei; identical to SEQ ID NO: 38566
  REGION 1..228: note = tr|A0A097R538|A0A097R538_HAFAL 7-cyano-7-deazaguanine synthase OS=Hafnia alvei FB1; OX = 1453496 GN=queC PE=3 SV=1

SEQ ID NO: 38568 - protein, 228 aa, Hafnia paralvei
  REGION 1..228: note = tr|A0A2A2M7B2|A0A2A2M7B2_9GAMM 7-cyano-7-deazaguanine synthase OS=Hafnia paralvei; OX = 546367 GN=queC PE=3 SV=1
MKRAVVVFSGGQDSTTCLIQALDQYDEVHCITFDYGQRHRAEIDVARDLAIKLGASAHKVLDVGLLNELAISSLTRDNIPVPTESEDGIPNTFVPGRNILFLTLAAIYAYQVQAEAVITGVCETDFSGYPDCRDEFVKALNKAITLGMARDVRFETPLMWLNKAETWALADHYQKLDLVRRETLTCYNGIQGDGCGECAACHLRSHGLNEYLANQAVVSASLKEKTGL

SEQ ID NO: 38569 - protein, 446 aa, Hafnia paralvei
  REGION 1..446: note = tr|A0A2A2MB56|A0A2A2MB56_9GAMM DNA-binding protein; OS = Hafnia paralvei OX=546367 GN=CJD50_12945 PE=4 SV=1
MNIYIDHDYSRLPASNDSTISVQIYSRDGVVAKNGIKPRNDIATIGKPVYDAIKRLGVQISDEVMDFLTISMAVTAADTFILRDDCFDGWTRDINVSVRVINPTIWIKNKTYIEKALQFLSGDVWNFDFKKDGMKPPVPFKPVNGRKLINLKGLDCISLFSGGLDSAIGVIDILTTGEKPLLISHSYKGDKAKQAQISKGIKDKGTFSRLCTSANPIGRGMERDITMRTRSLNFLAFAAVGADAVMKANNKSNISIYVPENGFISLNAPLTNRRIGSLSTRTTHPYFIEMMQDIFDNIGFKMKFINPYQFKTKGQMVSQCKDMKTLAQIVDSTVSCSHWKRKHQQCGYCVPCMIRRASLLRGGIKETITYHQASYANLLNFVKNKQDGRDDIFSVIMAIENAKKRNLKAWVLKSGKLKEQDIGKYENVFFEGLQEVEAFLKKEKLV

SEQ ID NO: 38570 - protein, 231 aa, Hahella chejuensis
  REGION 1..231: note = sp|Q2S7U9|QUEC_HAHCH 7-cyano-7-deazaguanine synthase; OS = Hahella chejuensis (strain KCTC 2396) OX=349521 GN=queC; PE = 3 SV=1
MNQSDTSLIPNRAVAIFSGGMDSFTLLNELVQEGKEVFALSFNYGQRHSKELECARQVCESLNIAHKIIDITAINSLLAGSSLTDDIQVPEGHYEEENMKSTVVPNRNMILLSLAIGYAVSLKAEAVYYGAHGGDHAIYPDCRPAFVEIMSEASKLANYEPVEVRAPYLYETKIEILRRGLALGLDYGQTWTCYNGREKACGKCGSCVERLEAFDKNDATDPLAYESVCTG

SEQ ID NO: 38571 - protein, 223 aa, Hahella sp.
  REGION 1..223: note = tr|A0A3T0VWJ1|A0A3T0VWJ1_9GAMM 7-cyano-7-deazaguanine synthase OS=Hahella sp. KA22; OX = 1628392 GN=queC PE=3 SV=1
MPNRAVAIFSGGMDSFTLLNELVAEGKEVFALSFNYGQRHSKELVCARQVCESLNVAHKIIDITAINSLLAGSSLTDDIQVPEGHYEEENMKSTVVPNRNMILLSLAIGYAVSLKAEAVYYGAHGGDHAIYPDCRPAFVEIMSEASKLANYEPVEVRAPYLYETKIEILRRGLALGLDYGQTWTCYNGREKACGKCGSCVERLEAFEKNDAVDPVAYESVCTG

SEQ ID NO: 38572 - protein, 461 aa, Hahella sp.
  REGION 1..461: note = tr|A0A261GNL8|A0A261GNL8_9GAMM Uncharacterized protein OS=Hahella sp. CCB-MM4 OX=1926491 GN=BTA51_11355; PE = 4 SV=1
MTFLSSPENSSNSLTVDVVEPHNTLLPTSAVACEINNHIQFNPEILETYCAKNLESIVYDLLITTAAIEFSDRYKPRSRVKWPRDIQLRIPVADPSHWSSPSVSDSLRKTLNVLTGDHWRLYFVQRSSKYTEAVQSQLDYPPNASAIMAYSDGLDSRSVASIFEDSEGKDTLIKVRVGSSDKQNGKPAAFTAIPFTVKYPKHHHKEDSFRSRGFKFAAISAIAAYLSKTKNIIVPESGQGALSPVLLPLHAQYPDFRNHPVFFRKMESFIYALLGYSLNYSQPRIWFTKGETVFSALNTGIPEDVLKDTRSCWQSRYNVSFGGIRHQCGACAACLLRRLSLNHAEIEESENTYYWSNLSSSSFEKAAPDSLSTRKGFKTMKANAVAGVRHFDELANLVKDSNTRFLLAHSLELAKSTNQKHEDVHIRLTEMLKKHSHEWHEFLNSLKDKSFINNWIQGVIR

SEQ ID NO: 38573 - protein, 253 aa, unidentified
  source 1..253: note = Hahellaceae bacterium
  REGION 1..253: note = tr|A0A2D8R8K0|A0A2D8R8K0_9GAMM 7-cyano-7-deazaguanine synthase OS=Hahellaceae bacterium; OX = 2048971 GN=queC PE=3 SV=1
MSSRSFNNAPSGDSPSVVIFSGGMDSYTLLHSLLQQVGPSARVQAEAVPQRDLVHALSFDYGQRHKKELIYAADVCKSLGIPHRIIDITAVNSLLAGSSLTDAIDVPEGHYESESMKSTVVPNRNMILLSLAIGYAVSIKAEAVYFGAHGGDHAIYPDCRPEFLERMNAVSVIANYEPVRVEAPFVGIDKIDILGQGLAMGLDYSKTWTCYNGREKACGKCGSCVERLEAFAENGVVDPLPYEPNVDRPDLKV

SEQ ID NO: 38574 - protein, 234 aa, unidentified
  source 1..234: note = Hahellaceae bacterium
  REGION 1..234: note = tr|A0A2D8RHY9|A0A2D8RHY9_9GAMM 7-cyano-7-deazaguanine synthase OS=Hahellaceae bacterium; OX = 2048971 GN=queC PE=3 SV=1
MVLSNDSALVLFSGGQDSTTCLGWALDRFRRVETIGFRYKQRHAVELECREQILAYLSKDYPEWGDRLGEDHLVDVPALADIGETAMTEEVEITAGNNGLPNTFVPGRNLLFLTFAAALAYRRGIKHIITGVCETDFSGYPDCRDDTVKALQVAINLGMESRFNLETPLMWLDKAETWALADHIGGKVFLELIIEQSHTCYKGDRSQRWAWGYGCGDCPACDLRASGWELFQAR

SEQ ID NO: 38575 - protein, 125 aa, Halanaerobium congolense
  REGION 1..125: note = tr|A0A4R7EC13|A0A4R7EC13_9FIRM Queuosine biosynthesis protein QueC (Fragment) OS=Halanaerobium congolense OX=54121 GN=BY453_11357 PE=4 SV=1
MSTATTEAKYNLLIDNLKELEPFVIAFSGGVDSTFLTAAAQKAGVEFEAVTVNSPFVPDREIKEVENLVRSMDFKHQQISIELQELKKAADNTAERCYYCKKVIFDKIINYANGKTVIEGSNLDD

SEQ ID NO: 38576 - protein, 272 aa, Halanaerobium congolense
  REGION 1..272: note = tr|A0A1M7LVS0|A0A1M7LVS0_9FIRM Uncharacterized protein OS=Halanaerobium congolense OX=54121; GN = C7954_10622 PE=4 SV=1
MTTATTKAKYNLLIDNLKELEPFVIAFSGGVDSTFLTAAAQEAGVEFEAVTVNSPFVPDREIKEVENLVRSMDFKHQQMSIELQELKKAADNTAERCYYCKKVIFDKIINYANGKTVIEGSNLDDTGDYRPGRKALKELGIKSPLLKVELTKKEIRMLSKELGLSTWDKPSLSCLATRVSYDNQITAERLEKIELAEELLRRNGFHQFRVRDHNNLARIELSEADREKILDLNLMDKLSDKLQKLGFQYVTLDLSAYKSGSMNKEILEAKDE

SEQ ID NO: 38577 - protein, 272 aa, unidentified
  source 1..272: note = Halanaerobium hydrogeniformans
  REGION 1..272: note = tr|E4RKB3|E4RKB3_HALHG Uncharacterized protein; OS = Halanaerobium hydrogeniformans OX=656519 GN=Halsa_2216; PE = 4 SV=1
MSTVTKEEKYSILLDNLKNLEPFILAFSGGVDSTFLTAAALDAEVEFEAVTVNTPFVPQREINEIKELVKELKFEHRQLDIGLSELEKALENTPERCYYCKEIIFSKIKEYAGEREIIEGSNLDDTGDYRPGRKALKELKVKSPLLDAGFTKKEIRSLSKKMDLSTWNKATLSCLATRISYNDQITEEKLEKIYLAEELLRKNGLIQFRVRDHNNLARIEIAPQERSKILDLNLMDKIHSKLIKLGFQYVTLDLSAYKSGSMNKEILGVDDE

SEQ ID NO: 38578 - protein, 272 aa, Halanaerobium kushneri
  REGION 1..272: note = tr|A0A1N6Z4V6|A0A1N6Z4V6_9FIRM Uncharacterized protein OS=Halanaerobium kushneri OX=56779; GN = SAMN05421834_11652 PE=4 SV=1
MSTVTTTDKYNLLLESLTELEPFIIAFSGGVDSTFLAAAATKAGVDFEAVTVNTPFVPEREIKEVAELVEKLDLNHQQLEIELRELEKAVENNSDRCYHCKKVIFNKIIDYAAGKTVIEGSNVDDQGDYRPGRKALKELGVKSPMLAAALTKNEIRELSKKLGLSTWNKPSMSCLATRVSYDDRISADKLEKIEIAEELMHRMGFEQFRVRDHSNLARIELSEADREKILDLKLMDKLSDKLQKLGFQYVTLDLSAYKSGSMNKEILEAKDE

SEQ ID NO: 38579 - protein, 272 aa, Halanaerobium saccharolyticum
  REGION 1..272: note = tr|M5EF96|M5EF96_9FIRM ATP-utilizing enzyme of the PP-loop superfamily OS=Halanaerobium saccharolyticum subsp. saccharolyticum DSM 6643 OX=1293054 GN=HSACCH_01615; PE = 4 SV=1
MSISTTKDKYKLLLDNLKELEPFVIAFSGGVDSTFLTAAAKEAGVEFEAVTVNTPFVPEREIREVKKLVQELEIEHQQLEIELNQLEKALENDAERCYHCKKVIFNQIMDYAAGKKVVEGSNLDDTGDYRPGRRALKELGIKSPLLTAQLTKKEIRMLSKDLGLITWNKPSLSCLATRVSYGNKITADRLEKIEIAEELLRRNGFHQFRVRDHNNLARIELSEADRDKILDLNLMDKLSDKLQKLGFQYVTLDLSAYESGSMNKEILEGKDE

SEQ ID NO: 38580 - protein, 272 aa, Halanaerobium saccharolyticum
  REGION 1..272: note = tr|A0A4R6M1D9|A0A4R6M1D9_9FIRM Uncharacterized protein OS=Halanaerobium saccharolyticum OX=43595; GN = DFR79_102102 PE=4 SV=1
MSTVTTADKYNLLLDNLKELEPFVIAFSGGVDSTFLTAAAQKAGAEFEAVTVNTPFVPDREIREVAELVEELNFEHQQIEIELSELKKAAANTAERCYHCKKVIFNQILDYAAGKTVVEGSNLDDTGDYRPGRKALQELGVKSPLLAAQLTKKEIRMLSKDLGLVTWNKPTLSCLATRVSYNNPITAERLEKIEIAEELLRRNGFKQFRVRDHNNLARIELSEADREKIMDLNLMDKLSDKLQKLGFQYVTLDLSAYQSGSMNKEILEGKDE

SEQ ID NO: 38581 - protein, 272 aa, Halanaerobium sp.
  REGION 1..272: note = tr|A0A424YEM6|A0A424YEM6_9FIRM ATP-dependent sacrificial sulfur transferase LarE OS=Halanaerobium sp. MSAO_Bac5 OX=2293859 GN=larE PE=4 SV=1
MSTVTKEDKYKLLINKLKKLSPFVLAFSGGVDSTFLTAAALDAEVEFEAVTINTPFVADREINEVEELVKQLQFEHKEIEIELAELKKALDNTAERCYFCKEIIFSKIIDYAGDREVIEGSNLDDTGDYRPGRKALKELQVKSPLLEVGLTKKEIRELSKKMKLPTWNKATLSCLATRISYNDPITAQKLEKIDLAEELMRKNGFEQFRVRDHNNLARIEIAPQERSKILDLNLMDKIHSKLIKLGFKYVTLDLSAYESGSMNKEILEGENE

SEQ ID NO: 38582 - protein, 127 aa, Halanaerobium sp.
  REGION 1..127: note = tr|A0A139D768|A0A139D768_9FIRM Uncharacterized protein (Fragment) OS=Halanaerobium sp. T82-1 OX=1794808; GN = AWL62_1219 PE=4 SV=1
MSTATTEAKYNLLIDNLKELEPFVIAFSGGVDSTFLTAAAQKAGVEFEAVTVNSPFVPDREIKEVENLVRSMDFKHQQISIELQELKKAADNTAERCYYCKKVIFDKIINYANGKTVIEGSNLDDTG

SEQ ID NO: 38583 - protein, 233 aa, Haliea salexigens
  REGION 1..233: note = tr|A0A3C1KQB3|A0A3C1KQB3_9GAMM 7-cyano-7-deazaguanine synthase OS=Haliea salexigens; OX = 287487 GN=queC PE=3 SV=1
MSPVTERPGTGQRAVILVSGGLDSTTVLAMALRQGYKCYTLSFDYGQRHRAELVAAERVSTAHRGVQHKVVTLNLDSIGGSALTDPAIAVPEEATTGIPVTYVPARNTVFLSIALGWAEVLDAQAIFIGVNAVDYSGYPDCRPAYITAFEEMANLATRAGVEGRRLTLHTPLMHLSKAEIIAAGIGLGVDYALTVSCYQATDEGLACGRCDACRLRRDGFLQAGVADPTRYRP

SEQ ID NO: 38584 - protein, 236 aa, Haliea sp.
  REGION 1..236: note = tr|A0A2D5F8A9|A0A2D5F8A9_9GAMM 7-cyano-7-deazaguanine synthase OS=Haliea sp. OX=1932666; GN = queC PE=3 SV=1
MNGSKALVLFSGGQDSATCLAWALDRFDVVETIGFDYGQRHAIELAARGPLRDAVAIAMMDKGKGKLGGDIVLPAHVLGEVAQTALTHDVAIKAEEGGLPNTFVPGRNLLFLTLAAAYGWRRGIETLVGGMCETDYSGYPDCRDDTMKAMASALTLGLDQPVKIETPLMFITKAETWALAERLGGERLIEAILEHSHTCYEGVREERHSWGYGCGVCPACGLRAKGHAEWTAWTER

SEQ ID NO: 38585 - protein, 234 aa, Haliea sp.
  REGION 1..234: note = tr|A0A519JJ63|A0A519JJ63_9GAMM 7-cyano-7-deazaguanine synthase OS=Haliea sp. OX=1932666; GN = queC PE=3 SV=1
MHTTALVLFSGGQDSTTCLAQALSKYQRVETVGFDYGQRHSVELQARLVVLQQLRAQFPQWAHKLGEDHVLDLAVLGQVSETSLTRDMAFKMESSGLPNTFVPGRNLLFLTLAAALAYRRGLQVMVTGVCETDFSGYPDCRDDTMKAMQLALSLGMDKRFLIETPLMWIDKAATWALAESLGGTALVDLIIEHTHTCYLGDREHRHAWGYGCGSCPACDLRSRGYAAYRGTPPA

SEQ ID NO: 38586 - protein, 223 aa, unidentified; identical to SEQ ID NO: 37351
  source 1..223: note = Halieaceae bacterium
  REGION 1..223: note = tr|A0A2D7P0W4|A0A2D7P0W4_9GAMM 7-cyano-7-deazaguanine synthase OS=Halieaceae bacterium; OX = 2026743 GN=queC PE=3 SV=1

SEQ ID NO: 38587 - protein, 237 aa, unidentified
  source 1..237: note = Halieaceae bacterium
  REGION 1..237: note = tr|A0A356SFY9|A0A356SFY9_9GAMM 7-cyano-7-deazaguanine synthase OS=Halieaceae bacterium; OX = 2026743 GN=queC PE=3 SV=1
MSGSEKAVVLLSGGLDSSTVLRMAGAQHPEVYALSFRYGQRHSVELDCATRVATAAGVSKHTIIDIDLRQFGGSALTDDIDVPKDRSDAEMSADIPITYVPARNTIFLSFALAWAEVLKANHIYVGVNAVDYSGYPDCRPEFITAFEDMANLATKEAVEGRSRVQIHTPLIDLTKAEIIQQGMDLGVDYALTSSCYDPGDDGRPCMACDSCLLRQKGFLAAGVTDPLVAKFEQAPYA

SEQ ID NO: 38588 - protein, 225 aa, unidentified
  source 1..225: note = Halioglobus japonicus
  REGION 1..225: note = tr|A0A2N5Y877|A0A2N5Y877_9GAMM 7-cyano-7-deazaguanine synthase OS=Halioglobus japonicus; OX = 930805 GN=queC PE=3 SV=1
MNSDKRAVILVSGGLDSTTVLAMARAQGYACYTLSFDYGQRHRAELLAADRVSTALGDVEHKVVNLNLDAIGGSALTDTDIDVPEEETQGIPVTYVPARNTVFMSIALGWAEVLGAQDIFIGVNAVDYSGYPDCRPEYIAAFEAMANLATRAGVEGQKLTIHTPLMELGKGDIIAAGLDLGVDYSLTVSCYQADADGRACGKCDSCRLRRQGFVDAGVADPTRYY

SEQ ID NO: 38589 - protein, 224 aa, unidentified
  source 1..224: note = Halioglobus lutimaris
  REGION 1..224: note = tr|A0A2N5X0L4|A0A2N5X0L4_9GAMM 7-cyano-7-deazaguanine synthase OS=Halioglobus lutimaris; OX = 1737061 GN=queC PE=3 SV=1
MSEQRAVILVSGGLDSATVLAMARAEGYACYTLSFDYGQRNRAELQAAERVSASLGDVEHKVVRLNLDSIGGSALTDAAIDVPESLTEGIPVTYVPARNTIFLSIGLGWAEVLGAQDIFIGVNAVDYSGYPDCRPEYIAAFETMSNLATRIGVEGRKTTIHTPLMKLGKGEIIRAGLDLGLDYSLTVSCYQASVEGFACGKCDSCRLRRQGFVDAGVKDPTRYI

SEQ ID NO: 38590 - protein, 225 aa, unidentified
  source 1..225: note = Halioglobus sp.
  REGION 1..225: note = tr|A0A2E0Z321|A0A2E0Z321_9GAMM 7-cyano-7-deazaguanine synthase OS=Halioglobus sp.; OX = 2024834 GN=queC PE=3 SV=1
MSARAKAVVLVSGGLDSTTVLAMARARGFACYTLSFDYGQRHRAELAAAERVSAALGDVEHKVVTLNLDSIGGSALTDLSIAVPEQETEGIPVTYVPARNTVFLSIALGWAEVLGAQDIFIGVNAVDYSGYPDCRPQFIDAFEAMANLATREGVEGRKISVHAPLIDLGKGEIIRAGLELGVDYALTVSCYQATATGLACGRCDSCRLRRAGFEQAGVADPTRYV

SEQ ID NO: 38591 - protein, 224 aa, unidentified
  source 1..224: note = Halioglobus sp.
  REGION 1..224: note = tr|A0A3L7DU84|A0A3L7DU84_9GAMM 7-cyano-7-deazaguanine synthase OS=Halioglobus sp. U0301; OX = 2283635 GN=queC PE=3 SV=1
MTDKRAVILVSGGLDSTTVLAMARSEGYACYTLSFDYGQRHRAELFAAERVSAALGDVEHKVVKLNLDSIGGSALTDAAIAVPEEETEGIPVTYVPARNTVFLSIALGWAEVLGAQDIFIGVNAVDYSGYPDCRPAYIAAFENMANLATRAGVEGNRLRIHTPLMDLGKGEIINAGLALGVDYALTVSCYQATDAGLACGKCDACRLRARGFADAGVDDPTPYA

SEQ ID NO: 38592 - protein, 225 aa, unidentified
  source 1..225: note = Haloarcobacter mediterraneus
  REGION 1..225: note = tr|A0A4Q1AV66|A0A4Q1AV66_9PROT 7-cyano-7-deazaguanine synthase OS=Haloarcobacter mediterraneus OX=2023153 GN=queC PE=3 SV=1
MNKASKKAVCILSGGMDSTLASYIAKKEGYEIIAVHFNYGQRTEKKELQAFRNICNDLQIKEKYEIDIPFFTQIGASALTDNSIDIPINGIEEGVPITYVPFRNGIFLSIASAIAEKEEANALFIGVVEEDSSGYPDCTDEFISKMTNAINQGTKESTKIEIKTPLVHLMKDEIVKKSLELNVPLEHTWSCYQEEESACGVCDSCRLRLNGFEKANSKDPIKYKE

SEQ ID NO: 38593 - protein, 221 aa, Halobacillus aidingensis
  REGION 1..221: note = tr|A0A1H0S7B6|A0A1H0S7B6_HALAD 7-cyano-7-deazaguanine synthase OS=Halobacillus aidingensis OX=240303 GN=queC PE=3 SV=1
MEKNNKAVVVFSGGQDSTTCLFWALKKFDSVEVVTFDYNQRHKEEIEVAKEIAEDQQVLHHILDMSLLNQLAPNALTRDDIEVKDGEDGELPSTFVPGRNQLFLSFATILARQIGAKHIVTGVCETDFSGYPDCRDVFVKSLNVTLNLSMDDEFVIHTPLMWLDKAETWEMADDLDAFNYVREKTLTCYNGIRGDGCGECPACELRRNGLHTYLAKKEVTK

SEQ ID NO: 38594 - protein, 222 aa, Halobacillus alkaliphilus
  REGION 1..222: note = tr|A0A1I2TK75|A0A1I2TK75_9BACI 7-cyano-7-deazaguanine synthase OS=Halobacillus alkaliphilus OX=396056 GN=queC PE=3 SV=1
MEKNNKAIVVFSGGQDSTTCLFWALKKYDEVQVVTFDYNQRHNEEIEVAKEIAVDLKVKHHVLDMSLLNQLAPNALTRDDIEVTDGKDGGLPSTFVPGRNLLFLSFASILAKQIGAKHVVTGVCETDFSGYPDCRDVFIKSLNVTLNLSMDDEFVVHTPLMWLDKAQTWALADELNAFEYVREKTLTCYHGVRGDGCGECPACELRQKGLEAYLEQGTEVNR

SEQ ID NO: 38595 - protein, 198 aa, Halobacillus alkaliphilus
  REGION 1..198: note = tr|A0A1I2L1Z3|A0A1I2L1Z3_9BACI 7-cyano-7-deazaguanine synthase OS=Halobacillus alkaliphilus OX=396056 GN=SAMN05216353_10711 PE=3 SV=1
MNNKKKNVSILLSGGLDSTTLIEYYKQYNYEINGIHFQYNQSAKNTEWEACKNIANYYDIEVKNLKLGLPILNFEGQIQCRNSLFIFGAAANIKPSENVTLAYGAHSGTPYYDCSINFVSSAQTILDGYFGGTVSIEAPFIRWSKEDILKFSLMKKVPIELTYSCEKKEYIECGKCPSCLDRRALTSAYKEYLQKKEN

SEQ ID NO: 38596 - protein, 221 aa, Halobacillus dabanensis
  REGION 1..221: note = tr|A0A1I3XVK5|A0A1I3XVK5_HALDA 7-cyano-7-deazaguanine synthase OS=Halobacillus dabanensis; OX = 240302 GN=queC PE=3 SV=1
MEKNNKAVVVFSGGQDSTTCLFWALKKFDSVEVVTFDYNQRHNEEINVAKEIAEDMDVRHHILDMSLLNQLAPNALTRDDIEVEGGNEGELPSTFVPGRNLLFLSFATILARQIGAKHIVTGVCETDFSGYPDCRDVFVKSLNVTLNLSMDDEFVVHTPLMWLDKAETWEMADELNAFQYVRENTLTCYNGIRGDGCGNCPACELRKNGLDTYLANKEVSG

SEQ ID NO: 38597 - protein, 221 aa, Halobacillus faecis
  REGION 1..221: note = tr|A0A511WYF6|A0A511WYF6_9BACI 7-cyano-7-deazaguanine synthase OS=Halobacillus faecis; OX = 360184 GN=queC PE=3 SV=1
MKKNNKAVVVFSGGQDSTTCLFWALKKFDSVEVVTFDYNQRHKEEIEVAKEIAEDQQVRHHILDMSLLNQLAPNALTRDDIEVKDGEDGELPSTFVPGRNLLFLSFATILARQIGAKHIVTGVCETDFSGYPDCRDVFVKSLNVTLNLSMDDEFVIHTPLMWLDKAQTWEMADDLGAFDYVREKTLTCYNGVRGDGCGECPACELRKNGLDTYVAKKEVSR

SEQ ID NO: 38598 - protein, 222 aa, Halobacillus halophilus
  REGION 1..222: note = tr|I0JJQ2|I0JJQ2_HALH3 7-cyano-7-deazaguanine synthase OS=Halobacillus halophilus (strain ATCC 35676 / DSM 2266 / JCM 20832 / NBRC 102448/ NCIMB 2269) OX=866895; GN = q ueC PE=3 SV=1
MENNNKAVVVFSGGQDSTTCLFWALKKYDEVQVVTFDYNQRHNEEIEVAKEIAEDLKVKHHVLDMSLLNQLAPNALTRDDIEVTDGEDGGLPSTFVPGRNLLFLSFASILAKQIGAKHVVTGVCETDFSGYPDCRDVFIKSLNVTLNLSMDDEFVVHTPLMWLDKAQTWALADELDAFEYVREKTLTCYHGVRGDGCGECPACELRQKGLEIYLEQGTEVNR

SEQ ID NO: 38599 - protein, 221 aa, Halobacillus karajensis
  REGION 1..221: note = tr|A0A024P5I4|A0A024P5I4_9BACI 7-cyano-7-deazaguanine synthase OS=Halobacillus karajensis; OX = 195088 GN=queC PE=3 SV=1
MEKNSKAVVVFSGGQDSTTCLFWALKKFDHVEVVTFDYNQRHKEEIKVAQEIAEDQKVRQHILDMSLLNQLAPNALTRDDIEVKEGEEGELPSTFVPGRNLLFLSFATILARQINAKHIVTGVCETDFSGYPDCRDVFVKSLNVSLNLSMDDEFVIHTPLMWLDKAETWELADQLDAFNYVRTKTLTCYNGVRGDGCGECPACELRRNGLDTYLSKKEVQD

SEQ ID NO: 38600 - protein, 221 aa, Halobacillus litoralis
  REGION 1..221: note = tr|A0A410MB19|A0A410MB19_9BACI 7-cyano-7-deazaguanine synthase OS=Halobacillus litoralis; OX = 45668 GN=queC PE=3 SV=1
MEKNNKAVVVFSGGQDSTTCLFWAMKKFDEVEVVTFDYNQRHKEEIEVAREIAGEMDVRHHVLDMSLLNQLAPNALTRNDIEVKDGEDGELPSTFVPGRNLLFLSFATILARQIGAKHVVTGVCETDFSGYPDCRDIFIKSLNVTLNLSMEDDFVVHTPLMWLDKAQTWEMADQLDAFNYVREKTLTCYNGIRGDGCGECPACQLRRNGLETYVAQKEVNQ

SEQ ID NO: 38601 - protein, 245 aa, Halobacillus mangrovi
  REGION 1..245: note = tr|A0A1W5ZSB5|A0A1W5ZSB5_9BACI Uncharacterized protein OS=Halobacillus mangrovi OX=402384 GN=HM131_04765; PE = 4 SV=1
MPNNVLWTGGWDSTYRVLNLVLDQKKTIQPYYVLDPVRPSTEMELKTMERIKRLMNEFDPGAEERVLETIEIRKDEIPLNPDFTKEYEKLQKEFRLGDQYDWLGRYAESVNMDTLELSVHHDDKVQGMIKDDVIKIEDGEDFYYRVVDNPSHPAFVIFQKYRFPLLEITKLGMEEKAKERGYAHIMEETWFCHTPKKTGEPCGLCNPCKYTQEEGLGRRIPEPTRFEKIRYFLFKVNRRIKKMVK

SEQ ID NO: 38602 - protein, 222 aa, Halobacillus mangrovi
  REGION 1..222: note = tr|A0A1W5ZYJ1|A0A1W5ZYJ1_9BACI 7-cyano-7-deazaguanine synthase OS=Halobacillus mangrovi; OX = 402384 GN=queC PE=3 SV=1
MEKNNKAVVVFSGGQDSTTCLFWALKKFDHVEVVTFDYNQRHKEEIEVAKEIAGDLNVKHHVIDMSLLNQLAPNALTRDDIEVKAGENGELPSTFVPGRNLLFLSFATIIANQIGAKHVVTGVCETDFSGYPDCRDVFVKSLNVTLNLSMDDQFVIHTPLMWLDKAETWEMADELDAFTYVREKTLTCYNGVRGDGCGECPACNLRLNGLETYLEKREEVAK

SEQ ID NO: 38603 - protein, 221 aa, Halobacillus salinus
  REGION 1..221: note = tr|A0A4Z0H2C2|A0A4Z0H2C2_9BACI 7-cyano-7-deazaguanine synthase OS=Halobacillus salinus; OX = 192814 GN=queC PE=3 SV=1
METNQKAVVVFSGGQDSTTCLFWAMQKFAHVEVVTFDYDQRHKAEVEVAKEIAEDQQVTHHVLDMSLLNQLAPNALTRDDIEVKDGEDGELPSTFVPGRNLLFLSFATILARQIGAKHVVTGVCETDFSGYPDCRDVFVKSLNVTLNLSMDDEFVVHTPLMWLDKAETWGMADELGAFDYVRTKTLTCYNGVRGDGCGECPACHLRKNGLDTYLAQKGESQ

SEQ ID NO: 38604 - protein, 245 aa, Halobacillus sp.
  REGION 1..245: note = tr|A0A0B0D1W6|A0A0B0D1W6_9BACI Uncharacterized protein OS=Halobacillus sp. BBL2006 OX=1543706; GN = LD39_09990 PE=4 SV=1
MPNNVLWTGGWDSTYRVLNLVLDQKKTIQPYYVLDSVRPSTKMELKTMERIKRLMVEFDPEAEQRILETIEIKKDEIPLNPDFTKEYEKLRKEYRLGDQYDWLGRYAESVNMDTLELSVHHDDKAQGMIKDDVVKIEDGEDFYYRVVDNPSHPAFVIFQKYRFPLLEITKLEMEEKAKERGYAHIMEETWFCHTPKKNGEPCGLCNPCKYTQEEGLGRRIPEPTRAERIRYFLFKVNRRLKKIVN

SEQ ID NO: 38605 - protein, 221 aa, Halobacillus sp.
  REGION 1..221: note = tr|L5NDT4|L5NDT4_9BACI 7-cyano-7-deazaguanine synthase OS=Halobacillus sp. BAB-2008 OX=1246484 GN=queC; PE = 3 SV=1
MEKNSKAVVVFSGGQDSTTCLYWALEKFDHVEAVTFDYDQRHKEEIEVAKEIAADKGVRHHILDMALLNQLAPNALTRNDMEVKDGENGELPSTFVPGRNLLFLSFASILARQIGAKHVITGVCETDFSGYPDCRDVFVKSLNVTLNLSMDDEFVLHTPLMWLDKAETWELADTLGGFEYVREKTLTCYNGIRGEGCGDCPACRLRQNGLDMYLAQKEVSR

SEQ ID NO: 38606 - protein, 221 aa, Halobacillus trueperi
  REGION 1..221: note = tr|A0A3D8VSN9|A0A3D8VSN9_9BACI 7-cyano-7-deazaguanine synthase OS=Halobacillus trueperi; OX = 156205 GN=queC PE=3 SV=1
MEKNNKAVVVFSGGQDSTTCLFWALKKFDSVEVVTFDYNQRHKEEIEVAKEIAEDQQVRHHILDMSLLNQLAPNALTRDDIEVKDGEDGELPSTFVPGRNQLFLSFATILARQIGAKHIVTGVCETDFSGYPDCRDVFVKSLNVTLNLSMDDEFVIHTPLMWLDKAETWEMADDLDAFDYVREKTLTCYNGIRGDGCGECPACELRRNGLHTYLAKKEVTK

SEQ ID NO: 38607 - protein, 221 aa, Halobacillus trueperi
  REGION 1..221: note = tr|A0A3E0J6N5|A0A3E0J6N5_9BACI 7-cyano-7-deazaguanine synthase OS=Halobacillus trueperi; OX = 156205 GN=queC PE=3 SV=1
MEKNKKAVVVFSGGQDSTTCLFWALKKFDSVEVVTFDYNQRHKEEIEVAKEIAGDQRVRHHILDMSLLNQLAPNALTRDDIEVKDGEDGELPSTFVPGRNLLFLSFATILARQIGAKHIVTGVCETDFSGYPDCRDVFVKSLNVTLNLSMDDEFVIHTPLMWLDKAETWEMADDLDAFDYVREKTLTCYNGIRGDGCGECPACELRRNGLHTYLAKKEVTK

SEQ ID NO: 38608 - protein, 223 aa, unidentified
  source 1..223: note = Halobacteriovoraceae bacterium
  REGION 1..223: note = tr|A0A2E4D983|A0A2E4D983_9PROT 7-cyano-7-deazaguanine synthase OS=Halobacteriovoraceae bacterium OX=2026745 GN=queC PE=3 SV=1
MSDLAIVLVSGGMDSVTVAAIAHEKHQNLAFLHLNYHQKTAAKERECFQAIAQHYLVPKELQKIVDMSFLSQIGGSSLTDQNISVSDYQGDNNNIPSSYVPFRNTHIIALAVSWAETIGAQSIYIGANEEDSPGYPDCRKEYYDAYNKLISLGTKEGKIQVHTPIIKMKKSEIVLKAKALNAPLELTWSCYKNGERACGTCDSCALRLRGFKEAGLQDPIHYQ

SEQ ID NO: 38609 - protein, 233 aa, unidentified
  source 1..233: note = Halobacteriovoraceae bacterium
  REGION 1..233: note = tr|A0A2E3XTC5|A0A2E3XTC5_9PROT 7-cyano-7-deazaguanine synthase OS=Halobacteriovoraceae bacterium OX=2026745 GN=queC PE=3 SV=1
MKSKSTELAVVLVSGGMDSLVSAAIANEAHESLAFLHLNYGQNTEDKEFECFQKIAEFYNVPESLQKVIDITFLKQIGGSSLTDDQIEVKKYHGDSEEIPDSYVPFRNTHIISMAVSWAEVIGAKKIYIGAVEEDSSGYPDCRPSYYQAMNALIKQGTKDGDIEVITPVIDLSKDQIVKKAVELKAPIAASWSCYEKEDKACGVCDSCALRLRGFEKAGLEDPIEYHQRPKYT

SEQ ID NO: 38610 - protein, 233 aa, unidentified
  source 1..233: note = Halobacteriovorax marinus
  REGION 1..233: note = tr|E1X5I2|E1X5I2_HALMS 7-cyano-7-deazaguanine synthase OS=Halobacteriovorax marinus (strain ATCC BAA-682 / DSM 15412 / SJ) OX=862908 GN=queC PE=3 SV=1
MSEKSNELAVVLVSGGMDSLVTAAMANEKHQRMAFLHLNYGQKTQDRELKCFNEIADHYNVPKSLRKIIDISFLSQIGGSSLTDDSIDVKDYKGDSEEIPDSYVPFRNTHIVAMAVSWSEVVGAKKIYIGAVYEDSSGYPDCRPSYYQALNNLIKEGTKDGDIEVVTPVIHMKKEEIVKKAISLQAPLSSSYSCYARGDKACGICDSCALRLRGFQIAGLEDPIEYDQRPNYL

SEQ ID NO: 38611 - protein, 285 aa, unidentified
  source 1..285: note = Halobacteriovorax marinus
  REGION 1..285: note = tr|A0A1Y5F988|A0A1Y5F988_9PROT Uncharacterized protein OS=Halobacteriovorax marinus OX=97084; GN = A9Q84_19910 PE=4 SV=1
MKYSGESVAILFSGGTDSTLTAALLEKSFEKIHLVTYNRFGFHATDNTAVQAKMLKDKFGAERFVHDILNVDKLFKHISYERYVKNIKEFGFFNLSTCGLCKLSMHVRTIIYCKDNDIKYVADGANQAMSMFPAQMEGVIDELKKMYEHFGIVYFNPVFEMDGHEDKGFIEKANLQLLNDPTIPEIEKINLPVRDKKTETPGDKLFKLGLAPNPNVKGSKYDRKRQPRCFQFIIFNIFAIKYYLQKNTYEEYRDKTVSFYKHKIGGMIDLIEKKDDKKVRRLFEE

SEQ ID NO: 38612 - protein, 233 aa, unidentified
  source 1..233: note = Halobacteriovorax sp.
  REGION 1..233: note = tr|A0A2E5JEX7|A0A2E5JEX7_9PROT 7-cyano-7-deazaguanine synthase OS=Halobacteriovorax sp.; OX = 2020862 GN=queC PE=3 SV=1
MSQKENTLAIALVSGGMDSLLSAAMAHEKHQHLAFLHLNYGQKTEERELQCFHKIAEYYGVPKELRKVVDVTFLKQIGGSSLTDDGIDVKKYKGDSEDIPDSYVPFRNTHIVSMAVSWAEVIGAKKIYIGAVDEDSSGYPDCRPSYYKALNALIKEGTKDGDIEVITPVITMKKFEIVKKALELKAPIIDSWSCYARGDKACGVCDSCALRLRGFAQAGLEDPIEYDQRPKYI

SEQ ID NO: 38613 - protein, 231 aa, unidentified
  source 1..231: note = Halobacteriovorax sp.
  REGION 1..231: note = tr|A0A4Z0KY35|A0A4Z0KY35_9PROT 7-cyano-7-deazaguanine synthase OS=Halobacteriovorax sp. Y22 OX=2505978 GN=queC PE=3 SV=1
MKSDKLAVVLVSGGMDSLVCAAIANEKHENLAFLHLNYGQKTEERELDCFQKIADHYGVDKSLRKVIDVSFLKQIGGSSLTDDGIDVKQYKGDSEEIPDSYVPFRNTHIIAMAVSWSEVVGAKNIYIGAVNEDSSGYPDCRPSYYAAYNELIKQGTKDGDIEIITPVIDMAKNEIVQKAVDLGAPLQFSYSCYARGDKACGVCDSCALRLRGFQKAGIEDPIEYDQRPNYL

SEQ ID NO: 38614 - protein, 233 aa, unidentified
  source 1..233: note = Halodesulfovibrio marinisediminis
  REGION 1..233: note = tr|A0A1N6I872|A0A1N6I872_9DELT 7-cyano-7-deazaguanine synthase OS=Halodesulfovibrio marinisediminis DSM 17456 OX=1121457 GN=queC PE=3 SV=1
MNNSALVVFSGGQDSTTCLAWALERFDSVATIGFSYGQRHDVEMDCRKNVLSEVCGLNDTWKQRLKHDEVLEINLFNEIGGTALTEEVEIQMGENGLPTTFVPGRNLVFLTAAAAYAYRQGIRHIVIGVCETDFSGYPDCRDDTVKAMQVALNLGMESRFVIHTPLMWIDKAATWTMADDLGGKPFVDLVREHTHTCYLGDRTELHAWGYGCGTCPACELRAKGWEQFEEGKQ

SEQ ID NO: 38615 - protein, 230 aa, unidentified
  source 1..230: note = Halomonadaceae bacterium
  REGION 1..230: note = tr|A0A139CD28|A0A139CD28_9GAMM 7-cyano-7-deazaguanine synthase OS=Halomonadaceae bacterium T82-2 OX=1783518 GN=queC PE=3 SV=1
MTRTTLSTPARAVVIYSGGMDSYTVLHHALRQGFELHALSFHYGQRHDRELDAARRVCEQLGIAHQVVDIQAIHPLIDNSALTDAERALPDGDYAEDNLTATVVPNRNMILLSLAIAKAVNIGAEVCFYGAHGGDHVLYPDCRPEFLARMNDVAAIANFSPVTIEAPYLHADKADILADGLAMGLDYAETWTCYQGGETACGECGSCRERLAAFAAHGQVDPLPYAATGR

SEQ ID NO: 38616 - protein, 233 aa, unidentified
  source 1..233: note = Halomonas aestuarii
  REGION 1..233: note = tr|A0A1J0VBV3|A0A1J0VBV3_9GAMM 7-cyano-7-deazaguanine synthase OS=Halomonas aestuarii; OX = 1897729 GN=queC PE=3 SV=1
MTHSPDPATVVIYSGGMDSFTVLHRALREGLDVHALSFDYGQRHRRELEVAERVCRELGVPHQVVDITAIHGLIDNSALTDASRAMPEGDYAAENLADTVVPNRNMILLSLAIAKAVNIGAGRVDYGAHGGDHVLYPDCRPEFVQAMNDVAGIANFEPLTIHAPYLRASKAEILAEGLAMGLDYADTWTCYRGEALACGRCGSCRERLAAFAANGATDPLGYSERPDLDEGAP

SEQ ID NO: 38617 - protein, 237 aa, Halomonas alkaliantarctica
  REGION 1..237: note = tr|A0A4R7YA78|A0A4R7YA78_9GAMM 7-cyano-7-deazaguanine synthase OS=Halomonas alkaliantarctica OX=232346 GN=queC PE=3 SV=1
MSSTPPMAADTATTTVVIYSGGMDSFTVLHRALREGLNVHALSFDYGQRHARELDTARQVCASLGLPHQVVDIRAIHGLIDNSALTNPAQAMPQGDYDADNLRATVVPNRNMILLSLAIAKAVNIGAERVDYGAHGGDHVLYPDCRPEFVEAMNHVAGIANFEPVKLHAPYLKVSKADILRDGLAMGLDYRHTWTCYEGRELACGVCGSCRERLEAFAANGVTDPLAYSVDSAVGQR

SEQ ID NO: 38618 - protein, 237 aa, Halomonas alkaliphila
  REGION 1..237: note = tr|A0A386X3S8|A0A386X3S8_9GAMM 7-cyano-7-deazaguanine synthase OS=Halomonas alkaliphila; OX = 272774 GN=queC PE=3 SV=1
MSLPPTSGADASSTVVIYSGGMDSYTVLHRAIKEGLEVHALSFDYGQRHHAKELDIAKAVCKQHNIPHQVVDIRAIHGLIDNSALTNPDISMPEGDYAADNLTTTVVPNRNMILLSLAIAKAVNIGAGRVDYGAHGGDHILYPDCRPEFVHAMNQVAGIANFEPITLHAPYLAASKADILRDGLAMGLNYRDTWTCYEGRPLACGKCGSCRERLAAFAANNTSDPLAYESTPAQVTG

SEQ ID NO: 38619 - protein, 236 aa, Halomonas andesensis
  REGION 1..236: note = tr|A0A3S0XXX1|A0A3S0XXX1_9GAMM 7-cyano-7-deazaguanine synthase OS=Halomonas andesensis; OX = 447567 GN=queC PE=3 SV=1
MSSSPILGANASSTVVIYSGGMDSYTVLHRAIKEGLVVHALSFDYGQRHAKELDVAKAVCKLHNIPHQVIDIRAIHSLIDNSALTNPDVSMPEGNYAADNLHTTVVPNRNMILLSLAIAKAVNSGAARVDYGAHGGDHILYPDCRPEFVHAMNQVAGIANFQPVMLHAPYLTSSKADILRDGLAMGLDYRDTWTCYEGRELACGKCGSCHERLAAFAANNVEDPLAYEFVPAKVTD

SEQ ID NO: 38620 - protein, 229 aa, Halomonas anticariensis
  REGION 1..229: note = tr|S2L7E0|S2L7E0_HALAF 7-cyano-7-deazaguanine synthase OS=Halomonas anticariensis (strain DSM 16096 / FP35) OX=1121939 GN=queC PE=3 SV=1
MPNTLSLSGSPSRAVVIYSGGMDSFTVLHRARREGYEIHALSFDYGQRHARELDAATWVCQQLGIAHQVVDIRAIHGLIDNSALTDASREMPEGNYDSDNLATTVVPNRNMILLSLAIAQAVNIGANKVFYGAHGGDHVLYPDCRPLFVEKMNAVAAIANFEAVEICAPYLHSSKQAILADGLAMGLDYAATWTCYRGEELACGRCGSCRERLAAFTDNGVTDPLAYRG

SEQ ID NO: 38621 - protein, 236 aa, Halomonas aquamarina
  REGION 1..236: note = tr|A0A1H8INZ0|A0A1H8INZ0_9GAMM 7-cyano-7-deazaguanine synthase OS=Halomonas aquamarina; OX = 77097 GN=queC PE=3 SV=1
MSSTASSGAQAPSTVVIYSGGMDSYTVLHRALREGLAVHALSFDYGQRHRRELDVARQVCESLAIPHQVVDIRAIHGLIDNSALTNAALTMPQGEYDADSLHSTVVPNRNMILLSLAIAKAVNIGANRVDYGAHGGDHMLYPDCRPAFVEAMNDVAQIANFEPVTVHAPYLASSKADILRDGLAMGLDYRHTWTCYEGQQLACGQCGSCRERLAAFAANHSVDPLDYAIDTSQVAH

SEQ ID NO: 38622 - protein, 232 aa, Halomonas arcis
  REGION 1..232: note = tr|A0A1H0FA21|A0A1H0FA21_9GAMM 7-cyano-7-deazaguanine synthase OS=Halomonas arcis; OX = 416873 GN=queC PE=3 SV=1
MSTYPAPHGDTAVVIYSGGMDSFTLLHRALNEGYHVHALSFHYGQRHARELDTARQVCQHLGVSHQVVDIRAIHSLIDNSALTNTAHEMPHGDYDGDNLAATVVPNRNMILLSLAIANAVNIGAHRVDYGAHGGDHVLYPDCRPAFVDAMDRVAQIANFSPIAVHAPYLHASKADILRDGLAMGLDYRHTWTCYEGGDLACGRCGSCRERLAAFAANGVTDPLEYARSPETP

SEQ ID NO: 38623 - protein, 132 aa, Halomonas axialensis
  REGION 1..132: note = tr|A0A455V5Q4|A0A455V5Q4_9GAMM 7-cyano-7-deazaguanine synthase OS=Halomonas axialensis; OX = 115555 GN=HAALTHF_35420n PE=3 SV=1
MVPNRNMILLSLAIAKAVNIGANRVDYGAHGGDHMLYPDCRPAFVEAMNDVAQIANFEPVTVHAPYLASSKADILRDGLAMGLDYRHTWTCYEGQQLACGQCGSCRERLAAFAANHSVDPLDYAIDTSQVAH

SEQ ID NO: 38624 - protein, 229 aa, unidentified
  source 1..229: note = Halomonas beimenensis
  REGION 1..229: note = tr|A0A291P7W0|A0A291P7W0_9GAMM 7-cyano-7-deazaguanine synthase OS=Halomonas beimenensis; OX = 475662 GN=queC PE=3 SV=1
MSHHSAPATVVIYSGGMDSYTVLHRALREGREVHALSFDYGQRHARELEVARRVCRELGVPHQVVDITAIHGLIDASALTDASRELPDADYAEDNLQDTVVPNRNMILLSLAIAKAVNIGADRVDYGAHGGDHVLYPDCRPEFVEAMNAVAAIANFAPIEIHAPYLRAGKAEILADGLAMGLDYARTWTCYRGEALACGRCGSCRERLAAFAANDAVDPLAYAGEPGDV

SEQ ID NO: 38625 - protein, 237 aa, Halomonas boliviensis
  REGION 1..237: note = tr|A0A265DV65|A0A265DV65_9GAMM 7-cyano-7-deazaguanine synthase OS=Halomonas boliviensis LC1 OX=1072583 GN=queC PE=3 SV=1
MSLLPPVAADTATTTIVIYSGGMDSFTVLHRALREGLTVHALSFDYGQRHARELDTARQVCASLGLPHQVVDIRAMHGLIDNSALTDPDQAMPKGDYGADNLRATVVPNRNMILLSLAIAKAVNIGAERVDYGAHGGDHVLYPDCRPEFVEAMNHVAGIANFEPVELHAPYLTASKADILRDGLAMGLDYRHTWTCYEGRELACGVCGSCRERLAAFAANGVTDPLAYSEDSAVGQH

SEQ ID NO: 38626 - protein, 236 aa, Halomonas campaniensis
  REGION 1..236: note = tr|A0A060B686|A0A060B686_9GAMM 7-cyano-7-deazaguanine synthase OS=Halomonas campaniensis; OX = 213554 GN=queC PE=3 SV=1
MSLPPTSGADASSTVVIYSGGMDSYTVLHRAIKEGLEVHALSFDYGQRHAKELDIAKAVCKQHNIPHQVVDIRAIHGLIDNSALTNPDISMPEGDYAADNLTTTVVPNRNMILLSLAIAKAVNIGAGRVDYGAHGGDHILYPDCRPEFVHAMNQVAGIANFEPITLHAPYLATSKADILRDGLAMGLNYRDTWTCYEGRPLACGKCGSCRERLAAFAANNTSDPLAYESTPAQVTG

SEQ ID NO: 38627 - protein, 237 aa, Halomonas campaniensis
  REGION 1..237: note = tr|A0A246S0T6|A0A246S0T6_9GAMM 7-cyano-7-deazaguanine synthase OS=Halomonas campaniensis; OX = 213554 GN=queC PE=3 SV=1
MSSIPQVTANTATTTVVIYSGGMDSFTVLHRALREGLSVHALSFDYGQRHARELDTARQVCASLDLPHQVVDIRAIHGLIDNSALTNQDQAMPQGDYDTDNLRATVVPNRNMILLSLAIAKAVNIGAERVDYGAHGGDHVLYPDCRPEFVEAMNHVAGIANFEPVKLHAPYLSASKADILREGLAMGLDYRHTWTCYEGREMACGVCGSCRERLAAFAANGVTDPLAYSVDSAVGQR

SEQ ID NO: 38628 - protein, 241 aa, Halomonas caseinilytica
  REGION 1..241: note = tr|A0A1M6NTP7|A0A1M6NTP7_9GAMM 7-cyano-7-deazaguanine synthase OS=Halomonas caseinilytica; OX = 438744 GN=queC PE=3 SV=1
MSQASASSATVVIYSGGMDSFTVLHRALREGRDVHALSFDYGQRHARELEVARRVCRELTVPHQVVDIRVIHGLIDNSALTDADRRMPDGDYDADNLADTVVPNRNMMLLSMAIAKAVNIGAGRVDYGAHGGDHVLYPDCRPEFVEAMNAVAGIANFEPVEIHTPYLRRTKAEILAGGLAMGLDYADTWTCYLGESLACGRCGSCRERLAAFAANGIDDPLGYSYRPEPVADAPSEGEHDV

SEQ ID NO: 38629 - protein, 268 aa, unidentified
  source 1..268: note = Halomonas chromatireducens
  REGION 1..268: note = tr|A0A0X8HDK0|A0A0X8HDK0_9GAMM 7-cyano-7-deazaguanine synthase OS=Halomonas chromatireducens OX=507626 GN=queC PE=3 SV=1
MTQSATSPVPATVVIYSGGMDSFTVLHRALREGLAVHALSFDYGQRHARELEVAAHVCRELDVPHQVVDIRAIHGLIDNSALTDASRDMPDGDYASDNLSATVVPNRNMILLSMAIAKAVNIGAGRVDYGAHGGDHVLYPDCRPEFVERMNAVAGIANFEPVRIHAPYLGSTKADILADGLAMGLDYSDTWTCYLGEELACGRCGSCRERLAAFTANGATDPLGYLQRPDTAATAQRPEAGYLQRPDATATSTRSDTDAPESREAPDV

SEQ ID NO: 38630 - protein, 231 aa, Halomonas cupida
  REGION 1..231: note = tr|A0A1M7ATM9|A0A1M7ATM9_9GAMM 7-cyano-7-deazaguanine synthase OS=Halomonas cupida; OX = 44933 GN=queC PE=3 SV=1
MIDSNPATVVVYSGGMDSYTVLHRVLRETPNVHALSFHYGQRHSRELDVARDVCNRLGIEHQVVDITAIHGLIDNSALTDASRAMPDGDYAEDNLTATVVPNRNMILLSLAIAKAVNVGASRVAYGAHGGDHVLYPDCRPAFVEAMNDVAAIANFSPVEIHAPYLRASKSEILADGLAMGLDYGETWTCYEGRELACGRCGSCRERLAAFAAHGVTDPLAYADTSADTQHV

SEQ ID NO: 38631 - protein, 236 aa, Halomonas daqingensis
  REGION 1..236: note = tr|A0A1H5RP84|A0A1H5RP84_9GAMM 7-cyano-7-deazaguanine synthase OS=Halomonas daqingensis; OX = 419596 GN=queC PE=3 SV=1
MTQATPRATVVIYSGGMDSYTVLHRALREGLNVTALSFDYGQRHGRELEVAARVCAELGVPHQVVDIRAIHGLIDNSALTDASRDMPEGDYGEENLAATVVPNRNMILLSLAIAKAVNVGAERVDYGAHGGDHVLYPDCRPAFVEAMNAVAAIANFSPVEIHAPYLRASKAEILADGLAMGLDYAKTWTCYRGEALACGRCGSCRERLAAFAANGQTDPLEYAVDAPRPDLARGGV

SEQ ID NO: 38632 - protein, 236 aa, Halomonas desiderata
  REGION 1..236: note = tr|A0A243T3H1|A0A243T3H1_9GAMM 7-cyano-7-deazaguanine synthase OS=Halomonas desiderata SP1 OX=1191209 GN=queC PE=3 SV=1
MTQATPRATVVIYSGGMDSYTVLHRALREGLNVTALSFDYGQRHARELAVAARVCAELGVPHQVVDIRAIHGLIDNSALTDASRDMPEGDYGEENLAATVVPNRNMILLSLAIAKAVNVGAERVDYGAHGGDHVLYPDCRPAFVEAMNAVAAIANFSPVEIHAPYLRASKAEILADGLAMGLDYAKTWTCYRGEALACGRCGSCRERLAAFAANGQTDPLEYAVDAPRPDLARGGV

SEQ ID NO: 38633 - protein, 238 aa, Halomonas elongata
  REGION 1..238: note = tr|A0A329QCK2|A0A329QCK2_HALEL 7-cyano-7-deazaguanine synthase OS=Halomonas elongata; OX = 2746 GN=queC PE=3 SV=1
MSQAPASSATVVIYSGGMDSFTVLHRALREGRDVHALSFDYGQRHSRELDVARRVCRDLEVPHQVVDIRAIHGLIDNSALTDAERAMPDGDYDADNLADTVVPNRNMMLLSMAIAKAVNIGAGRVDYGAHGGDHVLYPDCRPEFVEAMNAVAGIANFEPVEIHTPYLRHTKADILADGLSMGLDYADTWTCYLGESLACGRCGSCRERLAAFAANGVSDPLGYAQRPDAATNGESDDV

SEQ ID NO: 38634 - protein, 238 aa, Halomonas elongata
  REGION 1..238: note = tr|A0A1B8P2S0|A0A1B8P2S0_HALEL 7-cyano-7-deazaguanine synthase OS=Halomonas elongata; OX = 2746 GN=queC PE=3 SV=1
MSQAPASSATVVIYSGGMDSFTVLHRALREGRDVHALSFDYGQRHSRELDVARRVCRDLEVPHQVVDIRAIHGLIDNSALTDAERAMPDGDYDAGNLADTVVPNRNMMLLSMAIAKAVNIGAGRVDYGAHGGDHVLYPDCRPEFVEAMNAVAGIANFEPVEIHTPYLRHTKADILADGLSMDLDYADTWTCYLGESLACGRCGSCRERLAAFAANGVSDPLGYAQRPDAATDGESDDV

SEQ ID NO: 38635 - protein, 233 aa, unidentified
  source 1..233: note = Halomonas endophytica
  REGION 1..233: note = tr|A0A2N7TXN1|A0A2N7TXN1_9GAMM 7-cyano-7-deazaguanine synthase OS=Halomonas endophytica; OX = 2033802 GN=queC PE=3 SV=1
MTQPVSSSVPATVVIYSGGMDSFTVLHRALREGLEVHALSFDYGQRHARELNVAATVCRGLGVPHQVVDIRAIHGLIDNSALTDASRDMPCGDYASDNLSATVVPNRNMILLSLAVAKAVNIGAGRVDYGAHGGDHVLYPDCRPEFVERMNAVAGIANFEPVEIHAPYLRATKAEILADGLSMGLDYADTWTCYLGEELACGRCGSCRERLGAFAANGVSDPLSYAAQSDQEV

SEQ ID NO: 38636 - protein, 238 aa, Halomonas eurihalina
  REGION 1..238: note = tr|A0A5D9D9Z1|A0A5D9D9Z1_HALER 7-cyano-7-deazaguanine synthase OS=Halomonas eurihalina; OX = 42566 GN=queC PE=3 SV=1
MSQAPASSATVVIYSGGMDSFTVLHRALREGRDVHALSFDYGQRHARELEVARRVCRDLAVPHQVVDIRAIHGLIDNSALTDTERAMPDGDYDADNLADTVVPNRNMMLLSMAIAKAVNIGAGRVDYGAHGGDHVLYPDCRPEFVEAMNAVAGIANFEPVEIHTPYLRHTKADILADGLAMGLDYADTWTCYLGESLACGRCGSCRERLAAFAAHGVSDPLGYAQRPDTATDGESDDV

SEQ ID NO: 38637 - protein, 239 aa, Halomonas halmophila
  REGION 1..239: note = tr|A0A4Y4EZZ0|A0A4Y4EZZ0_9GAMM 7-cyano-7-deazaguanine synthase OS=Halomonas halmophila; OX = 252 GN=queC PE=3 SV=1
MSQSSSSSATVVIYSGGMDSYTVLHRALREGLEVHALSFDYGQRHSRELEVARRVCAALEVPHQVIDIRAIHSLIDNSALTDSDRSMPDGDYDADNLTATVVPNRNMMLLSMAIAKAVNIGAGRVDYGAHGGDHVLYPDCRPAFVEAMNAVAGIANFEAVTIHTPYLHSSKAEILADGLAMGLDYAATWTCYEGAELACGRCGSCRERLAAFDANRASDPLAYAATPESAGSSEGREDV

SEQ ID NO: 38638 - protein, 249 aa, Halomonas halophila
  REGION 1..249: note = tr|A0A510ZBW7|A0A510ZBW7_9GAMM 7-cyano-7-deazaguanine synthase OS=Halomonas halophila; OX = 29573 GN=queC PE=3 SV=1
MSESAAPATVVIYSGGMDSFTVLHRALREGREVHALSFDYGQRHARELAVAREVCRELGVPHQVVDITAIHGLIDASALTDSSQELPDADYAEANLKATVVPNRNMILLSLAIAKAVNIGADRVDYGAHGGDHVLYPDCRPEFVEAMNDVAGIANFEPVTLHAPYLRAGKDEILAEGLAMGLDYARTWTCYRGEALACGRCGSCRERLSAFAANGAVDPIAYDTTGDEADVSSQRPDAAADAAEGSDHV

SEQ ID NO: 38639 - protein, 254 aa, unidentified
  source 1..254: note = Halomonas heilongjiangensis
  REGION 1..254: note = tr|A0A2N7TIE3|A0A2N7TIE3_9GAMM 7-cyano-7-deazaguanine synthase OS=Halomonas heilongjiangensis OX=1387883 GN=queC PE=3 SV=1
MTHSSAPATVVIYSGGMDSFTVLHRALGEGLDVHALSFDYGQRHARELEVAARVCRRLGVPHQVVDIRAIHGLIDNSALTDASREMPEGDYGQENLTATVVPNRNMILLSLAIAKAVNIGAGRVDYGAHGGDHVLYPDCRPEFVEAMNAVAGIANFAPVEIHAPYLRASKAEILADGLAMGLDYADTWTCYRGEDLACGRCGSCRERLAAFAANGASDPLGYRERPDAAGTSQRPDAAGTSQRPDAAARGAPDV

SEQ ID NO: 38640 - protein, 227 aa, unidentified
  source 1..227: note = Halomonas huangheensis
  REGION 1..227: note = tr|W1NBS2|W1NBS2_9GAMM 7-cyano-7-deazaguanine synthase OS=Halomonas huangheensis OX=1178482 GN=queC PE=3; SV = 1
MTDSSNATVVVYSGGMDSYTVLHRVLRETRNVHALSFHYGQRHSRELDVARRVCEELRVAHQVVDITAIHGLIDNSALTDDSRPMPDDDYAEDNLTATVVPNRNMILLSLAIAKAVNVGAGRVAYGAHGGDHVLYPDCRPAFVEAMNDVAAIANFSPVEIHAPYLNANKEQILADGLAMGLDYANTWTCYVGEELACGRCGSCRERLAAFAAHGIKDPLNYADTSHV

SEQ ID NO: 38641 - protein, 235 aa, Halomonas hydrothermalis
  REGION 1..235: note = tr|A0A291JWY7|A0A291JWY7_9GAMM 7-cyano-7-deazaguanine synthase OS=Halomonas hydrothermalis OX=115561 GN=queC PE=3 SV=1
MSSTASPGAQAPSTVVIYSGGMDSYTVLHRALREGLTVHALSFDYGQRHRRELDVARQVCESLAIPHQVVDIRAIHGLIDNSALTNSALAMPQGEYDADSLHSTVVPNRNMILLSLAIAKAVNIGASRVDYGAHGGDHVLYPDCRPAFVEAMNDVAQIANFEPVTVHAPYLASSKADILRDGLAMGLDYRHTWTCYEGQQLACGQCGSCRERLAAFAANQATDPLAYAPLAERDC

SEQ ID NO: 38642 - protein, 251 aa, Halomonas korlensis
  REGION 1..251: note = tr|A0A1I7K843|A0A1I7K843_9GAMM 7-cyano-7-deazaguanine synthase (Queuosine biosynthesis); OS = Halomonas korlensis OX=463301 GN=SAMN04487955_11576; PE = 4 SV=1
MDKAIDVFWTGGWDSSYRVLYASVVEKRLIKPHYIIDFGRKSSLRELEAISDIRRKLEKIDPEAAKRIGEIKITPITEIADIPEVTESFNRLKKQAHLGSQYDWLSRYATSHNIDDLELSVHVDDKAYFFLEGRVKQGKDGRWRMRDDAEGDVRIFSCLTFPLLQISKTEMREQAQKHDFIDALEKAWFCFNPKKGKPCGVCNPCIYAVEEGMGYRLSGNAMLNYRTRHIRKIAKAPGYVSRNIYRKAKGQ

SEQ ID NO: 38643 - protein, 258 aa, Halomonas korlensis
  REGION 1..258: note = tr|A0A1I7F3I6|A0A1I7F3I6_9GAMM 7-cyano-7-deazaguanine synthase OS=Halomonas korlensis; OX = 463301 GN=queC PE=3 SV=1
MTIPAFPPGKATDTTVVIYSGGMDSYTVLHRALREGLTVHALSFDYGQRHRRELTVATRVCRALGVPHQVVDIRAIHGLIDNSALTDADREMPEGDYSEANLTATVVPNRNMILLSLAIAKAANIGAGRVDYGAHGGDHVLYPDCRPEFVEAMNAAAGIANFDPVQLHAPYLRSTKAEILADGLAMGLDYADTWTCYQGGELACGRCGSCRERLAAFAANGVEDPLSYLQQPCLQRPCLQRPSDAARSQRPDPDAGVA

SEQ ID NO: 38644 - protein, 236 aa, Halomonas meridiana
  REGION 1..236: note = tr|A0A1N6D148|A0A1N6D148_9GAMM 7-cyano-7-deazaguanine synthase OS=Halomonas meridiana; OX = 29570 GN=queC PE=3 SV=1
MSSTASSGAQAPSTVVIYSGGMDSYTVLHRALREGLAVHALSFDYGQRHRRELDVARQVCESLAIPHQVVDIRAIHGLIDNSALTNAALTMPQGEYDADSLHSTVVPNRNMILLSLAIAKAVNIGASRVDYGAHGGDHMLYPDCRPAFVEAMNDVAQIANFEPVTVHAPYLASSKADILRDGLAMGLDYRHTWTCYEGQQLACGQCGSCRERLAAFAANHSVDPLDYAIDTSQVAH

SEQ ID NO: 38645 - protein, 236 aa, Halomonas meridiana
  REGION 1..236: note = tr|A0A0D7V0G2|A0A0D7V0G2_9GAMM 7-cyano-7-deazaguanine synthase OS=Halomonas meridiana; OX = 29570 GN=queC PE=3 SV=1
MSSTASSGAQAPSTVVIYSGGMDSYTVLHRALREGLAVHALSFDYGQRHRRELDVARQVCESLAIPHQVVDIRAIHGLIDNSALTNAALTMPQGEYDADSLHSTVVPNRNMILLSLAIAKAVNIGASRVDYGAHGGDHVLYPDCRPAFVEAMNDVAQIANFEPVTVHAPYLASSKADILRDGLAMGLDYRYTWTCYEGQQLACGQCGSCRERLAAFAANHSVDPLDYAIDTSQVAH

SEQ ID NO: 38646 - protein, 245 aa, Halomonas muralis
  REGION 1..245: note = tr|A0A1G9FS00|A0A1G9FS00_9GAMM 7-cyano-7-deazaguanine synthase OS=Halomonas muralis; OX = 119000 GN=queC PE=3 SV=1
MTQQHRDASGIARLKAIVIYSGGMDSYTVLHHALCQGYEVHALSFDYGQRHSRELNVARDVCQRLGIAHQIVDIRAIHSLIDNSALTDASRDLPGGDYASDNMVATLVPNRNMILLSLAIAQAVNIGAELCFYGAHGGDHVLYPDCRPEFVERMNDVAAIANFETARIEAPYLHVDKAAILADGLAMGLDYGETWTCYLGEEFACGACGSCRERLAAFAANGVSDPVRYSHRCQPGTNGKGEPDV

SEQ ID NO: 38647 - protein, 236 aa, unidentified
  source 1..236: note = Halomonas nigrificans
  REGION 1..236: note = tr|A0A2A4HIX1|A0A2A4HIX1_9GAMM 7-cyano-7-deazaguanine synthase OS=Halomonas nigrificans; OX = 2042704 GN=queC PE=3 SV=1
MLLSPASDVNASSTVVIYSGGMDSFTVLHRAIQEGLNVHALSFDYGQRHARELVTAREVCRQLKVPHQVVDIRAIHGLIDNSALTNSSIAMPEGDYAADNLRATVVPNRNMILLSLAIAKAVNIGASRVDYGAHGGDHILYPDCRPEFVDAMNHVSGIANFEPVLIHAPYLKSTKADILRDGLAMGLDYRHTWTCYEGRTLACGKCGSCLERLAAFTANHATDPLEYEHSTAQVTS

SEQ ID NO: 38648 - protein, 239 aa, Halomonas nitroreducens
  REGION 1..239: note = tr|A0A3S0JZQ1|A0A3S0JZQ1_9GAMM 7-cyano-7-deazaguanine synthase OS=Halomonas nitroreducens; OX = 447425 GN=queC PE=3 SV=1
MSKPASPATVVIYSGGMDSYTVLHRALREGREVHALSFDYGQRHAKELEVARRVCRDLDLPHQVVDIRAIHGLIDNSALTDASREMPEGDYAADNLADTVVPNRNMMLLSLAIAKAVNIGADRVDYGAHGGDHVLYPDCRPEFVTAMNAVAGIANFAPVSIHAPYLRAGKAEILADGLAMGLDYAATWTCYRGEPLACGRCGSCRERLAAFAANGVPDPLGYAQRPDTAAEASEAAGDV

SEQ ID NO: 38649 - protein, 58 aa, unidentified
  source 1..58: note = Halomonas olivaria
  REGION 1..58: note = tr|A0A3T1DQH7|A0A3T1DQH7_9GAMM 7-cyano-7-deazaguanine synthase OS=Halomonas olivaria; OX = 390919 GN=HORIV_32720 PE=3 SV=1
MREGLAMGLDYTHTWTCYEGRELACGVCGSCRERLAAFAVNGVTDPLAYSVSTPIGQR

SEQ ID NO: 38650 - protein, 236 aa, Halomonas pacifica
  REGION 1..236: note = tr|A0A510X3W3|A0A510X3W3_9GAMM 7-cyano-7-deazaguanine synthase OS=Halomonas pacifica; OX = 77098 GN=queC PE=3 SV=1
MTTPSRGRRAVIIYSGGMDSFTVLHQALAEGLEVHALSVDYGQRHHRELDTARRVCQALGVPHQVVDLRAIHGLVDASALTDTAQALPEGDYAADNLAATVVPNRNMILLSLALAKAINIGAEEVRYGAHGGDHDLYPDCRPEFVRRMQAAAEVCDFAPLRLTVPFLHNSKAEILAAGLALGLDYADTWTCYRGEALACGRCGSCRERLAAFAANGVVDPLAYAADSPRPDLAGGR

SEQ ID NO: 38651 - protein, 238 aa, Halomonas pantelleriensis
  REGION 1..238: note = tr|A0A1G9MC93|A0A1G9MC93_9GAMM 7-cyano-7-deazaguanine synthase OS=Halomonas pantelleriensis OX=48727 GN=queC PE=3 SV=1
MTTDARPAVVIYSGGMDSYTVLHRALRDGHHVHALSFDYGQRHARELDAARAVCQRLGVAHQVIDIRAIHGLIDNSALTDASREMPSGDYDADNLAATVVPNRNMILLSLAIAQAVNIGAPRVYYGAHGGDHVLYPDCRPAFVDKMNAVAAIANFDAVEIVAPYLRRGKDEILADGLAMGLDYAETWTCYLGGELACGTCGSCRERLAAFAANGASDPLGYVERPDSDASSSAGGAPR

SEQ ID NO: 38652 - protein, 278 aa, Halomonas saccharevitans
  REGION 1..278: note = tr|A0A1I6ZP61|A0A1I6ZP61_9GAMM 7-cyano-7-deazaguanine synthase OS=Halomonas saccharevitans OX=416872 GN=queC PE=3 SV=1
MTHTPYPATVVIYSGGMDSFTVLHRALREGLDVHALSFDYGQRHRRELEVAARVCRELGVPHQIVDITAIHGLIDSSALTDESRAMPEGDYAEDNLTATVVPNRNMVLLSLAIAKAVNIGAGRVDYGAHGGDHVLYPDCRPAFVEAMNDVAGIANFEAVTIHAPYLRSSKAEILAEGLAMGLDYADTWTCYRGEALACGRCGSCRERLAAFAANGAVDPLGYLQRPDDAADSQRPDPAAAIQRPDDAATAQRPDDAADAQRPETAADLQRPGADAGDS

SEQ ID NO: 38653 - protein, 238 aa, Halomonas shengliensis
  REGION 1..238: note = tr|A0A1H0G0S3|A0A1H0G0S3_9GAMM 7-cyano-7-deazaguanine synthase OS=Halomonas shengliensis; OX = 419597 GN=queC PE=3 SV=1
MTSSPSPKAAGRATVVIYSGGMDSYTVLHRALREGLDVHALSFDYGQRHARELEVARRVCRGLGVSHQVIDITAIHGLIDNSALTDAGRALPDADYAEDNLQDTVVPNRNMILLALSIAKAVNIGAGRVDYGAHGGDHVLYPDCRPEFVEAMNAVAGIANFEAVEIHAPYLRASKAEILADGLAMGLDYADTWTCYRGGRLACGRCGSCRERLAAFAANGAVDPLAYAERPFDGPGGG

SEQ ID NO: 38654 - protein, 235 aa, unidentified
  source 1..235: note = Halomonas songnenensis
  REGION 1..235: note = tr|A0A2T0V116|A0A2T0V116_9GAMM 7-cyano-7-deazaguanine synthase OS=Halomonas songnenensis; OX = 1176243 GN=queC PE=3 SV=1
MSNTSSTSPAAPATVVIYSGGMDSYTVLHRALREGLNVHALSFNYGQRHARELEVATQVCQQLGVPHQVVDIRAIHGLIDSSALTDATQAMPDGDYADDNLRATVVPNRNMILLSLAIAKAVNIGAERVDYGAHGGDHVLYPDCRPEFVEAMNQVAGIANFEPVVLHAPYLKATKAEILRDGLSMGLDYRHTWTCYEGRALACGKCGSCRERLEAFAANNATDPLAYASTDQVNG

SEQ ID NO: 38655 - protein, 236 aa, Halomonas sp.
  REGION 1..236: note = tr|F7SNT6|F7SNT6_9GAMM 7-cyano-7-deazaguanine synthase OS=Halomonas sp. TD01 OX=999141 GN=queC PE=3 SV=1
MSLPQTSGADASSTVVIYSGGMDSYTVLHRAIKEGLDVHALSFDYGQRHTKELDIAKAVCKQHNIPHQIVDIRAIHGLIDNSALTNPDLSMPEGNYAADNLHTTVVPNRNMILLSLAIAKAVNIGAARVDYGAHGGDHILYPDCRPEFVHAMNHVAGIANFEPVTLHVPYLTSSKADILRDGLAMGLDYRDTWTCYEGRALACGKCGSCHERLAAFAANDVVDPLTYESTPAQVTG

SEQ ID NO: 38656 - protein, 260 aa, Halomonas sp.
  REGION 1..260: note = tr|A0A369KYD9|A0A369KYD9_9GAMM 7-cyano-7-deazaguanine synthase OS=Halomonas sp. DQ26W; OX = 2282311 GN=queC PE=3 SV=1
MTQSDTSSVPATVVIYSGGMDSFTVLHRALREGLAVHALSFNYGQRHARELEVAARVCRELDVPHQVVDIRAIHGLIDNSALTDAGRDMPEGDYASDNLTATVVPNRNMILLSLAIAKAVNIGAGRVDYGAHGGDHVLYPDCRPEFVERMNAVAGIANFEPVQINAPYLGSTKAEILAEGLAMGLDYADTWTCYLGRELACGHCGSCRERLEAFAANGVSDPLGYLQRPEAAASSTRPEAADTVQRPEAAALASRGASDV

SEQ ID NO: 38657 - protein, 236 aa, Halomonas subglaciescola
  REGION 1..236: note = tr|A0A1M7EUZ0|A0A1M7EUZ0_9GAMM 7-cyano-7-deazaguanine synthase OS=Halomonas subglaciescola OX=29571 GN=queC PE=3 SV=1
MPTPSTANATVVIYSGGMDSFTVLHRALREGRNVHALSFDYGQRHVRELDTAQRVCHALDVPHQVVDIRAIHGLIDSSALTDAAQAMPHGDYASDNLASTAVPNRNMILLSLAIAKAVNIGADRVDYGAHGGDHVLYPDCRPAFVDAMRHAAGLANLEPVEIHVPYLHATKADILRDGLAMGLDYADTWTCYEGGEQACGQCASCRERLEAFADNGMTDPLDYSPRHAETAHANTP

SEQ ID NO: 38658 - protein, 225 aa, Halomonas subterranea
  REGION 1..225: note = tr|A0A1H9VIL1|A0A1H9VIL1_9GAMM 7-cyano-7-deazaguanine synthase OS=Halomonas subterranea; OX = 416874 GN=queC PE=3 SV=1
MVIYSGGMDSFTLLHRALNEGYHVHALSFHYGQRHARELDAARQVCQHLNVPHQVVDIRAIHSLIDNSALTNTDQAMPQGDYDGDNMAATVVPNRNMILLSLAIANAVNIGAERVDYGAHGGDHVLYPDCRPAFVEAMDQVSQIANFSPVKVHAPYLHASKADILQQGLAMGLDYRNTWTCYEGGELACGQCGSCRERLAAFAANGVTDPLTYASHPCASQQEAR

SEQ ID NO: 38659 - protein, 95 aa, Halomonas sulfidaeris
  REGION 1..95: note = tr|A0A455UH62|A0A455UH62_9GAMM 7-cyano-7-deazaguanine synthase OS=Halomonas sulfidaeris; OX = 115553 GN=HSBAA_36000 PE=3 SV=1
MLHRALREGLNVHALSFDYGQRHARELDTARQVCAALGLPHQVVDIRAIHSLIDNSALTNPDQPMPQGNYAADNLHDTVVPNRNMILLSWRLPRP

SEQ ID NO: 38660 - protein, 115 aa, Halomonas sulfidaeris
  REGION 1..115: note = tr|A0A455U8J4|A0A455U8J4_9GAMM 7-cyano-7-deazaguanine synthase OS=Halomonas sulfidaeris; OX = 115553 GN=HSBAA_36010 PE=3 SV=1
MNIGAERVDYGAHGGDHVLYPDCRPEFVEAMDHVAGIANFEPVKLHAPYLYASKADILREGLAMGLDYRLTWTCYEGRELACGMCGSCRERLAAFAANGVTDPLGYNPDTTAGQG

SEQ ID NO: 38661 - protein, 256 aa, Halomonas taeanensis
  REGION 1..256: note = tr|A0A328XHP8|A0A328XHP8_9GAMM 7-cyano-7-deazaguanine synthase OS=Halomonas taeanensis; OX = 284577 GN=queC PE=3 SV=1
MTSSTPRAVVIYSGGMDSYTVLHRARREGYELHALSFNYGQRHARELDTAKQVCEQLGIAHQIVDIRAIHGLIDSSALTDASQALPGGDYDADNLSATVVPNRNMILLSLAIAQAVNIGADRVFYGAHGGDHVLYPDCRPEFVEKMNDVAAIANFSPVTIEAPYLHKGKHEILADGLAMGLDYANTWTCYLGETLACGECGSCRERLAAFAHHGLSDPLGYSSSQRSGSDEKAATSQRPGSDAETSADSGEGRHDV

SEQ ID NO: 38662 - protein, 263 aa, Halomonas taeanensis
  REGION 1..263: note = tr|A0A1G7V704|A0A1G7V704_9GAMM 7-cyano-7-deazaguanine synthase OS=Halomonas taeanensis; OX = 284577 GN=queC PE=3 SV=1
MTSSTPRAVVIYSGGMDSYTVLHRARREGYELHALSFNYGQRHARELDIAKQVCAELGIAHQIVDIRAIHGLIDNSALTDASQALPSGDYAADNLSATVVPNRNMILLSLAIAQAVNIGADRVFYGAHGGDHVLYPDCRPEFVEKMNDVAAIANFSPVTIEAPYLHKGKDEILADGLAMGLDYANTWTCYLGEALACGECGSCRERLAAFARHGLSDPLGYSSQRPEAAASPQPGTDEKTAASQRPGTDAEAIADTNEGRQDV

SEQ ID NO: 38663 - protein, 237 aa, Halomonas titanicae
  REGION 1..237: note = tr|A0A558J5K2|A0A558J5K2_9GAMM 7-cyano-7-deazaguanine synthase OS=Halomonas titanicae; OX = 664683 GN=queC PE=3 SV=1
MSSIPPVAADTATTTVVIYSGGMDSFTVLHRALREGLNVHALSFDYGQRHARELDTARQVCTSLELPHQVVDIRAIHGLIDNSALTNPEQAMPQGDYDADNLRATVVPNRNMILLSLAIAKAVNIGAERVDYGAHGGDHVLYPDCRPEFVEAMNQVAGIANFEPVKLHAPYLYTSKADILREGLAMGLDYAHTWTCYEGRELACGVCGSCRERLAAFAANGVTDPLAYSVNSTAGQC

SEQ ID NO: 38664 - protein, 237 aa, Halomonas ventosae
  REGION 1..237: note = tr|A0A2T0VEY2|A0A2T0VEY2_9GAMM 7-cyano-7-deazaguanine synthase OS=Halomonas ventosae; OX = 229007 GN=queC PE=3 SV=1
MNDASTPATVVIYSGGMDSFTVLHRALREGREVHALSCDYGQRHARELEVAARVCRTLGVPHQVVDIRAIHGLIDASALTDARRELPEGDYAADNLTATVVPNRNMILLSLAIAKAVNIGAGRVDYGAHGGDHELYPDCRPAFVEAMNAVAGIANFQAVEIHTPYLRAGKAEILAEGLAMGLDYADTWTCYRGEELACGRCGSCRERLAAFAANDATDPLGYCQRPDPAAEPAKGGE

SEQ ID NO: 38665 - protein, 237 aa, Halomonas ventosae
  REGION 1..237: note = tr|A0A4R6ZWD2|A0A4R6ZWD2_9GAMM 7-cyano-7-deazaguanine synthase OS=Halomonas ventosae; OX = 229007 GN=queC PE=3 SV=1
MNDASTPATVVIYSGGMDSYTVLHRALREGREVHALSFDYGQRHARELEVAARVCRNLGVPHQVVDIRAIHGLIDASALTDARRALPEGDYAEENLTATVVPNRNMILLSLAIAKAVNIGAGRVDYGAHGGDHVLYPDCRPEFVEAMNAVAGIANFQAVEIHTPYLQAGKAEILADGLAMGLDYADTWTCYRGEALACGRCGSCRERLAAFAANDATDPLGYCQRPDPAAEPAKGGE

SEQ ID NO: 38666 - protein, 236 aa, Halomonas venusta
  REGION 1..236: note = tr|A0A3Q8WH84|A0A3Q8WH84_9GAMM 7-cyano-7-deazaguanine synthase OS=Halomonas venusta; OX = 44935 GN=queC PE=3 SV=1
MSLPPASGADASSTVVIYSGGMDSYTVLHRAIKEGLDVHALSFDYGQRHSKELDIAKAVCKQLNIPHQVVDIRAIHGLIDNSALTNPDISMPEGDYAADNLSTTVVPNRNMILLSLAIAKAVNIGAGRVDYGAHGGDHILYPDCRPEFVHAMNQVAGIANFEPVTLHAPYLASSKADILRDGLAMGLNYRDTWTCYEGRALACGKCGSCRERLAAFAANNVSDPLAYESTPAQVID

SEQ ID NO: 38667 - protein, 233 aa, Halomonas xianhensis
  REGION 1..233: note = tr|A0A1I3A6I0|A0A1I3A6I0_9GAMM 7-cyano-7-deazaguanine synthase OS=Halomonas xianhensis; OX = 442341 GN=queC PE=3 SV=1
MTALFSDATGITSRKAVVIYSGGMDSYTVLHKSLREGFEVHALSFHYGQRHARELKVAEQVCLDLDIPHRLIDIRAIHSLMDGSALTDTERAMPQGEYGQDNLTATMVPNRNMVLLSLAIAHAVNIGASICFYGAHGGDHVLYPDCRPEFVDKMNDVAAIANFDPVRIEAPYLHSDKASILADGLSMGLDYARTWTCYLGEELACGQCGSCRERLAAFAANRLTDPLRYAAHV

SEQ ID NO: 38668 - protein, 233 aa, Halomonas xianhensis
  REGION 1..233: note = tr|A0A4R8FWI5|A0A4R8FWI5_9GAMM 7-cyano-7-deazaguanine synthase OS=Halomonas xianhensis; OX = 442341 GN=queC PE=3 SV=1
MTALSSDATGITSRKAVVIYSGGMDSYTVLHKALRQGFEVHALSFHYGQRHARELKVAEQVCLDLDIPHRLIDIRAIHSLMDGSALTDTERAMPQGEYGQDNLTATVVPNRNMVLLSLAIAHAVNIGAGLCFYGAHGGDHVLYPDCRPEFVDKMNDVAAIANFDPVRIEAPYLHSDKASILADGLSMGLDYARTWTCYLGEELACGQCGSCRERLAAFAAHGLTDPLRYAAHV

SEQ ID NO: 38669 - protein, 249 aa, Halorhodospira halochloris
  REGION 1..249: note = tr|A0A0X8X956|A0A0X8X956_HALHR 7-cyano-7-deazaguanine synthase OS=Halorhodospira halochloris OX=1052 GN=queC PE=3 SV=1
MVSQSHQLHSSICPKATGEAALLLFSGGQDSTTCLAWALERFSRVETIGFDYGQRHSVELEARCTILEQIAEQFPIWRERLGEDHLLDSHVLGQISSTSLTSESAITYDSRGLPSTYVPGRNLLFFVLAAAVAERRNIRNIVAGVCETDYSGYPDCRDDTIKSLQVTLNLGMAQQLILHTPLMWLDKARTWELAAKVGGNDLINLIVEHSHTCYHGNRQKLHPWGYGCGQCPACQLRADGWQRYIDSHA

SEQ ID NO: 38670 - protein, 247 aa, Halorhodospira halophila
  REGION 1..247: note = sp|A1WY18|QUEC_HALHL 7-cyano-7-deazaguanine synthase; OS = Halorhodospira halophila (strain DSM 244 / SL1); OX = 349124 GN=queC PE=3 SV=1
MAERPQRVPASTEQESALVLFSGGQDSTACLAWALEYFSRVETVGFAYGQRHDVELSAREEVLDGLRALRPDWAARLGSDRVLDAGVLGEISDTALTQDAEIAYDARGLPTTFVPGRNLLFFTLAAAVAHRRGIRHLVAGVCETDFSGYPDCRDDTVKSLQVTLNLGMAERLVLHTPLMWLDKAQTWMLAEQLGGSALVDLTVEASHTCYYGMREQRHEWGYGCGECPACRLRAEGWHRFRHGSGAQ

SEQ ID NO: 38671 - protein, 238 aa, Halospina denitrificans
  REGION 1..238: note = tr|A0A4R7JNQ6|A0A4R7JNQ6_9GAMM Queuosine biosynthesis protein QueC OS=Halospina denitrificans; OX = 332522 GN=DES49_2402 PE=4 SV=1
MDVLWTGGWDSTFRILQHLFEGRDVKPHYILDPGRPSTKREIKAMKDLREQFNADHRLGGRLHETRMVKKCSFPEDARIREAYQDLIRIRYIGEQYKWIAEYCKYFDLRRIEVSVLNNPLILKYHINKEYPFSVIFSYFEFPLINYSKTDMKEWCEENGFMGIMELTWFCHTPRKSGMPCGVCHPCITVMKEGMSGRMPFSSKIHYHLRILPRIKDTLKRHPNIYARLVALKKKIEVC

SEQ ID NO: 38672 - protein, 220 aa, Halospina denitrificans
  REGION 1..220: note = tr|A0A4R7K0Q0|A0A4R7K0Q0_9GAMM 7-cyano-7-deazaguanine synthase OS=Halospina denitrificans; OX = 332522 GN=queC PE=3 SV=1
MGTVVVIYSGGMDSYTLLHKALHEGWEVHALSFDYGQRHSRELDCAREVCRKLAVPHQVVDIGSIQSLLGGSALTDEVDVPEGHYEESNMKATVVPNRNMILLSLAIGQAVSLEAEAVWYGAHGGDHAIYPDCRPAFIERMDQLARVANYQPVRVEAPFMQMSKGEILAEGLSMGLDYRATWTCYNGREQACGRCGACVERLEAFSLNGLSDPLSYKELG

SEQ ID NO: 38673 - protein, 220 aa, Halospina sp.
  REGION 1..220: note = tr|A0A5J5FM26|A0A5J5FM26_9GAMM 7-cyano-7-deazaguanine synthase QueC OS=Halospina sp. K52047b OX=2614160 GN=queC PE=4 SV=1
MSRIVVIYSGGMDSYTLLHRALAEGWHVHALSFDYGQRHARELDCARAVTRELGIDHEVVDITSIQGLLAGSALTDSEPVPEGHYEEATMKATVVPNRNMILLSLAIGHAVSRGAEAVWYGAHGGDHAIYPDCRPEFIEQMDRVARVANYEAVRVAAPFMHFTKGQILGEGLAMDLDYSRTWTCYNGRTRACGRCGACTERLEAFAAHGVTDPLPYEDAH

SEQ ID NO: 38674 - protein, 233 aa, Halotalea alkalilenta
  REGION 1..233: note = tr|A0A172YEM4|A0A172YEM4_9GAMM 7-cyano-7-deazaguanine synthase OS=Halotalea alkalilenta; OX = 376489 GN=queC PE=3 SV=1
MSSNAQYPRAASRRAVVIYSGGMDSFTVLHRAINEGFEVHALSFDYGQRHRRELEVAARVCSRLGIDHRVVDLRAIHGLIDASSLTDASKPLPKAAYAGDNMRSTVVPNRNMILLALAIGHAVNIEAPVCFYGAHGGDHAIYPDCRPEFVEKINAVAAIANYQPVEVVAPYLHADKTSILADGLAMGLDYAQTWTCYLGEAQACGECGSCRERLAAFAAHGLEDPLDYVDGVR

SEQ ID NO: 38675 - protein, 237 aa, unidentified
  source 1..237: note = Halothece sp.
  REGION 1..237: note = tr|K9YGX3|K9YGX3_HALP7 7-cyano-7-deazaguanine synthase OS=Halothece sp. (strain PCC 7418) OX=65093; GN = queC PE=3 SV=1
MTQKAVVLLSGGLDSSTVLYQAQADGYECYALSFDYQQRHQRELEAAQQIAEAAGVKQHQVVSFDLGLWGGSALTDQTIDVPRDRAPQEMADNIPITYVPARNTIFLSFALAYAEALSAECVYIGVNALDYSGYPDCRPDYIQAMQQVFQLGTKQGREGNPITIQTPLIDLKKTDIIQLGNQLHVPWEKTWSCYQGETEACGVCDSCQLRLKAFQELGLTDPLPYRVSNRHEPNERD

SEQ ID NO: 38676 - protein, 231 aa, unidentified
  source 1..231: note = Halothiobacillaceae bacterium
  REGION 1..231: note = tr|A0A545SCC7|A0A545SCC7_9GAMM 7-cyano-7-deazaguanine synthase OS=Halothiobacillaceae bacterium OX=2268194 GN=queC PE=3 SV=1
MSDQSRRAVVLVSGGLDSATVLAIARAEGYACHALSVDYGQRHAAELEASRHVASALGAVEHRQVHVDLGGIAGSALTDHNIPVPEAEGQGIPVTYVPARNTIMLSIALGWAEVLGAQDIFVGVNAVDYSGYPDCRPAFIDAFERLANLATKAGVEGRAFHIRAPLIRMSKAEIITKGIELGVDYAQTVSCYQADQHGRACGRCDSCRLRAAGFAEAGVPDPTRYARKNDA

SEQ ID NO: 38677 - protein, 166 aa, unidentified
  source 1..166: note = Halothiobacillaceae bacterium
  REGION 1..166: note = tr|A0A539E610|A0A539E610_9GAMM 7-cyano-7-deazaguanine synthase (Fragment); OS = Halothiobacillaceae bacterium OX=2268194 GN=FD130_1211; PE = 3 SV=1
HKTITVDLDGIGGSALTDLTIPLPEQLRPGIPVTYVPARNTIFLSFALGWAEVLGATDIFIGVNAVDYSGYPDCRPEYIAAFERLAALATKAGVEGTCFKVQAPLLHMSKGQIIREGVRLGVDYGLTVSCYGADAAGQACGVCDSCRLRRAGFDEAGMIDPTLYSH

SEQ ID NO: 38678 - protein, 235 aa, Halothiobacillus neapolitanus
  REGION 1..235: note = tr|D0KY70|D0KY70_HALNC 7-cyano-7-deazaguanine synthase OS=Halothiobacillus neapolitanus (strain ATCC 23641 / c2) OX=555778 GN=queC PE=3 SV=1
MSLDTENTQPKAVVLLSGGLDSATVAAIAKSDGYQVHAVSFDYGQRHKVELKAAYRVALQLGIQHHKMISINLNDVGGSALTDSALAVPDYDAQSAEHIPITYVPARNLTFLSLALGWAEILGARRIYIGVNAVDYSGYPDCRPEFIKQFEVTANLATAAGLTGEPFKIIAPLQTLTKAEIIQWGTRFGVDYAQTISCYNPDEQGRACGRCDACHYRKQGFMDAGIPDVTIYAPE

SEQ ID NO: 38679 - protein, 225 aa, Halothiobacillus sp.
  REGION 1..225: note = tr|A0A0W1RY91|A0A0W1RY91_9GAMM 7-cyano-7-deazaguanine synthase OS=Halothiobacillus sp. XI15 OX=1766620 GN=queC PE=3 SV=1
MSATREPAIVLLSGGLDSATLAWMARADGYAVHALSFDYGQRHRAELAAAGRVAQAAGAVEHRTIRIDMDGITGSSLTDVERSVPDYDPAQSEIPSTYVPARNLTFLSFALGWAEVLSARRIYIGVNAVDYSGYPDCRPAFIEKFQELANVATAAAHPFEIHAPLLHMTKAEIIRTGQALGVDYGLTVSCYRADEAGRACGRCDSCHYRQQGFRDAGVPDPTRYA

SEQ ID NO: 38680 - protein, 235 aa, Halothiobacillus sp.
  REGION 1..235: note = tr|A0A191ZIG4|A0A191ZIG4_9GAMM 7-cyano-7-deazaguanine synthase OS=Halothiobacillus sp. LS2 OX=1860122 GN=queC PE=3 SV=1
MDTNSHTCPKAVVLLSGGLDSATVAAIARSEGYELYAISFDYGQRHKAELKAAARVAQAMGVRDHKVIRIDLNGMGGSALTDEALAVPDFAQRAENDIPITYVPARNLTFLSFALGWAEILGARQIFIGVNAVDYSGYPDCRPEFIAQFERVANLATAAGVNSLPFRIVAPLQYLTKVQIIEMGTKLGVDYRQTVSCYNPDSEGRACGRCDACHYRRQGFDEAGIPDATIYQASN

SEQ ID NO: 38681 - protein, 220 aa, Halovibrio sp.
  REGION 1..220: note = tr|A0A2A2FAL0|A0A2A2FAL0_9GAMM 7-cyano-7-deazaguanine synthase OS=Halovibrio sp. YL5-2; OX = 2032626 GN=queC PE=3 SV=1
MSRIVVIYSGGMDSYTLLHRALAEGWRVHALSFDYGQRHARELDCARAVTRELGIDHEVVDITGIQGLLAGSALTDSEPVPEGHYEEATMKATVVPNRNMILLSLAIGHAVSRGAEAVWYGAHGGDHAIYPDCRPEFIEQMDRVARVANYEAVRVAAPFMHFTKGQILGEGLAMDLDYSRTWTCYNGRTLACGRCGACTERLEAFAAHGVTDPLPYEDAH

SEQ ID NO: 38682 - protein, 237 aa, unidentified
  source 1..237: note = Halovibrio variabilis
  REGION 1..237: note = tr|A0A511URM2|A0A511URM2_9GAMM 7-cyano-7-deazaguanine synthase OS=Halovibrio variabilis; OX = 31910 GN=queC PE=3 SV=1
MSSTPSVAADSATTTVVIYSGGMDSFTLLHRALREGLSVHALSFDYGQRHARELDTARQVCTSLGLPHQVVDIRAIHSLIDNSALTNPDQAMPQGDYAADNLRATVVPNRNMILLSLAIAKAVNIGASRVDYGAHGGDHILYPDCRPAFVDAMNQVAGIANFEPVTLHAPYLHTSKADILREGLAMGLDYQHTWTCYEGRELACGVCGSCHERLAAFAANGVTDPLAYSPNTAAGQH

SEQ ID NO: 38683 - protein, 236 aa, unidentified
  source 1..236: note = Hamiltonella defensa
  REGION 1..236: note = tr|C4K4K2|C4K4K2_HAMD5 7-cyano-7-deazaguanine synthase OS=Hamiltonella defensa subsp. Acyrthosiphon pisum (strain 5AT) OX=572265 GN=queC PE=3 SV=1
MRKNNPIKRAVLVFSGGQDSTTCLIQALHQYDEVHCITFDYAQRHRSEIAIAQALAKKLQATSYKILDLQLLNELTVSSLTRENIPLPKKQNSEGSLPNTFVPGRNIVFLTFSAIYAYQLDADVVITGVCETDFSGYPDCRDEFVKSLNHAVTLGMQKNITFVTPLMWLNKAETWALADYYQQMPLIRNKTLTCYNGIQGDGCGECLSCELRLKGLKYYLAHKEEVTENLKLKSQL

SEQ ID NO: 38684 - protein, 228 aa, unidentified
  source 1..228: note = Handelsmanbacteria sp.
  REGION 1..228: note = tr|A0A1F6C5L3|A0A1F6C5L3_HANXR 7-cyano-7-deazaguanine synthase OS=Handelsmanbacteria sp. (strain RIFCSPLOWO2_12_FULL_64_10) OX=1817868 GN=queC PE=3; SV = 1
MQGPIDHRAVVLLSGGMDSSTCLWWARAQGGAEVHTVSIDYGQRHRVELEFSARLSARAGAVSHKVVRLDLTQFGGNPLTDAGVAVPRASEGQQARTVVPYRNMLFITLAAAHAETLGIADLYIAAVRDDHRSYRDCRRVFYNGLERALSLGGAHDREVRIHSPFVEMWKTEVVRIGLELGVPYEETHTCYEGKRPACGLCDACVERIAAFKANGVQDPIEYEIEVEW

SEQ ID NO: 38685 - protein, 223 aa, unidentified
  source 1..223: note = Handelsmanbacteria sp.
  REGION 1..223: note = tr|A0A1F6C621|A0A1F6C621_HANXR 7-cyano-7-deazaguanine synthase OS=Handelsmanbacteria sp. (strain RIFCSPLOWO2_12_FULL_64_10) OX=1817868 GN=queC PE=3; SV = 1
MGRSLAVVVASGGMDSCVAAAVAAQDHDLGFLHVNYGQRTERRELRAFEEIADFYGVSRRLVVDARCLSAVGGSSLTDASMPVPEADVDRWEVPTTYVPFRNAHLLCIGVSWAEALGARKVYVGVEVESGYPDCSAGFIEAFNRAVTAGTRPGSGIEVVAPLVAMKKAGVVRLGMALGAPLHLTWSCYRSEGLACGRCDSCALRLRGFRLAGVKDLIAYARPD

SEQ ID NO: 38686 - protein, 235 aa, Hansschlegelia zhihuaiae
  REGION 1..235: note = tr|A0A4Q0MM39|A0A4Q0MM39_9RHIZ 7-cyano-7-deazaguanine synthase OS=Hansschlegelia zhihuaiae OX=405005 GN=queC PE=3 SV=1
MNGDRALVLFSGGQDSTTCLAWALDRYSHVETVGFDYGQRHRVELGQRGRLREGLAALTADWAARLGPDHTIALPALGELSETALTSDVEIAMSEAGLPNTFVPGRNIAFLTFAAALAYRRGLKRIVGGMCETDYSGYPDCRDDAIKALQAALNLGMEARFVLETPLMWLDKADTWALAEALGGRALVELIVAESHTCYLGERGEAHAWGFGCGACPACELRARGFAQYEASRTI

SEQ ID NO: 38687 - protein, 227 aa, Hapalosiphon sp.
  REGION 1..227: note = tr|A0A0M0SRV2|A0A0M0SRV2_9CYAN 7-cyano-7-deazaguanine synthase OS=Hapalosiphon sp. MRB220; OX = 1704290 GN=queC PE=3 SV=1
MKAVILLSGGLDSSTVLYQALADGCKCYAISFDYQQRHRRELHSALAIAQKAGVVQNQIVTFDLRQWGGSALTDDTIDLPQKRSVEEMSQNIPVTYVPARNTIFLSFALAYAETIAAERVYIGVNALDYSGYPDCRPDYIQAMQEVFRLGTKQGREGKPITIVAPLLELKKTDIIQLGNKLGVPWELTWSCYAGGELACGVCDSCRLRLAAFAELGLKDPLNYASFD

SEQ ID NO: 38688 - protein, 227 aa, unidentified
  source 1..227: note = Hapalosiphonaceae cyanobacterium
  REGION 1..227: note = tr|A0A328IDP7|A0A328IDP7_9CYAN 7-cyano-7-deazaguanine synthase OS=Hapalosiphonaceae cyanobacterium JJU2 OX=2109628 GN=queC PE=3 SV=1
MKAVILLSGGLDSSTVLYQALADGYECYTISFDYQQRHRRELDSALAIAQKAGVIQNQIVTFDLRQWGGSALTDDSIDLPEKRSLEEMSQNIPATYVPARNTIFLSFALAYAETIAAERVYIGVNALDYSGYPDCRPDYIQAMQEVFRLGTKQGREGKPITIVAPLLELKKTDIIELGNKLGVPWELTWSCYAGGEVACGICDSCRLRLAAFAKLGLTDPLNYASLC

SEQ ID NO: 38689 - protein, 225 aa, Helicobacter acinonychis
  REGION 1..225: note = sp|Q17XR6|QUEC_HELAH 7-cyano-7-deazaguanine synthase; OS = Helicobacter acinonychis (strain Sheeba) OX=382638; GN = queC PE=3 SV=1
MGQEICVISFSGGQDSTTLAIWAAKRFKKVYLVGFDYAQKHSVELECAQKIASLLKLPYEIIQLDFLENITHSALFKNSNDLIGHSHVQNKDLPNSFVPNRNAIFITLLHSYAQKLGANNIALGVSQADFSGYPDCKEDFIKSIEHALNLGSNTTIKIVTPLMFLSKAQEFQMAKDLGALDLIIKETHTCYQGERKILHAYGYGCGECLACQLRKKGYEEFQARF

SEQ ID NO: 38690 - protein, 246 aa, unidentified
  source 1..246: note = Helicobacter ailurogastricus
  REGION 1..246: note = tr|A0A0K2X685|A0A0K2X685_9HELI 7-cyano-7-deazaguanine synthase OS=Helicobacter ailurogastricus OX=1578720 GN=queC PE=3 SV=1
MGAILAKENPMILEKTYNASCVLCFSGGQDSTTLALWAKKAFSATHLLAFDYAQKHAIELEQAQKIAGLLNLPLKILDVRFLQEITLSALFANHPQKSHAPHPQNPDLPASFVPDRNALFFTLAHAYAFNLGADFVLVGVSQQDYSGYFDCRAAFLESLQTSLNLGAFGVPEGITFLAPFMQMSKAQEFGLARDLGGLDFVLEYTHTCYEGVRGVRHAYGYGCGVCPACQLRQAAYQEFLEHYKQN

SEQ ID NO: 38691 - protein, 260 aa, unidentified
  source 1..260: note = Helicobacter ailurogastricus
  REGION 1..260: note = tr|A0A0K2Y0Z5|A0A0K2Y0Z5_9HELI 7-cyano-7-deazaguanine synthase OS=Helicobacter ailurogastricus OX=1578720 GN=queC PE=3 SV=1
MVVLIPKHKKPFAIMGAILAKENPMILEKTYNASCVLCFSGGQDSTTLALWAKKAFSATHLLAFDYAQKHAIELEQAQKIAGLLNLPLKILDVRFLQEITLSALFANHPQKSHAPHPQNPDLPASFVPDRNALFFTLAHAYAFNLGADFVLVGVSQQDYSGYFDCRAAFLESLQTSLNLGAFGVPEGITFLAPFMQMSKAQEFGLARDLGGLDFVLEYTHTCYEGVRGVRHAYGYGCGVCPACQLRQAAYQEFLEHYKQN

SEQ ID NO: 38692 - protein, 224 aa, Helicobacter anseris
  REGION 1..224: note = tr|A0A3D8JAY6|A0A3D8JAY6_9HELI 7-cyano-7-deazaguanine synthase OS=Helicobacter anseris; OX = 375926 GN=queC PE=3 SV=1
MEKCLVIFSGGQDSTTTARWAQEKFQSVVLLGFDYGQKHKIELTQAQLIAQKLHLPFHIIKLDFLDQICQSALFFNSTQNVNDTHLNNNALPASFVPNRNAIFITLAHSFAQKIGANHLALGVSEQDYSGYPDCRKVFIDSIEKTLNLSSQTHITIHTPLIAMSKAKEFALAKELGILEIILEDTHTCYEGIREKKHPWGYGCGICNACILRKNAYESFLLQNA

SEQ ID NO: 38693 - protein, 213 aa, Helicobacter bilis
  REGION 1..213: note = tr|N2BLN8|N2BLN8_9HELI 7-cyano-7-deazaguanine synthase OS=Helicobacter bilis WiWa OX=1235804; GN = C826_00969 PE=3 SV=1
MRLVLFSGGVDSTTALFWSKKECATHALIFKYPSLHNKREIDSAVRICKDENISYTLLDMSSVFIGFKSALLQNSSESIPQDSYNLESMAKLVVPFRNGIFLSVAAGLAESLGYKEIVLANHAGDHPLYPDCTKTFIDSMNESIMQGSGGAVKLCSPFCNWDKKEIVKLGLSLGVDYTKTYSCYRGGEKHCNTCPTCIESNESFLANGIVIER

SEQ ID NO: 38694 - protein, 213 aa, Helicobacter bilis; identical to SEQ ID NO: 38693
  REGION 1..213: note = tr|A0A4U8TTR4|A0A4U8TTR4_9HELI 7-cyano-7-deazaguanine synthase OS=Helicobacter bilis; OX = 37372 GN=queC PE=3 SV=1

SEQ ID NO: 38695 - protein, 244 aa, Helicobacter bizzozeronii
  REGION 1..244: note = tr|F8KRV0|F8KRV0_HELBC 7-cyano-7-deazaguanine synthase OS=Helicobacter bizzozeronii (strain CIII-1); OX = 1002804 GN=queC PE=3 SV=1
MFNPFDISALLATSFEGSCVLCFSGGQDSTTLALWGKHAFKQVHLLGFDYAQKHAIELEQAQKIAQLLHLPYTCLSLDFLASISASALFTHSTESMQSSHPRNPNLPASFVPDRNALFLTLAHAYAFNVGADFVLVGVSQQDYSGYFDCREVFIASMQESLNLGAFGSKEGISILAPLMFASKAQEFQLAQELGGLDLVLEHSHTCYEGVRDQKHVYGYGCGVCPACALRQKGYAEFLEYYKKN

SEQ ID NO: 38696 - protein, 244 aa, Helicobacter bizzozeronii
  REGION 1..244: note = tr|H5VD62|H5VD62_HELBI 7-cyano-7-deazaguanine synthase OS=Helicobacter bizzozeronii CCUG 35545; OX = 1002805 GN=queC PE=3 SV=1
MFNPFDISALLATSFEGSCVLCFSGGQDSTTLALWGKHAFKQVHLLGFNYAQKHAIELEQAQKIAQLLHLPYTCLSLDFLASISASALFTHSTESMQASHPRNPNLPASFVPDRNALFLTLAHAYAFNVGADFVLVGVSQQDYSGYFDCREGFIASMQESLNLGAFGSKEGIGILAPLMFASKAQEFQLAQELGGLDLVLEHSHTCYEGVRDQKHVYGYGCGVCPACALRQKGYAEFLEYYKQN

SEQ ID NO: 38697 - protein, 223 aa, Helicobacter canadensis
  REGION 1..223: note = tr|C5ZVV2|C5ZVV2_9HELI 7-cyano-7-deazaguanine synthase OS=Helicobacter canadensis MIT 98-5491 OX=537970; GN = exsB PE=3 SV=1
MDKAIVLASGGLDSCVSVACAIKDGYEVCLLHINYGQRTQKRENQAFNDIANYYGIQNKLIVDIDYLRQIGGSSLVDSSIPIEQETIPSSTGQIPMTYVPFRNANMISIAVSWAEVIGAKKIYVGAVEEDSSGYPDCMEIFYEKFNELLKVALLPQNNVEILTPLIHLNKAEIVHQGILLKAPLHLTWSCYQNEDKACGVCESCKLRLRGFKLAGECDPIAYK

SEQ ID NO: 38698 - protein, 225 aa, Helicobacter cetorum
  REGION 1..225: note = tr|I0ENM2|I0ENM2_HELC0 7-cyano-7-deazaguanine synthase OS=Helicobacter cetorum (strain ATCC BAA-429 / MIT 00-7128) OX=182217 GN=queC PE=3 SV=1
MKQEICVLSFSGGQDSTTLAVWATKHFKKVYLVGFDYAQKHSIELECATKIASLLQLPYEIIKLDFLESITHSALFKSSKDLIKNSHTQHKDLPSSFVPNRNAIFITLLHSYAQKLGASNIALGVSQADFSGYPDCKEDFIKSIENSLNLGSNTHITIHTPLMFLTKAQEFQMAKDLGILDLIIKETHTCYHGERKTLHAYGYGCNECPACKLRKKGYEEFQSNL

SEQ ID NO: 38699 - protein, 227 aa, Helicobacter cetorum
  REGION 1..227: note = tr|I0EQP3|I0EQP3_HELCM 7-cyano-7-deazaguanine synthase OS=Helicobacter cetorum (strain ATCC BAA-540 / MIT 99-5656) OX=1163745 GN=queC PE=3 SV=1
MKQEICVLSFSGGQDSTTLAVWATKHFKKVYLVGFDYAQKHSIELECATKIASLLQLPYEIIKLDFLESITNSALFKNSKDLIKNSHTQHKNLPSSFVPNRNAIFITLLHSYAQKLGASNLALGVSQADFSGYPDCKEDFIKSIENSLNLGSNTHITIHTPLMFLTKAQEFQMAKDLGILDLIIKETHTCYHGERKTLHAYGYGCNECPACQLRKKGYEEFQSQMIL

SEQ ID NO: 38700 - protein, 67 aa, Helicobacter cinaedi
  REGION 1..67: note = tr|I7HED8|I7HED8_9HELI Truncated tRNA methyltransferase OS=Helicobacter cinaedi CCUG 18818 = ATCC BAA-847 OX=537971 GN=HCBAA847_2312 PE=4 SV=1
MLALALFSGGCDSLISMKLLKDQGIDVIALHFNIGFGGNKDKLEYFQNATAQIDVKLQVLDIRQQFF

SEQ ID NO: 38701 - protein, 243 aa, Helicobacter felis
  REGION 1..243: note = tr|E7AC02|E7AC02_HELFC 7-cyano-7-deazaguanine synthase OS=Helicobacter felis (strain ATCC 49179 / NCTC 12436 / CS1) OX=936155 GN=queC PE=3 SV=1
MLHPFDLAKMLTIQDFKTHTCVLCFSGGQDSTTLALWAKRVFEQTYLLGFDYDQKHAIELAQAHKIARMLELPYKVLDLSCLQEISTSALFAHTSHALNTPHPQAQDLPSSFVPDRNALFITLAHAYAFNLGAQAVLLGVSMQDYSGYFDCRQNFIESLQTSLNLGAFGKKEGINLLAPLMFSSKAQEFQLAHALGGLELILEHTHTCYEGVRESRHEFGYGCGVCPACQLRQQGYMKFLDTK

SEQ ID NO: 38702 - protein, 246 aa, Helicobacter heilmannii
  REGION 1..246: note = tr|A0A0K2XWH3|A0A0K2XWH3_HELHE 7-cyano-7-deazaguanine synthase OS=Helicobacter heilmannii; OX = 35817 GN=queC PE=3 SV=1
MGIILAKDTKMILEQTTNGSCVLCFSGGQDSTTLALWAKKAFKKTHLLTFNYAQKHAIELKQAQKIATLLDLPLKILDLAFLQEITFSALFASNSQSSNAPHPKNPNLPASFVPDRNALFFTLAHAYAFNLGADFVLVGVSQADYSGYFDCRKEFIESLQTSLNLGAFGAPKGIDFLAPFMDMSKAQEFALAQDLGGLELILEHTHTCYEGERGVRHAYGHGCGACPACCLRQEAYQEFLEYYKQN

SEQ ID NO: 38703 - protein, 246 aa, Helicobacter heilmannii
  REGION 1..246: note = tr|A0A0K2Y6Y1|A0A0K2Y6Y1_HELHE 7-cyano-7-deazaguanine synthase OS=Helicobacter heilmannii; OX = 35817 GN=queC PE=3 SV=1
MGIILAKDTKMILEQTTNGSCVLCFSGGQDSTTLALWAKKAFKKTHLLTFNYAQKHAIELKQAQKIATLLDLPLKILDLAFLQEITFSALFASNSQSSNAPHPKNPNLPASFVPDRNALFFTLAHAYAFNLGADFVLVGVSQADYSGYFDCRKEFIESLQTSLNLGAFGAPKGIDFLAPFMDMSKAQEFALAQDLGGLELILEHTHTCYEGERGVRHAYGHGCGACPACCLRQEAYQEFLEHYKQN

SEQ ID NO: 38704 - protein, 258 aa, Helicobacter muridarum
  REGION 1..258: note = tr|A0A377PUA6|A0A377PUA6_9HELI 7-cyano-7-deazaguanine synthase OS=Helicobacter muridarum; OX = 216 GN=queC PE=3 SV=1
MIESNIDSLVNHNICSLHSTKNVNIESIELKNAKRAVCIMSGGIDSALCAYIAKNQGFEIIALHFDYAQRTQTKERECFYALCDDLKPISRVLLNVDFIAHIGGSSLTNSELTIRKNFTDIRESKEIPNTYVPFRNGIFLSIASALAEKEQCEAIFIGVVQEDSSGYPDCTHAFIDKMQAAVNEGRGYSNTRIFAPLLHKNKCEIIELALEHGVPISSTWSCYESQDLACGLCDSCILRLDGFKMAGKSDPILYRIFT

SEQ ID NO: 38705 - protein, 231 aa, Helicobacter mustelae
  REGION 1..231: note = tr|D3UGG7|D3UGG7_HELM1 7-cyano-7-deazaguanine synthase OS=Helicobacter mustelae (strain ATCC 43772 / LMG 18044 / NCTC 12198 / 12198) OX=679897 GN=queC PE=3 SV=1
MQKCLVVFSGGQDSTTVAAWAKKEFSSVELLAFDYQQKHRIELQQARKIAEKLELKLNMIVLDFLAQIADSALFAKSIENLSTKHKTHQDLLASFVPNRNGLFLTIAHAFAQKIHANHIAIGVSEQDYSGYPDCREEFITAMESALNKGAQTQIKIHTPLSHMSKAEEFLLAQNLGVLEMILEDSHTCYEGVRESRHAWGYGCGICAACILRKNAYEKFLAIIAQKNAGNG

SEQ ID NO: 38706 - protein, 223 aa, Helicobacter pullorum
  REGION 1..223: note = tr|C5EZS7|C5EZS7_9HELI 7-cyano-7-deazaguanine synthase OS=Helicobacter pullorum MIT 98-5489 OX=537972; GN = queC PE=3 SV=1
MDKAIVLASGGLDSCVSIACALKDGYEVCLLHINYGQRTQSREDRAFSDIADFYGITQKLIVDISYLRQIGGSSLVDSSMPIEEDTIPSAKGAIPSTYVPFRNANMISIAVSWAEVIRAKKIYIGAVEEDSSGYPDCREIFYQKFNDLLKVGLSPKNEVEILTPLIHLSKKEIVQKGIELEAPLHLTWSCYQNENKACGVCESCKLRLRGFELAGVKDPIKYE

SEQ ID NO: 38707 - protein, 223 aa, Helicobacter pullorum
  REGION 1..223: note = tr|A0A0N0LT80|A0A0N0LT80_9HELI 7-cyano-7-deazaguanine synthase OS=Helicobacter pullorum; OX = 35818 GN=queC PE=3 SV=1
MDKAIVLASGGLDSCVSIACALKDGYEVCLLHINYGQRTQNREDRAFSDIADFYGITQKLIVDISYLRQIGGSSLVDSSMPIEEDTIPSAKGAIPSTYVPFRNANMISIAVSWAEVIGAKKIYIGAVEEDSSGYPDCREIFYQKFNDLLKVGLSPKNEVEILTPLIHLSKKEIVQKGIELEAPLHLTWSCYQNENKACGVCESCKLRLRGFELAGVKDPIKYE

SEQ ID NO: 38708 - protein, 226 aa, Helicobacter pylori
  REGION 1..226: note = sp|O25356|QUEC_HELPY 7-cyano-7-deazaguanine synthase; OS = Helicobacter pylori (strain ATCC 700392 / 26695); OX = 85962 GN=queC PE=3 SV=1
MEQKICVIGFSGGQDSTTLAVWAKKRFKKVCLVGFDYAQKHSVELECAQKIASLLQLPYEIIPLDFLENITRSALFKNSNDLIGHSHAQNKDLPNSFVPNRNAIFITLLHSYAQKLGASNIALGVSQADFSGYPDCKEDFIKSIEHALNLGSNTAIKILTPLMFLNKAQEFQMAKDLGVLDLVIKETHTCYQGERKILHAYGYGCDKCPACQLRKKGFEEFQANKK

SEQ ID NO: 38709 - protein, 226 aa, Helicobacter pylori
  REGION 1..226: note = tr|D6XPN3|D6XPN3_HELPV 7-cyano-7-deazaguanine synthase OS=Helicobacter pylori (strain v225d) OX=637913; GN = queC PE=3 SV=1
MEQEICAISFSGGQDSTTLAVWAKKRFKKVYLVGFDYAQKHSVELECAQKIASLLQLPYEIIPLDFLENITHSALFKNSNDLMGHSHAQNKDLPNSFVPNRNAIFITLLHSYAQKIGASNIALGVSQADFSGYPDCKEDFIKSIEHALNLGSNTAIKILTPLMFLNKAQEFQMAKDLGVLDLVIKETHTCYQGERKILHAYGYGCGECPACQLRKKGYEEFESNKK

SEQ ID NO: 38710 - protein, 233 aa, Helicobacter sp.
  REGION 1..233: note = tr|A0A3D6E338|A0A3D6E338_9HELI 7-cyano-7-deazaguanine synthase OS=Helicobacter sp. OX=218; GN = queC PE=3 SV=1
MTSLTPSALSSSHALVVFSGGQDSTTCLGWAIKHFKSVEAITFDYGQRHRIEIEQSRLIAQKLGIKQFILEFDLFSKLGDSALLETSSDLKASPHRTKPHLPASFVPNRNALFFTLAHAYAQREGLTHIITGISEADYSGYPDCREEFITHLERTLNLGSDSSILFAYPLLHRNKAQTFALAKECGVLDLVLEESHTCYNGDRSHRYEWGYGCKECPACGLREKGWREYQASL

SEQ ID NO: 38711 - protein, 228 aa, Helicobacter sp.
  REGION 1..228: note = tr|A0A268TWM7|A0A268TWM7_9HELI 7-cyano-7-deazaguanine synthase OS=Helicobacter sp. 12S02232-10 OX=1476197 GN=queC PE=3 SV=1
MARKCVVSFSGGQDSTTVAAWAKKEFDEVVLVGFDYNQKHKIELTQAKLIAQKLSLPFHIINISFFSQIVESALLQNNQKNINDPHLTNSNLPASFVPNRNALFITIVHSFAQKIGAQHIALGVSEQDYSGYPDCRENFIDAIENSLNLGSETNIQIHTPLMHLDKAKEFALAKDLGVLQIVLEDTHTCYEGNRSNYQEWGYGCGVCNACILRKKAYEKYLKTYAHQH

SEQ ID NO: 38712 - protein, 242 aa, Helicobacter suis
  REGION 1..242: note = tr|A0A510H9D9|A0A510H9D9_9HELI 7-cyano-7-deazaguanine synthase OS=Helicobacter suis; OX = 104628 GN=queC PE=3 SV=1
MKPFDLQSLLTKRYKSSCVLCFSGGQDSTTLALWSLSAFEKTYLLGFDYAQRHGIELEQATKIATQLKLPFKILSLDFLQELSNSALFKKSPQSIQAPHMKNPQLPASFVPDRNALFVTLAHAYAFNLGASFVLLGISEQDYSGYFDCRQNFLESLQTSLNLGAFGTPEGITLLAPFMFMSKAQEFALAQKLGFLDFILEQTHTCYIGDRSIRHPYGYGCGTCPACLLRQKGYENFLKESNK

SEQ ID NO: 38713 - protein, 242 aa, Helicobacter suis
  REGION 1..242: note = tr|E7G4M2|E7G4M2_9HELI 7-cyano-7-deazaguanine synthase OS=Helicobacter suis HS5 OX=710394 GN=exsB PE=3; SV = 1
MKPFDLQSLLTKRYKSSCVLCFSGGQDSTTLALWSLSAFEKTYLLGFDYAQRHGIELEQATKIATQLKLPFKILSLDFLQELSNSALFKKSPQSIQAPHMKNPQLPASFVPDRNALFVTLAHAYAFNLGASFVLLGISEQDYSGYFDCRQNFLESLQTSLNLGAFGTPEGITLLAPFMFMSKAQEFALAQKLGFLDFILEQTHTCYIGDRSTRHPYGYGCGTCPACLLRQKGYENFLKESNK

SEQ ID NO: 38714 - protein, 213 aa, Helicobacter trogontum
  REGION 1..213: note = tr|A0A4U8SAW2|A0A4U8SAW2_9HELI 7-cyano-7-deazaguanine synthase OS=Helicobacter trogontum; OX = 50960 GN=queC PE=3 SV=1
MRLVLLSGGGDSTTALFWSKKTCNTHALIFKYPSLHNQKEINCAMQICRDENIPYTLLDISSVFTDFKSALLQNNTETIPNDSYNLESMSKLVIPFRNGIFLSIAAGLAESLGCTEVVLANHAGDHPIYPDCTKAFITSMNESIFQGSGGLVKLCSPFCSWDKNEIVRLGVTLGIDYAKTYSCYKGGERHCNVCPTCIESNESFLANGIVVDR

SEQ ID NO: 38715 - protein, 213 aa, Helicobacter trogontum
  REGION 1..213: note = tr|A0A4U8TEK8|A0A4U8TEK8_9HELI 7-cyano-7-deazaguanine synthase OS=Helicobacter trogontum; OX = 50960 GN=queC PE=3 SV=1
MRLVLLSGGGDSTTALFWSKKTCNTHALIFKYPSLHNQKEINCAMQICRDENIPYTLLDISSVFTDFKSALLQNNTETIPNDSYNLESMSKLVIPFRNGIFLSIAAGLAESLGCTEVVLSNHAGDHPIYPDCTKAFITSMNESIFQGSGGLVKLCSPFCGWDKNEIVRLGVTLGIDYAKTYSCYKGSERHCNVCPTCIESNESFLANGIVVDR

SEQ ID NO: 38716 - protein, 229 aa, unidentified
  source 1..229: note = Helicobacter valdiviensis
  REGION 1..229: note = tr|A0A2W6MWD9|A0A2W6MWD9_9HELI 7-cyano-7-deazaguanine synthase OS=Helicobacter valdiviensis OX=1458358 GN=queC PE=3 SV=1
MKKALCILSGGMDSTLCAYLAKKEGYEIVAIHFNYGQRTQKKEKECFDAICKELQVYKSYSLDMDFLKVIGGNALVDTNLAVPKNELGKVGEVPITYVPFRNGVFLSIAGSIAEKEECERIYIGVIEADGSGYPDCTGDFIKKAQEFINKGTKECYSVEICTPLLKMKKVDIVKKSLELGVPLELTWSCYEGEDEACGECDSCLLRLRGFREAQKEDKIPYKNSLNFLM

SEQ ID NO: 38717 - protein, 247 aa, Heliobacterium modesticaldum
  REGION 1..247: note = tr|B0TFM0|B0TFM0_HELMI 7-cyano-7-deazaguanine synthase OS=Heliobacterium modesticaldum (strain ATCC 51547 / Ice1) OX=498761 GN=queC PE=3 SV=1
MDAYRERAVVILSGGLDSTTCMALADCRGEDIFALTFAYNQRHIREIEAAQAVACHYGAHHQIIDLGAVFAASALTSTEIRPEVAAPLGGSAVAKMEAMGCAEKNPVAIATAIPATYVPARNILFLAYALSFAEKVGARRIYTGVNALDNPGYPDCRPEFIAAFQRMIDVGTKAGTEGRSVEVFTPLIEMNKADIIRLALDLDAPLHLTLTCYYGERPACGECNSCRLRLEGFRLLGKGDPIAYRKG

SEQ ID NO: 38718 - protein, 230 aa, Heliophilum fasciatum
  REGION 1..230: note = tr|A0A4R2RIZ6|A0A4R2RIZ6_9FIRM 7-cyano-7-deazaguanine synthase OS=Heliophilum fasciatum; OX = 35700 GN=queC PE=3 SV=1
MRNAARERKAVVILSGGLDSTVCMAAAVSVGLKVYGLTFDYGQRHRRELKAAAAVARHYGVEHTVVSLPDIFASNALTKELNKLEVSGEIRAGIPATYVPARNILFLSYGLAWAENVGAEQIYIGVNATDYTGYPDCRPAFIEAFQQMIEVGTEAGLNGRAIQICAPLMQMTKKEIIQWGIELKAPLGLTHTCYQNAEPPCGVCDSCRLRKAGFAEAGKVDPLSFRPMLD

SEQ ID NO: 38719 - protein, 235 aa, unidentified
  source 1..235: note = Henriciella algicola
  REGION 1..235: note = tr|A0A399RC93|A0A399RC93_9RHOB 7-cyano-7-deazaguanine synthase OS=Henriciella algicola; OX = 1608422 GN=queC PE=3 SV=1
MSQSSSALVLFSGGQDSTTCLASALKRYRHVETVGFDYGQRHRVELDAREHVLTAIRQDFPQWADRLGEDHLIDLGVLGQISETSLTRETEITEDEDGLPSTFVPGRNLIFLTLSAALAWRRGIDVIIGGMCETDYSGYPDCRRDTIDAQQKALSLGMDRQFTLKTPLMWLDKAETWQLAYDIGGDALVDLIVDKTHSCYMGDHRTRHDWGYGCGDCPACDLRAKGYRKWRERQK

SEQ ID NO: 38720 - protein, 235 aa, unidentified
  source 1..235: note = Henriciella barbarensis
  REGION 1..235: note = tr|A0A399R2F7|A0A399R2F7_9RHOB 7-cyano-7-deazaguanine synthase OS=Henriciella barbarensis; OX = 86342 GN=queC PE=3 SV=1
MSQSSSALVLFSGGQDSTTCLASALKRYRHVETVGFDYGQRHRVELDAREHVLTAIRQDFPQWADRLGEDHLIDLGVLGQISETSLTRETEITENEDGLPSTFVPGRNLIFLTLSAALAWRRGIDVIIGGMCETDYSGYPDCRRDTIDAQQKALSLGMDRQFTLKTPLMWLDKSETWQLAFDIGGQALVDLIVEKTHSCYMGDHRTRHDWGYGCGNCPACHLRAKGYRQWRERQK

SEQ ID NO: 38721 - protein, 236 aa, Henriciella sp.
  REGION 1..236: note = tr|A0A399RS88|A0A399RS88_9RHOB 7-cyano-7-deazaguanine synthase OS=Henriciella sp. JN25; OX = 2305466 GN=queC PE=3 SV=1
MVKPTSALVLFSGGQDSTTCLASALKRFAHVETVGFDYGQRHKVELRCRKNVLNAIRSKFPQWADRLGEDHMIDLAALGEISDTALTRDTDIGEGENGLPSTFVPGRNLIFLTLSAALAWRRGISVLVGGMCETDYSGYPDCRRDTIDAQQKAIGLGMDRSIIIETPLMWLDKAETWQLAADLGGQALVDLIVDETHTCYKGERLRRHAWGYGCGECPACQLRKAGFEKWKQGAVA

SEQ ID NO: 38722 - protein, 235 aa, Henriciella sp.
  REGION 1..235: note = tr|A0A2E6L7D3|A0A2E6L7D3_9RHOB 7-cyano-7-deazaguanine synthase OS=Henriciella sp.; OX = 1968823 GN=queC PE=3 SV=1
MSTSSSALVLFSGGQDSTTCLASALKRYRHVETIGFDYGQRHRVELDAREDVLAAIRQNFPQWAERLGEDHLIDLGVLGQISETSLTRETEITEDEDGLPSTFVPGRNLVFLTLAAALAWRRGISVIIGGMCETDYSGYPDCRRDTIDAQQKALSLGMDRQFTLKTPLMWLDKSETWQLAWDIGGDALVDLIVEKTHSCYVGDHRTRHDWGYGCGKCPACELRAKGYRKWRERQG

SEQ ID NO: 38723 - protein, 229 aa, unidentified
  source 1..229: note = Hephaestia caeni
  REGION 1..229: note = tr|A0A397NPN5|A0A397NPN5_9SPHN 7-cyano-7-deazaguanine synthase OS=Hephaestia caeni; OX = 645617 GN=queC PE=3 SV=1
MPTDSPFAVALVSGGLDSMVAAARAKEDGYRLLALSIDYNQRHQVELAAAHRIAGMLGAERHVVLTLDLSAFGGSALTADIAVPKGGVGADIPITYVPARNTIFLSLALGWAEAAGARDLYIGVNALDYSGYPDCRAEFITAFEEMAALATKAGVEGDRFVVHTPLQHLSKADIVREAARLGLDAGLSWSCYDPALGNRHCGLCDSCRLRAKGFAEAGLPDPTVYAAVP

SEQ ID NO: 38724 - protein, 246 aa, Herbaspirillum aquaticum
  REGION 1..246: note = tr|A0A225SNW8|A0A225SNW8_9BURK 7-cyano-7-deazaguanine synthase OS=Herbaspirillum aquaticum OX=568783 GN=queC PE=3 SV=1
MSAIPAIAPTLNTQSALVLFSGGQDSTTCLAWALSRYQRVETIGFDYGQRHAIELEVRPALLEKIKAFSPEWQSRLGEDHMIDLSLIGKISDTALTRDVAIAMQDNGLPNTFVPGRNLLFMTVAATLAYRRGLNVLVGGMCETDFSGYPDCRDDTMKALQVALNLGMATQLKVETPLMWIDKAQTWSLAESLGGTALVDLIRADTHTCYLGERGQLHDWGHGCGKCPACELRARGYEQYAASKSAG

SEQ ID NO: 38725 - protein, 242 aa, Herbaspirillum hiltneri
  REGION 1..242: note = tr|A0A561JVS3|A0A561JVS3_9BURK 7-cyano-7-deazaguanine synthase OS=Herbaspirillum hiltneri; OX = 341045 GN=queC PE=3 SV=1
MNIATTPRPSLPHRALVLFSGGQDSTTCLAWALSRYEKVETIGFDYGQRHAIELKVRPALLEKMRGFSDDWNNRLGEDHMVDLSLIGQISDTALTRDVAISMQENGLPNTFVPGRNLLFMTVAATVAYRRGLDVLVGGMCETDFSGYPDCRDDTMKALQVALNLGMATHLKVETPLMWIDKAATWRLSEELGGKALVDLIRSDTHTCYLGERGALHDWGYGCGKCPACELRARGYQQYAQTA

SEQ ID NO: 38726 - protein, 246 aa, Herbaspirillum huttiense
  REGION 1..246: note = tr|A0A4V1AQ04|A0A4V1AQ04_9BURK 7-cyano-7-deazaguanine synthase OS=Herbaspirillum huttiense OX=863372 GN=queC PE=3 SV=1
MPATPAIAPTLSTQSALVLFSGGQDSTTCLAWALSRYQRVETIGFDYGQRHAIELEVRPALLEKMKAFSPEWQARLGEDHMIDLSLIGKISDTALTRDVAIAMQDNGLPNTFVPGRNLLFMTVAATLAYRRGLNVLVGGMCETDFSGYPDCRDDTMKALQVALNLGMATQLKVETPLMWIDKAETWSLAESLGGSALVDLIRADTHTCYLGERGQLHDWGHGCGKCPACELRARGYQQYAARKSAR

SEQ ID NO: 38727 - protein, 246 aa, Herbaspirillum huttiense
  REGION 1..246: note = tr|A0A561KPZ4|A0A561KPZ4_9BURK 7-cyano-7-deazaguanine synthase OS=Herbaspirillum huttiense OX=863372 GN=queC PE=3 SV=1
MSAIPAIAPTLNTQSALVLFSGGQDSTTCLAWALSRYQRVETIGFDYGQRHAIELEVRPALLEKMKAFSPEWQSRLGEDHMVDLSLIGKISDTALTRDVAIAMQDNGLPNTFVPGRNLLFMTVAATLAYRRGLNVLVGGMCETDFSGYPDCRDDTMKALQVALNLGMATQLKVETPLMWIDKAQTWSLAESLGGTALVDLIRADTHTCYLGERGQLHDWGHGCGKCPACELRARGYEQYAASKSAG

SEQ ID NO: 38728 - protein, 248 aa, unidentified
  source 1..248: note = Herbaspirillum robiniae
  REGION 1..248: note = tr|A0A246WNE8|A0A246WNE8_9BURK 7-cyano-7-deazaguanine synthase OS=Herbaspirillum robiniae; OX = 2014887 GN=queC PE=3 SV=1
MSDISPDAVAPTVKTQSALVLFSGGQDSTTCLAWALSRYQRVETIGFDYGQRHAIELEVRPALLEKLKTFSPEWQARLGEDHMIDLGLIGAISDTALTRDVEIAMNDNGLPNTFVPGRNLLFMTVAATLAYRRGLNVLVGGMCETDFSGYPDCRDDTMKALQVALNLGMATQLKVETPLMWIDKAETWELAESLGGAPLVDLVRADTHTCYLGERGALHDWGHGCGKCPACALRARGYQQYAARKKTA

SEQ ID NO: 38729 - protein, 259 aa, Herbaspirillum rubrisubalbicans
  REGION 1..259: note = tr|A0A0U3L453|A0A0U3L453_9BURK 7-cyano-7-deazaguanine synthase OS=Herbaspirillum rubrisubalbicans M1 OX=1078773 GN=queC PE=3 SV=1
MLVPVSLPALSKNMSATPPIAPTLNTQSALVLFSGGQDSTTCLAWALSRYARVETIGFDYGQRHAIELQVRPALLQKMQTFSPDWQARLGEDHMIDLSLIGKISDTALTRDVAIAMQDNGLPNTFVPGRNLLFMTVAATLAYRRGLNVLVGGMCETDFSGYPDCRDDTMKALQVALNLGMATQLKVETPLMWIDKADTWSLAESLGGSALVDLIRADTHTCYLGERGQLHDWGHGCGKCPACELRARGYQQYAARKTTG

SEQ ID NO: 38730 - protein, 246 aa, Herbaspirillum rubrisubalbicans
  REGION 1..246: note = tr|A0A328J4B0|A0A328J4B0_9BURK 7-cyano-7-deazaguanine synthase OS=Herbaspirillum rubrisubalbicans OX=80842 GN=queC PE=3 SV=1
MSATPPIAPTLNTQSALVLFSGGQDSTTCLAWALSRYARVETIGFDYGQRHAIELQVRPALLQKMQTFSPDWQARLGEDHMIDLSLIGKISDTALTRDVAIAMQDNGLPNTFVPGRNLLFMTVAATLAYRRGLNVLVGGMCETDFSGYPDCRDDTMKALQVALNLGMATQLKVETPLMWIDKADTWSLAESLGGSALVDLIRADTHTCYLGERGQLHDWGHGCGKCPACELRARGYQQYAARKTSG

SEQ ID NO: 38731 - protein, 263 aa, Herbaspirillum seropedicae
  REGION 1..263: note = tr|D8ITL7|D8ITL7_HERSS 7-cyano-7-deazaguanine synthase OS=Herbaspirillum seropedicae (strain SmR1); OX = 757424 GN=queC PE=3 SV=1
MRLPFWFTVLLFAAMSTSSPSPSLAPTLNTQSALVLFSGGQDSTTCLAWALSRYQRVETIGFDYGQRHAIELAVRPALLERMRAFSPDWQTRLGEDHMIDLSLIGKISDTALTRDVEIAMQDNGLPNTFVPGRNLLFMTVAATLAYRRGLNVLVGGMCETDFSGYPDCRDDTMKALQVALNLGMATQLKVETPLMWIDKAGTWALAELLGGAPLVDLIRTDTHTCYLGERGALHDWGHGCGKCPACELRARGYQQYAARKSPA

SEQ ID NO: 38732 - protein, 249 aa, Herbaspirillum seropedicae
  REGION 1..249: note = tr|A0A5B8EEC0|A0A5B8EEC0_HERSE 7-cyano-7-deazaguanine synthase OS=Herbaspirillum seropedicae OX=964 GN=queC PE=3 SV=1
MSTSSPSPSLAPTLNTQSALVLFSGGQDSTTCLAWALSRYQRVETIGFDYGQRHAIELAVRPALLERMRAFSPDWQTRLGEDHMIDLSLIGKISDTALTRDVEIAMQDNGLPNTFVPGRNLLFMTVAATLAYRRGLNVLVGGMCETDFSGYPDCRDDTMKALQVALNLGMATQLKVETPLMWIDKADTWALAESLGGAPLVDLIRIDTHTCYLGERGALHDWGHGCGKCPACELRARGYQQYATRKSPA

SEQ ID NO: 38733 - protein, 252 aa, Herbaspirillum sp.
  REGION 1..252: note = tr|A0A1V2VKR8|A0A1V2VKR8_9BURK 7-cyano-7-deazaguanine synthase OS=Herbaspirillum sp. VT-16-41 OX=1953765 GN=queC PE=3 SV=1
MSATSAIAPTLNTQSALVLFSGGQDSTTCLAWALSRYQRVETIGFDYGQRHAIELEVRPALLEKMKGFSADWQARLGEDHMIDLSLIGKISDTALTRDVEITMQDNGLPNTFVPGRNLLFMTVAATLAYRRGLNVLVGGMCETDFSGYPDCRDDTMKALQVALNLGMATQLKVETPLMWIDKAQTWALAESLGGQALVDLIRADTHTCYLGERGQLHDWGHGCGTCPACQLRARGYEQYVQDVQNRASKKIG

SEQ ID NO: 38734 - protein, 247 aa, Herbaspirillum sp.
  REGION 1..247: note = tr|J3CGR8|J3CGR8_9BURK 7-cyano-7-deazaguanine synthase OS=Herbaspirillum sp. YR522 OX=1144342 GN=queC; PE = 3 SV=1
MPSSVTDTPIAPTLKTQSALVLFSGGQDSTTCLAWALSRYQRVETVGFDYGQRHAVELTVRPALLASTRAFSPEWAARLGEDHMIDLSLIGSISDTALTREVEISMQDNGLPNTFVPGRNLMFMTVAATLAYRRGLNVLVGGMCETDFSGYPDCRDDTMKALQVALNLGMATQLKIETPLMWIDKAQTWSLAHSLGGDALVDLIRTDTHTCYLGERGALHDWGHGCGKCPACELRARGYRQYRQHAG

SEQ ID NO: 38735 - protein, 233 aa, Herminiimonas arsenicoxydans
  REGION 1..233: note = sp|A4G964|QUEC_HERAR 7-cyano-7-deazaguanine synthase; OS = Herminiimonas arsenicoxydans OX=204773 GN=queC PE=3 SV=1
MNSANSALVLFSGGQDSTTCLAWALTHYARVETIGFDYGQRHAIELAVRPFLLEKMRLISPEWDGRLGADHMIDLSLIAKISNTALTSNVEIAMLENGLPNTFVPGRNLLFMTVAATVAYRRGLDVLVGGMCETDFSGYPDCRDDTMKALQVTLNLGMATKLKVETPLMWIDKAATWKMAQDLGGTPLLNLVRTGTHTCYLGERGELHDWGYGCGNCPACKLRARGYADFIAG

SEQ ID NO: 38736 - protein, 232 aa, Herminiimonas fonticola
  REGION 1..232: note = tr|A0A4R6GGN5|A0A4R6GGN5_9BURK 7-cyano-7-deazaguanine synthase OS=Herminiimonas fonticola; OX = 303380 GN=queC PE=3 SV=1
MNSADSALVLFSGGQDSTTCLAWALARYSRVETIGFDYGQRHAIELTVRPTVLQKLRGFSAEWDSRLGEDHMIDLSLISKISDTALTSNVEIAMMENGLPNTFVPGRNLLFMTVAATVAYRRGLNVLVGGMCETDFSGYPDCRDDTMKALQVALNLGMATKLQVETPLMWIDKAETWKMAQDLGGTALVDLIRSETHTCYLGERGKLHDWGYGCGTCPACALRARGYADFVR

SEQ ID NO: 38737 - protein, 235 aa, Herminiimonas sp.
  REGION 1..235: note = tr|A0A3N7A2C8|A0A3N7A2C8_9BURK 7-cyano-7-deazaguanine synthase OS=Herminiimonas sp. KBW02; OX = 2153363 GN=queC PE=3 SV=1
MSSADGALVLFSGGQDSTTCVAWALKRYARVETIGFDYGQRHAVELEVRPGVLQSLRGINPEWDKKLGEDHMIDLSLISKISDTAMTQDVEITMMENGLPNTFVPGRNLLFMTVAATVAYRRGLDVLVGGMCETDFSGYPDCRDDTMKALQVALNLGMATRLKLETPLMWIDKAETWQLAQDLGGNTLVDLIRAGTHTCYLGERGALHDWGYGCGKCPACELRARGYANFIAPTK

SEQ ID NO: 38738 - protein, 239 aa, Hippea maritima
  REGION 1..239: note = tr|F2LX27|F2LX27_HIPMA 7-cyano-7-deazaguanine synthase OS=Hippea maritima (strain ATCC 700847 / DSM 10411 / MH2) OX=760142 GN=queC PE=3 SV=1
MKKAVIIYSGGLDSTTCLFWALDEFDEVHTITFYYAQRHSIEVDFSKKTLELAQRIKNKTIKSHYFSIDLSQIGGSALTDPSIDVPKNRDEEKISSEIPITYVPFRNGVFLSITAALAEKNEIYNIIGGWNMLDYSGYPDCRDDFLTAFEKAINYGTKAGSQGKTFKILTPLLKMNKAQIILFGKKHGADYSYSYSCYSGDGIPCGECDACILRAKGFKEAGLEDDFLVRLKREGHNSP

SEQ ID NO: 38739 - protein, 458 aa, Hoeflea sp.
  REGION 1..458: note = tr|A0A5E8AV48|A0A5E8AV48_9RHIZ Uncharacterized protein OS=Hoeflea sp. EC-HK425 OX=2038388 GN=HOE425_50018; PE = 4 SV=1
MRRDDDEPMTRDKHLVVVEKGQGAGTGGEIAIIDEHIRFKPEVLDSFNVKGFSSKHYDLMVLCAAIELADRRWKRPAGWHRDLHVTIPAIDVETWLRPAVSQSLRSLMKHLTGDSWHFSFVRANNPTPIGSRQLPLIFDHKKKFAVAYSEGLDSRAVSALSGSKDEALCIRVAGKRQRRREGDSFFTQIPFKVTGFKAKESSFRSRGFQFAAMTAIAAHLSGITRIVVPESGQGAFGPALVPLHNIYVDYRNFPSFFRKMEKFVRAIFDVSLCYEQPRLWSTKGQTLSAYLALPGKEQKHLANTKSCWQSRRVVNDGKKRRQCGLCAACLLRRQSMFAAGVVEPPETYVVSNLTTGDLEVALSRIRGKADRDIMIEYGSVGARHLQHLADLATLPDTALRIHASQIGAATAQSYDDTLQKLKMMLMTHAQEWRTFLSAQGEQSFLRGWMEGGRYGRFE

SEQ ID NO: 38740 - protein, 106 aa, unidentified
  source 1..106: note = Holophagaceae bacterium
  REGION 1..106: note = tr|A0A3D6EK01|A0A3D6EK01_9BACT 7-cyano-7-deazaguanine synthase (Fragment); OS = Holophagaceae bacterium OX=2052165 GN=DHV93_06905 PE=3; SV = 1
  VARIANT 74..75: note = Xaa can be any naturally occurring amino acid
LDRPGVPVSYVPFRNAHLLATCVSWAEVLCAAAIFVGFVEEDSSGYPDCREAFLKSFEQTANLGTKPETRLAFXXRLRGFQEAGFPDPIPYSFIPETLQPANRGER

SEQ ID NO: 38741 - protein, 230 aa, unidentified
  source 1..230: note = Hormoscilla sp.
  REGION 1..230: note = tr|A0A533N843|A0A533N843_9CYAN 7-cyano-7-deazaguanine synthase OS=Hormoscilla sp. GUM007; OX = 2480854 GN=queC PE=3 SV=1
MTQKAIALLSGGLDSSTTAAQAIADGYETIALSFRYGQRHDRELEAAQAIAKELHLTEHYIIDIDLAQWGGSALTDQNVSVPTDGVKPDIIPITYVPGRNTVFIAIALSLAEAKGASAIYLGINAVDYSGYPDCRPEYLAAFQQLANLSSKVGLEGKAPKLVAPLVKDSKADIVRRALQLGVPIQETYSCYQGGETPCGLCDSCRIRDRALCEVGRPDLATPIGRSLYNL

SEQ ID NO: 38742 - protein, 236 aa, unidentified
  source 1..236: note = Hormoscilla sp.
  REGION 1..236: note = tr|A0A533NW01|A0A533NW01_9CYAN 7-cyano-7-deazaguanine synthase OS=Hormoscilla sp. GUM202; OX = 2480853 GN=queC PE=3 SV=1
MNEKAIALLSGGLDSSTTAAQAIADGYETIALSFRYGQRHDRELEAAQTIAKELHLAEHYIIDVNLSQWGGSALTDRNVSVPTDGVKPGIIPITYVPGRNTVFIAIALSLAEAKGASAIYLGINAVDYSGYPDCRPEYLAAFGQLANLSSQVGLEGKAPKLVAPLVKDSKADIVRRALQLGVSIQETYSCYQGEELPCGLCDSCRLRDRALCEVGRPDLATQIGRSIYNLETGASH

SEQ ID NO: 38743 - protein, 227 aa, unidentified
  source 1..227: note = Humitalea rosea
  REGION 1..227: note = tr|A0A2W7K3E0|A0A2W7K3E0_9PROT 7-cyano-7-deazaguanine synthase OS=Humitalea rosea; OX = 990373 GN=queC PE=3 SV=1
MKAALVLFSGGQDSATCLAWALDRFEHVETLGFDYGQRHVVELACRDALRAGMAGPGLGPDHTLAVPTLADIGGSALTEDAAIAMRADGLPNTFVPGRNILFLTLAAALAARRGIRHLVTGVCETDYSGYPDCRDDTIKSVQVTLNLGMQARFVIHTPLMWRDKAATWMLAEELGGAPLVALINTESHSCYLGDRTHRHPWGFGCGTCPACDLRARGWAQYVASAPV

SEQ ID NO: 38744 - protein, 616 aa, unidentified
  source 1..616: note = Humitalea rosea
  REGION 1..616: note = tr|A0A2W7I6G5|A0A2W7I6G5_9PROT Queuosine biosynthesis protein QueC OS=Humitalea rosea OX=990373; GN = C8P66_12029 PE=4 SV=1
MKQFDIECGVAAPSHADAIAMNVHGPGKNVNLRVDYITRTMVGNVPDLLIDLLEVAAYVYCADQRLKRGSLQLTNFGESWRRSLRFSIPVRLPEVWQQDRIQSMLADTLGFLSDDSYSFEFRKATDPFQPRDVYFHDLIDASQDCDEVSMFSGGVDSFAGGLQDVVLDKRSVCLVGHSSSTKVQSIQQTLVDALKERGHERRISYIPVWVTNENVNANEYTQRTRSFLFACLGLVIARMSGKDRFTFYENGVVSINPPVAGDVVGGRATRTTHPRVFRGLEELFSTLLDRPISIRNPLQWLTKREVTLKIKEAGMADLLALTNSCTRPRSWTTKQKHCGACSQCIDRRFGVMAADMASFEPAENYKIDLLTADRSAKDDLRMAVSYVTFFKKVGSTPKERFLVEFPEVVSALDSFNDLSAAEAGNGLYDLFQRQAAAVESVITAGLQEHSRALFRNELPPASLLAVCFSRSSIEVAPPSDYDKQAKAFIDRLSVPVLEFAIDKDGKVVVFRDGTTLSGANFRLAEELLANFRDAKAAGQAVPFLAPADLAVRLGISEQSMRQQLTRLRTAIEPLSVSLGVVLDQNSFIENKERAGYRLNPNLRELSLADMREPPAP

SEQ ID NO: 38745 - protein, 229 aa, unidentified
  source 1..229: note = Hungateiclostridium clariflavum
  REGION 1..229: note = tr|G8LWS2|G8LWS2_HUNCD 7-cyano-7-deazaguanine synthase OS=Hungateiclostridium clariflavum (strain DSM 19732 / NBRC 101661 / EBR45) OX=720554 GN=queC PE=3 SV=1
MKRAIVLLSGGLDSTTCLSVALAKGYEVYPISFDYGQRHKKELDCVRQIVKYYDIKNHKLIHIDNVGGSALTDSNINVPDYEGTSNIPVTYVPARNIIFLSYAVGYAEVVDADAIFIGVNAIDYSGYPDCRPEFIEAFERMIKVGTKRGVEGKPIKIETPLLKLSKAEIIKLAYENKAPLHLTTSCYRGGDKACGVCDSCVLRLKGFKEAGIEDPIEYSIDVEEKFRTL

SEQ ID NO: 38746 - protein, 219 aa, unidentified
  source 1..219: note = Hungateiclostridium saccincola
  REGION 1..219: note = tr|A0A2K9E4G6|A0A2K9E4G6_9FIRM 7-cyano-7-deazaguanine synthase OS=Hungateiclostridium saccincola OX=1677857 GN=queC PE=3 SV=1
MSKAVVLLSGGLDSTTCLSIAIKEGYDVYTLSFDYGQKNNKEILCTQEIVKYYSIKEHKIIKVGNVGGSALTNDDIEVPDYQGLPNIPVTYVPARNIIFLSYAVGYAEVIGAEAIYIGVNAVDYSGYPDCTPEFIEAFQEVVKVGTKAGINGRPVKILTPLMNLSKAEIIKLACENNAPLHLTSSCYRGGDKACGVCDSCVLRLKGFKEAGIVDPVEYV

SEQ ID NO: 38747 - protein, 220 aa, unidentified
  source 1..220: note = Hungateiclostridium sp.
  REGION 1..220: note = tr|A0A4Q0I0E9|A0A4Q0I0E9_9FIRM 7-cyano-7-deazaguanine synthase OS=Hungateiclostridium sp. N2K1 OX=2487273 GN=queC PE=3 SV=1
MRRAVVLLSGGLDSTTCLSVAVAEGYEVYPLSFDYGQRNKKELESAKQVAKYFKIKEHKIVKIGNVGGSALTDMKIDVPDYKGLPSIPVTYVPARNIIFLSYAAGYAEVLDAEAIFIGVNAVDYSGYPDCRPEFIEAFQKAINVGTKNGVNGKPVRIHTPLLNLSKAEIIKLACENNAPLHLTTTCYKGGEKACGVCDSCVLRLKGFKEAGIVDAIEYMD

SEQ ID NO: 38748 - protein, 222 aa, unidentified
  source 1..222: note = Hungateiclostridium straminisolvens
  REGION 1..222: note = tr|W4V9Z1|W4V9Z1_9FIRM 7-cyano-7-deazaguanine synthase OS=Hungateiclostridium straminisolvens JCM 21531; OX = 1294263 GN=queC PE=3 SV=1
MRRAVVLLSGGLDSTTCLSVALAEGYEVYPLSFDYGQRNRRELESAKQVAKYFKIKEHKIVKIGNVGGSALTDMEIDVPDYKGLPSIPVTYVPARNIIFLSYAAGYAEVVDADAIFIGVNAVDYSGYPDCRPEFIEAFQKAINVGTKNGVNGKPVKIITPLINLTKAEIIKLACENNAPLHLTTTCYKGGEKACGVCDSCVLRLKGFKEAGIVDTIEYMEKT

SEQ ID NO: 38749 - protein, 222 aa, unidentified
  source 1..222: note = Hungateiclostridium thermocellum
  REGION 1..222: note = sp|A3DK21|QUEC_HUNT2 7-cyano-7-deazaguanine synthase; OS = Hungateiclostridium thermocellum (strain ATCC 27405 / DSM 1237 / JCM 9322 / NBRC 103400 / NCIMB 10682 / NRRLB-4536 / VPI 7372) OX=203119 GN=queC PE=3 SV=1
MRRAVVLLSGGLDSTTCLSVALAEGYEVYPLSFDYGQRNRKELESAKQVVKYFKLKEHKIVKIGNVGGSALTDMNIDVPDYKGLPTIPVTYVPARNIIFLSYAVGYAEVVDAEAIFIGVNAVDYSGYPDCRPEFIEAFQKAINLGTKSGVNGKPVKIITPLINLSKAEIIKLACENNAPLHLTTTCYRGGEKACGVCDSCVLRLKGFKEAGIVDTIEYMERT

SEQ ID NO: 38750 - protein, 222 aa, unidentified; identical to SEQ ID NO: 38749
  source 1..222: note = Hungateiclostridium thermocellum
  REGION 1..222: note = tr|A0A4S5EVV1|A0A4S5EVV1_HUNTH 7-cyano-7-deazaguanine synthase OS=Hungateiclostridium thermocellum OX=1515 GN=queC PE=3 SV=1

SEQ ID NO: 38751 - protein, 271 aa, unidentified; identical to SEQ ID NO: 37496
  source 1..271: note = Hungatella hathewayi
  REGION 1..271: note = tr|A0A3E4TSD9|A0A3E4TSD9_9CLOT ATP-dependent sacrificial sulfur transferase LarE OS=Hungatella hathewayi OX=154046 GN=larE PE=4 SV=1

SEQ ID NO: 38752 - protein, 233 aa, Hyalangium minutum
  REGION 1..233: note = tr|A0A085WRD6|A0A085WRD6_9DELT 7-cyano-7-deazaguanine synthase OS=Hyalangium minutum; OX = 394096 GN=queC PE=3 SV=1
MSGTERTAVVLLSGGLDSATALAMAQSEGFMPYALSFRYGQRHEVELEAAKRVAASLGAVRHEITQIDLSMFGSSALTADIAVPKDRPASEISQGIPVTYVPARNTIFLSFALAWAEVLGASDVFIGVNALDYSGYPDCRPEYIEAYERLANLATKAGVEGHQRLRIHTPLISLSKAEIIRAGLTLGVNYGITLSCYDPSPLGEACGHCDSCQLRLKGFREAGAKDPARYRAE

SEQ ID NO: 38753 - protein, 230 aa, Hyalangium minutum
  REGION 1..230: note = tr|A0A085WN80|A0A085WN80_9DELT 7-cyano-7-deazaguanine synthase OS=Hyalangium minutum; OX = 394096 GN=queC PE=3 SV=1
MKKAVVLLSGGLDSTTCLAMAKAAGFEPVCLGIAYGQRHAVELERARKVVASMGVRDFRVVNIDLRSVGGSALTADIPVPKDRPEKEMSHGIPVTYVPARNTLFLSLALGLAEVVGAQDLYIGVNAVDYSGYPDCRPEFIRAFETLANLATKAGVEGARFHIHAPLSGMTKAEIIHEGVRLGVDYGMTHSCYDPDTQGRACGRCDSCLLRKKGFEDAGVPDPTAYTTEGK

SEQ ID NO: 38754 - protein, 221 aa, unidentified
  source 1..221: note = Hydrocarboniclastica marina
  REGION 1..221: note = tr|A0A4P7XCR4|A0A4P7XCR4_9ALTE 7-cyano-7-deazaguanine synthase OS=Hydrocarboniclastica marina OX=2259620 GN=queC PE=3 SV=1
MKHPVVVIYSGGMDSFTLLHMARSQGRTVHALSFNYGQRHVRELDYASWVCTNLQLDHRVVDITSIQELLQGSSLTGESPVPEGHYAASNMKSTVVPNRNMILLSLAIGHAVTTGASEVWYGAHGGDHAIYPDCRPQFVERMDEVAQIANYEPVRIVAPFLHADKGQILRQGLALGLDYGQTWTCYNGREKACGRCGSCVERLEAFAANGLADPLPYETDT

SEQ ID NO: 38755 - protein, 225 aa, Hydrocarboniphaga daqingensis
  REGION 1..225: note = tr|A0A1M5RU21|A0A1M5RU21_9GAMM 7-cyano-7-deazaguanine synthase OS=Hydrocarboniphaga daqingensis OX=490188 GN=queC PE=3 SV=1
MTVARRAVVLLSGGLDSATVMAIARSEGYELYAISVAYGQRHMAEIKASADVARSLGARRHQVMHVNLNDVGGSALTDTSIDVPETPSEGIPVTYVPARNTLFLSLALGWAEVVGATDIFIGVNAVDYSGYPDCRPEFVAAFERLANVATRVGIEGGGIQIHTPLIDLSKADIVRIGTQLGVDYAQTVSCYQADDQGRACGRCDSCRLRRAGFESAGITDPTRYY

SEQ ID NO: 38756 - protein, 228 aa, Hydrocarboniphaga effusa
  REGION 1..228: note = tr|I7Z8T2|I7Z8T2_9GAMM 7-cyano-7-deazaguanine synthase OS=Hydrocarboniphaga effusa AP103 OX=1172194; GN = queC PE=3 SV=1
MNRQARKAVVLLSGGLDSATVLAMAVEQGFEPYTLAVSYGQRHSAEIEASVRVATSMGSVRHQVMRVNLDELGGSALTDRSIAVPVTPTSGIPVTYVPARNTLFLSLALGWAEVVGATDLFIGVNAVDYSGYPDCRPEFIEAFEKLANVATKAGVEGARFRIHTPLIAMSKAQIVTEGTRLGVDYAQTVSCYQADDSGAACGRCDSCRLRRAGFEVAGLADPTRYQSA

SEQ ID NO: 38757 - protein, 453 aa, Hydrocarboniphaga effusa
  REGION 1..453: note = tr|I7Z9L8|I7Z9L8_9GAMM Uncharacterized protein; OS = Hydrocarboniphaga effusa AP103 OX=1172194 GN=WQQ_35670; PE = 4 SV=1
MKINSDRQAQYGLTLHVAEEADRSKARGNREIARIGSEITFDPKVLDTYHYSGWKSAHHDLLVICAAAEYADRRCARRIGQWARSFKLTIPVREPALWQRSEVTLSLIDTLRHLTGDDWDFAFTPSVAKDESFARQRSLDFGNSKQFVIAYSDGLDSRSVSGIHSVGDAAIRVRVTKNKGRIKSSEAPFDLIPFSVKVPSSPESSVRSRGFKFASVTAIAAQISNVKRIVVPESGQGALGPALLPLHNIYADYRNHPTFFRKMERFIRLALQYELSYEQPRLWHTKGQTIFEFISQPGQSAQSLSDTRSCWQQRWNTRSEGKLRQCGLCAACLLRRMSLHAAGVKETDDTYIFSDLSASKHKGSAQQTSRTMLEYGSVGARHLHQLANLAEVPDAQLRGHSYELARVLSIPEEETLLNLKRLLTQHSKEWREFVNSQGPASFLVRWTGGELYG

SEQ ID NO: 38758 - protein, 234 aa, Hydrococcus rivularis
  REGION 1..234: note = tr|A0A1U7H8G4|A0A1U7H8G4_9CYAN 7-cyano-7-deazaguanine synthase OS=Hydrococcus rivularis NIES-593 OX=1921803 GN=queC PE=3 SV=1
MSKAVVLLSGGLDSATTAAIAIADGYEVIALSFRYGQRHERELAAATKIAKTLGIKEHYTVDVNLSQWGGSALTDESIDVPKDGVKPDIIPATYVPGRNTVFIAIALSLAEAKGAEAIYLGINAVDYSGYPDCRPEYLEAYQQLANLSSKIGVEGKAPRLVAPLVKDSKVEIVRRALRLGVPIQDTWSCYQGGEDPCGVCDSCRIRDRALIEANVAELATPTGRELYYAEEMKG

SEQ ID NO: 38759 - protein, 226 aa, Hydrocoleum sp.
  REGION 1..226: note = tr|A0A261KNW3|A0A261KNW3_9CYAN 7-cyano-7-deazaguanine synthase OS=Hydrocoleum sp. CS-953; OX = 1671698 GN=queC PE=3 SV=1
MKAVILLSGGLDSSTVLYQAKADGCECYAISFDYQQRHRRELESAKKIADAVGVIQHHVVNFDLRLWGGSALTDNQIDLPSDRSVEEMSENIPITYVPARNTIFLSFALAYAEVVNAGRVYIGVNALDYSGYPDCRPDYIQAMQEVFRLGTKQGREGEAIAIVAPLLEMKKTEIIQLGNSLGVPWEKTWSCYAGGEKPCGVCDSCRLRLTAFEELGLSDPLMIMDN

SEQ ID NO: 38760 - protein, 223 aa, Hydrogenimonas sp.
  REGION 1..223: note = tr|A0A3G9HBN4|A0A3G9HBN4_9PROT 7-cyano-7-deazaguanine synthase OS=Hydrogenimonas sp.; OX = 2231112 GN=queC PE=3 SV=1
MKKAIVILSGGMDSSTAAYIAKSRGYGVIALHFDYGQRTQSRERKAFEAICDALGVEGRYVIDLPFFSQIGASALTDRNIDVPTGGIEPGVPVTYVPFRNGIFLSIAAAVAEKEGAEALFIGVVEEDSSGYPDCREEFIAAMQKAINLGTKEGTEICIETPLIHLKKEDIVKSALNYGVPLELTWSCYKEEGEACGVCDSCRLRLKGFEKAGIKDPLEYADRC

SEQ ID NO: 38761 - protein, 222 aa, Hydrogenimonas thermophila
  REGION 1..222: note = tr|A0A1I5NLQ6|A0A1I5NLQ6_9PROT 7-cyano-7-deazaguanine synthase OS=Hydrogenimonas thermophila OX=223786 GN=queC PE=3 SV=1
MKKAVVILSGGMDSTTAAYIAKSEGYEIVALHFDYRQRTQKREHEAFDAICNSLKVVNRYVIDLPFFEHIGASALTDESIDVPTGGIEAGVPVTYVPFRNGIFLSIAAAVAEKEGAEALYIGVVEEDSSGYPDCRENFIDAIERAIDLGTKDDTKIAIKTPLVHLKKEDIVKTAIEYGVPLELTWSCYKNEDEACGVCDSCRLRLKGFEKAGLKDPIPYKVN

SEQ ID NO: 38762 - protein, 216 aa, Hydrogenivirga caldilitoris
  REGION 1..216: note = tr|A0A497XVT7|A0A497XVT7_9AQUI 7-cyano-7-deazaguanine synthase OS=Hydrogenivirga caldilitoris OX=246264 GN=queC PE=3 SV=1
MNKVIVLLSGGMDSATLLWLAKRDFNKVWAISFDYGQRHRVELKYAKELASIAGVEEHIIVDTPIYRSIKGSALIDESVDVPSGEYPENEPPITTVPMRNLNFLAIAAAFADAYEIDHIGIGVHALDTPYPDCRPEFITSAEAAINAGSVLTAKRKLRIHVWAPFLGMTKRDIALLGKELGVPYEKTYSCYRGTEPPCGECPTCRQRKEALKGILP

SEQ ID NO: 38763 - protein, 201 aa, Hydrogenivirga caldilitoris
  REGION 1..201: note = tr|A0A497XPD1|A0A497XPD1_9AQUI 7-cyano-7-deazaguanine synthase OS=Hydrogenivirga caldilitoris OX=246264 GN=BCF55_0418 PE=3 SV=1
MKKIAVLYSSGVESASLTVHYLDEGFLVYPVYVRCGLPWEKVEVKWASRLWSYLRGRYKRVMPFRTVFLRGLGVSRGIEIPLRNLVLTTHAAIEAIKRNVKSVAVGSLGIYPFPDNNREYFDALQNLIRKGSKEEFRIETPFMGMEKWEVIRKFYGRLRYELTFSCVRPVKGMHCGRCLKCIERKEGFKLAGVKDPTFYLS

SEQ ID NO: 38764 - protein, 203 aa, Hydrogenivirga sp.
  REGION 1..203: note = tr|A8URJ3|A8URJ3_9AQUI 7-cyano-7-deazaguanine synthase OS=Hydrogenivirga sp. 128-5-R1-1 OX=392423; GN = HG1285_03523 PE=3 SV=1
MKKVGVLFSAGVESTSLLVYYLERGYLTLPLYARCGLSWERTELKWSERLWAFLKYRYKNLMPLKTFPASGLQPSKGSIEIPLRNITLVMGAVVHAYVKGIRKVALGSLGIYPFPDNNRDYLDRLEALISEGARENISLETPFMGMEKWEVVREFYRKAPYRLTFSCVKPIIGKHCGKCEKCLERKEGFLKAGVPDPTSYVSS

SEQ ID NO: 38765 - protein, 166 aa, Hydrogenivirga sp.
  REGION 1..166: note = tr|A8V022|A8V022_9AQUI 7-cyano-7-deazaguanine synthase OS=Hydrogenivirga sp. 128-5-R1-1 OX=392423; GN = HG1285_06988 PE=3 SV=1
MVDIPHLKGIEGSALTDEKVDIPSEDYPDQPPITTVPMRNLNFLSIAASFCDVYEIENIGIGIHSVDSPYPDCRAEFASSAEAVINASSVMVAKKKNRIKVYTPFLGMTKTDVLKLGLELGVPYEKTYSCYRGTIPPCGECATCRQRQEAFESVGVKDPLVKADER

SEQ ID NO: 38766 - protein, 250 aa, Hydrogenoanaerobacterium saccharovorans
  REGION 1..250: note = tr|A0A1H7YUP2|A0A1H7YUP2_9FIRM Uncharacterized protein OS=Hydrogenoanaerobacterium saccharovorans; OX = 474960 GN=SAMN05216180_0245 PE=4 SV=1
MTLQTFFKQNPRAAIAFSGGVDSTYLLYAAKQYGCDVHAFFIKTAFQPEFELEDAIQLAKQIDVPLTVLRHDVFEHPVVVANPADRCYHCKTALFTLMKQAAKGEGYTLLIDGTNASDDCSDRPGMKALAELSVRSPLRECGITKAEIRTLSQKAGLVTHDKPAYACLATRIPTGTAISEAVLKKVELAEGALFSMGFSNLRVRVMGDGECAKLQLPAEQFEKAVRLHAEIQKELSPNFKDILLDLNPRG

SEQ ID NO: 38767 - protein, 216 aa, Hydrogenobacter hydrogenophilus
  REGION 1..216: note = tr|A0A285NX87|A0A285NX87_9AQUI 7-cyano-7-deazaguanine synthase OS=Hydrogenobacter hydrogenophilus OX=35835 GN=queC PE=3 SV=1
MSKGKVIVLLSGGMDSAVLLWLSKKEFEKVYAISFDYGQRHKVELKYAKELAKLAQVEKHIITHIPHYSEIKISALLSEDVPVPKGEYPEDEPPITTVPMRNLTFLSIAGAFADALEIDHIGIGVHALDSPYPDCRPEFITSAEAAINAGSVLVAKTKKRIHIYAPFLGMSKRDIALLGKALNVPFEKTYSCYLGTEPPCGECPTCLQRKSALSSV

SEQ ID NO: 38768 - protein, 203 aa, Hydrogenobacter hydrogenophilus
  REGION 1..203: note = tr|A0A285NWJ0|A0A285NWJ0_9AQUI 7-cyano-7-deazaguanine synthase OS=Hydrogenobacter hydrogenophilus OX=35835 GN=SAMN06265353_0689 PE=3 SV=1
MSVRIAVLFSGGVESTTLLYMYLQKGYLVYPVYVKTGEKWESLELENAINLWRYTKRNYPNLMALRVLKVQGLASPRKTLKTIQDIFIPLRNMTLITTCALYAFSKDINRLAIGSLGLYAFPDNTAEYLKELEKLIAKGLGKEFFIETPLFGLEKAQVVKMGLSVVPYHLTLSCANPRKIKGKIVPCGKCIKCKERQEALAVG

SEQ ID NO: 38769 - protein, 203 aa, Hydrogenobacter thermophilus
  REGION 1..203: note = tr|D3DJ65|D3DJ65_HYDTT 7-cyano-7-deazaguanine synthase OS=Hydrogenobacter thermophilus (strain DSM 6534 / IAM 12695 / TK-6) OX=608538 GN=queC2 PE=3 SV=1
MSAYKIAVLFSGGVESTTLLYMYLQRKEIVYPVYIKMGESWERLELENALRLWQYTKSRYASLRPLRVINLQVSGAIRKSPYQVSEIFIPLRNMSLITACALYALSKKVRRLAIGSLGLYPFPDNSKSYIKELERLISEGSGTAFSIEMPFFGLEKGKIVKEFYGKVPYHLTLSCAMPKKVGKKILHCGKCIKCKERQEALLG

SEQ ID NO: 38770 - protein, 214 aa, Hydrogenobacter thermophilus
  REGION 1..214: note = tr|D3DIG3|D3DIG3_HYDTT 7-cyano-7-deazaguanine synthase OS=Hydrogenobacter thermophilus (strain DSM 6534 / IAM 12695 / TK-6) OX=608538 GN=queC1 PE=3 SV=1
MKSVLVLLSGGMDSATLLWLSKKEFDKIYAISFDYGQRHRVEIKYAKDLAKMAQVEEHFIVEVPHYSVLKGSALLDQEASIPKGEYPQEEPPITTVPMRNLTFISIAASFADTLEIDHIGIGVHALDSPYPDCRPEFITSAEAAVNASSIFVAKTKKRIHIYAPFLGMSKRDIALIGRDLGVPFEKTYSCYVGTEPPCGECAACLQRKQALSFL

SEQ ID NO: 38771 - protein, 216 aa, Hydrogenobaculum sp.
  REGION 1..216: note = tr|A0A2J6W6A9|A0A2J6W6A9_9AQUI 7-cyano-7-deazaguanine synthase OS=Hydrogenobaculum sp.; OX = 2053560 GN=queC PE=3 SV=1
MSNILVLLSGGMDSATLLWEAKAKFKDIYAISFDYGQKHIIEVKYAKELANMVGVKKHFIVKIPHYKEINFSSALLSVSSQDIPKEAYPTDVPITYVPMRNLTFLAIASGIADELSIENIGIAVHAVDAPYPDCRPEFITSAEAAINAGSSFVVKTKKRIHVYAPFLGFSKKDIAKLGKTLGVPFDKTYSCYEGTEPPCGECATCIQRKEALEGVL

SEQ ID NO: 38772 - protein, 216 aa, Hydrogenobaculum sp.
  REGION 1..216: note = tr|M1R5G1|M1R5G1_9AQUI 7-cyano-7-deazaguanine synthase OS=Hydrogenobaculum sp. HO OX=547144 GN=queC PE=3; SV = 1
MSNILVLLSGGMDSATLLWEAKTKFKDVYAISFDYGQKHIVELKYAKELANMVGIKEHFIVKIPHYKEINFHSPLLSVSKKEIPKESYQEDVPITYVPMRNLTFLAIASGIADELGIENIGIAVHAVDAPYPDCRPEFITSAEAAINAGSSFVVKTKKRIYVYAPFLGFSKKDIAKLGKTLGVPFDKTYSCYEGTEPPCGECATCIQRKEALEGIL

SEQ ID NO: 38773 - protein, 247 aa, unidentified
  source 1..247: note = Hydrogenophaga crassostreae
  REGION 1..247: note = tr|A0A162SWN2|A0A162SWN2_9BURK 7-cyano-7-deazaguanine synthase OS=Hydrogenophaga crassostreae OX=1763535 GN=queC PE=3 SV=1
MPPRSVAPHHTSALVLFSGGQDSTTCLAQALARYPRVETLGFDYGQRHSVEMTARLNVLREIRERFPAWSPRLGEDHVLDLAVLGKVSETSLTRDKAFEMEASGLPNTFVPGRNLLFLTLAAALAYRRGIQVIVTGVCETDFSGYPDCRDDTMKALQVALSLGMDHRFLIDTPLMWIDKAATWQLAHDVGAASGVADGGKQLVDLIVEHTHTCYLGDREHRHVWGYGCGVCPACELRARGWAGFVAR

SEQ ID NO: 38774 - protein, 239 aa, Hydrogenophaga intermedia
  REGION 1..239: note = tr|A0A1L1PKU3|A0A1L1PKU3_HYDIT 7-cyano-7-deazaguanine synthase OS=Hydrogenophaga intermedia OX=65786 GN=queC PE=3 SV=1
MPEPTRHTRALVLFSGGQDSTTCLAHALARFDHVETIGFDYGQRHRVELDARLVVLRELRAAFPAWAAKLGDDHVLDLAVLGAVSETSLTRDMAFRMEANGLPNTFVPGRNLLFLTLAAALAYRRGLSVLVTGVCETDFSGYPDCRDDTMKAMQLALSLGMDQRFLIDTPLMWIDKADTWRLARELGGEALIDLVVEHTHTCYLGDREHRHDWGWGCGQCPACELRARGWAAYHGGVST

SEQ ID NO: 38775 - protein, 247 aa, Hydrogenophaga pseudoflava
  REGION 1..247: note = tr|A0A4P6X542|A0A4P6X542_HYDPS 7-cyano-7-deazaguanine synthase OS=Hydrogenophaga pseudoflava OX=47421 GN=queC PE=3 SV=1
MNAQTRTAHHTSALVLFSGGQDSTTCLAHALARYPRVETLGFDYGQRHSVELQARTVVLQKIREQFPAWAGRLGEDHLLDLAVLGKVSETSLTRDMAFKMEASGLPNTFVPGRNLLFLTLAAALAYRRDIQVIVTGVCETDFSGYPDCRDDTMKALQVALSLGMDHRFLIDTPLMWIDKAQTWQLAHDLGDGTGVADGGNALVDLIVEHTHTCYLGDREHRHDWGYGCGACPACELRARGWAGYRAA

SEQ ID NO: 38776 - protein, 258 aa, Hydrogenophaga sp.
  REGION 1..258: note = tr|A0A4P7R998|A0A4P7R998_9BURK 7-cyano-7-deazaguanine synthase OS=Hydrogenophaga sp. PAMC20947 OX=2565558 GN=queC PE=3 SV=1
MSDALTPPSSVPLRPSAIPHHTSALVLFSGGQDSTTCLAQALARYPRVETLGFDYGQRHSVEMTARLQVLGELRGRFPDWSTRLGEDHVLDLAVLGKVSETSLTRDMAFRMEESGLPNTFVPGRNLLFLTLAAALAYRRGIQVIITGVCETDFSGYPDCRDDTMKALQVALSLGMDHRFLIDTPLMWIDKAATWRLAHDVGAASGVEGGGQQLVDLIVEHTHTCYLGDREHRHAWGYGCGTCPACELRARGWVGFVGG

SEQ ID NO: 38777 - protein, 250 aa, Hydrogenophaga sp.
  REGION 1..250: note = tr|A0A1V3S1U7|A0A1V3S1U7_9BURK 7-cyano-7-deazaguanine synthase OS=Hydrogenophaga sp. A37; OX = 1945864 GN=queC PE=3 SV=1
MVTAQPHHTSALVLFSGGQDSTTCLAHALARYPRVETLGFDYGQRHSVELQARTVVIQKLRDQFPAWSERLGEDHLLDLAVLGKVSDTSLTRDMAFKMEASGLPNTFVPGRNLLFLTLAAALAYRRDIQVIVTGVCETDFSGYPDCRDDTMKALQVALSLGMDHRFLIDTPLMWIDKAETWRMAEALGEASGVAGGGKAFVDLIVEHTHTCYLGDREHRQDWGYGCGSCPACELRARGWAGFTNACGDVS

SEQ ID NO: 38778 - protein, 223 aa, unidentified
  source 1..223: note = Hydrogenophilaceae bacterium
  REGION 1..223: note = tr|A0A1J4YTF7|A0A1J4YTF7_9PROT 7-cyano-7-deazaguanine synthase OS=Hydrogenophilaceae bacterium CG1_02_62_390 OX=1805218 GN=queC PE=3 SV=1
MSKKAVVLLSGGLDSATALAVARNQGYECYALSVDYGQRHASELNAARAVAAQLGVAGQRVVHLDIGQFGGSALTDKDMAVPTAPSAGIPITYVPARNTVMLSLALGWAEVLDADAIFIGVNSVDYSGYPDCRPEFIAAFQRMANLATKRAVEGQPVTIETPLMYLSKAEIVRLGSGLGVDYGLTVSCYQADEQGRACGVCDSCRFRRQGFIEAGVADPTPYR

SEQ ID NO: 38779 - protein, 239 aa, unidentified
  source 1..239: note = Hydrogenophilales bacterium
  REGION 1..239: note = tr|A0A259EYB4|A0A259EYB4_9PROT 7-cyano-7-deazaguanine synthase OS=Hydrogenophilales bacterium 17-61-9 OX=1970524 GN=queC PE=3 SV=1
MKPAVILLSGGLDSATVLAIARAAGYACHALSLDYGQRHQAELVAAARLAHALGAVEHRVMRLGLGDIGGSALTDSAIAVPESPTEGIPVTYVPARNTVMLALALAWAEVLGSRDIFIGVNAVDYSGYPDCRPEFIAAFEQMANLATRSGVEGEKLQIHAPLQDLSKAQIIQRGAALGVDYVQTVSCYQADADGGACGRCDSCRLRREGFIAAGIADPTRYALESGRNDADFSQTRNPA

SEQ ID NO: 38780 - protein, 225 aa, unidentified
  source 1..225: note = Hydrogenophilales bacterium
  REGION 1..225: note = tr|A0A259GJV6|A0A259GJV6_9PROT 7-cyano-7-deazaguanine synthase OS=Hydrogenophilales bacterium 17-61-76 OX=1970523 GN=queC PE=3 SV=1
MKPAVILLSGGLDSATVLAIAREADFACHTLSLDYGQRHNAELAAAGRLAKSLGAVEHRVVKLGLGDFGGSALTDASIAVPETPTSGIPATYVPARNTVMLSLALAWTEVLGGRDIFIGVNAVDYSGYPDCRAEFIAAFEHMANLATRAGVEGAQLRVHAPLQYLSKAEIIQRGIQLGVDYAQTVSCYQADLEGRACGRCDSCRLRREGFLNTGIPDPTRYAAAD

SEQ ID NO: 38781 - protein, 231 aa, Hydrogenophilus thermoluteolus
  REGION 1..231: note = tr|A0A2Z6E079|A0A2Z6E079_HYDTE 7-cyano-7-deazaguanine synthase OS=Hydrogenophilus thermoluteolus OX=297 GN=queC PE=3 SV=1
MTGYTKPKAVVLLSGGLDSTTVLAETAARGYQLYALTVAYGQRHAAEIAAAKRVARAFAVVEHRIAQASLDAFGGSALTDAALAVPEDGSTRTTIPITYVPARNTVLLALALAWAEVVGATDLFIGANAVDYSGYPDCRPPFLAAFEHLANVATKAGVEGARYRVHAPLLYLSKAEIIRRGVALGVDYGLTVSCYQADAEGRACGRCDSCRLRAAGFAAAGVPDPTHYQTG

SEQ ID NO: 38782 - protein, 221 aa, Hydrogenothermus marinus
  REGION 1..221: note = tr|A0A3M0BR31|A0A3M0BR31_9AQUI 7-cyano-7-deazaguanine synthase OS=Hydrogenothermus marinus OX=133270 GN=queC PE=3 SV=1
MEKIIVLLSGGMDSATLLWLAKKQFKEVYAISFDYGQKHKVELDFAKQLAKIAGVKEHFIAEIPHLRNIKGNALTDKNIEVPTEKYPEEAPITTVPMRNLTFLSIAAAFCDVYEIENIGIGIHSIDSPYPDCRAEFASSAEAAINASSVMVEKKKNRIKVYTPFLGKSKIDILKLGLELGVPYDKTYSCYKGTIPPCGQCATCQQRKEAFKSVGLEDPSFT

SEQ ID NO: 38783 - protein, 128 aa, Hydrogenothermus sp.
  REGION 1..128: note = tr|A0A432R7I0|A0A432R7I0_9AQUI 7-cyano-7-deazaguanine synthase (Fragment); OS = Hydrogenothermus sp. OX=2231113 GN=DSY47_07410 PE=3 SV=1
MASNIIVLVSGGMDSATLLWLAKKEFDEVYAISFDYGQKHKIELDFAKELVKLANVKKHFIVEIPHLKGIEGSALTDENIEVPSEDYPNQPPITTVPMRNLNFLAIASSFCDVYEIENIGIGIHSIDS

SEQ ID NO: 38784 - protein, 232 aa, unidentified
  source 1..232: note = Hydrogenovibrio crunogenus
  REGION 1..232: note = sp|Q31H76|QUEC_HYDCU 7-cyano-7-deazaguanine synthase; OS = Hydrogenovibrio crunogenus (strain XCL-2) OX=317025; GN = queC PE=3 SV=1
MADVDVKKAVVLLSGGLDSATVLAIAQAQGFECHTISFDYGQRHRAELIAAERISRVSGAKTHRVMEMNMHAIGGSALTDDSIDVPVSGVEKEMIPVTYVPARNTVFLSYALALAEVLEADDIFIGVNAVDYSGYPDCRPEYIAAYEKMANLATKAGVEGHKMHIQTPLIDLTKAEIIQTGVKLGVDYSQTVSCYQADKNGAACGICDSCRLRKQGFENAGVTDPTIYASNL

SEQ ID NO: 38785 - protein, 232 aa, unidentified
  source 1..232: note = Hydrogenovibrio crunogenus
  REGION 1..232: note = tr|A0A4P7P0Z4|A0A4P7P0Z4_9GAMM 7-cyano-7-deazaguanine synthase OS=Hydrogenovibrio crunogenus OX=39765 GN=queC PE=3 SV=1
MAGVDTKKAVVLLSGGLDSATVLAIAQAQGFECHTISFDYGQRHRAELMAAERVSRASGAKTHRVMEMNMHAIGGSALTDDSIDVPVSGVDKETIPVTYVPARNTVFLSYALALAEVLQADDIFIGVNAVDYSGYPDCRPEYIAAYEKMANLATKAGVEGHKMHIQTPLIDLTKAEIIQTGVRLGVDYSKTVSCYQADKNGAACGICDSCRLRKQGFEKAGVADPTIYVSNL

SEQ ID NO: 38786 - protein, 232 aa, Hydrogenovibrio marinus
  REGION 1..232: note = tr|A0A066ZMZ4|A0A066ZMZ4_HYDMR 7-cyano-7-deazaguanine synthase OS=Hydrogenovibrio marinus; OX = 28885 GN=queC PE=3 SV=1
MEPTTLNKRAVVLLSGGLDSTTVLAIAQSQGYECHALSFDYGQRHQVELQAAARIAEACQVASHRVMQMNMNAIGGSALTDNNIDVPTGGVEENTIPVTYVPARNTIFLSYALGLAEVIDADTIFIGVNAVDYSGYPDCRPEYIEAFEKMANLATKKGVEGHKIHIETPLISMTKAEIIQTGASLGVDYGLTVSCYQANDKGEACGVCDSCRLRKQGFSDAGVADPTQYYSA

SEQ ID NO: 38787 - protein, 245 aa, Hydrogenovibrio marinus
  REGION 1..245: note = tr|A0A5A4WME4|A0A5A4WME4_HYDMR 7-cyano-7-deazaguanine synthase OS=Hydrogenovibrio marinus; OX = 28885 GN=queC PE=3 SV=1
MANKYITNSTDLNMEPTTLNKRAVVLLSGGLDSTTVLAIAQSQGYECHALSFDYGQRHQVELQAAARIAEACQVASHRVMQMNMNAIGGSALTDNNIDVPTGGVEENTIPVTYVPARNTIFLSYALGLAEVIDADTIFIGVNAVDYSGYPDCRPEYIEAFEKMANLATKKGVEGHKIHIETPLISMTKAEIIQTGASLGVDYGLTVSCYQANDKGEACGVCDSCRLRKQGFSDAGVADPTQYYSA

SEQ ID NO: 38788 - protein, 231 aa, Hydrogenovibrio sp.
  REGION 1..231: note = tr|A0A2I2A5W6|A0A2I2A5W6_9GAMM 7-cyano-7-deazaguanine synthase OS=Hydrogenovibrio sp. SC-1 OX=2065820 GN=queC PE=3 SV=1
MSTDQKKAVVLLSGGLDSATVLAVAQSQGYECHTLSFDYGQRHKVELHAAQALANHFKVASHRVMQMNMHAIGGSALTDNLIDVPIEGVEDNQIPVTYVPARNTVFLSYALGLAEVLEADDIFIGVNAVDYSGYPDCRPEYIAAFETLANLATKAGVEGHRMHIQTPLISLTKAQIIQTGVQLGVDYSQTVSCYQANENGQACGVCDSCRLRKQGFKEAGIADPTRYVTLA

SEQ ID NO: 38789 - protein, 227 aa, unidentified
  source 1..227: note = Hydrogenovibrio thermophilus
  REGION 1..227: note = tr|A0A410H2D3|A0A410H2D3_9GAMM 7-cyano-7-deazaguanine synthase OS=Hydrogenovibrio thermophilus OX=265883 GN=queC PE=3 SV=1
MKKAIVLLSGGLDSATVLAIAQSEGYECHTMSFDYGQRHRAELLAAERVSKAFGAKTHRVMSMNMRAIGGSALTDDAIDVPTTGVEENQIPVTYVPARNTIFLSYALGLAEVVDADDIFIGVNAVDYSGYPDCRPEFIQAFEVMANLATKAGVEGHKMHIRTPLIDLTKSQIIQEGIRLGVDYSQTVSCYQADDSGAACGVCDSCRLRKQGFEAAGVADPTVYVNTH

SEQ ID NO: 38790 - protein, 246 aa, unidentified
  source 1..246: note = Hydromonas duriensis
  REGION 1..246: note = tr|A0A4V3DK78|A0A4V3DK78_9BURK 7-cyano-7-deazaguanine synthase OS=Hydromonas duriensis; OX = 1527608 GN=queC PE=3 SV=1
MNLIKNAPDEGALVVLSGGQDSTTCLYWAIQRWGRERVQALTFDYGQRHRVELDSARAIAELAGVRQTVLPIDTFARMGGNALTDDIIPESGVRADDDAALPNTFVPGRNLIFLTFAAAFAYQKGLAHVVTGVAQTDYSGYPDCRENTLKSLELALRLGMDSRVTLHTPLMFLTKAQTVHLAQDVGAMSALALSHTCYNGAVPPCGECAACLLRAQGFAQAGAIDPLIERTGRARADETVNQLTLC

SEQ ID NO: 38791 - protein, 257 aa, unidentified
  source 1..257: note = Hydromonas sp.
  REGION 1..257: note = tr|A0A345DD84|A0A345DD84_9BURK 7-cyano-7-deazaguanine synthase OS=Hydromonas sp. F02; OX = 2268024 GN=queC PE=3 SV=1
MDNLNLTSCGAGGVGSGALVVLSGGQDSTTCLYWAVARWGRENVQALTFDYGQRHRVELDSAQKIAALVGVKQTVLPIDTFAAMGGNALTDDIAPESGVRADDDAALPNTFVPGRNLIFLTFAAAFAYQKGLAHVVTGVAQTDYSGYPDCRENTLKSLELALRLGMDSRVTLHTPLMFMSKAETVALAQAVGAMDALALSHTCYNGAVPPCGECAACVLRAQGFAQAGVADPLVVRTLVSACAVDAVAHDDAQLTLC

SEQ ID NO: 38792 - protein, 223 aa, unidentified
  source 1..223: note = Hyella patelloides
  REGION 1..223: note = tr|A0A563VTY9|A0A563VTY9_9CYAN 7-cyano-7-deazaguanine synthase OS=Hyella patelloides LEGE 07179 OX=945734 GN=queC PE=3 SV=1
MKKAVVLLSGGLDSATTAAIAIKEGYEAIALSFRYGQRHEKELQAAAKIAQALNIQQHHIIEVNLSQWGGSSLTDTNLEIPQEGVQPDVIPSTYVPGRNTVFIAIALSLAEATGATAIYLGINAVDYSGYPDCRPEYLDAYQKLANLASKTAIEGNTIQLVAPLVKDTKVDIVKRALNLGVPLAETWSCYQGGEKPCGVCDSCRIRDHALIAAGRSDLISSNY

SEQ ID NO: 38793 - protein, 215 aa, unidentified
  source 1..215: note = Hyella patelloides
  REGION 1..215: note = tr|A0A563VTQ7|A0A563VTQ7_9CYAN 7-cyano-7-deazaguanine synthase OS=Hyella patelloides LEGE 07179 OX=945734 GN=H1P_2790001 PE=3 SV=1
MDSQILDKSQIKIYLLIGGGTDSAALINFYQSRRANINGIHFNYGQPSLAGERRSVNALAEYYQISISSIDLGMKISHAKGEYYCRNATLLMAAASTFSAKQGILSLGIHSGTPYYDCSPEFLQDIQHLFDGYFGGTVQIEAPFLDFTKQDIYKYCHKNKVPVEITFSCERQSDRPCGECPSCINRRTFSCERQSDRPCGECPSCINRRMLDAIR

SEQ ID NO: 38794 - protein, 232 aa, Hylemonella gracilis
  REGION 1..232: note = tr|A0A4V1A1S3|A0A4V1A1S3_9BURK 7-cyano-7-deazaguanine synthase OS=Hylemonella gracilis; OX = 80880 GN=queC PE=3 SV=1
MHTSALVLFSGGQDSTTCLAQALSRYERVETIAFDYRQRHAVELDARLRVLAELRRAYPHWSGRLGQDHLLDVAVLGAVSETSLTRETEFQMQANGLPNTFVPGRNLLFLTLAAAVAYRRDLQVLITGVCETDFSGYPDCRDDTMKAMQIALSLGMDKRLLIETPLMWIDKAETWHLAESLGGKMLVDLIVEHTHTCYLGERGQRHVWGYGCGHCPACELRARGWERYRAAA

SEQ ID NO: 38795 - protein, 232 aa, Hylemonella gracilis
  REGION 1..232: note = tr|A0A016XKK6|A0A016XKK6_9BURK 7-cyano-7-deazaguanine synthase OS=Hylemonella gracilis str. Niagara R OX=1458275 GN=queC PE=3 SV=1
MHTSALVLFSGGQDSTTCLAHALSRYERVETIAFDYRQRHVVELDARLRVLEELRRTYPHWASKLGQDHLLDVAVLGAVSETSLTRETEFQMQANGLPNTFVPGRNLLFLTLAAAVAYRRDLQVLVTGVCETDFSGYPDCRDDTMKAMQLALSLGMDKRLLIETPLMWIDKADTWRLAESLGGKALVDLIVEHTHTCYLGERDQRHAWGYGCGRCPACELRAGGWERYRSAA

SEQ ID NO: 38796 - protein, 202 aa, Hymenobacter chitinivorans
  REGION 1..202: note = tr|A0A2M9BN93|A0A2M9BN93_9BACT 7-cyano-7-deazaguanine synthase OS=Hymenobacter chitinivorans DSM 11115 OX=1121954 GN=CLV45_0822 PE=3 SV=1
MKSALLLSGGMDSIAIAYWKRPAIAVTLDYGQLPAQAEIDASKAVAAALGIQHEIVQVNCRALGSGDLAGTTSLSNAPTAEWWPYRNQLLLTLAAMHLSRLQVTELMIGTVATDQSSHKDGHEHFVSLMNQLVSFQEGGLQITAPAISLTTAELVRISGITRSLLCYAHSCQKSNLACGECGGCEKYRATMQELYEAEGLVY

SEQ ID NO: 38797 - protein, 201 aa, Hymenobacter sp.
  REGION 1..201: note = tr|A0A126PCW9|A0A126PCW9_9BACT 7-cyano-7-deazaguanine synthase OS=Hymenobacter sp. PAMC 26628 OX=1484118 GN=AXW84_11190 PE=3 SV=1
MKRAILLSGGIDSIALSYWLRPDLAFTIDYGQLPYQGEVRAAEQIAKHLEITHELLKVDCGAIGSGDLSGKAPDPQAPASEWWPYRNQLLLTICASKAITMGATEIMIGTVASDGFHKDGTPRFIELMNEAFSYQEGNLQISAPAITMTSAELVRASQIPEELLFWAHSCHKADYACGNCRGCNKYRNVMHELYGTSFTTG

SEQ ID NO: 38798 - protein, 234 aa, unidentified
  source 1..234: note = Hyphomicrobiaceae bacterium
  REGION 1..234: note = tr|A0A5C7M006|A0A5C7M006_9RHIZ 7-cyano-7-deazaguanine synthase OS=Hyphomicrobiaceae bacterium OX=2015799 GN=queC PE=3 SV=1
MKKAVVLLSGGLDSTTTLAIAKAEGFEVYALSFRYGQRHLGELDCAKRVAALLGAKQHVIAQFDLRAFGGSALTDEIPVPKNREADEIGTGIPVTYVPARNTVFLSFALSWAEVLGANDIFIGVNALDYSGYPDCRPEYIEAFERMANLATKSGVEGHAHIRIRTPLIQLSKTDIIRKGLQLGVDYSLTSTCYDPDPSGAACGECDACLLRLKGFREIGLPDPAPYRQSMKAKP

SEQ ID NO: 38799 - protein, 215 aa, unidentified
  source 1..215: note = Hyphomicrobiaceae bacterium
  REGION 1..215: note = tr|A0A5C7LX01|A0A5C7LX01_9RHIZ 7-cyano-7-deazaguanine synthase OS=Hyphomicrobiaceae bacterium OX=2015799 GN=E6R03_09375 PE=3 SV=1
MSNKVAIVSGGMDSVVMLKRFAPSLACVMYFNYGSNHAQKESYFSRLHAEEHKLAWLEIDLGFIKQHFSSALLQGSEAIPDGHYQDEIMKKTVVPFRNGIMLSIAAGFAESIGASAVMIGSHFGDHAIYPDCRADFITPMRAAVKAGTYANIEVEAPFASFVKRDIGMLGKQLGVDFTQSWSCYKNGEHHCGTCGTCVERKEALQGFDPTYYEVL

SEQ ID NO: 38800 - protein, 232 aa, Hyphomicrobium denitrificans
  REGION 1..232: note = tr|D8JYX1|D8JYX1_HYPDA 7-cyano-7-deazaguanine synthase OS=Hyphomicrobium denitrificans (strain ATCC 51888 / DSM 1869 / NCIB 11706 / TK 0415) OX=582899 GN=queC; PE = 3 S V=1
MPQTSALVLFSGGQDSTVCLAWALDRYERVETVGFTYGQRHAVELAQRPVIRSKLANLSGGSKLGDDAVLDLPALQSISDTALTRETEITFAATGLPTTFVPGRNLLFLTYAAALAYRRGIGTLVGGMCETDFSGYPDCRNATVQALAQALSLGLDTHLEIETPLMFIDKAATWDLADKLGGKALVDLIVEDTHTCYLGDRSHRHAWGYGCGTCPACELRAKGWNEWQARTT

SEQ ID NO: 38801 - protein, 215 aa, Hyphomicrobium denitrificans
  REGION 1..215: note = tr|N0B475|N0B475_9RHIZ 7-cyano-7-deazaguanine synthase OS=Hyphomicrobium denitrificans 1NES1 OX=670307; GN = queC PE=3 SV=1
MCLAWALDRYERVETLGFTYGQRHAVELAQRPIIRSELAKRRNGSKLGADVVLDLPALESISDTALTRETEITFAATGLPTTFVPGRNLLFLTYAAALAYRRGIATLVGGMCETDFSGYPDCRNATIQALAQALSLGLDTHLEIETPLMFIDKAATWELAGKLGGRDLIDLIIEDTHTCYLGDRSHRHTWGYGCGTCPACELRAKGWNEWQARTI

SEQ ID NO: 38802 - protein, 240 aa, Hyphomicrobium facile
  REGION 1..240: note = tr|A0A1I7NUW5|A0A1I7NUW5_9RHIZ 7-cyano-7-deazaguanine synthase OS=Hyphomicrobium facile; OX = 51670 GN=queC PE=3 SV=1
MPESSALVLFSGGQDSTVCLAWALDRYDRIETVGFSYGQRHSVELEQREIIRSKLARLGPAGQRLGGDTVLDLPALQSISDTALTRDTEIAFAATGLPTTFVPGRNLLFLTYAAALGYRRGIATIVGGMCETDFSGYPDCRNDTMQAMAQALSLGLATPVSIETPLMFIDKAGTWELASKLGGEDLIQIILEDTHTCYVGDRTNRHEWGYGCGVCPACDLRAKGWAEWQARTNRELPQKA

SEQ ID NO: 38803 - protein, 243 aa, unidentified
  source 1..243: note = Hyphomicrobium nitrativorans
  REGION 1..243: note = tr|V5SE88|V5SE88_9RHIZ 7-cyano-7-deazaguanine synthase OS=Hyphomicrobium nitrativorans NL23 OX=1029756; GN = queC PE=3 SV=1
MADDSALVLFSGGQDSTVCLAWALARFGRVETIGFDYGQRHAVELSQRGAVLDGLRARFPAWAPRLGADHSLALPELGRLSETSLTRETEIAMTDAGLPSTFVPGRNLLFLTYAAALAYRRGIGTLVGGMCETDYSGYPDCRNDTIQTLARTLSLGMDVELRIETPLMWIDKAGTWALTHALGGDALVDLIVQDTHTCYLGDRSRRHAWGAGCGTCPACELRAKGWNAWKRETAATDTASEPL

SEQ ID NO: 38804 - protein, 238 aa, Hyphomicrobium sp.
  REGION 1..238: note = tr|A0A258KYH6|A0A258KYH6_9RHIZ 7-cyano-7-deazaguanine synthase OS=Hyphomicrobium sp. 32-62-53 OX=1970390 GN=queC PE=3 SV=1
MTDVTAAPSALVLFSGGQDSTVCLAWALQQYEHVETVGFQYGQRHEVELAQRGIIRDEIAKLGDWGARLGPDTMIALPELGRLSETALTRDREIAFEVNGLPNTFVPGRNLLFLTYAAALAYRRGIHTLVGGMCETDYSGYPDCRQATMTAMEEALSRGLDYPLAIETPLMFVDKAGTWAMAETLGGAALTDIVIAHSHTCYLGDRTHQHSWGYGCGTCPACQLRAKGFLQWRGIDAL

SEQ ID NO: 38805 - protein, 239 aa, Hyphomicrobium sp.
  REGION 1..239: note = tr|A0A1E4C1Y3|A0A1E4C1Y3_9RHIZ 7-cyano-7-deazaguanine synthase OS=Hyphomicrobium sp. SCN 65-11 OX=1660102 GN=queC PE=3 SV=1
MTDPSERAALVLFSGGQDSTVCLASALTRYDRVETIGFDYGQRHRVELEQRGKVIAALRDRFPDWAARLGEDHRLSLPTLAQISETSLTRETAIEMTASGLPSTFVPGRNLLFFTYAAALAYRRGIATLVGGMCETDYSGYPDCRNDTLQTLARALTLGLDRPVAIDTPLMTIDKAGTWALAETLGGAALVDIIIEETHSCYLGDRATRHPSGYGCGSCPACELRANGFTRWQSERGAA

SEQ ID NO: 38806 - protein, 234 aa, Hyphomicrobium sulfonivorans
  REGION 1..234: note = tr|A0A120CUC4|A0A120CUC4_HYPSL 7-cyano-7-deazaguanine synthase OS=Hyphomicrobium sulfonivorans OX=121290 GN=queC PE=3 SV=1
MTDRDNAALVLFSGGQDSAVCLAWALERYGRVETLGFNYGQRHVAELAQRETLRLAMAELKPIWRERLGDDHMLALPELGRLSDTALTREAEIEISAAGLPSTFVPGRNLMFFTYAAALAYRRGIRTLVGGMCETDFSGYPDCRNDTLQTLAKALALGMDAPFVIETPLMWVDKAETWALTDTLGGQPLIDLIVEESHTCYLGVRTRRYEWGYGCNHCPACALRRKGWEEWRNR

SEQ ID NO: 38807 - protein, 240 aa, unidentified
  source 1..240: note = Hyphomonadaceae bacterium
  REGION 1..240: note = tr|A0A0F2QHR1|A0A0F2QHR1_9RHOB 7-cyano-7-deazaguanine synthase OS=Hyphomonadaceae bacterium BRH_c29 OX=1629720 GN=queC PE=3 SV=1
MTQMPSASADARALVLFSGGQDSATCLAWALERYEQVETIGFDYGQRHAVELTCRESVRTGLASLNPAWASRLREDHMVDATVLKSLGETAMTHDVAIETTEAGLPSTFVPGRNLLFLTLAGALAVRRGIGVLVGGMCETDYSGYPDCRNDTIQTQAETLRLGLDKPMQIETPLMYIDKAGTWEMAEQLGGQALVELIVEETHTCYLGDRSHHHAWGYGCGTCPACELRASGWDRWQAAR

SEQ ID NO: 38808 - protein, 240 aa, unidentified
  source 1..240: note = Hyphomonadaceae bacterium
  REGION 1..240: note = tr|A0A2E4S4T1|A0A2E4S4T1_9RHOB 7-cyano-7-deazaguanine synthase OS=Hyphomonadaceae bacterium OX=2026748 GN=queC PE=3 SV=1
  VARIANT 236: note = Xaa can be any naturally occurring amino acid
MSTSSSALVLFSGGQDSTTCLASALKRYRHVETIGFDYGQRHRVELDAREDVLAAIRQNFPQWAERLGEDHLIDLGVLGQISETSLTRETEITEDEDGLPSTFVPGRNLVFLTLAAALAWRRGISVIIGGMCETDYSGYPDCRRDTIDAQQKALSLGMDRQFTLKTPLMWLDKSETWQLAWDIGGDALVDLIVEKTHSCYVGDHRTRHDWGYGCGKCPACELRAKGYRKWRERQGXKPIR

SEQ ID NO: 38809 - protein, 69 aa, Hyphomonas adhaerens
  REGION 1..69: note = tr|A0A3B9H0M0|A0A3B9H0M0_9RHOB 7-cyano-7-deazaguanine synthase (Fragment) OS=Hyphomonas adhaerens OX=81029 GN=DCG58_13885 PE=3 SV=1
MTLQTSPSVNRALVLFSGGQDSATCLAWALDRFDAVETIGFDYGQRHAVELSCREKVRIDMASLKESWA

SEQ ID NO: 38810 - protein, 239 aa, Hyphomonas adhaerens
  REGION 1..239: note = tr|A0A069E670|A0A069E670_9RHOB 7-cyano-7-deazaguanine synthase OS=Hyphomonas adhaerens MHS-3 OX=1280949 GN=queC PE=3 SV=1
MTLQTSPSVTRALVLFSGGQDSATCLAWALDRFDAVETIGFDYGQRHAVELSCREKVRIGMASLKESWASRLGDDHMIDATVLKSLGETAMTHDVAIETTDAGLPSTFVPGRNLLFLTLAGALGVRRGVGVLVGGMCETDYSGYPDCRNDTIQAQAETLRLGLGKPMTIETPLMYIDKAGTWAMALELGGQGLIDLIVEDTHTCYLGDRTHRHDWGYGCGTCPACELRAAGWDRWQVSR

SEQ ID NO: 38811 - protein, 242 aa, unidentified
  source 1..242: note = Hyphomonas atlantica
  REGION 1..242: note = tr|A0A059EAK1|A0A059EAK1_9RHOB 7-cyano-7-deazaguanine synthase OS=Hyphomonas atlantica; OX = 1280948 GN=queC PE=3 SV=1
MPVTGAVMSQLLPAALVLFSGGQDSTTCLAWALSRYERVETVGFDYGQRHRIELECRETVRSGLAALNTDWGARLGADHMLDATVLKSLGETAMTHEVSIEMTEAGLPSTFVPGRNLLFLTLAGALASRRGIAVLVGGMCETDYSGYPDCRADTMAAQAETLRLGLDVPMQIETPLMYIDKAETWALADTLGGQGLVDLIAEDTHTCYLGERGARHEWGYGCGTCPACELRAKGWESWKNAS

SEQ ID NO: 38812 - protein, 235 aa, unidentified
  source 1..235: note = Hyphomonas beringensis
  REGION 1..235: note = tr|A0A062U4T4|A0A062U4T4_9RHOB 7-cyano-7-deazaguanine synthase OS=Hyphomonas beringensis; OX = 1280946 GN=queC PE=3 SV=1
MADPSSSALVLFSGGQDSTTCLASALSRFERVETVGFDYGQRHRIELTCRETVRKGIAAINPLWGDRLGEDHMLDATVLKSLGETAMTHEVSIEMTEAGLPSTFVPGRNLLFLTLAGALASRRGIGVLVGGMCETDYSGYPDCRADTMAAQAETLRLGLDVPIQIDTPLMYIDKAETWALAHQLGGYALVRLIVEDTHTCYLGERGELHDWGHGCGTCPACELRARGWEKWAASR

SEQ ID NO: 38813 - protein, 201 aa, unidentified
  source 1..201: note = Hyphomonas chukchiensis
  REGION 1..201: note = tr|A0A062UMJ2|A0A062UMJ2_9RHOB 7-cyano-7-deazaguanine synthase OS=Hyphomonas chukchiensis; OX = 1280947 GN=queC PE=3 SV=1
MGFDYGQRHRVELACRTRFIDSLRAQFPAWGERLGVDHMLDASVLKSLGESAMTDDVAIEMTEAGLPSTFVPGRNLLFFTLAGALAYRRGIDVLVGGMCETDYSGYPDCRAATLAAQEQTLQLGLDSTVRIETPLMYVDKAGTWALAEATGGQALVDLVTEETHTCYLGDRTHRHEWGYGCGTCPACELRSSGWQRWKAGA

SEQ ID NO: 38814 - protein, 188 aa, Hyphomonas hirschiana
  REGION 1..188: note = tr|A0A059FXX0|A0A059FXX0_9RHOB 7-cyano-7-deazaguanine synthase OS=Hyphomonas hirschiana VP5 OX=1280951 GN=HHI_06619 PE=3 SV=1
MTADDSIETVVLVSGGIDSAACAAMYANNGGSTTGVFVDYGHPAAIEEFASAEKVCAALGIPLLKTSFSTDRITGPGEIVGRNALLIWSAVFASGIKKGVIAIGVHAGTTYYDCSSTFITRMDNMLAESTNGLVRISAPFVNASKSEVFSYLQRSKVEASLTYSCESGSKEPCGICASCQDRTKLGLR

SEQ ID NO: 38815 - protein, 456 aa, Hyphomonas hirschiana
  REGION 1..456: note = tr|A0A059FY57|A0A059FY57_9RHOB Uncharacterized protein OS=Hyphomonas hirschiana VP5 OX=1280951; GN = HHI_04825 PE=4 SV=1
MVSDYAIERPDAHVYVCSDGEAAPEHSALCVLGRHLKLEPRALGTFLMRSIPARAEDLLVLAGAVAYIDRLGKRHHSKCWERDLFLSLPVRDFDFWDASDLRDELKSLLEMLTGDSWYLEFRPGRAPLPVDRQGSLSLTDTPPVVIPYSNGLDSFAVARLHAQPRQHIIRVSTGRVGDTEKKVSHARTASTRWVSMPISLPGAGVRLPEQSYRSRGFLFGAVAATAAGIMKGAEIVVPESGQGTFGPALTVIGHEHPDVRMSPIFTSALGRFVSRIFESPIRFVHPRVWSTKGETLAALQIAQLSEGWEVTVSCSRSSRRKIQGSVAKHCGVCANCLLRRQSLQVAGLVSSSQEPYIWPDLGQSPPWTSRDHPVPGKSVVQQAISAILAMRDFAMISPESPLVLREAAAIAEALGEPRESTLHGMHHVMAKHREEWSALLSTFPPTSLFRALGAVA

SEQ ID NO: 38816 - protein, 239 aa, Hyphomonas jannaschiana
  REGION 1..239: note = tr|A0A059FES2|A0A059FES2_9RHOB 7-cyano-7-deazaguanine synthase OS=Hyphomonas jannaschiana VP2 OX=1280952 GN=queC PE=3 SV=1
MTSQTSPTVTRALVLFSGGQDSATCLAWALDRFDQVETIGFDYGQRHAVELTCREKVRIGMASLKESWASRLGEDHMIDATVLKSLGETAMTHDVVIETTEAGLPSTFVPGRNLLFLTLAGALAVRRGISVLVGGMCETDYSGYPDCRNDTIQAQAETLRLGLGKPMSIETPLMYIDKAGTWEMAHGLAGQALIDLIVEDTHTCYLGDRSQRHVWGYGCGSCPACELRAAGWDRWQAAK

SEQ ID NO: 38817 - protein, 235 aa, Hyphomonas johnsonii
  REGION 1..235: note = tr|A0A059FQZ2|A0A059FQZ2_9RHOB 7-cyano-7-deazaguanine synthase OS=Hyphomonas johnsonii MHS-2 OX=1280950 GN=queC PE=3 SV=1
MIENRTSALVLFSGGQDSATCLAGALARFRRVETVGFDYGQRHRVELDCRTRFLQAIRDDFPRWGEHLGADHMLDASVLKGLGQSAMTDDVAIEMTKAGLPSTFVPGRNLLFFTLAGALAYRRGIDVLVGGMCETDYSGYPDCRAATLAAQEQTLRLGLDMDIRIDAPLMNIDKAETWAMANRLGGARLVDLIVEETHTCYLGDRTQRHAWGYGCGTCPACELRANGWARWKATA

SEQ ID NO: 38818 - protein, 456 aa, Hyphomonas neptunium; identical to SEQ ID NO: 38815
  REGION 1..456: note = tr|Q0C5H6|Q0C5H6_HYPNA Uncharacterized protein; OS = Hyphomonas neptunium (strain ATCC 15444) OX=228405; GN = HNE_0287 PE=4 SV=1

SEQ ID NO: 38819 - protein, 239 aa, Hyphomonas neptunium
  REGION 1..239: note = sp|Q0C4T2|QUEC_HYPNA 7-cyano-7-deazaguanine synthase; OS = Hyphomonas neptunium (strain ATCC 15444) OX=228405; GN = queC PE=3 SV=1
MTQPISSALVLFSGGQDSATCLAWALDRFDRVETIGFDYGQRHAIELACRPKVRAAIRQMSPVWAEKLGEDHMIDAGVLKSLGATAMTHEVEISMTAAGLPNTFVPGRNLLFFTLAGALAVRRGIGVLVGGMCETDYSGYPDCRADTLKAQEQTLRLGLDADIRIDAPLMYLDKAATWQLAQELGGDALVALIGEETHTCYLGERGARHDWGYGCGTCPACELRSNGWQRWQDGKAAAP

SEQ ID NO: 38820 - protein, 198 aa, Hyphomonas oceanitis
  REGION 1..198: note = tr|A0A059GCI4|A0A059GCI4_9RHOB 7-cyano-7-deazaguanine synthase OS=Hyphomonas oceanitis SCH89 OX=1280953 GN=HOC_01445 PE=3 SV=1
MKTALLLSGGMDSVSIAYWKMPNIAITIDYGQRPAPGEIRAASAVCSSLGIEHQILTVDIAALGSGDLSDQPPVSGAPASEWWPYRNQFLLTVAAMRCHAEGVNRMMIGALKSDGFHADGTRVFVDAMNELFALQEGELAVEAPAIGFDAVELVRTSKVPMDILAWSHSCHVAEFACGFCRGCRKHYDTMEAVNGSAY

SEQ ID NO: 38821 - protein, 201 aa, Hyphomonas oceanitis
  REGION 1..201: note = tr|A0A059GA13|A0A059GA13_9RHOB 7-cyano-7-deazaguanine synthase OS=Hyphomonas oceanitis SCH89 OX=1280953 GN=queC PE=3 SV=1
MGFDYGQRHRVELECRTRFIDSIRAQFPEWGERLGADHMLDASVLKSLGESAMTDDVAIEMTEAGLPSTFVPGRNLLFFTLAGALAYRRGIDVLVGGMCETDYSGYPDCRAATLAAQEQTLQLGLDSTVRIETPLMYVDKAGTWALAEETGGQALVDLITEETHTCYLGDRTRRHEWGYGCGTCPACELRSSGWQRWKAGA

SEQ ID NO: 38822 - protein, 239 aa, Hyphomonas polymorpha
  REGION 1..239: note = tr|A0A062VCI6|A0A062VCI6_9RHOB 7-cyano-7-deazaguanine synthase OS=Hyphomonas polymorpha PS728 OX=1280954 GN=queC PE=3 SV=1
MTQPFSSALVLFSGGQDSATCLAWALTRFDRVETIGFDYGQRHAVELACRPKFLDAIRRNFPAWGEKLDGDHIIDASVLKALGATAMTHDVEITLTAAGLPNTFVPGRNLLFFTLAGALAVRRGHGVLVGGMCETDYSGYPDCRADTLKAQEETLRLGLDADIRIDTPLMYLDKAATWQLAQDLGGDALVDLIAEETHTCYLGQRGARHAWGYGCGACPACELRANGWQRWQAGKGSAA

SEQ ID NO: 38823 - protein, 235 aa, Hyphomonas sp.
  REGION 1..235: note = tr|A0A1Z9Y0E2|A0A1Z9Y0E2_9RHOB 7-cyano-7-deazaguanine synthase OS=Hyphomonas sp. TMED17; OX = 1986605 GN=queC PE=3 SV=1
MAGDSALVLVSGGQDSTVCLAFALERYAHVETVGFDYGQRHDVEISCRQAVLQAFRDHFPEWSAKLGDDHMCDLRGFGAVSNTSLTRETEIEMDQTGLPSTFVPGRNLVFFNYAAAVSWRRGINRLIGGMCETDYSGYPDCRRATLDAQELALQKGTERPFKIETPLMDLDKAQTWMLAKELGGDKLVEIIVQHTHTCYLGARETLHDWGYGCGRCPACELRAAGFEAWKSECGA

SEQ ID NO: 38824 - protein, 239 aa, Hyphomonas sp.
  REGION 1..239: note = tr|A0A258BZP4|A0A258BZP4_9RHOB 7-cyano-7-deazaguanine synthase OS=Hyphomonas sp. 32-62-5; OX = 1970391 GN=queC PE=3 SV=1
MKHAPSSALVLFSGGQDSATCLAWALDRFDRVETIGFDYGQRHAIELACRPKFLAAIRAAFPAWGAKLGDDHMIDASVLKALGATAMTHDVAITMTAAGLPNTFVPGRNLLFFTLAGALAVRRGAGHLVGGMCETDYSGYPDCRADTMKAQEETLRLGLDADVRIETPLMYLDKAATWQLAQDLGGDTLVDLIAEETHTCYLGERGTRHAWGYGCGACPACELRANGWQRWQAGKGTAP

SEQ ID NO: 38825 - protein, 225 aa, unidentified
  source 1..225: note = Hypnocyclicus thermotrophus
  REGION 1..225: note = tr|A0A4R7KZI6|A0A4R7KZI6_9FUSO 7-cyano-7-deazaguanine synthase OS=Hypnocyclicus thermotrophus OX=1627895 GN=queC PE=3 SV=1
MKERINKNRAVVVFSGGQDSTTLLFKAKKEYKEVIALSFDYGQKHKLELECAQEITKKHGIEHHILDMSLLNQLAPNALTRVDVNVPKGEVEGIPNTFVDGRNMIFLTFAAVFAKQRDINIIITGVSQSDFSGYPDCRDHFIKSLNTTLNLAMDYQFVVETPLMWLDKAETWNMAYELGVLDIIKNDTLTCYNGIKGDGCGECPSCVLRKKGYEEFEQKFLKKNF

SEQ ID NO: 38826 - protein, 1381 aa, unidentified
  source 1..1381: note = Hyunsoonleella pacifica
  REGION 1..1381: note = tr|A0A4V2JBD5|A0A4V2JBD5_9FLAO Amino acid adenylation domain-containing protein OS=Hyunsoonleella pacifica OX=1080224 GN=EYD46_01945 PE=4 SV=1
MDKSKIELLPLTKSQTSLWLTDKLHLNLPINNDPYAFYIKGEIDIKIFKLAFKELLGNTDVLRAIILEVDGKPYQKIAACLEEDLLYLDFEDKKLAEVEEWLRTKSKLVLDTSKKLFDSALIRLKNDDFIWYLNLHHLITDATSRTILFNRMSYIYEELLNFGTSSFTEEYKYNMFIDFEEKSRDQHKEKTKYWENKIKSFTDPPSFYGLKKVGNVTEKSHRIEVQLSKDDIDKLTKFSENPEIKIWNKDVTLLTVFASVLFSYLYRVSGQRKLIIGIPIHNRINKAFQETVGLFIEIFPLTVEIDENETFISLLKKIQLDTIHCFKNGLIGTSSANLSRSYNVILNYINSSYNNFANHETITRWIHPECSDPAHKLRFHIHDFNNTNQLNLIFDFNEDILVASTPETFLEHFENVFNAFLADINQPIDKPSIISKVEKSVFTETLIDTSPELQTVIDAFEDNVKTTPNAIALQFKSETLTYKALNKKANQLANYLIVKGAKVNDNVVVHSYRNSNYIISVLAILKIGGTFIPIASDQTKNRIDFILENCDCAFVLTQNELLKNFSEDIRIPIINLQEIGDDLANQSEENIDIIKNESTLAYVLYTSGSTGLPKGVLISNRALSNYIFWAKEHYGFSSKSVFALFTSIGFDLTITSTFLPLVSGGRMIVYEEDESGIDISVLNVIKDNLADTIKLTPSHLSLFQNKNLQDSNIKTMIVGGEDFKVNMGKAMKLTFGNDVKIFNEYGPTEATVGCIVSEFNPEKHKQSSIPIGLPITNMNAYILDEFNNLVPKGVVGELYLSGSSLASGYLGLDDLTTSKFIDNPFVQSTKMYKTGDLARINSKGEYEYLGRVDEQVKLRGYRIELPDIESNLLDFEGIDNCAVVLTENTKKQINDDEVFNCIECGLPSNYPQTDFDAHGVCNLCNAFKGYKNKAQKYFKTESELHSILTSRKGKSPSYDCLTLLSGGKDSTYILAQLVSMGLKVLAFTLDNGYISEQAKDNINRIVSKLGVDHIYGQTEHMNAIFVDSLYRHKNVCNGCFKTIYTLSTKIAMERQIPFIVTGLSRGQFFETRLTEELFWDEDLDVTKIDDTILEVRKLYHREEDAIKELLDVSIFEGDDIFETVQFVDFYRYSDVSLENMIKYLEEKVGWIRPTDTGRSTNCLINQVGIYVHKRQRGYSNYSFPYSWDVRLGHKTRDESLEEINEYIDEVEVKRIMAEIGYEEPIDIHNNQKLVAYYTGDKALMSQELKMYLSNKIPDYMIPSNFKYLEEIPLTKNGKIDKKTLRSLTTDQLELEVSYVAPRNEIEQLVESIWKEVLRLERIGVHDDFIALGGHSLAAIRVTSRINEELELNVPLNKIFNLPTIERYSEYIEDIITKLLNE

SEQ ID NO: 38827 - protein, 240 aa, Ideonella sp.
  REGION 1..240: note = tr|A0A437RRX9|A0A437RRX9_9BURK 7-cyano-7-deazaguanine synthase OS=Ideonella sp. KYPY4; OX = 1862385 GN=queC PE=3 SV=1
MSDARPVHTQALVLFSGGQDSATCLAWALSRYERVETIGFDYGQRHKVELTCRGRFLEALKQRYPQWARKIGDDHLLDLALLGQISDTALTQDKAIAFASTGLPNTFVPARNLVFLTLAAAIAYRRGLTVLVGGMCETDYSGYPDCRDDTLKALQVALSLGMDSRFLLDTPLMWLSKAQTWHLAESLGGRPLVELIREETHTCYAGDRQTRHAWGYGCGSCPACELRRKGHDTYLEAPAP

SEQ ID NO: 38828 - protein, 239 aa, Ideonella sp.
  REGION 1..239: note = tr|A0A523Q5T7|A0A523Q5T7_9BURK 7-cyano-7-deazaguanine synthase OS=Ideonella sp. MAG2; OX = 2083017 GN=queC PE=3 SV=1
MAAQNRTALVLFSGGQDSTVCLAWALQRFARVETLGFDYGQRHRIELDCRLTVRQELARHFPQWAAKLGEDHVLDLSLLGQISACALTEHRAIELEANGLPNTFVPGRNLLFLSFAATLAYRRGASVLVGGMCETDYSGYPDCRDNTLKALQVALSLGLDTPMTLETPLMFLTKGQTWALAHELGGEALNALIAEHTHTCYLGERGTRHPWGYGCGECPACQLRAAGHAAWLQHDEAGL

SEQ ID NO: 38829 - protein, 218 aa, Idiomarina abyssalis
  REGION 1..218: note = tr|A0A370QDA9|A0A370QDA9_9GAMM 7-cyano-7-deazaguanine synthase OS=Idiomarina abyssalis; OX = 86102 GN=queC PE=3 SV=1
MSQKVVVIYSGGMDSFTVLHKALAEGNEVLALSFNYGQRHVKELEVAAKVCKQHGIPHKVVDITAINSLLSGSSLTDDIDIPEGHYEEESMKSTVVPNRNMILLSLAIGYAVSEEASAVYYGAHSGDHAIYPDCRPEFVRQMDVVSKMANYEPVAVHAPYLDVDKNAILADGIKMDLDYSQTWTCYNGRDKACGKCGACQERLEAFAANGIEDPLSYE

SEQ ID NO: 38830 - protein, 241 aa, Idiomarina aestuarii
  REGION 1..241: note = tr|A0A2T4D161|A0A2T4D161_9GAMM 7-cyano-7-deazaguanine synthase OS=Idiomarina aestuarii; OX = 624146 GN=queC PE=3 SV=1
MKTIVVCSGGLDSVTLAHKVAAEHNLHYLISFNYGQRHKKELDYAARAARDLGVKHHIVDLTPVGALLTGSSLTSDDIAVPDGHYAEETMRITVVPNRNAIMLAVAFGAAASAGADAVAAAVHGGDHFIYPDCRPDFIKSFQTMQNHALEGMRDVSLYTPFLHGSKADIAAEAGRLGLPIDRTWSCYKGGETHCGRCGTCVERREALELARVPDPTVYVDRDYWKQARAAHMARSLGASGN

SEQ ID NO: 38831 - protein, 222 aa, Idiomarina aestuarii
  REGION 1..222: note = tr|A0A2T4CXK3|A0A2T4CXK3_9GAMM 7-cyano-7-deazaguanine synthase OS=Idiomarina aestuarii; OX = 624146 GN=queC PE=3 SV=1
MTKRAVILLSGGLDSVTALAIAKAEGYECFTISFDYGQRHKTELFAAENLAKKSGVASHKVIQIDLRAIGGSALTDDIDVPETEQQGIPITYVPARNTVFLSIALGWAEVLNAEAIFVGVNAVDYSGYPDCRPEFIDAFEKLANLATKSAVEGSAIYIKAPLMHLSKSEIVKLGTELGIDYSETVSCYQADAQGRACGQCDSCRFRRQGFIDAGLADPTRYQ

SEQ ID NO: 38832 - protein, 218 aa, unidentified
  source 1..218: note = Idiomarina aquatica
  REGION 1..218: note = tr|A0A4R6PMI5|A0A4R6PMI5_9GAMM 7-cyano-7-deazaguanine synthase OS=Idiomarina aquatica; OX = 1327752 GN=queC PE=3 SV=1
MSQKVVVIYSGGMDSFTVLNKALQQGLDVSALSFNYGQRHVKELDVAANVCKSLEIPHKIVDITAINSLLAGSSLTDDIDIPEGHYEQESMKSTVVPNRNMILLSLAIGYAVSENAQAVYYGAHSGDHAIYPDCRPEFVRQMNVVSKLANYDPVEVVAPYLDVDKNAILADGLKMGLDYSNTWTCYNGRDKACGKCGACIERLEAFAANEQSDPLSYE

SEQ ID NO: 38833 - protein, 206 aa, unidentified
  source 1..206: note = Idiomarina aquatica
  REGION 1..206: note = tr|A0A4R6P7U7|A0A4R6P7U7_9GAMM 7-cyano-7-deazaguanine synthase OS=Idiomarina aquatica; OX = 1327752 GN=DEU29_11179 PE=3 SV=1
MKQAMLIASGGLDSTTVAYELVNQGVVVKPVFFDYGQHCVETEWKRLNEVLPNGVEPPERIDISGIFKGSSSRLVLEANLWKDPVKDDDLYIPYRTMLFFAAAAARAQTLGIFDVFTGFINSNHAKEIDCSASFLNGLDELAENVGVVRFHSPFRYSSKRDVLEKALELKVPVGRTFSCQAASLFPCGACPNCVERLNALHELNLI

SEQ ID NO: 38834 - protein, 219 aa, unidentified
  source 1..219: note = Idiomarina aquimaris
  REGION 1..219: note = tr|A0A432XAX5|A0A432XAX5_9GAMM 7-cyano-7-deazaguanine synthase OS=Idiomarina aquimaris; OX = 641841 GN=queC PE=3 SV=1
MAKVVVIYSGGMDSFTVLHRALRDGHEVYGLSFNYGQRHVKELEVARKVTNALNVPHKVVDITAINELIANSSLTSNTTDIPEGHYEEASMQSTVVPNRNMILLSLAIGYAVSIGAEAVYYGAHSGDHAIYPDCRPEFVQRMNEVSKIANYEPVEIAVPYLANDKAEILRDGLAMGLDYSNTWTCYNGREKACGKCGACVERLEAFAANNATDPLSYES

SEQ ID NO: 38835 - protein, 221 aa, unidentified
  source 1..221: note = Idiomarina atlantica
  REGION 1..221: note = tr|A0A094J5P7|A0A094J5P7_9GAMM 7-cyano-7-deazaguanine synthase OS=Idiomarina atlantica; OX = 1517416 GN=queC PE=3 SV=1
MAKVVVIYSGGMDSFTVLHRAIKDGHEVYALSFNYGQRHVKELDVARQVTNQLGVPHKIVDISAINELIANSSLTSDAAAIPEGHYEEASMQSTVVPNRNMILLSLAIGYAVSIGAEAVYYGAHSGDHAIYPDCRPEFVQKMNDVSRIANYEPIEIAVPYLHCNKGEILADGLAMGLDYGHTWTCYNGRERACGKCGACVERLEAFASNNCVDPLAYESTT

SEQ ID NO: 38836 - protein, 72 aa, Idiomarina baltica
  REGION 1..72: note = tr|A0A348WLR8|A0A348WLR8_9GAMM 7-cyano-7-deazaguanine synthase (Fragment) OS=Idiomarina baltica OX=190892 GN=DCR58_01700 PE=3 SV=1
NRNMILLSLAIGYAVSEGASAVYYGAHSGDHAIYPDCRPEFVRQMNVVSQLANYEPVEVVAPYLDVDKNAIL

SEQ ID NO: 38837 - protein, 103 aa, Idiomarina baltica
  REGION 1..103: note = tr|A0A348WLR9|A0A348WLR9_9GAMM 7-cyano-7-deazaguanine synthase (Fragment) OS=Idiomarina baltica OX=190892 GN=DCR58_01705 PE=3 SV=1
MSQKVVVIYSGGMDSFTVLNRALEQGHEVSALSFNYGQRHVRELDVAAKVCEALNIPHKIVDITAINTLLAGSSLTDDIEIPEGHYEESSMKSTVVPNRNMIL

SEQ ID NO: 38838 - protein, 217 aa, Idiomarina donghaiensis
  REGION 1..217: note = tr|A0A432XBC2|A0A432XBC2_9GAMM 7-cyano-7-deazaguanine synthase OS=Idiomarina donghaiensis; OX = 519452 GN=queC PE=3 SV=1
MAKVVVIYSGGMDSFTVLNHAIHAGHDVYALSFNYGQRHVRELDAAAKICDSLKLSHKIVDITAMNSLMAGSSLTSDIDIPEGHYEAESMQSTVVPNRNMILLSLAIGYAVSIDAEAVYYGAHSGDHAIYPDCRPEFVEKMNAVSLIANYQPVRIEVPFLHNNKAEILAAGLAMGLDYSQTWTCYNGRDKACGKCGACIERLEAFAANQQTDPLPYE

SEQ ID NO: 38839 - protein, 219 aa, Idiomarina fontislapidosi
  REGION 1..219: note = tr|A0A432YBA1|A0A432YBA1_9GAMM 7-cyano-7-deazaguanine synthase OS=Idiomarina fontislapidosi OX=263723 GN=queC PE=3 SV=1
MSQKVVVIYSGGMDSFTVLNKALQQGHEVSALSFNYGQRHVRELDVAAKVCKDLGIPHKVVDITAINGLLAGSSLTDDIDIPEGHYEESSMKSTVVPNRNMILLSLAIGYAVSEGASAVYYGAHSGDHAIYPDCRPEFVRQMNVVSQLANYEPIEVVAPYLDVDKNAILADGLRMALNYADTWTCYNGRDKACGKCGACVERLEAFAANGVKDPLPYEA

SEQ ID NO: 38840 - protein, 217 aa, unidentified
  source 1..217: note = Idiomarina halophila
  REGION 1..217: note = tr|A0A432XRK6|A0A432XRK6_9GAMM 7-cyano-7-deazaguanine synthase OS=Idiomarina halophila; OX = 1449799 GN=queC PE=3 SV=1
MAKVVVIYSGGMDSFTVLNRAIRDGHEVHALSFNYGQRHVKELDVAAKVTSELGVSHKIVDIRAINELLASSLTSADAAIPEGHYQEDSMKSTVVPNRNMILLSLAIGYAVSLEANAVYYGAHSGDHAIYPDCRPEFVKRMNDVSLIANYEPVAIEVPYLDNDKAQILADGLAMGLDYSQTWTCYNGRHLACGKCGACVERLEAFAANQTRDPLPYE

SEQ ID NO: 38841 - protein, 218 aa, Idiomarina homiensis
  REGION 1..218: note = tr|A0A432XSU3|A0A432XSU3_9GAMM 7-cyano-7-deazaguanine synthase OS=Idiomarina homiensis; OX = 364198 GN=queC PE=3 SV=1
MAKVVVIYSGGMDSFTVLHRAIRDGHDVYALSFDYGQRHVKELTVAAEVTRGLNIPHKIVDITAINELISNSSLTSTSTAIPEGHYEEASMQSTVVPNRNMILLSLAIGYAVSIGAEAVYYGAHSGDHAIYPDCRPEFVQRMNDVSRIANYEPIEIAVPYLTNDKAEILRDGLAMGLDYKNTWTCYNGRDKACGKCGACVERLEAFAANNTVDPLAYE

SEQ ID NO: 38842 - protein, 221 aa, unidentified
  source 1..221: note = Idiomarina indica
  REGION 1..221: note = tr|A0A1G6E1H7|A0A1G6E1H7_9GAMM 7-cyano-7-deazaguanine synthase OS=Idiomarina indica; OX = 1159017 GN=queC PE=3 SV=1
MAKVVVIYSGGMDSFTVLHHALQQGHEIFAISFNYGQRHVRELDAAAQVCQQLNIPHKVVDITAINSLLAGSSLTSDIAIPEGEYAEDNMRSTVVPNRNMILLSLAIGYAVSIEAEAVYYGAHSGDHDIYPDCRPEFVEKMNAVSLIANYEPIRIEVPYLHSDKAEILAAGLAMDLDYSQTWTCYNGREKACGKCSACSERLAAFAANQVVDPLAYEEESA

SEQ ID NO: 38843 - protein, 218 aa, Idiomarina insulisalsae
  REGION 1..218: note = tr|A0A432Y8M4|A0A432Y8M4_9GAMM 7-cyano-7-deazaguanine synthase OS=Idiomarina insulisalsae; OX = 575789 GN=queC PE=3 SV=1
MAKVVVIYSGGMDSFTVLHRALRDGHEVYALSFNYGQRHVKELEVAHQVTTQLGLPHKIVDITAINELIANSSLTSSDVDIPEGHYEEVSMKSTVVPNRNMILLSLAIGYAVSIEAQAVYYGAHSGDHAIYPDCRPEFVKRMNDVSQIANYQPIEIAVPYLDCDKGEILKDGLAMGLDYRQTWTCYNGREKACGKCGACVERLEAFAANQVTDPLPYE

SEQ ID NO: 38844 - protein, 218 aa, Idiomarina loihiensis
  REGION 1..218: note = sp|Q5QUZ6|QUEC_IDILO 7-cyano-7-deazaguanine synthase; OS = Idiomarina loihiensis (strain ATCC BAA-735 / DSM 15497 / L2-TR) OX=283942 GN=queC PE=3 SV=1
MSQKVVVIYSGGMDSFTVLHRALAEGNEVLALSFNYGQRHVKELEVAGNVCKQHGIPHKVVDITAINSLLSGSSLTDDIDIPEGHYEEESMKSTVVPNRNMILLSLAIGYAVSEEASAVYYGAHSGDHAIYPDCRPEFVRQMDVVSKMANYEPVAVHAPYLDVDKNAILADGIKMGLDYSQTWTCYNGRDKACGKCGACQERLEAFAANGIEDPIAYE

SEQ ID NO: 38845 - protein, 185 aa, Idiomarina loihiensis
  REGION 1..185: note = tr|A0A349C4J0|A0A349C4J0_9GAMM 7-cyano-7-deazaguanine synthase (Fragment) OS=Idiomarina loihiensis OX=135577 GN=queC PE=3 SV=1
FNYGQRHVKELEVAANVCKQHGIPHKVVDITAINSLLSGSSLTDDIDIPEGHYEEESMKSTVVPNRNMILLSLAIGYAVSEEASAVYYGAHSGDHAIYPDCRPEFVRQMDVVSKMANYEPVAVHAPYLDVDKNAILADGIKMGLDYSQTWTCYNGRDKACGKCGACQERLEAFAANGIEDPIAYE

SEQ ID NO: 38846 - protein, 218 aa, Idiomarina marina
  REGION 1..218: note = tr|A0A432YAN7|A0A432YAN7_9GAMM 7-cyano-7-deazaguanine synthase OS=Idiomarina marina; OX = 502366 GN=queC PE=3 SV=1
MAKVVVIYSGGMDSFTVLHHAVRHGHEVYALSFNYGQRHVRELDAAARVCQQLGIPHKVVDITAINSLLAGSSLTSDIEIPEGHYAEASMQSTVVPNRNMILLSLAIGYAVSLGAEAVYYGAHSGDHAIYPDCRPEFVEKMNAVSLIANYEPVRIEVPYLRNNKAEILADGLRMNLDYSQTWTCYNGREKACGKCGACVERLEAFATNQVTDPLQYES

SEQ ID NO: 38847 - protein, 218 aa, Idiomarina maritima
  REGION 1..218: note = tr|A0A1I6I240|A0A1I6I240_9GAMM 7-cyano-7-deazaguanine synthase OS=Idiomarina maritima; OX = 519453 GN=queC PE=3 SV=1
MAKVVVIYSGGMDSFTVLHHAVQQGHEVYALSFNYGQRHVRELDAAAAVCLQLDIPHKVVDITAINSLLAGSSLTSDIDIPEGHYAEASMQSTVVPNRNMILLSLAIGYAVSIGAEAVYYGAHSGDHAIYPDCRPEFVEKMNAVSLIANYEPIRIEVPYLRNDKAEILADGLRMNLDYSQTWTCYNGRDKACGKCGACVERLEAFAANQVTDPLPYES

SEQ ID NO: 38848 - protein, 217 aa, Idiomarina maritima
  REGION 1..217: note = tr|A0A317Q6X0|A0A317Q6X0_9GAMM 7-cyano-7-deazaguanine synthase OS=Idiomarina maritima; OX = 519453 GN=queC PE=3 SV=1
MAKVVVIYSGGMDSFTVLHHALAHGHEVYALSFNYGQRHVKELEVAAQVCQQLNVNHKVVDITAINQLLAGSSLTSDIAIPEGHYEAQSMKSTVVPNRNMILLSLAIGYAVSLEAEAVYYGAHSGDHFIYPDCRPEFVEKMNEVSLIANYEPVRIEVPYLHQDKAAILADGISMSLDYSQTWTCYNGRDKACGKCGACVERLEAFAANHQVDPLPYE

SEQ ID NO: 38849 - protein, 219 aa, unidentified
  source 1..219: note = Idiomarina piscisalsi
  REGION 1..219: note = tr|A0A432YVM6|A0A432YVM6_9GAMM 7-cyano-7-deazaguanine synthase OS=Idiomarina piscisalsi; OX = 1096243 GN=queC PE=3 SV=1
MSQKVVVIYSGGMDSFTVLHKALQEGNEVLALSFNYGQRHVKELEVAANVCKQHGIPHKVVDITTINQLLSGSSLTDDIDIPEGHYEEESMKSTVVPNRNMILLSLAIGYAVSQKASAVYYGAHSGDHAIYPDCRPEFVRQMDVVSKMANYEPVAVHAPYLDVDKNAILADGLKMGLDYSQTWTCYNGRDKACGKCGACVERLEAFAANGVEDPIPYEA

SEQ ID NO: 38850 - protein, 218 aa, unidentified
  source 1..218: note = Idiomarina planktonica
  REGION 1..218: note = tr|A0A1Y6EN10|A0A1Y6EN10_9GAMM 7-cyano-7-deazaguanine synthase OS=Idiomarina planktonica; OX = 1323738 GN=queC PE=3 SV=1
MAQKVVVIYSGGMDSFTVLHRALADGCEVYALSFDYGQRHSKELKYAANVCEKQGIPHKIVDITAINQLLAGSSLTDNIDIPEGHYEEDSMKSTVVPNRNMILLSLAIGYAVSLKADAVYYGAHSGDHAIYPDCRPEFVLKMNEVSLLANYELVAVHSPYLEQDKAAILADGIAMGLDYANTWTCYNGREKACGKCGACVERMEAFAANQQTDPIPYE

SEQ ID NO: 38851 - protein, 218 aa, Idiomarina ramblicola
  REGION 1..218: note = tr|A0A432YZ19|A0A432YZ19_9GAMM 7-cyano-7-deazaguanine synthase OS=Idiomarina ramblicola; OX = 263724 GN=queC PE=3 SV=1
MSQKVVVIYSGGMDSFTVLHKALAEGNEVLALSFNYGQRHVKELEVAANVCKQHGIPHKLVDITAINSLLSGSSLTDNIDIPEGHYEEESMKSTVVPNRNMILLSLAIGYAVSENASAVYYGAHSGDHAIYPDCRPEFVRQMDVVSKMANYEPVAVHAPYLDVDKNAILADGIKMGLDYSQTWTCYNGRHEACGKCGACQERLEAFAANGIEDPLSYE

SEQ ID NO: 38852 - protein, 217 aa, Idiomarina salinarum
  REGION 1..217: note = tr|A0A094IWA3|A0A094IWA3_9GAMM 7-cyano-7-deazaguanine synthase OS=Idiomarina salinarum; OX = 435908 GN=queC PE=3 SV=1
MAKVVVIYSGGMDSFTVLHHALQQGHEVYALSFNYGQRHVRELDSAAAVCKQANIPHKIVDITAINQLLAGSSLTDDIDIPEGHYESVSMQSTVVPNRNMILLSLAIGYAVSIEAEAVCYGAHSGDHAIYPDCRPEFVLKMNDVSQIANYQPVTIDVPFLQNNKAEILAAGLAMGLDYGQTWTCYNGRELACGKCGACIERLEAFAANNQTDPLAYE

SEQ ID NO: 38853 - protein, 223 aa, Idiomarina sediminum
  REGION 1..223: note = tr|A0A432YZM5|A0A432YZM5_9GAMM 7-cyano-7-deazaguanine synthase OS=Idiomarina sediminum; OX = 431675 GN=queC PE=3 SV=1
MAKVVVIYSGGMDSFTVLNRALKDGHEVYALSFNYGQRHVKELEVAAEVTQRLNIPHKIVDITAINQLLAGSSLTSDAIAIPEGDYEEESMKSTVVPNRNMILLSLAIGYAVSLEAQAVYYGAHSGDHAIYPDCRPEFVKRMQEVSAIANYEPIAIEVPYLNADKGEILRDGLAMGLDYKQTWTCYNGREKACGKCGACVERLDAFAANQVTDPLEYEATSAS

SEQ ID NO: 38854 - protein, 218 aa, Idiomarina seosinensis
  REGION 1..218: note = tr|A0A432ZH00|A0A432ZH00_9GAMM 7-cyano-7-deazaguanine synthase OS=Idiomarina seosinensis; OX = 281739 GN=queC PE=3 SV=1
MSQKVVVIYSGGMDSFTVLNKALQQGHEVSALSFNYGQRHVKELDVAAKVCAELGVPHKVVDITAINTLLAGSSLTDDIEIPEGHYQEQSMQSTVVPNRNMILLSLAIGYAVSEQASAVYYGAHSGDHAIYPDCRPEFVRQMNVVSQLANYEPVAVVAPYLEDDKNEILADGIRMGLDYEKTWTCYNGRDKACGKCGACIERLEAFAANGLNDPLPYE

SEQ ID NO: 38855 - protein, 218 aa, Idiomarina sp.
  REGION 1..218: note = tr|A0A2D9G214|A0A2D9G214_9GAMM 7-cyano-7-deazaguanine synthase OS=Idiomarina sp.; OX = 1874361 GN=queC PE=3 SV=1
MSQKVVVIYSGGMDSFTVLHKALQEGNEVLALSFNYGQRHVKELEVAANVCKQHGIPHKVVDITAINSLLSGSSLTDDIDIPEGHYEEESMKSTVVPNRNMILLSLAIGYAVSENASAVYYGAHSGDHAIYPDCRPEFVRQMDVVSKMANYDPVAVHAPYLDVDKNAILADGLKMGLDYSQTWTCYNGRDKACGKCGACQERLEAFAANGMEDPIPYE

SEQ ID NO: 38856 - protein, 219 aa, Idiomarina sp.
  REGION 1..219: note = tr|A0A139C459|A0A139C459_9GAMM 7-cyano-7-deazaguanine synthase OS=Idiomarina sp. T82-3; OX = 1794809 GN=queC PE=3 SV=1
MSQKVVVIYSGGMDSFTVLNRALEQGHEVSALSFNYGQRHVRELDVAAKVCEALNIPHKIVDITAINTLLAGSSLTDDIEIPEGHYEESSMKSTVVPNRNMILLSLAIGYAVSEGASAVYYGAHSGDHAIYPDCRPEFVRQMNVVSQLANYEPVEVVAPYLDVDKNAILADGLRMELNYADTWTCYNGRDKACGKCGACVERLEAFAANGVTDPLPYEA

SEQ ID NO: 38857 - protein, 217 aa, Idiomarina tainanensis; identical to SEQ ID NO: 38848
  REGION 1..217: note = tr|A0A368UNZ6|A0A368UNZ6_9GAMM 7-cyano-7-deazaguanine synthase OS=Idiomarina tainanensis; OX = 502365 GN=queC PE=3 SV=1

SEQ ID NO: 38858 - protein, 218 aa, Idiomarina taiwanensis
  REGION 1..218: note = tr|A0A432ZC40|A0A432ZC40_9GAMM 7-cyano-7-deazaguanine synthase OS=Idiomarina taiwanensis; OX = 337250 GN=queC PE=3 SV=1
MMAKVVVIYSGGMDSFTVLHRAIQDGHDVHAISFNYGQRHVKELDYARSVCREHGIPHKVVDISAINELLAGSSLTDDIEIPEGHYEEESMKSTVVPNRNMILLSLAIGYAVSLEASAVYYGAHSGDHAIYPDCRPEFVQKMQAVSAIANYEPISIEVPFLHDDKAQILAAGLAMGLDYSQTWTCYKGLEQACGHCGACVERLEAFAANNTQDPLSYL

SEQ ID NO: 38859 - protein, 198 aa, unidentified
  source 1..198: note = Idiomarina tyrosinivorans
  REGION 1..198: note = tr|A0A432ZSR4|A0A432ZSR4_9GAMM 7-cyano-7-deazaguanine synthase OS=Idiomarina tyrosinivorans OX=1445662 GN=CWI84_02220 PE=3 SV=1
MTNSVLLLSGGLDSIALAYWLRPSRCLFVNYGQLPASAEHAAAGQICNSLNIPLEELTLPLENLGAGDMSGNSSSEHSPHSEFWPFRNQILITLGAMMALRYELDSVLIGTVSTDSKHKDGTVDFRDACNKLLGIQEGSVSVEAPAASMTTEQLIHESGVPVSLMGWAHSCHTSNVACGECPGCYKQSELMGSMGINR

SEQ ID NO: 38860 - protein, 220 aa, unidentified
  source 1..220: note = Idiomarina tyrosinivorans
  REGION 1..220: note = tr|A0A432ZRN0|A0A432ZRN0_9GAMM 7-cyano-7-deazaguanine synthase OS=Idiomarina tyrosinivorans OX=1445662 GN=queC PE=3 SV=1
MAQKVVVIYSGGMDSFTVLHHALQQGKSVYALSFDYGQRHVKELDVARSVCENLEIPHKIVDITSINQLLKGSSLTDDMAIPEGHYEEASMQSTVVPNRNMILLSLAIGYAASIEAEAVYYGAHSGDHAIYPDCRPEFVRQMDVASRLANYQPIAVEAPFLTQSKDDILAAGLAMGLDYSATWTCYNGREKACGRCGACNERLEAFRNNGATDPLPYEDA

SEQ ID NO: 38861 - protein, 217 aa, unidentified
  source 1..217: note = Idiomarina woesei
  REGION 1..217: note = tr|A0A0K6HC70|A0A0K6HC70_9GAMM 7-cyano-7-deazaguanine synthase OS=Idiomarina woesei; OX = 1381080 GN=queC PE=3 SV=1
MAKVVVIYSGGMDSFTVLNHAIHAGHDVFALSFNYGQRHVRELDAAAEVCQSLKVPHKIVDITAMNSLMAGSSLTSDIDIPEGHYEEKSMQSTVVPNRNMILLSLAIGYAVSIGAEAVYYGAHSGDHAIYPDCRPEFVKKMNDVSLIANYEPVRIEVPFLHNDKTEILAAGLAMGLDYSHTWTCYNGRDKACGKCGACVERLEAFAANQQTDPLPYE

SEQ ID NO: 38862 - protein, 220 aa, Idiomarina xiamenensis
  REGION 1..220: note = tr|K2KYK2|K2KYK2_9GAMM 7-cyano-7-deazaguanine synthase OS=Idiomarina xiamenensis 10-D-4 OX=740709; GN = queC PE=3 SV=1
MTKSVVVIYSGGMDSFTVLHRAIADGFDVYALSFDYGQRHKKELDVAAKVCKSNGISHKIVDITAINSLVGGSALTDDIDVPEGHYQEQSMKSTVVPNRNMILLSLAIGYAVSVGAEAVYYGAHSGDHAIYPDCRPEFVEKMNDVSLIANYEAIRVHSPYLYQDKSDILADGLAMGLDYANTWTCYNGREQACGRCGACVERLEAFAAQGVSDPLSYAAT

SEQ ID NO: 38863 - protein, 219 aa, Idiomarina zobellii
  REGION 1..219: note = tr|A0A1G7LIA6|A0A1G7LIA6_9GAMM 7-cyano-7-deazaguanine synthase OS=Idiomarina zobellii; OX = 86103 GN=queC PE=3 SV=1
MSQKVVVIYSGGMDSFTVLHKALQEGNEVLALSFNYGQRHVKELEVASNVCKQHGIPHKVVDITAINQLLSGSSLTDDIEIPEGHYEEESMKSTVVPNRNMILLSLAIGYAVSQEASAVYYGAHSGDHAIYPDCRPEFVRQMDVVSKMANYEPVAVHAPYLDVDKNAILADGLKMGLDYSQTWTCYNGRDKACGKCGACVERLEAFAANGVEDPIPYEA

SEQ ID NO: 38864 - protein, 219 aa, unidentified
  source 1..219: note = Idiomarinaceae bacterium
  REGION 1..219: note = tr|A0A2D6I6V5|A0A2D6I6V5_9GAMM 7-cyano-7-deazaguanine synthase OS=Idiomarinaceae bacterium OX=1898113 GN=queC PE=3 SV=1
  VARIANT 71: note = Xaa can be any naturally occurring amino acid
  VARIANT 100: note = Xaa can be any naturally occurring amino acid
MSQKVVVIYSGGMDSFTVLNRALEQGHEVSALSFNYGQRHVRELDVAAKVCEALNIPHKIVDITAINTLLXGSSLTDDIEIPEGHYEESSMKSTVVPNRXMILLSLAIGYAVSEGASAVYYGAHSGDHAIYPDCRPEFVRQMNVVSQLANYEPVEVVAPYLDVDKNAILADGLRMDLNYADTWTCYNGRDKACGKCGACVERLEAFAANGVTDPLPYEA

SEQ ID NO: 38865 - protein, 223 aa, unidentified
  source 1..223: note = Idiomarinaceae bacterium
  REGION 1..223: note = tr|A0A0P7XAL2|A0A0P7XAL2_9GAMM 7-cyano-7-deazaguanine synthase OS=Idiomarinaceae bacterium HL-53 OX=1298881 GN=queC PE=3 SV=1
MSQSDAKNALVVIYSGGMDSFTVLNKAVATGKAVYALSFNYGQRHKKELEYAVNVCKKLGISHKVVDISAINSLLAGSSLTDDIDVPDAEYAESNMKSTVVPNRNMILLSLAIGYAVSIQAQEVWYGAHSGDHAIYPDCRPEFVEAMNQVSLIANYEPIPVISPYLYQSKSEILADGIAMGLDYAQTWTCYNGRDKACGRCSACRERLQAFAENQLTDPLAYE

SEQ ID NO: 38866 - protein, 218 aa, unidentified
  source 1..218: note = Ignatzschineria cameli
  REGION 1..218: note = tr|A0A2U2ATW5|A0A2U2ATW5_9GAMM 7-cyano-7-deazaguanine synthase OS=Ignatzschineria cameli; OX = 2182793 GN=queC PE=3 SV=1
MNQNRAIVVFSGGQDSTTCLFWAKEQFEEVIALTFDYGQRHCNEVDHAKAIAEELDVELIVFELDLFSRLTKNALIDENLAIESHDGEPPSTFVPGRNHLFFSIAAMVAYQRMAQHIIVGVSETDFSGYPDCRDNFIKSLNVTLNLAMDASFELHAPLMWRDKAGVWALADQLGAFDYIQDRTLTCYNGIPASGCGECPACILRNNGLNQYLAQRKEK

SEQ ID NO: 38867 - protein, 218 aa, Ignatzschineria indica
  REGION 1..218: note = tr|A0A2U2ALP6|A0A2U2ALP6_9GAMM 7-cyano-7-deazaguanine synthase OS=Ignatzschineria indica; OX = 472583 GN=queC PE=3 SV=1
MNQNRAIVVFSGGQDSTTCLFWAKERFEDVIALTFDYGQRHSNEVDHARAIAEELGVELIVFELDLFSRLTKNALTDESLTIESHDGEPPSTFVPGRNHLFFSIAAMVAYQRMAKHIVVGVSETDFSGYPDCRDNFIKSLNVTLNLAMDAAFELHTPLMWRDKAEVWALSDELGAFDYVRERTLTCYNGIPASGCGECPACILRNNGLNHYLAQRKEK

SEQ ID NO: 38868 - protein, 218 aa, Ignatzschineria sp.
  REGION 1..218: note = tr|A0A256CIW4|A0A256CIW4_9GAMM 7-cyano-7-deazaguanine synthase OS=Ignatzschineria sp. F8392 OX=1980117 GN=queC PE=3 SV=1
MNQNRAIVVFSGGQDSTTCLFWAKERFKDVIALTFDYGQRHSNEVDHAKAIAKELDVELIVFELDLFSRLTKNALTDENLAIESHDGEPPSTFVPGRNHLFFSIAAMVAYQRMAQHIIVGVSETDFSGYPDCRDNFIKSLNVTLNLAMDASFELHAPLMWRDKAAVWALADQLGAFDYIQDRTLTCYNGIPASGCGECPACILRNNGLNQYLAQCKEK

SEQ ID NO: 38869 - protein, 217 aa, Ignatzschineria ureiclastica
  REGION 1..217: note = tr|A0A2U2ACY4|A0A2U2ACY4_9GAMM 7-cyano-7-deazaguanine synthase OS=Ignatzschineria ureiclastica OX=472582 GN=queC PE=3 SV=1
MKQQRAIVVFSGGQDSTTCLFWAKERFQEVIALTFDYGQRHQQEVQHAKAIAKELGVEWLPFQLDLFSKLTQNALTSNQVNIEQKEGELPSTFVPGRNHLFFSIAAMVAYQREAQHIIVGVSQTDFSGYPDCRDNFVKSLNVTLNLAMEADFQIHTPLMWLDKKEVWALSDQLGAFDYIQQKTLTCYEGIPASGCGVCPACILRQKGLEAYLAEKGE

SEQ ID NO: 38870 - protein, 227 aa, unidentified
  source 1..227: note = Ignavibacteria bacterium
  REGION 1..227: note = tr|A0A2M7MLV8|A0A2M7MLV8_9BACT 7-cyano-7-deazaguanine synthase OS=Ignavibacteria bacterium CG_4_10_14_3_um_filter_37_18 OX=1974037 GN=queC; PE = 3 SV=1
MNKPLAVIAVSGGMDSCVTAAILNEKYELAFAHFNYGQRTETRELKAFNDVADFYNVQHRLLIDFSHFHKIGGSSLTDFHLAVEKADLENKEVPSSYVPFRNANILSACVSWAEVIKAEAVGIGAVYEDASGYPDCRPQFYSAFEKMVDEGTKPETKIKILTPIINLSKAEIVKKGTELKAPLHLTWSCYQSEDEACGVCDSCAFRLRGFQQAGVEDPIPYKVKPKY

SEQ ID NO: 38871 - protein, 579 aa, unidentified
  source 1..579: note = Ignavibacteria bacterium
  REGION 1..579: note = tr|A0A1G0VKD4|A0A1G0VKD4_9BACT Uncharacterized protein OS=Ignavibacteria bacterium RIFOXYB2_FULL_37_11; OX = 1798448 GN=A2299_00835 PE=4 SV=1
MSNFIEHVVWCNGVKVKKQKGDAKCLILDHRDGAKDKNVNLNLRSFVTDIYKLSNRGKDLLEIAGYVFAADRLSYRGHERDLEYHSWSRTFHFNIAVRDLNFWKKAEVQELLSEALCFMSGDHSYSFTFCKAEEDLPTNFFDNDSFKIDKPNNLKVALYSGGLDSLAGIIESLETTDAEVCMVSHQSGQPGVINTQQNLYEVLANIYPNRCKHYKFHCGFSHTKSIDETQRTRSFLYTATAFAIANTYEQDCIYVYENGITSINFADTQDLMNARASRTTHPKTIGLLEKLFTKIAEKPFKIQHPYLFKTKTEVVDILKKYNREFTLDVAVSCSSTRNHPSGFSHCGICSQCIDRRFAVYAAEVEKFDEGGLYHTDFVKNGIDEIPHIKALTDYIRLAQEFKDIDIDGFYLNRAREIVDVEEYIEGADDQERLMKIYELTQKHSKNIEHALNQMRRIFDSPLAHPNPNSIFNTIIAPRTYQNVKLVVEDDYLEGKEIPPKTMKKLATEACESLVRKELITDVLDETRKNRPISTLVVTELRRKGYKVTQRQANTINDYFRKAQIQIKKENNGGLKVVSE

SEQ ID NO: 38872 - protein, 234 aa, unidentified
  source 1..234: note = Ignavibacteriae bacterium
  REGION 1..234: note = tr|A0A3N5JWI1|A0A3N5JWI1_9BACT 7-cyano-7-deazaguanine synthase OS=Ignavibacteriae bacterium OX=2026749 GN=queC PE=3 SV=1
MSKPRAVVLVSGGMDSCVTAAIAHLQYNCAFLHVNYGQRTERRELKAFHALADYYGVEHRLIADLTHLKSIGGSSLTDISMKVATADPETLFHSKHNDIPTSYVPFRNANILSVAVSWAEVVGAEQIFIGAVEEDSSGYPDCRKEFYDAFNSVIRLGTKPETTISINTPVIQLKKSEIVQRGMELHAPFHLTWSCYTNEDRACGVCDSCALRLRAFQIAGIEDPIPYILKPDYR

SEQ ID NO: 38873 - protein, 228 aa, unidentified
  source 1..228: note = Ignavibacteriae bacterium
  REGION 1..228: note = tr|A0A2N1V6I7|A0A2N1V6I7_9BACT 7-cyano-7-deazaguanine synthase OS=Ignavibacteriae bacterium HGW-Ignavibacteriae-4 OX=2013811 GN=queC PE=3; SV = 1
MSKLAVVLLSGGMDSAVTAAIAKESGYDIACLHLNYGQRTEKRELKQFDELCNHFGAVSSMVTDVRFLSQIGGSSLTDERIEITDANLDSNEIPSSYVPFRNANILAMATSWAEVIGATALYIGAVYEDSSGYPDTRRDFFDAFEKIIEKGTKPETNIKIITPIIDMGKDEIISKGLELGVPFDKTWSCYKNNEKACGKCDSCGLRLRAFEKLGISDPVEYEIRLSYK

SEQ ID NO: 38874 - protein, 229 aa, unidentified
  source 1..229: note = Ignavibacteriales bacterium
  REGION 1..229: note = tr|A0A2M7ZFC2|A0A2M7ZFC2_9BACT 7-cyano-7-deazaguanine synthase OS=Ignavibacteriales bacterium CG_4_9_14_3_um_filter_34_10 OX=1974044 GN=queC; PE = 3 SV=1
MKSKLAVVAASGGMDSCVTAAIANQKYELALAHFNYGQRTEKRELKAFNDIADFYNAKHRLVIDFSHFAKIGGSSLTDKSIEVTKADLSSKEVPNSYVPFRNANILSACVSWAEVIGAEAIFIGAVYEDASGYPDCRPDFYSAFEKMIDIGTKPETKIKIETPIINLSKAEIVKKGIELNAPLHLTWSCYQNEDEACGVCDSCAFRLRGFQQAEIEDPIPYKVKPKYNL

SEQ ID NO: 38875 - protein, 235 aa, unidentified
  source 1..235: note = Ignavibacteriales bacterium
  REGION 1..235: note = tr|A0A2M7I267|A0A2M7I267_9BACT 7-cyano-7-deazaguanine synthase OS=Ignavibacteriales bacterium CG12_big_fil_rev_8_21_14_0_65_30_8 OX=1974046; GN = queC PE=3 SV=1
MENKKTAVVALSGGMDSCVTAAIASQKFDLALIHINYGQRTQERELKAFHDIADFYGIEKKLVIDFTHFNKIGGSSLTDKKIKVAKADLKNKSSLSAERQIPSSYVPFRNANILSVCVSWAEVIGAEAVFIGAVYEDSSGYPDCRPVFFESFEKAVNNGTRPETKIKIITPIIHMSKKDIVLKGYELKAPLQLTWSCYQNENEACGVCDSCALRLRGFIQAGKEDPIKYKIRPEY

SEQ ID NO: 38876 - protein, 231 aa, Ignavibacterium album
  REGION 1..231: note = tr|I0AG95|I0AG95_IGNAJ 7-cyano-7-deazaguanine synthase OS=Ignavibacterium album (strain DSM 19864 / JCM 16511 / NBRC 101810 / Mat9-16) OX=945713 GN=queC PE=3 SV=1
METDKRKIAVVAVSGGMDSCVTAAIANRNYELAFAHINYGQRTEKRELKAFNDIADYFNVKYRLIIDYTHLSKIGGSSLTDFNIDVSKANLNNKEIPSSYVPFRNANILAACVSWAEVIGAEAVFIGAVYEDSSGYPDCRPEFFEAFEKMVELGTKPETHIKIKTPIINFSKEQIVKKGIELNAPLHLTWSCYQNEDEACGICDSCALRLRGFQKAGINDPIPYKTKPIYV

SEQ ID NO: 38877 - protein, 231 aa, Ilumatobacter fluminis
  REGION 1..231: note = tr|A0A4R7HVR2|A0A4R7HVR2_9ACTN 7-cyano-7-deazaguanine synthase OS=Ilumatobacter fluminis; OX = 467091 GN=queC PE=3 SV=1
MKTKPRAVVLLSGGLDSTTVLAAAQNEGYECYALSFDYGQRHDVELEAARKVAEAMGAADHVIAKIDLRSFGGSALTADLEVPKGRAIDEMESGIPITYVPARNTIFLSFAMAWAETLEASDIFVGVNALDYSGYPDCRPEFIEAFERMANLATKGGVEGTTKTVIHAPLMELTKAGIIELGQTLGVDYGLTHSCYDPDDAGRPCGQCDSCLLRAKGFAEAGLSDPALNVA

SEQ ID NO: 38878 - protein, 222 aa, Ilyobacter polytropus
  REGION 1..222: note = tr|E3HCY0|E3HCY0_ILYPC 7-cyano-7-deazaguanine synthase OS=Ilyobacter polytropus (strain DSM 2926 / CuHBu1) OX=572544 GN=queC PE=3 SV=1
MQNIIDKDRCVLVFSGGQDSSTLLFWAKKKFKEVIALSFNYGQKHDLELQCAKDICKKYDVEHHILDMGLLSQLAPNALTRTDIKVDKEAPEGGLPNTFVDGRNMIFLTFASIFAKQRNINHVITGVSQSDFSGYPDCRDIFIKSISTTLSLAMDYQFVIDTPLMWLDKAETWKMADDLGVLDIIKNETLTCYNGIIGNGCGECPACKLRKNGYVEFKRKFK

SEQ ID NO: 38879 - protein, 237 aa, unidentified
  source 1..237: note = Imhoffiella purpurea
  REGION 1..237: note = tr|W9V7B6|W9V7B6_9GAMM 7-cyano-7-deazaguanine synthase OS=Imhoffiella purpurea OX=1249627 GN=queC PE=3; SV = 1
MKRAVVLLSGGLDSATALAIAKSEGYAPYALSFRYGQRHAVELRSAARIAESMGVAEHVIADIDLRRFGGSALTDDLEVPKGRETDAMASGIPVTYVPARNTVFLSFALAWAEVLKASDLFIGVNALDYSGYPDCRPEYIDAFERMANLATAAGVEGRQHFHVHAPLIELSKADIIRRGLRLGVDYGLTSSCYDPGEDGRPCGACDSCSLRAKGFAEARLRDPLLARFDISISEKDS

SEQ ID NO: 38880 - protein, 229 aa, unidentified
  source 1..229: note = Immundisolibacter cernigliae
  REGION 1..229: note = tr|A0A1B1YVD2|A0A1B1YVD2_9GAMM 7-cyano-7-deazaguanine synthase OS=Immundisolibacter cernigliae OX=1810504 GN=queC PE=3 SV=1
MNESARGPAVVLLSGGLDSATVLAMARADGYLCHALSIDYGQRHGAELAAAARVAAAGGAASHRTVSVNLDAIGGSALTDVSIDVPSSPSAGIPVTYVPARNTVFLAIALGYAEVLAASAIFVGVNAVDYSGYPDCRPAFIDAFQALADVATKAGVEGQGPRIAAPLLRLSKADIVRRGQELGVDYGLTVSCYNADPQGRACGQCDACRLRAEGFRVAGVADPTVYFPA

SEQ ID NO: 38881 - protein, 254 aa, Inhella sp.
  REGION 1..254: note = tr|A0A3S2VFW0|A0A3S2VFW0_9BURK 7-cyano-7-deazaguanine synthase OS=Inhella sp. CCP-18; OX = 2499851 GN=queC PE=3 SV=1
MLARGRAGTLRRTVSKRNPDPRTALVLFSGGQDSTACLAWALDRYTNVETLGFDYRQRHRIELDCRLVVRDQIAAQFPAWRARLGPDHLLDLALLSQLSDTALTSERAIEMQANGLPNTFVPGRNLLFLTLAATVAYRRGASVLVGGMCETDYSGYPDCRDNTIKAQQLALSLGLDTPMTVETPLMFLTKAATWHLAEQLGGEALVELTREHTHTCYLGERGARHAWGHGCGHCPACELRASGHAQYLQERAGC

SEQ ID NO: 38882 - protein, 223 aa, unidentified
  source 1..223: note = Inmirania thermothiophila
  REGION 1..223: note = tr|A0A3N1XUD2|A0A3N1XUD2_9GAMM 7-cyano-7-deazaguanine synthase OS=Inmirania thermothiophila OX=1750597 GN=queC PE=3 SV=1
MSTPAVVLLSGGLDSATTLAIARARGFACHALSVRYGQRHDAELAAAARIAAALGAVAHKVVAIDLGAIGGSALTDPAIAVPTAPTEGIPVTYVPARNTVLLALALGWAEVLGAADIFVGVNAVDYSGYPDCRPAFVEAFERLANLATRAGVEGRRFRIHAPLLRLRKAEIIREGVRLGVDYALTVSCYQADAEGRACGRCDACRLRAQGFAEAGLPDPTRYR

SEQ ID NO: 38883 - protein, 228 aa, Inquilinus limosus
  REGION 1..228: note = tr|A0A0A0D152|A0A0A0D152_9PROT 7-cyano-7-deazaguanine synthase OS=Inquilinus limosus MP06; OX = 1398085 GN=queC PE=3 SV=1
MVLFSGGQDSATCLAWALQRFGRVETVGFDYGQRHRVELDVRPVVLDAIRDRFPAWAGKLGDDHMLDLSVLGQVSDTALTRDVEIAMQDNGLPNTFVPGRNLVFVTFAAALAYRRGLRHLVAGVCETDYSGYPDCRDDTMKAMQLALNLGMETRFVLHTPLMWIDKAETWGLAESLGGEALVELIRDETHSCYRGDRSQMHDWGHGCGECPACDLRAEGWRRFRAPAG

SEQ ID NO: 38884 - protein, 241 aa, Inquilinus limosus
  REGION 1..241: note = tr|A0A211ZNE0|A0A211ZNE0_9PROT 7-cyano-7-deazaguanine synthase OS=Inquilinus limosus; OX = 171674 GN=queC PE=3 SV=1
MVADQGERAAAEGALVLFSGGQDSATCLAWALERFGRVETVGFDYGQRHRVELDVRPVVLEAIRARFPDWAGRLGDDHMLDLSVLGQVSDTALTRDVEIAMQDNGLPNTFVPGRNLVFMTFAAALAYRRGLRHLVVGVCETDYSGYPDCRDDTMKAMQLALNLGMETRFVLHTPLMWIDKAETWRLTESLGGEALVGLIRDETHSCYRGDRSQVHDWGHGCGECPACDLRAEGWRRFRATP

SEQ ID NO: 38885 - protein, 240 aa, Insolitispirillum peregrinum
  REGION 1..240: note = tr|A0A1N7MVZ4|A0A1N7MVZ4_9PROT 7-cyano-7-deazaguanine synthase OS=Insolitispirillum peregrinum OX=80876 GN=queC PE=3 SV=1
MVGCTMTLDPSSALVLFSGGQDSATCLAWALDRFTRVETLAFDYNQRHRIELEVRQDFLAALRADFIPWAERLGQDHFIDATGLSAIGATAMTENVAIEMGSNGLPTTFVPGRNLLFLTYAAALAYRRGIKHIITGVCETDFSGYPDCRDDTIKALQVALNLGMESRFVLHTPLMWIDKAQTWALAETLGGRALVDAIVDKTHTCYLGDRSTRHPWGHGCGQCPACTLRANGWWQWEQGA

SEQ ID NO: 38886 - protein, 224 aa, unidentified; identical to SEQ ID NO: 37484
  source 1..224: note = Intestinibacter bartlettii
  REGION 1..224: note = tr|B0A668|B0A668_9FIRM 7-cyano-7-deazaguanine synthase OS=Intestinibacter bartlettii DSM 16795 OX=445973; GN = queC PE=3 SV=1

SEQ ID NO: 38887 - protein, 228 aa, Iodobacter fluviatilis
  REGION 1..228: note = tr|A0A377SUQ2|A0A377SUQ2_9NEIS 7-cyano-7-deazaguanine synthase OS=Iodobacter fluviatilis; OX = 537 GN=queC PE=3 SV=1
MTKKPAVILLSGGLDSATCLAIAKAEGFAPYCLSFDYGQKHNAELKAAARVAEALGAVEHRILKIDLAGFGGSALTDATIDVPTDGGKPGEIPVTYVPARNTVLLSYALAWSEVLKADDIFIGVNAVDYSGYPDCRPEYIASFQAMARLATKVGVEGSNLTIHTPLLKLTKAEIAQKGTELGVDYALTVTCYKADEDGQACGECEACRLRSAGFAQAGLADPTRYQGE

SEQ ID NO: 38888 - protein, 227 aa, Iodobacter sp.
  REGION 1..227: note = tr|A0A3S8ZVC8|A0A3S8ZVC8_9NEIS 7-cyano-7-deazaguanine synthase OS=Iodobacter sp. H11R3; OX = 2496266 GN=queC PE=3 SV=1
MTKKPAVILLSGGLDSATCLAIAKAEGFAPYCLSFDYGQKHNAELKAAARVAKALGAVEHRILKIDLAGFGGSALTDATIDVPVGGGKPGEIPVTYVPARNTVLLSYALAWSEVLKADDIFIGVNAVDYSGYPDCRPEYIASFQAMARLATKVGVEGSNLTIHTPLLKLTKAGIAQKGTELGVDYALTVTCYKADFEGRACGQCEACRLRSAGFANAGLADPTRYQK

SEQ ID NO: 38889 - protein, 227 aa, Iodobacter sp.
  REGION 1..227: note = tr|A0A2G3JFN7|A0A2G3JFN7_9NEIS 7-cyano-7-deazaguanine synthase OS=Iodobacter sp. BJB302; OX = 1506510 GN=queC PE=3 SV=1
MTKKPAVILLSGGLDSATCLAIAKAEGFAPYCLSFDYGQKHNAELKAAARVAEALGAVEHRILKIDLAGFGGSALTDSSIEVPVDGGKPGEIPVTYVPARNTVLLSYALAWSEVLKADDIFIGVNAVDYSGYPDCRPEYIASFQAMARLATKVGVEGSNLTIHTPLLKLTKAEIAQKGTELGVDYALTVTCYKADDEGRACGECEACRLRSAGFAHAGLADPTRYQK

SEQ ID NO: 38890 - protein, 246 aa, Isosphaera pallida
  REGION 1..246: note = tr|E8R0T0|E8R0T0_ISOPI 7-cyano-7-deazaguanine synthase OS=Isosphaera pallida (strain ATCC 43644 / DSM 9630 / IS1B) OX=575540 GN=queC PE=3 SV=1
MSDGASGKSLPSKRLDVPVVVLLSGGLDSTTVLAEAVSKYSMPHALTIHYGQRHQIEREAARRVARAFNVVRHVELEVDLRAFGRSALTDDLEVPKDRSDTEIARGIPITYVPARNTIFLSLALAFAESIGSTDLFVGVNCVDYSGYPDCRPEYLRAFEALANLATKVGVEGTGRFRVHAPFLHATKADIIRRGLELGVDYSLTHSCYDPDDQGRACGRCDSCRLRLAAFRQVGRPDPAPYQPGAV

SEQ ID NO: 38891 - protein, 235 aa, unidentified
  source 1..235: note = Isosphaeraceae bacterium
  REGION 1..235: note = tr|A0A432MMX0|A0A432MMX0_9BACT 7-cyano-7-deazaguanine synthase OS=Isosphaeraceae bacterium GM2012 OX=2080755 GN=queC PE=3 SV=1
MSNRPKAVVLLSGGLDSTTVLAESLALGYAPYALTILYGQRHAVEREAARRVASAMGVERHVELEIDLRAFGGSALTDAIAVPKDREEDEMAAGIPVTYVPARNTIFLSMALAWAEAIGAFDLFIGVNCVDYSGYPDCRPEFLAAFERLAGLATKAGVEGSGRYRIHAPLLKKTKDEIILRGVELGVDYGLTHSCYDPDGQGRSCGRCDSCRLRLAAFGRLGLKDPVEYRPDVGG

SEQ ID NO: 38892 - protein, 231 aa, unidentified
  source 1..231: note = Izhakiella australiensis
  REGION 1..231: note = tr|A0A1S8YF96|A0A1S8YF96_9ENTR 7-cyano-7-deazaguanine synthase OS=Izhakiella australiensis OX=1926881 GN=queC PE=3 SV=1
MKRAVVVFSGGQDSTTCLIQALKQYDDVHCITFDYGQRHRAEIDTARQLSQQLGASAHKVLDVTLLNELAISSLTRDNIPVPDYDPDASGLPSTFVPGRNILFLTLSAIYAYQVNAEAVITGVCETDFSGYPDCRDEFVKALNHAVELGMARPVRFETPLMWLNKAETWALADYWQRLDLVRKQTLTCYNGIQGDGCGECAACHLRANGLQQYQQAPAAVMQAMKSKTGLA

SEQ ID NO: 38893 - protein, 231 aa, unidentified
  source 1..231: note = Izhakiella capsodis
  REGION 1..231: note = tr|A0A1I4YFW8|A0A1I4YFW8_9ENTR 7-cyano-7-deazaguanine synthase OS=Izhakiella capsodis; OX = 1367852 GN=queC PE=3 SV=1
MKRAVVVFSGGQDSTTCLIQALAQYEDVHCITFDYGQRHRAEIDTARHLSAHLGVSAHKVLDVTLLNELAISSLTRDNIPIPNYDPDANSLPNTFVPGRNILFLTLSSIYAYQVDAEAVITGVCETDFSGYPDCRDEFVKALNHAVKLGMARTIRFETPLMWLNKAETWALADYWQQLDLVRTKTLTCYNGIQGDGCGECAACHLRANGLQQYQQNPTTIMQAMKSKTGLT

SEQ ID NO: 38894 - protein, 231 aa, unidentified
  source 1..231: note = Izhakiella sp.
  REGION 1..231: note = tr|A0A4P8YJM2|A0A4P8YJM2_9ENTR 7-cyano-7-deazaguanine synthase OS=Izhakiella sp. KSNA2; OX = 2579935 GN=queC PE=3 SV=1
MKRAVVVFSGGQDSTTCLIQALAQYDEVHCVTFDYGQRHHAEIDVARELALELGAAAHKVLDVTLLNELAISSLTRDSIPVPDYEPEADGIPNTFVPGRNILFLTLAAIYAYQVKAEAVITGVCETDFSGYPDCRDEFVKALNHAVTLGMARDVRFETPLMWLNKAETWALADYWGRLDLVREHTLTCYNGIRGDGCGECAACHLRANGLSGYLNDKAVILAAMKEKIGLA

SEQ ID NO: 38895 - protein, 241 aa, Janthinobacterium agaricidamnosum
  REGION 1..241: note = tr|A0A3G2EGE2|A0A3G2EGE2_9BURK 7-cyano-7-deazaguanine synthase OS=Janthinobacterium agaricidamnosum OX=55508 GN=queC PE=3 SV=1
MLATDSALVLFSGGQDSTTCLAWALKHYSRVETIGFDYGQRHAIELTVRPGVLEQMRRQSPEWDSRLGQDHMIDLSLISAISDTAMTQNVEIVMQENGLPNTFVPGRNLLFMTVAATVAYRRGLTVLVGGMCETDFSGYPDCRDDTMKALQVALNLGMNTRLKLETPLMWLDKAQSWDLAEDLGGQPLVDLIRSGTHTCYLGERGELHDWGYGCGTCPACSLRANGYQQYAARKAAKPALK

SEQ ID NO: 38896 - protein, 237 aa, Janthinobacterium agaricidamnosum
  REGION 1..237: note = tr|W0VBX0|W0VBX0_9BURK 7-cyano-7-deazaguanine synthase OS=Janthinobacterium agaricidamnosum NBRC 102515 = DSM 9628 OX=1349767 GN=queC PE=3 SV=1
MLATDSALVLFSGGQDSTTCLAWALEHYARVETIGFDYGQRHAIELTVRPTLLEQMRGQSAEWHSRLGQDHMIDLSLIAAISDTALTQNVEIAMQENGLPNTFVPGRNLLFMTVAATVAYRRGLTVLVGGMCETDFSGYPDCRDDTMKALQVALNLGMATRLKVETPLMWLDKSQTWDLAHGLGGQPLVDLIRSGTHTCYLGERGQLHDWGYGCGTCPACALRAKGYQEYAARSGAV

SEQ ID NO: 38897 - protein, 253 aa, Janthinobacterium lividum
  REGION 1..253: note = tr|A0A377RMC8|A0A377RMC8_9BURK 7-cyano-7-deazaguanine synthase OS=Janthinobacterium lividum OX=29581 GN=queC PE=3 SV=1
MFSRALGQNKTEKKEIMLATDSALVLFSGGQDSTTCLAWALKHYSRVETIGFDYGQRHAIELTVRPGVLEQMRQQSPEWDSRLGQDHMIDLSLISAISDTAMTQNVEIVMQENGLPNTFVPGRNLLFMTVAATVAYRRGLTVLVGGMCETDFSGYPDCRDDTMKALQVALNLGMDTRLKLETPLMWLDKAQSWDLAEDLGGQPLVDLIRSGTHTCYLGERGQLHDWGYGCGTCPACALRANGYQQYAARKGLK

SEQ ID NO: 38898 - protein, 237 aa, Janthinobacterium lividum
  REGION 1..237: note = tr|A0A1E8PQI1|A0A1E8PQI1_9BURK 7-cyano-7-deazaguanine synthase OS=Janthinobacterium lividum OX=29581 GN=queC PE=3 SV=1
MLATDSALVLFSGGQDSTTCLAWALKHYSRVETIGFDYGQRHAIELTVRPGLLAQIREQSPEWDSRLGQDHMIDLSLISAISDTAMTQNVEIVMQENGLPNTFVPGRNLLFMTVAATVAYRRGLTVLVGGMCETDFSGYPDCRDDTMKALQVALNLGMNTRLKLETPLMWLDKAQSWDLAQDLGGQPLVDLIRSGTHTCYLGERGELHDWGYGCGTCPACALRANGYQQYAARKAAK

SEQ ID NO: 38899 - protein, 241 aa, Janthinobacterium sp.
  REGION 1..241: note = tr|A0A2N0HWX7|A0A2N0HWX7_9BURK 7-cyano-7-deazaguanine synthase OS=Janthinobacterium sp. 64 OX=2035208 GN=queC PE=3 SV=1
MLATDSALVLFSGGQDSTTCLAWALKHYNRVETIGFDYGQRHAIELTVRPGVLEQMRQQSPEWDRRLGQDHMIDLSLIAAISDTAMTQNVEIVMQENGLPNTFVPGRNLLFMTVAATVAYRRGLTVLVGGMCETDFSGYPDCRDDTMKALQVALNLGMNTRLKLETPLMWLDKAQSWDLAQDLGGQPLVDLIRSGTHTCYLGERGELHDWGYGCGTCPACALRANGYQHYAARKAAKQAAN

SEQ ID NO: 38900 - protein, 235 aa, Janthinobacterium sp.
  REGION 1..235: note = sp|A6T2X9|QUEC_JANMA 7-cyano-7-deazaguanine synthase; OS = Janthinobacterium sp. (strain Marseille) OX=375286; GN = queC PE=3 SV=1
MSSADGALVLFSGGQDSTTCVAWALKRYAKVETIGFDYGQRHAVELEVRPDVLRSLRDINPEWNKKLGEDHMIDLSLISKISNTAMTQDVEITMMENGLPNTFVPGRNLLFMTVAATVAYRRGLDVLVGGMCETDFSGYPDCRDDTMKALQVALNLGMATRLKLETPLMWIDKAETWKMAQDLGGKPLVDLIRAGTHTCYLGERGALHDWGYGCGTCPACELRARGYANFAAQEK

SEQ ID NO: 38901 - protein, 237 aa, unidentified
  source 1..237: note = Janthinobacterium svalbardensis
  REGION 1..237: note = tr|A0A290WRE2|A0A290WRE2_9BURK 7-cyano-7-deazaguanine synthase OS=Janthinobacterium svalbardensis OX=368607 GN=queC PE=3 SV=1
MLATDSALVLFSGGQDSTTCLAWALKHYSRVETIGFDYGQRHAIELTVRPGVLEQMRQQSPEWDSRLGQDHMIDLSLIAAISDTAMTQNVEIVMQENGLPNTFVPGRNLLFMTVAATVAYRRGLTVLVGGMCETDFSGYPDCRDDTMKALQVALNLGMNTRLKLETPLMWLDKAQSWDLAQDLGGQPLVDLIRSGTHTCYLGERGQLHDWGYGCGTCPACALRANGYQQYAARKAAK

SEQ ID NO: 38902 - protein, 227 aa, Jeongeupia sp.
  REGION 1..227: note = tr|A0A1D9BFI4|A0A1D9BFI4_9NEIS 7-cyano-7-deazaguanine synthase OS=Jeongeupia sp. USM3; OX = 1906741 GN=queC PE=3 SV=1
MTRPAVILLSGGLDSATCLAIARDQGFAPYCLSFNYGQRHNAELKAAERVTRALGAVEHRVVTIDLASFGGSALTDANIAVPEEAPQQGEIPLTYVPARNTILLSYALAWAEVLKSDDIFIGVNAVDYSGYPDCRPDYIAAYQAMARLATRTGVEGSPLTIHTPLISLSKAEIVQTGTRLGVDYGLTVTCYQADDDGRACGVCDACRLRREGFAVAGLPDPTRYRPA

SEQ ID NO: 38903 - protein, 217 aa, Jeotgalibacillus alimentarius
  REGION 1..217: note = tr|A0A0C2VIS7|A0A0C2VIS7_9BACL 7-cyano-7-deazaguanine synthase OS=Jeotgalibacillus alimentarius OX=135826 GN=queC PE=3 SV=1
MDKNKAIVVFSGGQDSTTCLFWAMKNFDSVEAVTFSYGQRHATEIEAAKEIASELGIRHHILDMSLLNQLSPSALTRDEEIVEKEGELPSTFVPGRNLMFLSFASVLAHQRGAKHIVTGVCETDFSGYPDCRDAFVKSLNVSVNLSMDKDFVFHTPLMWLDKKETWALADQLNQFDFVRNRTITCYNGVKGDGCGECPACRLRLKGMNEYLSEREGS

SEQ ID NO: 38904 - protein, 221 aa, Jeotgalibacillus campisalis
  REGION 1..221: note = tr|A0A0C2VV60|A0A0C2VV60_9BACL 7-cyano-7-deazaguanine synthase OS=Jeotgalibacillus campisalis OX=220754 GN=queC PE=3 SV=1
MDKNQKALVVFSGGQDSTTCLFWAKKHFDQVEAVTFEYGQRHNNEIEVAKQITEELGVAHHVLDMSLLNQLAPSSLTRKDQPIVETEGELPSTFVPGRNLLFMSFAAVLAKQIGARHLITGVCETDFSGYPDCRDIFMKSLNVTINLSMEEDFVLHTPLMWLDKAQTWELADDLQVFEYIRDHTLTCYNGLQGTGCGECPACKLRNKGMIQFLEKKEAKTT

SEQ ID NO: 38905 - protein, 218 aa, unidentified
  source 1..218: note = Jeotgalibacillus malaysiensis
  REGION 1..218: note = tr|A0A0B5ARH3|A0A0B5ARH3_9BACL 7-cyano-7-deazaguanine synthase OS=Jeotgalibacillus malaysiensis OX=1508404 GN=queC PE=3 SV=1
MDKNKAIVVFSGGQDSTTCLFWALEKFDSVEAVTFAYGQRHASEIEAAKEIASDLNVRHHILDMSLLNQLAPSALTRDEEIVQKEGELPSTFVPGRNLMFLSFASVLAHQSGAKHIVTGVCETDFSGYPDCRDAFVKSLNVSVNLSMDKDFVFHTPLMWLDKKETWELADQLNRFEYVRNHTITCYNGVKGDGCGECPACKLRLKGMNEYLNEKEGIR

SEQ ID NO: 38906 - protein, 219 aa, Jeotgalibacillus marinus; identical to SEQ ID NO: 36273
  REGION 1..219: note = tr|A0A0M0L172|A0A0M0L172_9BACL 7-cyano-7-deazaguanine synthase OS=Jeotgalibacillus marinus OX=86667 GN=queC PE=3 SV=1

SEQ ID NO: 38907 - protein, 220 aa, unidentified
  source 1..220: note = Jeotgalibacillus proteolyticus
  REGION 1..220: note = tr|A0A2S5GFR4|A0A2S5GFR4_9BACL 7-cyano-7-deazaguanine synthase OS=Jeotgalibacillus proteolyticus OX=2082395 GN=queC PE=3 SV=1
MNKNRKALVVFSGGQDSTTCLFWAKANFEEVEAVTFEYGQRHYQEIEVAKSIANDLGVRHHVLDMSLLNQLAPSALTRKDQKIEHDEGELPSTFVPGRNLLFMSFAAVLAKQIGARHLVTGVCETDFSGYPDCRDIFIKSLNVTINLSMSEDFVIHTPLMWLNKEQTWELADHLDALEYVRDRTLTCYNGVQGEGCRECPACLLRNQGMVNYLNRKEEKI

SEQ ID NO: 38908 - protein, 218 aa, Jeotgalibacillus salarius
  REGION 1..218: note = tr|A0A4Y8LKL2|A0A4Y8LKL2_9BACL 7-cyano-7-deazaguanine synthase OS=Jeotgalibacillus salarius OX=546023 GN=queC PE=3 SV=1
MDKNKAIVVFSGGQDSTTCLFWALEKFDSVEAVTFAYGQRHASEIEAAKEIASDLGVKHHLLDMSLLNQLAPSALTRDEEITEKEGELPSTFVPGRNLMFLSFASVLAHQVNAKHVVTGVCETDFSGYPDCRDAFVKSLNVSVNLSMDKDFVFHTPLMWLDKKETWALADELNRFDYIRNHTITCYNGIKGDGCGDCPSCKLRLNGMNEYLNSKEGMR

SEQ ID NO: 38909 - protein, 221 aa, Jeotgalibacillus soli
  REGION 1..221: note = tr|A0A0C2RUC7|A0A0C2RUC7_9BACL 7-cyano-7-deazaguanine synthase OS=Jeotgalibacillus soli; OX = 889306 GN=queC PE=3 SV=1
MERNRKALVVFSGGQDSTTCLFWAKQHFDEVEVVTFKYGQRHIEEINCAREIANDQGVNHHVLDMSLLNQLAPSALTREDQAIIQEEGQLPSTFVPGRNLLFMSFAAVLAKQIGARHLVTGVCETDFSGYPDCRDIFIKSLNVTVNLSMEEDFVIHTPLMWLDKEQTWELADSLNAFDYIRTKTLTCYNGIKGDGCGTCPACELRRRGMEQFLMKKGEGLR

SEQ ID NO: 38910 - protein, 231 aa, Jeotgalibacillus sp.
  REGION 1..231: note = tr|A0A4R5XVD6|A0A4R5XVD6_9BACL 7-cyano-7-deazaguanine synthase OS=Jeotgalibacillus sp. S-D1 OX=2552189 GN=queC PE=3 SV=1
MDKNKKALVVFSGGQDSTTCLFWALRKFDDVEVVTFEYGQRHIKEIEVAKTIAKDLGVNQHVLDMSLLNQLAPSALTRNDQEIKQKEGDLPSTFVPGRNLLFMSFAAVLAKQIEARHLITGVCETDFSGYPDCRDVFMKSLNVTINLSMEEDFVIHTPLMWLDKAETWELADKLEAFDYVQKNTLTCYNGIQGEGCGTCPACELRNRGMKIYLEKREANTDDTANLSRSHT

SEQ ID NO: 38911 - protein, 219 aa, Jeotgalibacillus sp.
  REGION 1..219: note = tr|A0A4Y8LK86|A0A4Y8LK86_9BACL 7-cyano-7-deazaguanine synthase OS=Jeotgalibacillus sp. R-1-5s-1 OX=2555897 GN=queC PE=3 SV=1
MDKNNKAIVVFSGGQDSTTCLFWALEKFDEVEAVTFKYGQRHENEIVCAEKIAEELGVKHHVLDMSLLNQLAPSALTRDEEIVEKEGELPSTFVPGRNLLFLSFAAVLAKQRHARHLVTGVCETDFSGYPDCRDIFIKSLNVTVNLSMEENFVIHTPLMWLDKKETWALADQLGRFDYIRTKTLTCYNGVQGDGCGDCPACRLRLNGMTEYLHEKEGQK

SEQ ID NO: 38912 - protein, 241 aa, Jonesia denitrificans
  REGION 1..241: note = tr|C7R591|C7R591_JONDD 7-cyano-7-deazaguanine synthase OS=Jonesia denitrificans (strain ATCC 14870 / DSM 20603 / CIP 55134) OX=471856 GN=Jden_0093 PE=3 SV=1
MSKNKVALLLSGGPDSVTLLYDLLAQGHEVVALTYNFGEAEAQNERDAATAIAAELEVEHHFFDFSGPLKEFYHLPQPQFLRMAMMRSSEAGPVSKSEDVQPFGSAIALLLTASWAVKNDISSVFYAVHADDSHFTDNHREYFDKLSDVTRECEGQDFAVEFHTPYLDTRKFDVINKGITLGVPFGRTWSCAAGGSTHCGQCAPCINRSGAFAVIGEQDPVAYLHDPQEHLENRFAGSAQL

SEQ ID NO: 38913 - protein, 231 aa, unidentified
  source 1..231: note = Kalamiella piersonii
  REGION 1..231: note = tr|A0A3A9J1B5|A0A3A9J1B5_9GAMM 7-cyano-7-deazaguanine synthase OS=Kalamiella piersonii; OX = 2364647 GN=queC PE=3 SV=1
MKRAVVVFSGGQDSTTCLIQALQQYDEVHCVTFDYGQRHREEIDVARALALKLGARAHKVLDVTLLNELAVSSLTRDNIPVPSYDPAASGLPSTFVPGRNILFLTLASVYAYQVEAEAVITGVCETDFSGYPDCRDEFVKALNHAVALGMAREVRFETPLMWLNKAETWALADYWQSLTLVREETLTCYNGVKGDGCGECAACHLRARGLNDYLADRDGVMAAMKSKSGLA

SEQ ID NO: 38914 - protein, 229 aa, Kandleria vitulina
  REGION 1..229: note = tr|A0A0R2HEQ9|A0A0R2HEQ9_9FIRM 7-cyano-7-deazaguanine synthase OS=Kandleria vitulina DSM 20405 OX=1410657 GN=queC PE=3 SV=1
MKALVLSSGGIDSTTCLAMAVEKYGADNVIGLCMYYGQKHQKEIESAKKVANYYGTELYELNLSKIFAYSKCTLLNQSEDEIPHESYDEQLKHTDGAPVSTYVPFRNGLFLSAAASFALSKECSVIYYGAHADDAAGSAYPDCSPAFNNAINEAIYLGSGQQLKVEAPFINKTKADVVKIGLDLHVPYELTWSCYEGGDEPCHTCGTCVDREKAFELNGTIDPLLKGDK

SEQ ID NO: 38915 - protein, 229 aa, Kandleria vitulina
  REGION 1..229: note = tr|A0A1H2Q990|A0A1H2Q990_9FIRM 7-cyano-7-deazaguanine synthase OS=Kandleria vitulina; OX = 1630 GN=queC PE=3 SV=1
MKALVLSSGGIDSTTCLAMAVEKYGADNVIGLCMYYGQKHQKEIESAKKVANYYGTELYELNLSKIFAYSKCTLLNQSEDEIPHESYDEQLKHTDGAPVSTYVPFRNGLFLSAAASFALSKECSVIYYGAHADDAAGSAYPDCSPAFNNAINEAIYLGSGQQLKVEAPFINKTKADVVKIGLDLHVPYELTWSCYEGGDEPCHTCGTCVDREKAFELNGTVDPLLKGDK

SEQ ID NO: 38916 - protein, 227 aa, Kangiella geojedonensis
  REGION 1..227: note = tr|A0A0F6TRJ1|A0A0F6TRJ1_9GAMM 7-cyano-7-deazaguanine synthase OS=Kangiella geojedonensis; OX = 914150 GN=queC PE=3 SV=1
MTKRAVILLSGGLDSTTALAIAKERGFECYTMSFNYGQRTVAELKAAAKVSAQFGATKHIEVNLDMSEIGGSALTDHSIDVPTGEAIAAEEAIPVTYVPARNTVFLSIALGWAEVLQAHHIFVGVNAVDYSGYPDCRPEFIEAFENMANLATKAGVEGQKVHIDAPLIDMTKAQIIAKGIELGVDYAKTVSCYDADNDGKACGECDSCVLRRQGFKSQGFSDPTIYQ

SEQ ID NO: 38917 - protein, 224 aa, Kangiella koreensis
  REGION 1..224: note = tr|C7R5T2|C7R5T2_KANKD 7-cyano-7-deazaguanine synthase OS=Kangiella koreensis (strain DSM 16069 / KCTC 12182 / SW-125) OX=523791 GN=queC PE=3 SV=1
MQKRAVVLLSGGLDSTTALAMAKSQGYDCYAMSFNYGQRSLAELNAAKKIAQSLDAKEHIVVNLDMSQIGGSALTDHSIDVPTEGLEEGIPVTYVPARNTVFLSIALGWAEVLKADHIFIGVNAVDYSGYPDCRPEFIKAFETMANLATKAGVEGQKLTIEAPLINLTKAQIIAEGMTLGVDYSQTVSCYKATDDGKACGVCDSCRLRKQGFESQGFADPTRYI

SEQ ID NO: 38918 - protein, 224 aa, unidentified
  source 1..224: note = Kangiella profundi
  REGION 1..224: note = tr|A0A2K9A992|A0A2K9A992_9GAMM 7-cyano-7-deazaguanine synthase OS=Kangiella profundi; OX = 1561924 GN=queC PE=3 SV=1
MNKRAVVLLSGGLDSTTALAIAKSQGYDCYAMSFNYGQRSLAELNAAKKVAESMDAKEHIVVNLDMSQIGGSALTDHSIDVPTEGLEEGIPVTYVPARNTVFLSIALGWAEVLKADHIFIGVNAVDYSGYPDCRPEFIKAFEAMANLATKAGVEGQKLTIEAPLINLTKAQIIAEGMKLGVDYSQTVSCYKATDDGKACGVCDSCRLRKQGFVGQGFADPTRYV

SEQ ID NO: 38919 - protein, 227 aa, unidentified
  source 1..227: note = Kangiella sediminilitoris
  REGION 1..227: note = tr|A0A1B3BBY1|A0A1B3BBY1_9GAMM 7-cyano-7-deazaguanine synthase OS=Kangiella sediminilitoris OX=1144748 GN=queC PE=3 SV=1
MNKRAVILLSGGLDSTTALAIAKEKGFECYTMSFNYGQRTVAELEAAKKVSAQHGAKKHIEVNLDMTEIGGSALTDHSIDVPVGEALEQEEDIPVTYVPARNTVFLSIALGWAEVLQANHIFVGVNAVDYSGYPDCRPEFVEAFEQMANLATKAGVNGHKMHIEAPLIDMTKAQIIKKGIELGVDYGLTVSCYNATADGRACGQCDSCILRKQGFEEQGFNDPTPYQ

SEQ ID NO: 38920 - protein, 227 aa, Kangiella sp.
  REGION 1..227: note = tr|A0A3D8UNF8|A0A3D8UNF8_9GAMM 7-cyano-7-deazaguanine synthase OS=Kangiella sp. HD9-110m-PIT-SAG07 OX=2283595 GN=queC PE=3 SV=1
MTKRAVILFSGGLDSTTALAIAKERGFECYTMSFNYGQRTVAELKAAKNISAHFGAKKHIEVNLDMSEIGGSALTDHSIDVPTGEAIAAEEAIPVTYVPARNTVFLSIALGWAEVLEAHHIFLGVNAVDYSGYPDCRPEFIQSFEDMANLATKAGVEGRKVHIESPLIDMTKAEIIARGIQLGVDYQTTVSCYKADDAGRACGECDSCMLRKQGFETQGFTDPTLYQ

SEQ ID NO: 38921 - protein, 228 aa, Kangiella sp.
  REGION 1..228: note = tr|A0A2G2KXT2|A0A2G2KXT2_9GAMM 7-cyano-7-deazaguanine synthase OS=Kangiella sp.; OX = 1920245 GN=queC PE=3 SV=1
MAKKAIILFSGGLDSTTCLAIAKSQKYDCYALSFSYGQKHSSELDAAKRIAKSSNVKAHKIIDLDLASFGGSALTDDSIDVPIVSENSTLETNIPITYVPARNTIFFSIALAWAEVLEADVIIAGVNAVDYSGYPDCRPEYIKAFQAMADLATKAGIEGKGVKLETPLIDLSKVEIIRKGYSLGVNYAETVSCYKADEKGAACGECDSCIIRKDAFEKAIKKDPTIYV

SEQ ID NO: 38922 - protein, 227 aa, Kangiella spongicola
  REGION 1..227: note = tr|A0A318D1Q0|A0A318D1Q0_9GAMM 7-cyano-7-deazaguanine synthase OS=Kangiella spongicola; OX = 796379 GN=queC PE=3 SV=1
MTKRAVILLSGGLDSTTVLAMAKEQGYECYTMSFNYGQRTVAELKAAKAVSTQFGAKKHIEVKLDMTEIGGSALTDHDIDVPVGDAIAEEADIPVTYVPARNTVFLSIALGWAEVLEAQHIFVGVNSVDYSGYPDCRPEFIQAFEDMANLATKAGVEGRKVHIEAPLSDMTKAQIIASGVALGVDYQQTVSCYMSDDDGRACGECDSCILRRKGFEEQGFTDPTIYQ

SEQ ID NO: 38923 - protein, 239 aa, Kerstersia gyiorum; identical to SEQ ID NO: 36701
  REGION 1..239: note = tr|A0A171KQ74|A0A171KQ74_9BURK 7-cyano-7-deazaguanine synthase OS=Kerstersia gyiorum; OX = 206506 GN=queC PE=3 SV=1

SEQ ID NO: 38924 - protein, 239 aa, Kerstersia gyiorum
  REGION 1..239: note = tr|A0A4Q7MVQ2|A0A4Q7MVQ2_9BURK 7-cyano-7-deazaguanine synthase OS=Kerstersia gyiorum; OX = 206506 GN=queC PE=3 SV=1
MIPLREKRALVLFSGGQDSATCLAWALSRYQHVETLGFDYGQRHRVELDCRTRLRTLVADMNPDWAPRLAEDHLLPVDFFRHLGQTAMTDDVAITMQADGLPNTFVPGRNLLFLTLAAALAYRRNLNVLIGGMTEADYSGYPDCRDNTMKALQVALSLGIDRQLTIETPLMWLDKTEIWDLAWRLGGDVLVETIRQESHTCYLGTRDTLHSWGYGCGSCPACTLRARGYVRWAANRLAA

SEQ ID NO: 38925 - protein, 229 aa, unidentified
  source 1..229: note = Ketobacter alkanivorans
  REGION 1..229: note = tr|A0A2K9LR06|A0A2K9LR06_9GAMM 7-cyano-7-deazaguanine synthase OS=Ketobacter alkanivorans; OX = 1917421 GN=queC PE=3 SV=1
MAEHTSDKKIALVLLSGGLDSATCLAIARSQGYECYAISFEYGQRHDSELQAAERVVNALGAKELKTIHINMGDIGGSALTDKAIDVPESPTEGIPVTYVPARNTVFLSLALGWAEVLDADAIFIGVNAVDYSGYPDCRPEFIEAFERLAALATKRGVEGNPISIQAPLLHLSKSQIIHKGIALGVDYGLTVSCYQADAEGRACGKCDSCRLRQEGFRQAGVADPTRYC

SEQ ID NO: 38926 - protein, 225 aa, unidentified; identical to SEQ ID NO: 35792
  source 1..225: note = Ketobacter sp.
  REGION 1..225: note = tr|A0A3L8BSC8|A0A3L8BSC8_9GAMM 7-cyano-7-deazaguanine synthase OS=Ketobacter sp.; OX = 2083498 GN=queC PE=3 SV=1

SEQ ID NO: 38927 - protein, 225 aa, unidentified
  source 1..225: note = Ketobacter sp.
  REGION 1..225: note = tr|A0A3L8BZ41|A0A3L8BZ41_9GAMM 7-cyano-7-deazaguanine synthase OS=Ketobacter sp.; OX = 2083498 GN=queC PE=3 SV=1
MSDSKRAVVLLSGGLDSATCLAIARSQGYACYALSFHYGQRHDSELAAAQRVVAALGAEELKTIHINMGDIGGSALTDPAIDVPEAPTEGIPVTYVPARNTVFLSLALGWAEVLDADAIFIGVNAVDYSGYPDCRPEFISAFERLATLATKRGVEGHPISIQAPLLKLSKAEIIQQGVALGLDYGLTVSCYQADHQGRACGVCDSCRLRKEGFAQAGVADPTPYR

SEQ ID NO: 38928 - protein, 236 aa, unidentified
  source 1..236: note = Kibdelosporangium phytohabitans
  REGION 1..236: note = tr|A0A0N9I630|A0A0N9I630_9PSEU 7-cyano-7-deazaguanine synthase OS=Kibdelosporangium phytohabitans OX=860235 GN=queC PE=3 SV=1
MNGNGDRHDSTLVLLSGGLDSTVLATELVRRGAAVQAVSVHYGQRHAVELEAAAVVASRLGIPHDIIDLSVLRHHLRSALTGTGEIPHGHYAADTMSATVVPNRNAIMLMVACGVASARGLRVVATAVHSGDHPIYPDCRPEFIAAATLTAMLGTETVRVEAPYIRLTKAEIAAKGVQFDAPMELSWSCYEGGDSTGRHCGRCGTCVERAEAFHLAGVRDPTDYADTAFWREQVTV

SEQ ID NO: 38929 - protein, 233 aa, unidentified
  source 1..233: note = Kiloniella litopenaei
  REGION 1..233: note = tr|A0A0M2RDK4|A0A0M2RDK4_9PROT 7-cyano-7-deazaguanine synthase OS=Kiloniella litopenaei; OX = 1549748 GN=queC PE=3 SV=1
MKTLVICSGGLDSVTLAHKVAAEAELTRLISFDYGQRHKKELDYARRCAERLGVPHNIIDIANVGALLSGSALTDDVDVPDGHYEEETMKVTVVPNRNAIMLAIAFGAAAAEKADAVAAAVHGGDHFIYPDCRPTFIDSFEEMQRHALDGYASVKLYTPFVHLPKSDIAAEGSRLKVPFEETWSCYKGYEHHCGRCGTCVERREAFHVAKVEDPTIYQDPDYWLEAVEKAKGV

SEQ ID NO: 38930 - protein, 233 aa, unidentified
  source 1..233: note = Kiloniella spongiae
  REGION 1..233: note = tr|A0A0H2N0T9|A0A0H2N0T9_9PROT 7-cyano-7-deazaguanine synthase OS=Kiloniella spongiae; OX = 1489064 GN=queC PE=3 SV=1
MKTLVICSGGLDSVTLAHKVAAEAELTRLISFDYGQRHKKELDYARRCAERLGVPHNVIDIANVGALLSGSALTDDVDVPDGHYEEETMKVTVVPNRNAIMLAIAFGAAAAENADAVAAAVHGGDHFIYPDCRPAFIDSFEEMQRHALDGYAAVKLYTPFVHLPKSDIAAEGSRLKVPFEETWSCYKGYEHHCGRCGTCVERREAFHVANVEDPTIYQDPDYWLEAVEKAKGA

SEQ ID NO: 38931 - protein, 229 aa, Kineococcus radiotolerans
  REGION 1..229: note = sp|A6WGA4|QUEC_KINRD 7-cyano-7-deazaguanine synthase; OS = Kineococcus radiotolerans (strain ATCC BAA-149 / DSM 14245 / SRS30216) OX=266940 GN=queC PE=3 SV=1
MDRPAVVLLSGGLDSTTVLAIAKSQGFTPYALSFAYGQRHAVELDAARRVATALGAAGHVIATIDLTVFGGSALTADIAVPKHDTVEDLQADIPITYVPARNTIFLSYALAYAEVVGAGDIFIGVNALDYSGYPDCRPEYVDAFQAMGRLATRAGVQGTELTIHAPLMQMTKADIVRAGLALGVDYGMTSSCYDPDAAGHPCGHCDSCLLRLNGFAEAGSTDPLPYRGA

SEQ ID NO: 38932 - protein, 217 aa, Kingella denitrificans
  REGION 1..217: note = tr|F0F1F1|F0F1F1_9NEIS 7-cyano-7-deazaguanine synthase OS=Kingella denitrificans ATCC 33394 OX=888741; GN = exsB PE=3 SV=1
MTQALVVFSGGQDSTTCLFQAMQQYGAENVQAITFAYGQRHGIELERAASIAQELGIRQTVLDLSLITAITHNALTDAQAAIETDAQGMPNTFVDGRNALFLLYAAIYAKSQNIRDIFIGVCETDFSGYPDCRQIFVQSMNVTLNLAMAYDFRLHTPLMYLTKKETWALADELGVLDYIRTRTHTCYLGVDGGCHECPSCVLRERGLAEYLAEKSAA

SEQ ID NO: 38933 - protein, 226 aa, Kingella kingae
  REGION 1..226: note = tr|F5S8Q9|F5S8Q9_9NEIS 7-cyano-7-deazaguanine synthase OS=Kingella kingae ATCC 23330 OX=887327 GN=exsB; PE = 3 SV=1
MTQNKRVLVIFSGGQDSTTCLIQAIAQYGKDHVQAMTFAYGQRHAIELQRATEIAQELGIAQTVLDLSLVGSITHNALMDSQARIQTQDNGLPNTFVDGRNALFLLYAAIYAKSQQIHDIVIGVCETDFSGYPDCRQVFIDSMQQTLQLAMDYEFRLHTPLMYLTKKQTWALADELGALDFVRTRTHTCYMGVDGGCHECPSCVLRERGLQEYWAECEQNKKQPAL

SEQ ID NO: 38934 - protein, 227 aa, unidentified
  source 1..227: note = Kingella negevensis
  REGION 1..227: note = tr|A0A238HFS2|A0A238HFS2_9NEIS 7-cyano-7-deazaguanine synthase OS=Kingella negevensis; OX = 1522312 GN=queC PE=3 SV=1
MHRPTTNRKPQMSQKQALVIFSGGQDSTTCLFQAIAQYGAENVQAITFAYGQRHKIELERAAWIAKDLNIKQTVLDLSLMTSITHNALMDDTATIQTENNLPNTFVDGRNALFLLYAAIYAKSQNIHDIFVGVCETDFSGYPDCRDVFVKSMNVTLNLAMAYDFNIHTPLMWLTKKETWALADQLGAFEYVRNHTHTCYLGVEGGCHECPSCVLRERGLQEYLAERI

SEQ ID NO: 38935 - protein, 217 aa, Kingella oralis
  REGION 1..217: note = tr|C4GN20|C4GN20_9NEIS 7-cyano-7-deazaguanine synthase OS=Kingella oralis ATCC 51147 OX=629741 GN=queC; PE = 3 SV=1
MSPNTALVIFSGGQDSTTCLFQAIADCGAGNVQTISFQYGQRHAVELQRAAWIAQDLGVPHTVLDLSAIGNITHNALMDSSAPIQQAGNTPNTFVDGRNALFLLYAAIHAKAQGIHRIYTGVCETDFSGYPDCRDVFIKSMNVTLNLAMDYPFDIRTPLMWLTKKQTWALADQLGAFDYIRAHTHTCYMGVAGGCHQCPACILRERGLREYLAERGG

SEQ ID NO: 38936 - protein, 222 aa, Kingella potus
  REGION 1..222: note = tr|A0A377QXG4|A0A377QXG4_9NEIS 7-cyano-7-deazaguanine synthase OS=Kingella potus; OX = 265175 GN=queC PE=3 SV=1
MNSEKALVIFSGGQDSTTCLIQALHTYGRENVEALSFRYGQRHAVELERAAAIAQDLGVKQTLLDLSLIRQITSNALMDGTAAIQTGPGGLPNTFVDGRNALFLLYAAIYAKGQGIRHIIAGVCETDFSGYPDCRDVFVKSMNVSLNLAMDYAFQIHTPLMYLTKAQTWALADKLGYLDYIREHTHTCYNGITGGCHECPSCILRERGLAEYLAGKTAAASA

SEQ ID NO: 38937 - protein, 245 aa, Kinneretia asaccharophila
  REGION 1..245: note = tr|A0A4R6NC55|A0A4R6NC55_9BURK 7-cyano-7-deazaguanine synthase OS=Kinneretia asaccharophila OX=582607 GN=queC PE=3 SV=1
MSTTAAAPLPPQANRQRKALVLFSGGQDSTACLAWALDRYAEVETLGFDYGQRHRIELDCRQTVRREIAAQFPAWGAKLGEDHVLDLSLLGQISDTALTSERAIELQANGLPNTFVPGRNLLFLTFAATLAYRRGASVLVGGMCETDFSGYPDCRDNTLKALQVALSLGLDTPMTLETPLMFITKAETWALTQRLGGPALNALIAEHTHTCYLGERGQRHDWGYGCGHCPACELRARGYQEFVAA

SEQ ID NO: 38938 - protein, 235 aa, unidentified
  source 1..235: note = Kiritimatiella glycovorans
  REGION 1..235: note = tr|A0A0G3ED20|A0A0G3ED20_9BACT 7-cyano-7-deazaguanine synthase OS=Kiritimatiella glycovorans OX=1307763 GN=queC PE=3 SV=1
MRATNRRAVVLLSGGLDSATVLAEARSHDLECYALTLRYGQRHELELDAARAVADDLGVKEHLVMDLDLRRIGGSALTADLDVPRGEKRPGGGTAAAIPVTYVPARNTIFLSIALGWAEVLGTGDIYIGVNAVDYSGYPDCRPEFIDAFEAMASLATRESVEGRIRVQIHTPLIGMSKAEIIARGRRLGVDYGLTRTCYDPEGDGRACGQCEACRLRRKGFEEAGLQDPIEYAKG

SEQ ID NO: 38939 - protein, 231 aa, unidentified
  source 1..231: note = Kiritimatiellaceae bacterium
  REGION 1..231: note = tr|A0A2D7D742|A0A2D7D742_9BACT 7-cyano-7-deazaguanine synthase OS=Kiritimatiellaceae bacterium OX=2026752 GN=queC PE=3 SV=1
  VARIANT 52: note = Xaa can be any naturally occurring amino acid
  VARIANT 177: note = Xaa can be any naturally occurring amino acid
  VARIANT 220: note = Xaa can be any naturally occurring amino acid
MGRKAVVLLSGGLDSATVLAMAAADGFEIYAMSFRYGQRHAVELSCARALAXGAGVVEQREVEIDLGSLGGSALTTSAAVPKHDSVDELSDEIPSTYVPARNTIFLSYALAWAEVLGANDLFIGVNALDYSGYPDCRPEYIAAFETMANLATAAGVNGERLVVHTPLIHLTKAAIIXRGLALGVDYGMTTSCYDPLPGGVACGHCDSCLLRLKGFAEAGXVDPRRYADKEN

SEQ ID NO: 38940 - protein, 237 aa, unidentified
  source 1..237: note = Kiritimatiellaceae bacterium
  REGION 1..237: note = tr|A0A2E3TKL6|A0A2E3TKL6_9BACT 7-cyano-7-deazaguanine synthase OS=Kiritimatiellaceae bacterium OX=2026752 GN=queC PE=3 SV=1
  VARIANT 4: note = Xaa can be any naturally occurring amino acid
  VARIANT 24: note = Xaa can be any naturally occurring amino acid
  VARIANT 47: note = Xaa can be any naturally occurring amino acid
  VARIANT 86: note = Xaa can be any naturally occurring amino acid
  VARIANT 141: note = Xaa can be any naturally occurring amino acid
  VARIANT 171: note = Xaa can be any naturally occurring amino acid
  VARIANT 190: note = Xaa can be any naturally occurring amino acid
  VARIANT 210: note = Xaa can be any naturally occurring amino acid
  VARIANT 225: note = Xaa can be any naturally occurring amino acid
MMKXNKKAVILLSGGLDSATVLAXVKSLNYEIYALSFRYGQKHDIEXEFAERLANNTVREHKVVDIDLAMFGGSALTTDKLVPKHXNVDEIGSEIPITYVPARNTIFLSFALAYAEVIDSKDIFIGVNALDYSGYPDCRPXFIDSFQKTANLATAKGVKNKNISIHSPLIXLTKSQIIRKGIELGVDYSXTISCYDPVNGLACGFCDACXLRLKGFSEAGFNDPXKYSTNRINYSKE

SEQ ID NO: 38941 - protein, 887 aa, unidentified
  source 1..887: note = Kitasatospora albolonga
  REGION 1..887: note = tr|A0A1V0VHD8|A0A1V0VHD8_9ACTN Condensation domain-containing protein OS=Kitasatospora albolonga; OX = 68173 GN=B7C62_33360 PE=4 SV=1
MGSDTRDSALDADRARLVTRQVEEAVRQQPHATDCAVVLHGAEDPDGPAPAELRCVNCGIGDAFPGLAFDTGGVCSLCARLDAHREEIQVYFRQPEELAPRLRGAARARGSDIDCLLLFSGGKDSTYVLYRLVELGLRVMTFTFDNGFISRTALRNVEDVTSELGIEHVTATRADQRTVFLRSLQEHKSVCNGCFRSLLDLSTTLAHERGIPSIVTGLSRGQIMDERLSWFHEHGVYDVAEIEEKLRVGRRVYHQASGDLGAAVDSVDVVDFFRYSEVTKEGIRAYLRQRSSLWAQPTDTGFCSSNCMINDVGVYVHAAERGYHNYEAPTRWEVRLGHLDRAEADEELRVPVDTERVRRMLARIGYPDPADLRRLGARMTAYYVPAPGTAAQELPGAVAGVLPESLLPATWVPVPRIPRTAGRVDRRALLALRTVGPSASRAPEAGGVPPADGPLLAVQQRLLRQHTEELKGHARALPLVAPGVLDPAAVRRAVLRLLQHHDALRLRFAESEGRWSQRRGGIAGAVPVGVLDLTGRDPADEARLLGKAVDRMRAGTDPVGGRPLRIAVLDRRPRPSGLLVVVHGLVADTRSWRVLLEDLSEAVRQLQAGEAVALPPAGSFLDRLPPHDPAPASASQEAAATSPGEPRTSREPLGEPLRVHCDATVPARAAATAIQRELTRLFDGAGQPLELLDHTARSGEDRTVGPLTAPETVRGGSGAGAAGPEPVTTGPEPVPTDRETGAAGSGPVTTDPEPVPTDRETAPTAPETTPAGSETAPTAPEPVPPPPPAAHDRRSHPPHRYEHFGDLSAELLAPGTLWALAPGAEDTFTRPLGGLPEGVVVTGSVRGGRLVLDWWAAEPLRTGLRAAGVPERVAARLAAGRTQGDGA

SEQ ID NO: 38942 - protein, 224 aa, unidentified
  source 1..224: note = Kitasatospora aureofaciens
  REGION 1..224: note = tr|A0A0L8P779|A0A0L8P779_KITAU 7-cyano-7-deazaguanine synthase OS=Kitasatospora aureofaciens OX=1894 GN=ADK78_27905 PE=3 SV=1
MTSAKTLVVLSGGIDSVVLAHACKAEGREISAIAIDYGQRHRKELEYAGRAAGKLNIDLTVADLGGYSRLMRGFSLTDADVTVPDEHYTRTGSVNVVPNRNPVFMTVAYAHAVLAGAQEMCLGFLAEDAATAPDTSPAFLTAFNAMEARALEGLADPPPRVTAPLITLRKADVLLLGTELGVDWRETWTCFKGERFHCGSCASCHDRRNAFAEADLPDPTRYQR

SEQ ID NO: 38943 - protein, 371 aa, Kitasatospora cineracea
  REGION 1..371: note = tr|A0A3N1YHG5|A0A3N1YHG5_9ACTN 7-cyano-7-deazaguanine synthase in queuosine biosynthesis; OS = Kitasatospora cineracea OX=88074 GN=EDD39_6358 PE=4 SV=1
MAADLTRIAAAAYLADRSTPRPTTFSRTIALTVHTVDPEPWNAQPGRLVEDLLTWLTGDQWQLTAAAASAPDNAPAPIATADDVMLLSGGMDSLCGAADHLADGRSRIHLSHYDASTAIRHAQTTAVSWLNTRATQPIRHLALKVCQTGTPREASSRSRSLLFAALASTVAASASSPHVIVPENGFTSINPPLTAARGGALSTRSTHPGTFARLNQLLTTLSLPIHISNPYAYLTKGQLLTRAHQRTDGGVLAATAATLSCSKLDGARYTGGNPNHNCGLCLACLVRRAAFTDGPYPDPTPYLVDTLADDARGNLLRRRRRDMRDIQQLLLTGIDDTDLLAVGDVPLDTDIDAVMDLCQRGLQELSRVPLP

SEQ ID NO: 38944 - protein, 231 aa, Kitasatospora niigatensis
  REGION 1..231: note = tr|A0A3N4RYF9|A0A3N4RYF9_9ACTN 7-cyano-7-deazaguanine synthase OS=Kitasatospora niigatensis OX=88075 GN=queC PE=3 SV=1
MGRPAIVLLSGGLDSTTVLAIAKEQGFTPYALSFRYGQRHSVELEAAKRVAEAQGVERHVIADIDLRVFGGSALTDDIAVPKHDTVEEAESSSVPITYVPARNTIFLSFALAYAEVVGATDIFTGVTAVDYSGYPDCRPEYMDAYAKMANLATRAGIEGTQELKLHSPLIALSKADIVREGLRLGVDYSLTSSCYDPDEQGRACGRCDTCLMRLKGFAEAGATDPVQYQGA

SEQ ID NO: 38945 - protein, 244 aa, Kitasatospora sp.
  REGION 1..244: note = tr|A0A540W9E8|A0A540W9E8_9ACTN 7-cyano-7-deazaguanine synthase OS=Kitasatospora sp. MMS16-CNU292 OX=2567942 GN=queC PE=3 SV=1
MRGTTESTEMTDKSPCHAIVIASGGLDSTTVAYWLADRGAILTMLSFDYGQRHRTELQYAGRIAGHLGASHEVVDLSGLGRLLTGSALTDLGVRVPDGHYTAETMRSTVVPNRNTIMLSVAVAGAVATGADAVAFGAHSGDHAIYPDCRASFFDQFAAMTREGNEGFLADGFELLAPFIGLTKADIVEIGRQLGVPFEDTWSCYKGGQVHCGTCGTCTERIEAFALAGVSDPTVYASATPGAAS

SEQ ID NO: 38946 - protein, 236 aa, unidentified
  source 1..236: note = Kitasatospora xanthocidica
  REGION 1..236: note = tr|A0A373A5D3|A0A373A5D3_9ACTN 7-cyano-7-deazaguanine synthase OS=Kitasatospora xanthocidica OX=83382 GN=queC PE=3 SV=1
MTEHAPPQHAVVIASGGLDSTTVAYWLADSGSRLTLLSFDYGQRHRKELDFARQAAGRLNARHEVVDLSGLGRLLSGSALTDPAVEVPDGHYTAESMRSTVVPNRNAIMLSVAVGAAVAVGADAVAFGAHAGDHAVYPDCRTEFFDVFGEVARVGNEGFIAEGFRLLAPFIDQTKADIVRVAGQVGVPFADTWSCYRGGELHCGTCGTCAERIEAFALAEVEDPTEYATAPTGVAR

SEQ ID NO: 38947 - protein, 233 aa, unidentified
  source 1..233: note = Klebsiella aerogenes
  REGION 1..233: note = tr|A0A3S5DT61|A0A3S5DT61_KLEAE 7-cyano-7-deazaguanine synthase OS=Klebsiella aerogenes; OX = 548 GN=queC PE=3 SV=1
MKRAVVVFSGGQDSTTCLVQALQQYDEVHCVTFDYGQRHRAEIDVARELALKLGAVAHKVLDVTLLNELAVSSLTRDNIPVPDYQPDAEGIPNTFVPGRNILFLTLTAIYAYQVKAEAIITGVCETDFSGYPDCRDEFVKALHHAVSLGMAKDIRFETPLMWLNKAETWALADYWGQLDLVRRETLTCYNGIKGDGCGQCAACNLRANGLNQYLADKVGVMAVMQQKTGLAQA

SEQ ID NO: 38948 - protein, 236 aa, unidentified
  source 1..236: note = Klebsiella aerogenes
  REGION 1..236: note = tr|A0A0M3H7X9|A0A0M3H7X9_KLEAE 7-cyano-7-deazaguanine synthase OS=Klebsiella aerogenes; OX = 548 GN=queC PE=3 SV=1
MKRAVVVFSGGQDSTTCLVQALEQYDEVHCVTFDYGQRHRAEIDVARELALKLGAVAHKVLDVTLLNELAVSSLTRDSIPVPDYEPDADGIPNTFVPGRNILFLTLTAIYAYQVKAEAIITGVCETDFSGYPDCRDEFVKALHHAVSLGMAKDIRFETPLMWLNKAETWALADYWGQLDLVRRETLTCYNGIKGDGCGQCAACNLRANGLNQYLGDQAGVMAQMKQKTGLGQGHEA

SEQ ID NO: 38949 - protein, 231 aa, unidentified
  source 1..231: note = Klebsiella grimontii
  REGION 1..231: note = tr|A0A4R4DLT4|A0A4R4DLT4_9ENTR 7-cyano-7-deazaguanine synthase OS=Klebsiella grimontii; OX = 2058152 GN=queC PE=3 SV=1
MKRAVVVFSGGQDSTTCLVQALQQYDEVHCVTFDYGQRHRVEIDVARELALKLGAVAHKILDVTLLNELAVSSLTRDSIPVPDYEPDASGIPNTFVPGRNILFLTLTAIYAYQVKAEAIITGVCETDFSGYPDCRDEFVQALHHAVSLGMAKDIRFETPLMWLNKAETWALADYWGQLALVRHETLTCYNGIKGDGCGQCAACNLRANGLHHYLGDKVGVMTVMKQKTGLQ

SEQ ID NO: 38950 - protein, 231 aa, unidentified
  source 1..231: note = Klebsiella grimontii
  REGION 1..231: note = tr|A0A564GSF2|A0A564GSF2_9ENTR 7-cyano-7-deazaguanine synthase OS=Klebsiella grimontii; OX = 2058152 GN=queC PE=3 SV=1
MKRAVVVFSGGQDSTTCLVQALQQYDEVHCVTFDYGQRHRAEIDVARELALKLGAVAHKVLDVTLLNELAVSSLTRDSIPIPDYEPDASGIPNTFVPGRNILFLTLTAIYAYQVKAEAIITGVCETDFSGYPDCRDEFVKALHHAVSLGMAKDIRFETPLMWLNKAETWALADYWGQLELVRHETLTCYNGIKGDGCGQCAACNLRANGLSHYLGDKVGVMTVMKQKTGLQ

SEQ ID NO: 38951 - protein, 231 aa, unidentified
  source 1..231: note = Klebsiella michiganensis
  REGION 1..231: note = tr|A0A341E8C0|A0A341E8C0_9ENTR 7-cyano-7-deazaguanine synthase OS=Klebsiella michiganensis OX=1134687 GN=queC PE=3 SV=1
MKRAVVVFSGGQDSTTCLVQALQQYDEVHCVTFDYGQRHRAEIDVARELALKLGAVAHKILDVTLLNELAVSSLTRDSIPVPDYEPDASGIPNTFVPGRNILFLTLTAIYAYQVKAEAIITGVCETDFSGYPDCRDEFVQALHHAVSLGMAKDIRFETPLMWLNKAETWALADYWGQLALVRHETLTCYNGIKGDGCGQCAACNLRANGLHHYLGDKVGVMTVMKQKTGLQ

SEQ ID NO: 38952 - protein, 231 aa, unidentified
  source 1..231: note = Klebsiella michiganensis
  REGION 1..231: note = tr|A0A0J2LE24|A0A0J2LE24_9ENTR 7-cyano-7-deazaguanine synthase OS=Klebsiella michiganensis OX=1134687 GN=queC PE=3 SV=1
MKRAVVVFSGGQDSTTCLVQALQQYDEVHCVTFDYGQRHRAEIDVARELALKLGAVAHKVLDVTLLNELAVSSLTRDSIPVPDYEPDASGIPNTFVPGRNILFLTLTAIYAYQVKAEAIITGVCETDFSGYPDCRDEFVKALHHAVSLGMAKDIRFETPLMWLNKAETWALADYWGQLDLVRHETLTCYNGIKGDGCGQCAACNLRANGLSQYLGDKVGVMTVMKQKTGLQ

SEQ ID NO: 38953 - protein, 103 aa, Klebsiella oxytoca
  REGION 1..103: note = tr|A0A377SHC5|A0A377SHC5_KLEOX 7-cyano-7-deazaguanine synthase OS=Klebsiella oxytoca; OX = 571 GN=queC_1 PE=3 SV=1
MKRAVVVFSGGQDSTTCLVQALQQYDEVHCVTFDYGQRHRAEIDVARELALKLGAVAHKVLDVTLLNELAVSSLTAIAFRFRIMNRTPAAFRIPSYPGATFCF

SEQ ID NO: 38954 - protein, 231 aa, Klebsiella oxytoca; identical to SEQ ID NO: 38952
  REGION 1..231: note = tr|A0A0G3SDE2|A0A0G3SDE2_KLEOX 7-cyano-7-deazaguanine synthase OS=Klebsiella oxytoca; OX = 571 GN=queC_1 PE=3 SV=1

SEQ ID NO: 38955 - protein, 84 aa, Klebsiella pneumoniae
  REGION 1..84: note = tr|A0A378E636|A0A378E636_KLEPR 7-cyano-7-deazaguanine synthase OS=Klebsiella pneumoniae subsp. rhinoscleromatis OX=39831 GN=queC_1 PE=3 SV=1
MAKDIRFETPLMWLNKAETWALADYWGQLDLVRRETLTCYNGIKGDGCGQCAACNLRANGLNQYLADKVGVMAVMQQKTGLAQA

SEQ ID NO: 38956 - protein, 233 aa, Klebsiella pneumoniae; identical to SEQ ID NO: 38947
  REGION 1..233: note = sp|A6T5I7|QUEC_KLEP7 7-cyano-7-deazaguanine synthase; OS = Klebsiella pneumoniae subsp. pneumoniae (strain ATCC 700721 / MGH 78578) OX=272620 GN=queC PE=3 SV=1

SEQ ID NO: 38957 - protein, 233 aa, unidentified
  source 1..233: note = Klebsiella quasipneumoniae
  REGION 1..233: note = tr|A0A2Z3FFW0|A0A2Z3FFW0_9ENTR 7-cyano-7-deazaguanine synthase OS=Klebsiella quasipneumoniae OX=1463165 GN=queC PE=3 SV=1
MKRAVVVFSGGQDSTTCLVQALQQYDEVHCVTFDYGQRHRAEIDVARELALKLGAVAHKVLDVTLLNELAVSSLTRDNIPVPDYQPDAEGIPNTFVPGRNILFLTLTAIYAYQVKADAIITGVCETDFSGYPDCRDEFVKALHHAVSLGMAKDIRFETPLMWLNKAETWALADYWGQLDLVRRETLTCYNGIKGDGCGQCAACNLRANGLNQYLADKVGVMAVMKQKTGLTQA

SEQ ID NO: 38958 - protein, 233 aa, unidentified
  source 1..233: note = Klebsiella quasipneumoniae
  REGION 1..233: note = tr|A0A5C6IL75|A0A5C6IL75_9ENTR 7-cyano-7-deazaguanine synthase OS=Klebsiella quasipneumoniae subsp. similipneumoniae OX=1463164 GN=queC; PE = 3 SV=1
MKRAVVVFSGGQDSTTCLVQALQQYDEVHCVTFDYGQRHRAEIDVARELALKLGAVAHKVLDVTLLNELAVSSLTRDNIPVPDYQPDAEGIPNTFVPGRNILFLTLTAIYAYQVKAEAIITGVCETDFSGYPDCRDEFVKALHHAVSLGMAKDIRFETPLMWLNKAETWALADYWGQLDLVRRETLTCYNGIKGDGCGQCAACNLRANGLNQYLADKVGVMAVMKQKTGLTQA

SEQ ID NO: 38959 - protein, 233 aa, unidentified
  source 1..233: note = Klebsiella quasivariicola
  REGION 1..233: note = tr|A0A223UF94|A0A223UF94_9ENTR 7-cyano-7-deazaguanine synthase OS=Klebsiella quasivariicola OX=2026240 GN=queC PE=3 SV=1
MKRAVVVFSGGQDSTTCLVQALQQYDEVHCVTFDYGQRHRAEIDVARELALKLGAVAHKVLDVTLLNELAVSSLTRDNIPVPDYQPDAEGIPNTFVPGRNILFLTLTAIYAYQVKAEAIITGVCETDFSGYPDCRDEFVKALHHAVSLGMAKDIRFETPLMWLNKAETWALADYWGQLDLVRRETLTCYNGIKGDGCGQCAACNLRANGLNQYLGDKVGVMAVMKQKTGLTQA

SEQ ID NO: 38960 - protein, 231 aa, Klebsiella sp.
  REGION 1..231: note = tr|A0A564GV74|A0A564GV74_9ENTR 7-cyano-7-deazaguanine synthase OS=Klebsiella sp. WCHKl090001 OX=2153354 GN=queC PE=3 SV=1
MKRAVVVFSGGQDSTTCLVQALQQYDEVHCVTFDYGQRHRAEIDVARELAMKLGAVAHKVLDVTLLNELAISSLTRDSIPVPDYEPDANGIPNTFVPGRNILFLTLTAIYAYQVKAEAIITGVCETDFSGYPDCRDEFVKALHHAVSLGMAKDIRFETPLMWLNKAETWALADYWGQLDLVRQETLTCYNGIKGDGCGQCAACHLRANGLNQYQADKPGIMAVMKRKTGLE

SEQ ID NO: 38961 - protein, 233 aa, Klebsiella sp.
  REGION 1..233: note = tr|A0A3G5D710|A0A3G5D710_9ENTR 7-cyano-7-deazaguanine synthase OS=Klebsiella sp. P1CD1; OX = 2267618 GN=queC PE=3 SV=1
MKRAVVVFSGGQDSTTCLVQALQQYDEVHCVTFDYGQRHRAEIDVARELALKLGAVAHKVLDVTLLNELAVSSLTRDNIPVPDYQPDAEGIPNTFVPGRNILFLTLTAIYAYQVKAEAIITGVCETDFSGYPDCRDEFVKALHHAVSLGMAKDIRFETPLMWLNKAETWALADFWGQLDLVRQETLTCYNGIKGDGCGQCAACNLRANGLNQYLGDKVGVMAVMKQKTGLAQA

SEQ ID NO: 38962 - protein, 215 aa, Klebsiella variicola
  REGION 1..215: note = tr|A0A2N5A7U0|A0A2N5A7U0_KLEVA 7-cyano-7-deazaguanine synthase (Fragment) OS=Klebsiella variicola OX=244366 GN=CWM98_29855 PE=3 SV=1
MKRAVVVFSGGQDSTTCLVQALQQYDEVHCVTFDYGQRHRAEIDVARELALKLGAVAHKVLDVTLLNELAVSSLTRDNIPVPDYQPDAEGIPNTFVPGRNILFLTLTAIYAYQVKAEAIITGVCETDFSGYPDCRDEFVKALHHAVSLGMAKDIRFETPLMWLNKAETWALADFWGQLDLVRQETLTCYNGIKGDGCGQCAACNLRANGLNQYLG

SEQ ID NO: 38963 - protein, 233 aa, Klebsiella variicola; identical to SEQ ID NO: 38961
  REGION 1..233: note = tr|A0A087FUH7|A0A087FUH7_KLEVA 7-cyano-7-deazaguanine synthase OS=Klebsiella variicola; OX = 244366 GN=queC PE=3 SV=1

SEQ ID NO: 38964 - protein, 231 aa, Kluyvera ascorbata
  REGION 1..231: note = tr|A0A378GLM7|A0A378GLM7_9ENTR 7-cyano-7-deazaguanine synthase OS=Kluyvera ascorbata; OX = 51288 GN=queC PE=3 SV=1
MKRAVVVFSGGQDSTTCLVQALHQYDEVHCVTFDYGQRHRAEIDVARELALTLGARAHKVLDVTLLNELAVSSLTRDSIPVPDYEPDADGIPNTFVPGRNILFLTLAAIYAYQVKAEAVITGVCETDFSGYPDCRDEFVKALNHAVSLGMAKDIRFETPLMWLDKAQTWALADYWDKLELVRTETLTCYNGIKGNGCGHCAACNLRANGLNHYLADKPGVMAAMKQKTGLK

SEQ ID NO: 38965 - protein, 231 aa, Kluyvera ascorbata
  REGION 1..231: note = tr|A0A3N2SFB3|A0A3N2SFB3_9ENTR 7-cyano-7-deazaguanine synthase OS=Kluyvera ascorbata; OX = 51288 GN=queC PE=3 SV=1
MKRAVVVFSGGQDSTTCLVQALHQYDEVHCVTFDYGQRHRAEIDVARELALTLGARAHKVLDVTLLNELAVSSLTRDSIPVPDYEPDADGIPNTFVPGRNILFLTLAAIYAYQVKAEAVITGVCETDFSGYPDCRDEFVKALNHAVSLGMAKDIRFETPLMWLDKAQTWALADYWNKLELVRTETLTCYNGIKGNGCGHCAACNLRANGLNHYLADKPGVMAAMKQKTGLK

SEQ ID NO: 38966 - protein, 233 aa, Kluyvera cryocrescens
  REGION 1..233: note = tr|A0A2X3EB35|A0A2X3EB35_KLUCR 7-cyano-7-deazaguanine synthase OS=Kluyvera cryocrescens; OX = 580 GN=queC PE=3 SV=1
MKRAVVVFSGGQDSTTCLVQALHQYDEVHCVTFDYGQRHRAEIDVARELALTLGARAHKVLDVTLLNELAVSSLTRDSIPVPDYEPDADGIPNTFVPGRNILFLTLAAIYAYQVKAEAVITGVCETDFSGYPDCRDEFVKALNHAVSLGMAKDIRFETPLMWLDKAQTWALADYWGKLDLVRTETLTCYNGIKGDGCGHCAACNLRANGLHHYLADKPGVMATMKQKTGLKSV

SEQ ID NO: 38967 - protein, 98 aa, Kluyvera cryocrescens
  REGION 1..98: note = tr|A0A485CZ09|A0A485CZ09_KLUCR 7-cyano-7-deazaguanine synthase OS=Kluyvera cryocrescens; OX = 580 GN=queC_1 PE=3 SV=1
MSLWKALNHAVSLGMAKDIRFETPLMWLDKAQTWALADYWGKLDLVRTETLTCYNGIKGDGCGHCAACNLRANGLHHYLADKPGVMATMKQKTGLKSV

SEQ ID NO: 38968 - protein, 231 aa, Kluyvera georgiana
  REGION 1..231: note = tr|A0A1B7JI52|A0A1B7JI52_9ENTR 7-cyano-7-deazaguanine synthase OS=Kluyvera georgiana ATCC 51603 OX=1354264 GN=queC PE=3 SV=1
MKRAVVVFSGGQDSTTCLVQALHQYDEVHCVTFDYGQRHRAEIDVARELALKLGARAHKVLDVTLLNELAVSSLTRDSIPVPDYEPSAAGIPNTFVPGRNILFLTLTAIYAYQVQAEAVITGVCETDFSGYPDCRDEFVKALNHAVNLGMAKDIRFETPLMWLDKAQTWALADYWGKLDMVRGETLTCYNGIKGDGCGHCAACNLRANGLNHYLADKPGVMAAMKQKTGLK

SEQ ID NO: 38969 - protein, 231 aa, Kluyvera intermedia
  REGION 1..231: note = tr|A0A1X0X802|A0A1X0X802_KLUIN 7-cyano-7-deazaguanine synthase OS=Kluyvera intermedia; OX = 61648 GN=queC PE=3 SV=1
MKRAVVVFSGGQDSTTCLIQALQQYDEVHCVTFDYGQRHRAEIDVARELALQSGARAHKVLDVTLLNELAVSSLTRDSIPVPDYQPDASGIPNTFVPGRNILFLTLTAIYAYQVQAEAVITGVCETDFSGYPDCRDEFVKALNHAVNLGMAKDIRFETPLMWIDKAETWALADYWGKLELVRNETLTCYNGIKGDGCGHCAACNLRANGLRHYLADKAGVMAAMKKKTGLK

SEQ ID NO: 38970 - protein, 231 aa, Kluyvera intermedia
  REGION 1..231: note = tr|A0A447MKF8|A0A447MKF8_KLUIN 7-cyano-7-deazaguanine synthase OS=Kluyvera intermedia; OX = 61648 GN=queC PE=3 SV=1
MKRAVVVFSGGQDSTTCLVQALHQYDEVHCVTFDYGQRHRAEIDVARELALTLGARAHKVLDVTLLNELAVSSLTRDSIPVPDYEPDADGIPNTFVPGRNILFLTLTAIYAYQVKAEAIITGVCETDFSGYPDCRDEFVKALHHAVSLGMAKDIRFETPLMWLDKAQTWALADYWGKLDLVRSETLTCYNGIKGDGCGHCAACSLRANGLNHYLADKPAVMAAMKQKTGLK

SEQ ID NO: 38971 - protein, 231 aa, Kluyvera sp.
  REGION 1..231: note = tr|A0A2T3XJD7|A0A2T3XJD7_9ENTR 7-cyano-7-deazaguanine synthase OS=Kluyvera sp. Nf5; OX = 2116543 GN=queC PE=3 SV=1
MKRAVVVFSGGQDSTTCLVQALQQYDEVHCVTFDYGQRHRAEIDVARELALQLGARAHKVLDVTLLNELAVSSLTRDSIPVPDYQPDASGIPNTFVPGRNILFLTLAAIYAYQVQAEAVITGVCETDFSGYPDCRDEFVKALNHAVTLGMAKDIRFETPLMWIDKAETWALADYWGKLELVRNETLTCYNGIKGDGCGQCAACNLRANGLSHYLADKTAVMAAMKKKTGLK

SEQ ID NO: 38972 - protein, 425 aa, unidentified
  source 1..425: note = Kocuria indica
  REGION 1..425: note = tr|A0A4P6RQ64|A0A4P6RQ64_9MICC 7-cyano-7-deazaguanine synthase OS=Kocuria indica; OX = 1049583 GN=KocCE7_07195 PE=3 SV=1
MKYLSVPKLEGADRGGDQTPILLFGRGGAGDVLTAGWSAAERIRRQKLMPDAAAWDLLAIALSVVVADGTTLRSASPDGWTRQIDLEIALSDPDRWTPYADAIGTALRFLTTDLWTISFRDGGTIPAPPKKPRYPTSEAVALLSGGLDSLIGAIDLTASGTTLLAVSQTVRGDAAKQDRFAQRIGGGIDHLQLNHNASTPRGQKETSQRSRSLIFLAFAVLAATATRRYAYGHPVPLYVCENGFIAINPPLTAARVGSLSTRTAHPEFLGRMQSIFEAVGLNIQIKNPYAEKTKGEMLRECLDQDLLSIEAPLSTSCGRFQRFNYKHCGRCVPCQIRRASFEAWGRPDPTEYVYDNLAIQDEDHAAFDDVRSVAIALLTIEQDGFDRWLGPTLSSPLIHNRLELRDMLQRGFGELRTIHERYGLV

SEQ ID NO: 38973 - protein, 241 aa, unidentified
  source 1..241: note = Komagataeibacter cocois
  REGION 1..241: note = tr|A0A365YZV6|A0A365YZV6_9PROT 7-cyano-7-deazaguanine synthase OS=Komagataeibacter cocois; OX = 1747507 GN=queC PE=3 SV=1
MTLSALSPDTALVVFSGGQDSATCLAWALSRFAHVETLGFDYGQRHSIELSCREKLRDGMTRLDPEWGARLGPDHTLSLDALGAVSDTALTREAEITMGENGLPTTFVPGRNLIFLTFAAALAARRNARHIITGVCETDYSGYPDCRDDTIKSLQVTLNLGMASRLVLHTPLMWIDKARTWQMARDLGGDDLVNLINRESHSCYLGTRGVMHAWGHGCGTCPACQLRRAGWERFRLLSSDA

SEQ ID NO: 38974 - protein, 245 aa, unidentified
  source 1..245: note = Komagataeibacter europaeus
  REGION 1..245: note = tr|A0A0M0ELJ5|A0A0M0ELJ5_KOMEU 7-cyano-7-deazaguanine synthase OS=Komagataeibacter europaeus OX=33995 GN=queC PE=3 SV=1
MSVPPPPSHPENEAALVLFSGGQDSATCLAWALARFGRVETLGFDYGQRHAVELECRATLRDGMATENALWAQRLGADHTLDLAALGTVSDTALTREAEITMNENGLPNTFVPGRNLIFLTFAAALAARRNIRHIVTGVCETDYSGYPDCRDDTIKSLQVTLNLGMDAHYVLHTPLMWIDKAQTWELAHQLGGETLVRLINRESHSCYMGTRGTLHAWGHGCGTCPACQLRKAGWAQYMAARQHV

SEQ ID NO: 38975 - protein, 245 aa, unidentified; identical to SEQ ID NO: 38974
  source 1..245: note = Komagataeibacter europaeus
  REGION 1..245: note = tr|A0A0D6PX04|A0A0D6PX04_KOMEU 7-cyano-7-deazaguanine synthase OS=Komagataeibacter europaeus NBRC 3261 OX=1234669 GN=queC PE=3 SV=1

SEQ ID NO: 38976 - protein, 248 aa, unidentified
  source 1..248: note = Komagataeibacter hansenii
  REGION 1..248: note = tr|A0A318Q1B6|A0A318Q1B6_KOMHA 7-cyano-7-deazaguanine synthase OS=Komagataeibacter hansenii OX=436 GN=queC PE=3 SV=1
MTIPATSAAGPSGDSALVVFSGGQDSATCLAWALSRFAHVETLGFDYGQRHSVELSCRAALRDGMARLDPAWAARLGPDHTLSLDALGAVSDTALTREAEITLGENGLPTTFVPGRNIIFLTFAAALAARRNARHIVTGVCETDYSGYPDCRDDTIKALQVTLNLGMASRLVLHTPLMWIDKAQTWLMAQELGGDALVGLINRESHSCYLGTRGVMHPWGHGCGTCPACQLRRAGWERFRAMTQGHDI

SEQ ID NO: 38977 - protein, 248 aa, unidentified; identical to SEQ ID NO: 38976
  source 1..248: note = Komagataeibacter hansenii
  REGION 1..248: note = tr|D5QDE2|D5QDE2_KOMHA 7-cyano-7-deazaguanine synthase OS=Komagataeibacter hansenii ATCC 23769 OX=714995; GN = queC PE=3 SV=1

SEQ ID NO: 38978 - protein, 245 aa, unidentified
  source 1..245: note = Komagataeibacter intermedius
  REGION 1..245: note = tr|A0A0N0MF10|A0A0N0MF10_9PROT 7-cyano-7-deazaguanine synthase OS=Komagataeibacter intermedius AF2 OX=1458464 GN=queC PE=3 SV=1
MSVSPPPSHPENEAALVLFSGGQDSATCLAWALSRFGRVETLGFDYGQRHAVELECRDALRDGMATENAQWAQRLGADHTLDLAALGTVSDTALTREAEITMNENGLPNTFVPGRNLIFLTFAAALAARRHIRHIVTGVCETDYSGYPDCRDDTIKSLQVTLNLGMDSHYVLHTPLMWIDKAQTWELARQLGGNALVRLINRESHSCYLGTRGTLHAWGHGCGTCPACQLRKAGWEQFMAARQHV

SEQ ID NO: 38979 - protein, 246 aa, unidentified
  source 1..246: note = Komagataeibacter maltaceti
  REGION 1..246: note = tr|A0A2S3W554|A0A2S3W554_9PROT 7-cyano-7-deazaguanine synthase OS=Komagataeibacter maltaceti OX=1203393 GN=queC PE=3 SV=1
MTIPAPSPAGPSGERALVVFSGGQDSATCLAWALSRFAHVETLGFDYGQRHSIELSCREKLRAGMAALDPAWGVRLGPDHTLSLDALGAVSDTALTREAEITLGENGLPTTFVPGRNIIFLTFAAALAARRNARHIITGVCETDYSGYPDCRDDTIKALQVTLNLGMASRLVLHTPLMWIDKAQTWMMARELGGDALVDLINRESHSCYLGTRGVMHPWGHGCGTCPACQLRRAGWERFEAMTSDA

SEQ ID NO: 38980 - protein, 245 aa, unidentified
  source 1..245: note = Komagataeibacter medellinensis
  REGION 1..245: note = tr|G2I225|G2I225_KOMMN 7-cyano-7-deazaguanine synthase OS=Komagataeibacter medellinensis (strain NBRC 3288 / BCRC 11682 / LMG 1693 / Kondo 51) OX=634177 GN=queC; PE = 3SV=1
MSVSPPPSIPAREAALVLFSGGQDSATCLAWALARFGRVETLGFDYGQRHAVELECRDTLRRGMASEKPHWAQRLGADHTLDLAALGHVSDTALTREAEITLNENGLPNTFVPGRNLIFLTFAAALAARRNIRHIITGVCETDYSGYPDCRDDTIKSLQVTLNLGMASHYVLHTPLMWLDKAQTWELAQTLGGEALVGLINRESHSCYLGTRGTLHAWGHGCGTCPACQLRQAGWERFAEKSRHV

SEQ ID NO: 38981 - protein, 246 aa, unidentified
  source 1..246: note = Komagataeibacter nataicola
  REGION 1..246: note = tr|A0A1U9RNN6|A0A1U9RNN6_9PROT 7-cyano-7-deazaguanine synthase OS=Komagataeibacter nataicola OX=265960 GN=queC PE=3 SV=1
MSVSPPPPSRSENEAALVLFSGGQDSATCLAWALARFGRVETLGFDYGQRHAVELECRATLRDGMARLNPSWAQRLGADHTLDLAALGTVSDTALTREAEIALTEDGLPNTFVPGRNIIFLTFAAALAARRNIRHIVTGVCETDYSGYPDCRDDTIKSLQVTLNLGMASHYILHTPLMWIDKAQTWDLTEQLGGDALVRLINHESHSCYLGTRGALHAWGHGCGTCPACLLRKAGWERFMAQKHHV

SEQ ID NO: 38982 - protein, 245 aa, unidentified
  source 1..245: note = Komagataeibacter oboediens
  REGION 1..245: note = tr|A0A318QYF1|A0A318QYF1_9PROT 7-cyano-7-deazaguanine synthase OS=Komagataeibacter oboediens OX=65958 GN=queC PE=3 SV=1
MSVPPPPSHPENEAALVLFSGGQDSATCLAWALSRFGRVETLGFDYGQRHAVELECRDALRDGMATENPQWAQRLGADHTLDLAALGTVSDTALTREAEITMNENGLPNTFVPGRNLIFLTFAAALAARRHIRHIVTGVCETDYSGYPDCRDDTIKSLQVTLNLGMDSHYVLHTPLMWIDKAQTWELARQLGGNALVRLINRESHSCYLGSRGTLHAWGHGCGTCPACQLRKAGWEQFMAARQHV

SEQ ID NO: 38983 - protein, 241 aa, unidentified
  source 1..241: note = Komagataeibacter pomaceti
  REGION 1..241: note = tr|A0A318QAJ5|A0A318QAJ5_9PROT 7-cyano-7-deazaguanine synthase OS=Komagataeibacter pomaceti OX=2021998 GN=queC PE=3 SV=1
MTLSALSPDTALVVFSGGQDSATCLAWALSRFAHVETLGFDYGQRHSIELSCREKLRDGMARLDPAWGARLGPDHTLSLDALGAVSDTALTREAEITMGENGLPTTFVPGRNLIFLTFAAALAARRNARHIITGVCETDYSGYPDCRDDTIKSLQVTLNLGMASRLVLHTPLMWIDKARTWQMARDLGGDALVNLINRESHSCYLGTRGVMHPWGHGCGTCPACQLRRAGWERFQSLSSDA

SEQ ID NO: 38984 - protein, 245 aa, unidentified; identical to SEQ ID NO: 38486
  source 1..245: note = Komagataeibacter rhaeticus
  REGION 1..245: note = tr|A0A181C974|A0A181C974_9PROT 7-cyano-7-deazaguanine synthase OS=Komagataeibacter rhaeticus OX=215221 GN=queC PE=3 SV=1

SEQ ID NO: 38985 - protein, 245 aa, unidentified
  source 1..245: note = Komagataeibacter rhaeticus
  REGION 1..245: note = tr|A0A070ABK1|A0A070ABK1_9PROT 7-cyano-7-deazaguanine synthase OS=Komagataeibacter rhaeticus AF1 OX=1432055 GN=queC PE=3 SV=1
MSVSPPPSTPAREAALVLFSGGQDSATCLAWALARFGRVETLGFDYGQRHAVELECRATLREGMATENPQWAARLGADHTLDLAVLGTLSDTALTREAEITLNENGLPNTFVPGRNLLFLTFAAALAARRNIRHIITGVCETDYSGYPDCRDDTIKSLQVTLNLGMASHYVLHTPLMWLDKARTWELARTLGGDALVGLINRESHSCYLGTRGTLHPWGHGCGTCPACQLRKAGWERFLAECSHV

SEQ ID NO: 38986 - protein, 245 aa, unidentified
  source 1..245: note = Komagataeibacter saccharivorans
  REGION 1..245: note = tr|A0A347W803|A0A347W803_9PROT 7-cyano-7-deazaguanine synthase OS=Komagataeibacter saccharivorans OX=265959 GN=queC PE=3 SV=1
MSVPPPPSRPENEAALVLFSGGQDSATCLAWALSRFGRVETLGFDYGQRHAVELECRTALRDGMAIENPDWAARLGADHTLDLAALGTVSDTALTREAEIALTEGGLPNTFVPGRNIIFLTFAAALAARRNIRHIVTGVCETDYSGYPDCRDDTMKSLQVTLNLGMDSHYIIHTPLMWIDKAETWDLALQLGGNALVRLINHESHSCYLGTRGTLHAWGHGCGTCPACQLRKAGWERFVAQHPHV

SEQ ID NO: 38987 - protein, 245 aa, unidentified
  source 1..245: note = Komagataeibacter sp.
  REGION 1..245: note = tr|A0A371Z3D6|A0A371Z3D6_9PROT 7-cyano-7-deazaguanine synthase OS=Komagataeibacter sp. AV 382 OX=2301223 GN=queC PE=3 SV=1
MSVPPPLSRPEDEAALVLFSGGQDSATCLAWALSRFGRVETLGFDYGQRHAVELECRATLREGMATENPTWAQRLGADHTLDLAALGTVSDTALTREAEIAMTEGGLPNTFVPGRNLIFLTFAAALAARRNVRHIVTGVCETDYSGYPDCRDDTIKSLQVTLNLGMDSHYIIHTPLMWIDKAQTWELALQLGGNALVRLINHESHSCYLGTRGTLHAWGHGCGTCPACLLRKAGWERFMAERHHV

SEQ ID NO: 38988 - protein, 245 aa, unidentified
  source 1..245: note = Komagataeibacter sp.
  REGION 1..245: note = tr|A0A4P5NJW5|A0A4P5NJW5_9PROT 7-cyano-7-deazaguanine synthase OS=Komagataeibacter sp. MSKU9 OX=1932662 GN=queC PE=3 SV=1
MSVPPPPSHPENEAALVLFSGGQDSATCLAWALARFGRVETLGFDYGQRHAVELECRAALRDGMARQNARWAERLGADHTLDLAALGTVSDTALTREAKITMSENGLPNTFVPGRNLIFLTFAAALAARRNIRHIVTGVCETDYSGYPDCRDDTIKSLQVTLNLGMDAHYVLHTPLMWIDKAQTWELAHQLGGDALVHLINRESHSCYLGTRGTLHAWGHGCGTCPACRLRKAGWEQYMAARQHV

SEQ ID NO: 38989 - protein, 246 aa, unidentified
  source 1..246: note = Komagataeibacter sucrofermentans
  REGION 1..246: note = tr|A0A318QJ46|A0A318QJ46_9PROT 7-cyano-7-deazaguanine synthase OS=Komagataeibacter sucrofermentans OX=1053551 GN=queC PE=3 SV=1
MSVSPPPPSRPENEAALVLFSGGQDSATCLAWALARFGRVETLGFDYGQRHAVELECRATLRDGMARLNPTWAQRLGADHTLDLAALGTVSDTALTREAEIALTEGGLPNTFVPGRNIIFLTFAAALAARRNIRHIVTGVCETDYSGYPDCRDDTIKSLQVTLNLGMASHYILHTPLMWIDKAQTWDLAGQLGGDALVQLINHESHSCYLGTRGVLHDWGHGCGTCPACLLRKAGWERFMAQKHHV

SEQ ID NO: 38990 - protein, 245 aa, unidentified
  source 1..245: note = Komagataeibacter swingsii
  REGION 1..245: note = tr|A0A2V4RKM7|A0A2V4RKM7_9PROT 7-cyano-7-deazaguanine synthase OS=Komagataeibacter swingsii OX=215220 GN=queC PE=3 SV=1
MRAPPPPSHPENEAALVLFSGGQDSATCLAWALARFGRVETLGFDYGQRHAVELECRAALRDGMATQNALWAQRLGADHTLDLAALGTVSDTALTREAEITMNENGLPNTFVPGRNLIFLTFAAALAARRNIRHIVTGVCETDYSGYPDCRDDTIKSLQVTLNLGMDAHYVLHTPLMWIDKAQTWELAHQLGGDALVRLINRESHSCYLGTRGTLHAWGHGCGTCPACTLRRAGWEQYMAARQHV

SEQ ID NO: 38991 - protein, 245 aa, unidentified; identical to SEQ ID NO: 38486
  source 1..245: note = Komagataeibacter xylinus
  REGION 1..245: note = tr|A0A2D3HC80|A0A2D3HC80_KOMXY 7-cyano-7-deazaguanine synthase OS=Komagataeibacter xylinus OX=28448 GN=queC PE=3 SV=1

SEQ ID NO: 38992 - protein, 248 aa, unidentified; identical to SEQ ID NO: 38976
  source 1..248: note = Komagataeibacter xylinus
  REGION 1..248: note = tr|A0A143WGN1|A0A143WGN1_KOMXY 7-cyano-7-deazaguanine synthase OS=Komagataeibacter xylinus OX=28448 GN=queC PE=3 SV=1

SEQ ID NO: 38993 - protein, 237 aa, unidentified
  source 1..237: note = Kordiimonadales bacterium
  REGION 1..237: note = tr|A0A5A7N9W8|A0A5A7N9W8_9PROT 7-cyano-7-deazaguanine synthase OS=Kordiimonadales bacterium JCM 17846 OX=1236968 GN=queC PE=3 SV=1
MTKGSSSPGTPAILLLSGGLDSATVGAMARADGFALHALSFDYGQRHKAELQAADRVAKSLDVVEHKVAHIDLALFGGSALTADIDVPKGRTDSDRDAGIPITYVPARNTIFLSYALAFAEVREARHIFIGVNAVDFSGYPDCRPDYIKAYETMANLATVLGRSGTARIEIRTPLLHMSKAEIVAAGTRLDVDYAQTTSCYDPDEYGRACGACDACFLRREGFAAAGIADPTRYKAS

SEQ ID NO: 38994 - protein, 206 aa, unidentified
  source 1..206: note = Kordiimonadales bacterium
  REGION 1..206: note = tr|A0A5A7MU55|A0A5A7MU55_9PROT 7-cyano-7-deazaguanine synthase OS=Kordiimonadales bacterium JCM 17844 OX=1236966 GN=exsB PE=3 SV=1
MNQAVVMVSGGLDSTTVCYLLVREGIEVYPIFFDYGQHCAKTEWAKVREVLPQKALPPERLNISDLFKGSSSRMIQEADLWKEAVSDDDLYVPYRTMLFFAAAAARAQTLQVLNVYSGFINSNHAKEIDCSTAFMNGLEELSSGVGAVRFHAPFREKTKADVVRQALELGVPIGRTFSCQASSSFPCGACPNCVERLNALVEAGIA

SEQ ID NO: 38995 - protein, 231 aa, Kordiimonas lacus
  REGION 1..231: note = tr|A0A1G6VMJ1|A0A1G6VMJ1_9PROT 7-cyano-7-deazaguanine synthase OS=Kordiimonas lacus; OX = 637679 GN=queC PE=3 SV=1
MSDRKKAVVLLSGGLDSATCVAIAQEQGFEVYALSFRYGQRHSVELEAADRIADHLGVTEHKTAVIDLTLFGGSALTADIDVPKDRSDDDMSHDIPVTYVPARNTIFLSFALAYAEVVGAKDIFIGVNALDYSGYPDCRPEFIKSYEETANLGTKVGVTDAERIRIRTPLLDMTKAEIAAAGTKLGVDYGLTISCYDPDTAGKACGHCDSCLLRKKGFKEAGLADPTRYQD

SEQ ID NO: 38996 - protein, 232 aa, Kordiimonas sp.
  REGION 1..232: note = tr|A0A2E1CYE1|A0A2E1CYE1_9PROT 7-cyano-7-deazaguanine synthase OS=Kordiimonas sp.; OX = 1970157 GN=queC PE=3 SV=1
MNNPEKRKAVVLLSGGLDSSTCLAMALQQGYETYALSFQYGQRHTIELDAAANIAVKQGAAKHVIANIDLRGFGGSALTDDIPVPKGRTESEMDVEIPVTYVPARNTIFLSYALAWAEVLKAYDIFIGVNAMDYSGYPDCRPEYIRSYEQMANLATKSGVSGEKVTIHAPLIDMTKAEIIQKGLSLGVDYSLTTSCYDPDEKGASCGQCDACKLRLKGFRENGIIDPIKYIT

SEQ ID NO: 38997 - protein, 237 aa, unidentified
  source 1..237: note = Koribacter versatilis
  REGION 1..237: note = sp|Q1IHK6|QUEC_KORVE 7-cyano-7-deazaguanine synthase; OS = Koribacter versatilis (strain Ellin345) OX=204669; GN = queC PE=3 SV=2
MKVQRGDTGKAVVVLSGGMDSTVCATLAVREYGAENIGALHVSYGQRTAAREKQAFAAVAERLGIQTRLAVETPFFRAIGGSALTDANIAVPDAGELIGHEIPVTYVPFRNAHLLAMAVSWAEVLGASKIYIGAVAQDSSGYPDCRPEFYEAYNLAVRRGTKAGDIEVVTPLIALRKHEIVSLGLELGAPFDLTWSCYSREDCACGVCDSCVLRLRAFEGAGAVDPVPYAPRLAGHD

SEQ ID NO: 38998 - protein, 231 aa, unidentified
  source 1..231: note = Kosakonia arachidis
  REGION 1..231: note = tr|A0A1I6XVV6|A0A1I6XVV6_9ENTR 7-cyano-7-deazaguanine synthase OS=Kosakonia arachidis; OX = 551989 GN=queC PE=3 SV=1
MKRAVVVFSGGQDSTTCLVQALQQYDEVHCVTFDYGQRHRAEIDVARELALTLGARAHKVLDVTLLNELAVSSLTRDSIPVPDYEPDATGIPNTFVPGRNILFLTLAAVYAYQVQAEAVITGVCETDFSGYPDCRDEFVTALNHAVNLGLAKDIRFETPLMWINKAETWALADYWEKLDLVRGETLTCYNGIKGDGCGHCAACNLRANGLQHYLADKSGVMATMKQKTGLK

SEQ ID NO: 38999 - protein, 231 aa, unidentified
  source 1..231: note = Kosakonia cowanii
  REGION 1..231: note = tr|A0A3R5VJN0|A0A3R5VJN0_9ENTR 7-cyano-7-deazaguanine synthase OS=Kosakonia cowanii; OX = 208223 GN=queC PE=3 SV=1
MKRAVVVFSGGQDSTTCLVQALQQYDEVHCVTFDYGQRHRAEIDVARELAQKLGARAHKVLDVTLLNELAVSSLTRDSIPVPDYEESADGIPNTFVPGRNILFLTLAAVYAYQVQAEAVITGVCETDFSGYPDCRDEFVKALNHAVSLGLAKDIRFETPLMWIDKAQTWALADYWGALDMVRSETLTCYNGIKGDGCGHCAACHLRANGLQQYLADKASVLSAMKAKTGLK

SEQ ID NO: 39000 - protein, 231 aa, unidentified
  source 1..231: note = Kosakonia oryzae
  REGION 1..231: note = tr|A0A1T5FTX0|A0A1T5FTX0_9ENTR 7-cyano-7-deazaguanine synthase OS=Kosakonia oryzae; OX = 497725 GN=queC PE=3 SV=1
MKRAVVVFSGGQDSTTCLVQALQQYDEVHCVTFDYGQRHRAEIDVARELALTLGARAHKVLDVTLLNELAVSSLTRDSIPVPDYEPDATGIPNTFVPGRNILFLTLAAVYAYQVQAEAVITGVCETDFSGYPDCRDEFVKALNHAVNLGLAKDIRFETPLMWIDKAETWALADYWGKLDLVRSETLTCYNGIKGDGCGHCAACNLRANGLQHYLADKSGVMAAMKQKTGLK

SEQ ID NO: 39001 - protein, 231 aa, unidentified
  source 1..231: note = Kosakonia oryzendophytica
  REGION 1..231: note = tr|A0A1C4ANL5|A0A1C4ANL5_9ENTR 7-cyano-7-deazaguanine synthase OS=Kosakonia oryzendophytica OX=1005665 GN=queC PE=3 SV=1
MKRAVVVFSGGQDSTTCLVQALQQYDEVHCVTFDYGQRHRAEIDVARELAQVLGARAHKVLDVTLLNELAVSSLTRDSIPVPDYQPDATGIPSTFVPGRNILFLTLAAVYAYQVQAEAVITGVCETDFSGYPDCRDEFVKALNHAVNLGLAKDIRFETPLMWIDKAETWAQADYWGKLDLVRSETLTCYNGIKGDGCGHCAACNLRANGLQHYLADKSGVMATMKQKTGLK

SEQ ID NO: 39002 - protein, 231 aa, unidentified
  source 1..231: note = Kosakonia oryziphila
  REGION 1..231: note = tr|A0A1C4F569|A0A1C4F569_9ENTR 7-cyano-7-deazaguanine synthase OS=Kosakonia oryziphila; OX = 1005667 GN=queC PE=3 SV=1
MKRAVVVFSGGQDSTTCLVQALQQYDEVHCVTFDYGQRHRAEIDVARELALTLGARAHKVLDVTLLNELAVSSLTRDSIPVPDYEPDATGIPNTFVPGRNILFLTLAAVYAYQVQAEAVITGVCETDFSGYPDCRDEFVKALNHAVNLGLAKDIRFETPLMWIDKAETWALADYWGKLDLVRSETLTCYNGIKGDGCGHCAACNLRANGLQHYLADKSAVMAAMKQKTGLK

SEQ ID NO: 39003 - protein, 231 aa, unidentified; identical to SEQ ID NO: 39000
  source 1..231: note = Kosakonia radicincitans
  REGION 1..231: note = tr|A0A1V0LHW1|A0A1V0LHW1_9ENTR 7-cyano-7-deazaguanine synthase OS=Kosakonia radicincitans DSM 16656 OX=1177180 GN=queC PE=3 SV=1

SEQ ID NO: 39004 - protein, 231 aa, unidentified; identical to SEQ ID NO: 39000
  source 1..231: note = Kosakonia radicincitans
  REGION 1..231: note = tr|A0A5E8BGS0|A0A5E8BGS0_9ENTR 7-cyano-7-deazaguanine synthase OS=Kosakonia radicincitans; OX = 283686 GN=queC PE=3 SV=1

SEQ ID NO: 39005 - protein, 231 aa, unidentified
  source 1..231: note = Kosakonia sp.
  REGION 1..231: note = tr|A0A1I1WRW6|A0A1I1WRW6_9ENTR 7-cyano-7-deazaguanine synthase OS=Kosakonia sp. S29; OX = 1855371 GN=queC PE=3 SV=1
MKRAVVVFSGGQDSTTCLVQALQQYDEVHCVTFDYGQRHRAEIDVARELALQSGARAHKVLDVTLLNELAVSSLTRDSIPVPDYQPDASGIPNTFVPGRNILFLTLAAIYAYQVQAEAVITGVCETDFSGYPDCRDEFVKALNHAVNLGMAKDIRFETPLMWIDKAETWALADYWGKLDLVRNETLTCYNGIKGDGCGQCAACNLRANGLRHYLADKTGVMATMKKKIGLL

SEQ ID NO: 39006 - protein, 231 aa, unidentified
  source 1..231: note = Kosakonia sp.
  REGION 1..231: note = tr|A0A368ZYH0|A0A368ZYH0_9ENTR 7-cyano-7-deazaguanine synthase OS=Kosakonia sp. AG348; OX = 2183906 GN=queC PE=3 SV=1
MKRAVVVFSGGQDSTTCLVQALQQYDEVHCVTFDYGQRHRAEIDVARELALTLGARAHKVLDVTLLNELAVSSLTRDSIPVPDYEPDATGIPNTFVPGRNILFLTLAAVYAYQVQAEAVITGVCETDFSGYPDCRDEFVKALNHAVNLGLAKEIRFETPLMWIDKAETWALADYWGKLDLVRSETLTCYNGIKGDGCGHCAACNLRANGLQHYLADKPAVMAAMKQKTGLK

SEQ ID NO: 39007 - protein, 88 aa, Kosmotoga sp.
  REGION 1..88: note = tr|A0A5D0RLX7|A0A5D0RLX7_9BACT 7-cyano-7-deazaguanine synthase (Fragment) OS=Kosmotoga sp. OX=1955248 GN=FXF54_14680 PE=3 SV=1
MKKAVVLMSGGLDSCVTAGIASLDYELYFLHVNYGQKTENRELQSFYDLYKYFNGKDKLVVDIGYLKKIGGSSLVDDTENIEEGNINR

SEQ ID NO: 39008 - protein, 233 aa, Kozakia baliensis
  REGION 1..233: note = tr|A0A1D8UV80|A0A1D8UV80_9PROT 7-cyano-7-deazaguanine synthase OS=Kozakia baliensis; OX = 153496 GN=queC PE=3 SV=1
MLSNDAALVLFSGGQDSATCLAWALSRFSRVETVGFDYGQRHAVELECRELLRRDMIALAPDWEQRLGPDHTLDLRVLGALSETALTREAEIELTESGLPSTFVPGRNLIFLNFAAALGVRRNARHIVTGVCETDYSGYPDCRDDTIKALQVALNLGMEQRFVLHTPLMWLDKTQTWELAESLGGEALVQAINHDSHSCYLGDREHRHPWGYGCGTCPACELRAKGWSAYVGH

SEQ ID NO: 39009 - protein, 230 aa, Krasilnikovia cinnamomea
  REGION 1..230: note = tr|A0A4Q7ZJL3|A0A4Q7ZJL3_9ACTN 7-cyano-7-deazaguanine synthase OS=Krasilnikovia cinnamomea OX=349313 GN=queC PE=3 SV=1
MARIVQTFSGGMDSATLLRYLSRGGHELRTIGFDYGQRHKKELQFASKMAADLGVPYTIVSLDSLTCLLSESALTNADVAVPDGHYAEESMKITVVPNRNMIMLAVAIGYAENLHYDAVAIANHTGDHTIYPDCRPAFVEALDVAARLATYGGIRVLSPFKHISKTEIVAIGNAIGVDYRDTWSCYKGGDEHCGTCGTCVERQEALDEAGGVAVPAALDQVSAAMNEALT

SEQ ID NO: 39010 - protein, 228 aa, unidentified
  source 1..228: note = Krasilnikoviella flava
  REGION 1..228: note = tr|A0A1T5KRQ7|A0A1T5KRQ7_9MICO 7-cyano-7-deazaguanine synthase OS=Krasilnikoviella flava; OX = 526729 GN=queC PE=3 SV=1
MTKPAVVLLSGGLDSTTTLALAKDQGYAPYALSFSYGQRHATELEAAKRVAAAQGVERHVVAEIDLRVFGGSALTSDVAVPKHDSADELAADIPVTYVPARNTIFLSFALAYAETVGASDIFIGVNALDYSGYPDCRPEYIRSYEVMANLATRAGVEGSKLAIHTPLMELTKAGTIRAGLALGVDYGLTSSCYDPDATGHPCGHCDSCLLRLKGFDEAGAVDPLEYQA

SEQ ID NO: 39011 - protein, 235 aa, Kribbella flavida
  REGION 1..235: note = tr|D2PYU4|D2PYU4_KRIFD 7-cyano-7-deazaguanine synthase OS=Kribbella flavida (strain DSM 17836 / JCM 10339 / NBRC 14399) OX=479435 GN=queC PE=3 SV=1
MEVEEKMDRPAVVLLSGGLDSTTVLAIARSEGFTPYALSFRYGQRHVVELAAATRVAEAQGVARHVIADIDLRVFGGSALTSDIDVPKHDDVSDVDESIPLTYVPARNTIFLSFALAYAETVGAIDVFIGVSALDYSGYPDCRPEYIEAYEAMANLATRAGVDGHRLKIHTPLIEMTKGQTVELGLKLGVDYALTSSCYDPDLDGRPCGHCDSCLLRRKGFAEAGSEDPLVYQAG

SEQ ID NO: 39012 - protein, 231 aa, Kribbella sp.
  REGION 1..231: note = tr|A0A4R0IU85|A0A4R0IU85_9ACTN 7-cyano-7-deazaguanine synthase OS=Kribbella sp. YM55; OX = 1572660 GN=queC PE=3 SV=1
MSNEPAVVLLSGGLDSSTVLAIAKQEGYRLYALSFRYGQRHQAELDAARRVAEALGAERHVVADIDLRLFGGSALTADIDVPRHAHVDELDDSIPITYVPARNTIFLSFALAWAETLGAADVFIGVNALDYSGYPDCRPEYIAAFERMATLATKAGVEGDQRLRIHTPLIDLTKAETIERGLALGVDYSLTHSCYDPDAAGRACGSCDSCLLRRRGFAEVGLRDPALAGRL

SEQ ID NO: 39013 - protein, 232 aa, Kribbella sp.
  REGION 1..232: note = tr|A0A4U3M070|A0A4U3M070_9ACTN 7-cyano-7-deazaguanine synthase OS=Kribbella sp. NEAU-THZ 27 OX=2575441 GN=queC PE=3 SV=1
MSQKAVVLLSGGLDSTTVLAMAKDQGYETYALSFRYGQRHAVELEAARRVALAAGVQRHVVCDIDLRVFGGSALTAELDVPKHDATDELAENEIPITYVPARNTVFLSFALAYAEVVGSTDIFIGVSALDYSGYPDCRPEYIAAYEQMANLATRAGVEGQRLRIHTPLIELTKAQTVEVGTRLGVDYSLTSSCYDPDADGRPCGHCDSCLLRLKGFAEAGMKDPLRYQESGA

SEQ ID NO: 39014 - protein, 1381 aa, Kriegella aquimaris
  REGION 1..1381: note = tr|A0A1G9IR33|A0A1G9IR33_9FLAO Amino acid adenylation domain-containing protein OS=Kriegella aquimaris OX=192904 GN=SAMN04488514_101237 PE=4 SV=1
MDNTDSNHIELSQGQMSLWTGQKLNPDVPLHNTAYSFEIDGEIDPEVFKEAFRQVVSKIDALRTVFFEKEGIPYQTVLSKISNGLEFIDLAMESDAGVKAYLQERSLKEIDISKCIFDSILVKSPVRKYIWLLNIHHLVIDVVSLKTIFESTSKCYTGIIENNLEEIEPTPLFTEYVHFEKVFQKNPKNENIKNYWAERIKTIKKQPELYGVYNKFDKTKSTRVFLELGFERSQRLREIAQNPAIRSWTPHLTLFNIFSSLLFVYLYRVSGQRTLSIGAPNHNRATKQFQKTVGCFIQIFPLVSEILESDTFNSVLQRVKLETNNYLKYAKPGMATSEINRSFSTILNYIHTGFPDFCGFPTKTEWIPSEHIDVTHQMRCHIVDFDATGEIEVLFDYNRAIFDEDLISRAPHHFLNLVDAFLGNIYQPIDRPELLSDSEKLNTNSEGKTDLDAFISLIDQFNKIQNSNPNDIALRHKKEIYTYADINERANQLASFLVTKGIGKGTSVALYLERSPEYIIGVLAILKSGGTFIPIPSDQPSQRVAFILEDSGCALLLTDTQLKNNIKSVDIETIDLNLLSESIKNQSGIDTKIVIGPSDIAYVIYTSGSTGNPKGVLISQCAIFNYLNWAKKAYTTGDKFIFPLFTSIGFDLTITSTFLPLLTGGEVIIYKESGQGPDISLMEVLADNKVNSIKLTPSHLALLQGTDLSHSKINTMIVGGEDFKANLAANTQKTFGKGLKIYNEYGPTEATVGCIVAQFDSNKHKDVSVPIGTPIDNMHAYILDSYKNLVPKGVIGELYLGGTGLAEGYANLPSLTEDKFIKNPFLKGTKVYRTGDLARENSYGELEYLGRADDQVKLRGFRIEPSDIEANMLGHEEITNAAVVLIENEKSVSENEVINCTECGLPSNYPNTDFDENGVCHLCNAFKGYKDEAQRYFKTTDELRDILISKRGKNPNYDCLSLLSGGKDSTYILAQLIGMGLKVLAFTLDNGYISDQAKGNIDKIVQKLGVDHIYGTTEYMNKIFVDSLNRHQNVCNGCFKTIYTLSTQIALDKQIPFVVTGLSRGQFFETRLTEELFWDKNVDVSTIDKTILEARKLYHQEEDAVKNLLDVSMFNTDETFEKVQFIDFYRYSDVKLEEMLTYLKEKVDWVRPTDTGRSTNCLINQVGIYVHKKQKGYSNYSFPYSWDVRMGHKTRKETLEEINEVIDEKEVKRIINEIGYQEIGEDESNQKRLVAYYTGKKRLASKELSEYLKKELPEYMVPTFFKFIDEMPLTKNGKIDKSALRALNSSQLDMDTPFVAPNGEIEELLAAIWKEVLRLKQVGVHDDFIALGGHSLAAIRVTARINEEIEMNFPLNKIFDLPTIAEYAKYIEDTLVELLKE

SEQ ID NO: 39015 - protein, 235 aa, Kroppenstedtia eburnea
  REGION 1..235: note = tr|A0A1N7Q325|A0A1N7Q325_9BACL 7-cyano-7-deazaguanine synthase OS=Kroppenstedtia eburnea; OX = 714067 GN=queC PE=3 SV=1
MSENMAEKAVVVLSGGLDSTTCMGLAREAGYELYPLTFHYGQRHDREVEQARKVAKHFGVKKHRVVDMGFLRQIGGSALTDDKMEVPVPDGSGEEIPSTYVPARNLIFLSLATAYAEVIGAVKVYIGVSAVDYSGYPDCRPEFIRSMEETVRRGTKAGVNGNPIRLEAPLLHLSKGETIREGLRLQVPYHLTTSCYRGDRVACGLCDSCRLRLKGFRDVGAEDPIPYAEQVNRVN

SEQ ID NO: 39016 - protein, 252 aa, Ktedonobacter racemifer
  REGION 1..252: note = tr|D6TZN4|D6TZN4_9CHLR 7-cyano-7-deazaguanine synthase OS=Ktedonobacter racemifer DSM 44963 OX=485913; GN = queC PE=3 SV=1
MTTKRRGESAVLIVSGGMDSCVLSHYYAAAGFDLHLLSFNYGQKHVKELTYAERYISALRERYSNLEIQHQVVALPIAHLSPNSGSALLNPDQSMPHGHYTDDSMKATVVPYRNPNMLLQAATVAWNENARVVAFAAHYGDYAQYPDCRQEFVDAFNTMLNRAMDSDQVTVEVPFMRFSKAQIARFGASLDVPFELTWSCYEGGSEGFGDKHCGHCGTCVERYEAFKHAGVEDPTQYANDPELFLNIPGQRA

SEQ ID NO: 39017 - protein, 225 aa, Ktedonobacter sp.
  REGION 1..225: note = tr|A0A1Q6YY27|A0A1Q6YY27_9CHLR 7-cyano-7-deazaguanine synthase OS=Ktedonobacter sp. 13_2_20CM_53_11 OX=1805233 GN=queC PE=3 SV=1
MPKAMAIVSGGLDSTTLAYLLHAEGYDLHVLSFDYGQRHKKELAFAERCAKRLDAAFDIVDLSNLGRFLKGSALTDTIPVPDGHYAAPTMAITVVPNRNAMMLSVAYAVAVAEQAQVVAIGVHAGDHFIYPDCRPEFITSFERMQRIATEGFGDPHLRLEAPFMHLGKHQIVQLGTALQVPYADTWSCYKGEDRHCGTCGTCFERKEAFELAGIPDPTEYEGEGQ

SEQ ID NO: 39018 - protein, 225 aa, Ktedonobacter sp.
  REGION 1..225: note = tr|A0A352XZ21|A0A352XZ21_9CHLR 7-cyano-7-deazaguanine synthase OS=Ktedonobacter sp.; OX = 1932716 GN=queC PE=3 SV=1
MPKAIAIVSGGLDSVTLAYLLHAEGYELQILSFDYGQRHKKELAYAERCAKRLNAPFDIVDLSTLGRFLKGSALTDTIPVPDGHYAAPTMAITVVPNRNAMMLSIAYAVAVAEKAQVVAMGVHAGDHFIYPDCRPEFITSFDSMQRIATAGFGDPHLRLEAPFMHLGKHQIVQLGTTLQVPYADTWSCYKGGERHCGTCGTCFERKEAFELAGVPDPTIYEEEGT

SEQ ID NO: 39019 - protein, 254 aa, unidentified
  source 1..254: note = Ktedonobacterales bacterium
  REGION 1..254: note = tr|A0A4P6K5A1|A0A4P6K5A1_9CHLR 7-cyano-7-deazaguanine synthase OS=Ktedonobacterales bacterium SCAWS-G2 OX=2509675 GN=queC PE=3 SV=1
MTTTRERDQAVLVVSGGMDSCVLAYYYAAAGFDLHLLSFDYGQKHVKELEYAHKYIARLRERFAQGEQGLRVQHEILSLPIASLLPDSTCALLNDEEPMPYGHYSDESMKTTVVPYRNPNMLLQAATVAWGEGASVVAYAAHQGDHAIYPDCRPAFVNAFNAMLAAAMDGPAPIVQTPFLQFSKAQIARLGASLDVPFELTWSCYEGGRKGYGELHCGRCGTCVERRWSFAQAGLSDPTHYASEALDEDEGFHA

SEQ ID NO: 39020 - protein, 225 aa, unidentified
  source 1..225: note = Kuenenia stuttgartiensis
  REGION 1..225: note = tr|Q1Q0K0|Q1Q0K0_KUEST 7-cyano-7-deazaguanine synthase OS=Kuenenia stuttgartiensis OX=174633 GN=exsB; PE = 3 SV=1
MKGKDTAIVLASGGLDSCVTAAIANETYDLALLHINYGQRTESKELSAFHEIAAYYKVPAEQILIANIDYLKKIGGSSLTDTMIPVQEAEPDSKEIPTTYVPFRNTLFLSVAVSWAEVIGAEKVFIGAVSHDTPGYPDCKPFYYEVFNKLIDAGTKPETRIAVETPLIFKTKAEIVTLGISLKAPLHLSWSCYKNTDKACGVCNSCYLRRKAFEESGYKDPVEYA

SEQ ID NO: 39021 - protein, 220 aa, Kurthia sp.
  REGION 1..220: note = tr|A0A433RXP7|A0A433RXP7_9BACL 7-cyano-7-deazaguanine synthase OS=Kurthia sp. 3B1D; OX = 1562256 GN=queC PE=3 SV=1
MEKRDKALVVFSGGQDSTTCLFWALKRFKEVAVVTFDYGQRHALEIDCATKIANEQQVKQYILNMDLLNQLAPNALTRDDIDVQAGENGGLPNTFVPGRNLVFFSFAGILARQIGAQHIITGVSEADFSGYPDCRDNFMKSLNVTINLAMDEQLLLHTPLMWRNKAEVWALADELGVLDYIRQNTLTCYNGIIADGCGECPSCLLRKHGLELYLEKKVKA

SEQ ID NO: 39022 - protein, 227 aa, Kushneria avicenniae
  REGION 1..227: note = tr|A0A1I1FQK5|A0A1I1FQK5_9GAMM 7-cyano-7-deazaguanine synthase OS=Kushneria avicenniae; OX = 402385 GN=queC PE=3 SV=1
MTQQTASRAVVIYSGGMDSYTVLHRALREGHEVHALSFHYGQRHARELDVASRVCQSLGIAHQVVDIRAIHGLIGASALTDATQAMPRADYAEDNMKATVVPNRNMILLSLAIAHAVNLEAEICYYGAHGGDHAIYPDCRPEFVERINDVAAIANYTPVEIRAPYLHASKDDILAEGLQMGLDYAQSWTCYLGETLACGECGSCRERLQAFAAMGMTDPLPYRTREA

SEQ ID NO: 39023 - protein, 250 aa, Kushneria avicenniae
  REGION 1..250: note = tr|A0A1I1I262|A0A1I1I262_9GAMM Queuosine biosynthesis protein QueC OS=Kushneria avicenniae; OX = 402385 GN=SAMN05421848_0967 PE=4 SV=1
MQSRIDVLWTGGWDSTYRVLSAATIEKRTVVPHYIVDLGRGSSLRELQAISEVRATLAGIDPKAAARIEPLRITPVTEIAEDTELSAAYHRLTQQAHLGSQYDWLARYASSKGINHLELSVHVDDKAYHFLEGRVVATGNGSWTFDDRAEGDEAIFRFFDFPLLQISKMQMKAEAERHGFIKALEKSWFCYSPIDQAPCGLCNPCRYTIEEGMEYRLPEKALRRHRTRHLRRLARAPRALWRRASAALSS

SEQ ID NO: 39024 - protein, 232 aa, Kushneria indalinina
  REGION 1..232: note = tr|A0A3D9DZR4|A0A3D9DZR4_9GAMM 7-cyano-7-deazaguanine synthase OS=Kushneria indalinina DSM 14324 OX=1122140 GN=queC PE=3 SV=1
MTSQTASRAVVIYSGGMDSYTVLHRALREGHEVHALSFHYGQRHARELDVASEVCQSLGVAHQVVDIRAIHGLIGASALTDATQQMPRADYAEDNMKATVVPNRNMILLSLAIGHAVNLEAEICYYGAHGGDHAIYPDCRPEFVERMNDVAAIANYTPVEIRAPYLHASKDDILAEGLQMGLDYANSWTCYLGEALACGECGSCRERLQAFASQGLVDPLPYHMQSSRTREV

SEQ ID NO: 39025 - protein, 232 aa, unidentified
  source 1..232: note = Kushneria konosiri
  REGION 1..232: note = tr|A0A2Z2H8Z2|A0A2Z2H8Z2_9GAMM 7-cyano-7-deazaguanine synthase OS=Kushneria konosiri; OX = 698828 GN=queC PE=3 SV=1
MTLQTASRAVVIYSGGMDSYTVLHRALREGYEVHALSFHYGQRHARELDVARQVCESLGVAHQVVDIRAIHGLIGASALTDTTQQMPRADYAEDNMKATVVPNRNMILLSLAIGHAVNLEAELCYYGAHGGDHAIYPDCRPEFVKRMNDVAAIANYTPVEIRAPYLHASKHDILAEGLQMGLDYAQTWTCYLGEALACGECGSCRERLQAFALQGLVDPLPYRGNPSHTREV

SEQ ID NO: 39026 - protein, 250 aa, unidentified
  source 1..250: note = Kushneria konosiri
  REGION 1..250: note = tr|A0A2Z2H3T9|A0A2Z2H3T9_9GAMM Uncharacterized protein OS=Kushneria konosiri OX=698828 GN=B9G99_02270; PE = 4 SV=1
MQPRIDVLWTGGWDSTYRVLSAAMVDQRTVVPHYIVDLGRGSSLRELQAISEVRAALNSIDPEAAARIEPLRITPVTEIVEDHELSAAYHRLTQQAHLGSQYDWLARYAKSEDLHHLELSVHVDDKAYHFLKGRVVATEEGSWTFDERVDTDEAIFRFFDFPLLEISKTQMKAEAERYGFIEALEKSWFCYSPIDQAPCGLCNPCRYTIEEGMEYRLPTKALRRHRTRHLRRVARAPRALWRRAARALSS

SEQ ID NO: 39027 - protein, 232 aa, Kushneria marisflavi
  REGION 1..232: note = tr|A0A240UJT3|A0A240UJT3_9GAMM 7-cyano-7-deazaguanine synthase OS=Kushneria marisflavi; OX = 157779 GN=queC PE=3 SV=1
MTLQTASRAVVIYSGGMDSYTVLHRALREGYEVHALSFHYGQRHARELDVAREVCESLGVAHQVVDIRAIHGLIGASALTDATQQMPRADYAEDNMKATVVPNRNMILLSLAIGHAVNLEAELCYYGAHGGDHAIYPDCRPEFVARMNDVAAIANYTPVEIRAPYLHASKSDILAEGLRMGLDYAHTWTCYLGEALACGECGSCRERLQAFASQGLVDPLPYRDQTSQTREV

SEQ ID NO: 39028 - protein, 250 aa, Kushneria marisflavi
  REGION 1..250: note = tr|A0A240US43|A0A240US43_9GAMM Uncharacterized protein OS=Kushneria marisflavi OX=157779 GN=B9H00_12910; PE = 4 SV=1
MQPRIDVLWTGGWDSTYRVLSAAMVDQRTVVPHYIVDLGRGSSLRELQAISEVRAALNSIDPEAAARIEPLRITPVTEIVEDHELSAAYHRLTQQAHLGSQYDWLARYAKSEDLHHLELSVHVDDKAYHFLKGRVVATEEGSWTFDERVDTDEAIFRFFDFPLLEISKTQMKAEAERHGFIEALEKSWFCYSPIDQAPCGLCNPCRYTIEEGMEYRLPAKALRRHRTRHLRRVARAPRALWRRAARALSS

SEQ ID NO: 39029 - protein, 250 aa, unidentified
  source 1..250: note = Kushneria phyllosphaerae
  REGION 1..250: note = tr|A0A2R8CNA8|A0A2R8CNA8_9GAMM 7-cyano-7-deazaguanine synthase OS=Kushneria phyllosphaerae OX=2100822 GN=queC_1 PE=4 SV=1
MRPRIDVLWTGGWDSTYRVISAAMVNHQTVVPHYIVDLGRGSSLRELQAISEVRAVLAGIDPEAAARIEPLRITPVTEIPKNHELTGAWQRLTQQAHLGSQYDWLARYASSEDIRHLELSVHVDDKAYHFLKGRVMATEDGSWTFDDRIDADEAIFRFFDFPLLQISKTQMKAEAERHGFIEALERSWFCYSPIDQAPCGLCNPCRYTIEEGMAYRLPEKALRRHRTRHLRRLARAPRALWRRASAALSS

SEQ ID NO: 39030 - protein, 232 aa, unidentified
  source 1..232: note = Kushneria phyllosphaerae
  REGION 1..232: note = tr|A0A2R8CP38|A0A2R8CP38_9GAMM 7-cyano-7-deazaguanine synthase OS=Kushneria phyllosphaerae OX=2100822 GN=queC_2 PE=3 SV=1
MTLQNASRAVVIYSGGMDSYTVLHRALREGYDVHALSFHYGQRHARELDVASQVCQTLGVAHQVVDIRAIHGLIGASALTDASQPMPRADYAEDNMKATVVPNRNMILLSLAIGHAVNLEAEICYYGAHGGDHAIYPDCRPEFVARMNDVAAIANYTPVEIRAPYLHASKDDILAEGLQMGLDYAHTWTCYLGEALACGECGSCRERLQAFASQGIKDPLPYRSQTSRTREV

SEQ ID NO: 39031 - protein, 236 aa, Kushneria sinocarnis
  REGION 1..236: note = tr|A0A420WYM1|A0A420WYM1_9GAMM 7-cyano-7-deazaguanine synthase OS=Kushneria sinocarnis; OX = 595502 GN=queC PE=3 SV=1
MTQPSTTPRAVVIYSGGMDSLTVLHNALEAGFEVHALSFHYGQRHARELDAARRVCEQLNIAHQVIDIRAIHSLIGNSALTDSEREMPRADYAEDNMQDTVVPNRNMILLSLAIGHAVNTGARVCYYGAHGGDHAIYPDCRPEFVERMNDVAAIANYEPVEVRTPWLHADKSDILADGVRMGIDYAASWTCYIGDELACGECGSCRERLKAFQALGMTDPLPYRQRTPSATDSQTD

SEQ ID NO: 39032 - protein, 228 aa, Kushneria sp.
  REGION 1..228: note = tr|A0A1S1NWP9|A0A1S1NWP9_9GAMM 7-cyano-7-deazaguanine synthase OS=Kushneria sp. YCWA18; OX = 657387 GN=queC PE=3 SV=1
MTQPNTLPRAVVIYSGGMDSLTVLHNALEAGFEVHALSFHYGQRHARELDVARKVCERLHVDHQIIDIRAIHSLIGNSALTDNDREMPRADYDEDNMQDTVVPNRNMILLSLAIGHAVNIGARVCYYGAHGGDHAIYPDCRPEFVERMNSVAAIANYEPVEIRTPWLHADKSDILADGMRMGIDYADSWTCYIGDELACGECGSCRERLNAFAALGMTDPLAYKKRTS

SEQ ID NO: 39033 - protein, 238 aa, Kutzneria albida
  REGION 1..238: note = tr|W5W902|W5W902_9PSEU 7-cyano-7-deazaguanine synthase OS=Kutzneria albida DSM 43870 OX=1449976 GN=queC; PE = 3 SV=1
MDQDNNTPDSFTAVVVLSGGMDSTTLMAHYAALHHDLIAVTVDYGQRHRREIDSASQVAAHYGAEHLLVDLSGLGAVLGGSALTDASVPVPDGHYAEQSMRATVVPNRNAVLANVAVAVGVARRAGTVALGMHTGDHFIYPDCRPEFHTALRQLVAVANEGFPTPQLEAPFLNWSKADIATHGTRLKAPLGLSWSCYKGGELHCGTCGTCYERREAFRVAGVADPTRYVDDVTLFAAP

SEQ ID NO: 39034 - protein, 427 aa, Kutzneria albida
  REGION 1..427: note = tr|W5WBN3|W5WBN3_9PSEU Uncharacterized protein; OS = Kutzneria albida DSM 43870 OX=1449976 GN=KALB_5226 PE=4; SV = 1
MSNQRSYRYAFTATGKYPATGNWRRVGEADFRSSLQRVRHAVLPAAATPEWADDLLRIARAVYLVDKLSPRPHERDPWTRELCLWVQVTDPDRWLGEPLDRLNTLLRVLTSDVWDVAVAGGALPIDEQQRLGEYGTASEVALFSGGLDSTAYAAQQACTPGGPLLLLGYDMADAQLPQRSLYSAITELDARQRPVNYCGVAATLAKKGRKLEPSTRSRGFLFATTAVYAAAAHGVAQAMVPENGQLAINPPLTPARLAACSTRSVHPWILQQLNELITAVHGSVTVYNPFLYRTKGEVCTAAHANGLSHADLARTVSCGSYSIHRQIGNCGYCYPCLIRRSGLHAALGTDPTDYEHDLHHLSTLKTAQHLLDLHQWLSHEFTAHDLIADMPLPAGTSMYELLAMLQRGRAEIGSMLTASSPWGGICD

SEQ ID NO: 39035 - protein, 229 aa, unidentified
  source 1..229: note = Kutzneria buriramensis
  REGION 1..229: note = tr|A0A3E0HKY5|A0A3E0HKY5_9PSEU 7-cyano-7-deazaguanine synthase OS=Kutzneria buriramensis; OX = 1045776 GN=queC PE=3 SV=1
MPKTVAIVSGGLDSVTMAYHLQAQGHTLHLLSVNYGQRHLVEHEFAEKTARTLGVPHDVVDLSTVGKFLSGSSLTDATVDVPDHQDGSSGTSPNVVPNRNALLLSVAFAVAVAETAEAVAVGVVDDLNAAPDSNAAFIDSFIAMERIATRGYAHPDLALIAPLVRLRKSEVVSLGEELGVPWAETWSCFRGDALQCGRCAACRERQAAFRDAGVTDPTTYQTSDSKELA

SEQ ID NO: 39036 - protein, 240 aa, unidentified
  source 1..240: note = Kyrpidia spormannii
  REGION 1..240: note = tr|A0A2K8NAR6|A0A2K8NAR6_9BACL 7-cyano-7-deazaguanine synthase OS=Kyrpidia spormannii; OX = 2055160 GN=queC PE=3 SV=1
MEHRAPRAVVILSGGLDSTTCMAIADHEGYELYPITFSYGQKHAVELESAKQVAAHYRVGDRHRVVDLGNFIRGSSLTDPDQSIPVGRSLEEIGTGVPSTYVPGRNTVFLSLALSFAERIDARAIFIGVNALDYSGYPDCRPEFLQAFQRVIDTGTVAGSEGAGIRLKAPLVHLTKAEIIRWGSQLGAPYALTHSCYQGTVPACGVCDSCRLRIQGFREAGLVDPIPYAVPIAWQAGRPN

SEQ ID NO: 39037 - protein, 240 aa, unidentified
  source 1..240: note = Kyrpidia tusciae
  REGION 1..240: note = tr|D5WTQ5|D5WTQ5_KYRT2 7-cyano-7-deazaguanine synthase OS=Kyrpidia tusciae (strain DSM 2912 / NBRC 15312 / T2) OX=562970 GN=queC PE=3 SV=1
MEHRALRAVVILSGGLDSTTCMAIADHEGYELYPITFSYGQKHAVELESAKQVAAHYRVGDRHRVVDLGNFIRGSSLTDPDQSIPVGRSLEEIGTGVPSTYVPGRNTVFLSLALSFAERIDAQAIFIGVNALDYSGYPDCRPEFLQAFQRVIDTGTVAGTEGAGIRLKAPLVHLTKAEIIRRGSQLGAPYALTHSCYQGTVPACGVCDSCRIRIQGFREAGLVDPIPYAVPIAWQSDRPN

SEQ ID NO: 39038 - protein, 219 aa, Labrenzia aggregata
  REGION 1..219: note = tr|A0A0M6Y7T4|A0A0M6Y7T4_9RHOB 7-cyano-7-deazaguanine synthase OS=Labrenzia aggregata; OX = 187304 GN=queC PE=3 SV=1
MDSVTLAHKVAREHELIGLVSFDYGQRHKKELDYAKACADELNTEHILIDISNIGRQLTGSALTDNVDVPDGHYAEETMKITVVPNRNAIMLSIAFGIASARGAEAVATAVHGGDHFIYPDCRPAFTESFETMQRHALEGMGEISLFTPYVHTSKADIAAEGLRLGVDYRKTWSCYKGGEVHCGRCGTCVERREAFHLAGGIDPTVYADEAFWKEACNV

SEQ ID NO: 39039 - protein, 219 aa, Labrenzia aggregata
  REGION 1..219: note = tr|A0NZ69|A0NZ69_LABAI 7-cyano-7-deazaguanine synthase OS=Labrenzia aggregata (strain ATCC 25650 / DSM 13394 / JCM 20685 / NBRC 16684 / NCIMB 2208 / IAM 12614); OX = 38 4765 GN=queC PE=3 SV=1
MDSVTLAHKVAREHELIGLVSFDYGQRHKKELDYAKACADELKTEHILIDISNIGRQLTGSALTDNLDVPDGHYAEETMKITVVPNRNAIMLSIAFGIASARGAEAVATAVHGGDHFIYPDCRPAFTESFETMQRHALEGMGEISLFTPYVHTSKADIAAEGLRLGVDYRKTWSCYKGGEVHCGRCGTCVERREAFHLAGGVDPTVYADEAFWKEACNV

SEQ ID NO: 39040 - protein, 219 aa, Labrenzia alba
  REGION 1..219: note = tr|A0A0M6ZTR9|A0A0M6ZTR9_9RHOB 7-cyano-7-deazaguanine synthase OS=Labrenzia alba; OX = 311410 GN=queC PE=3 SV=1
MDSVTLAHKMAQDHELTGLISFDYGQRHRKELDYARACADELDTEHILMDIANIGRQLTGSALTDDLDVPDGHYAEDTMKITVVPNRNAIMLTIAYGIAASRGADAVATAVHGGDHFIYPDCRPAFTSSFETMQRHALDGYAEISLFTPYVHVSKADIASEGLRLGVDYRKTWSCYKGGEKHCGRCGTCVERREAFHLAGGIDPTEYTDADFWKAACNV

SEQ ID NO: 39041 - protein, 229 aa, Labrenzia alba
  REGION 1..229: note = tr|A0A0M6Z271|A0A0M6Z271_9RHOB 7-cyano-7-deazaguanine synthase OS=Labrenzia alba; OX = 311410 GN=queC PE=3 SV=1
MKALVICSGGMDSVTLAHKIAQDHKLVGLISFDYGQRHKKELDYAKACAEELNTDFILMDIANIGRQLTGSALTDDVDVPDGHYAEDSMKITVVPNRNAIMLTIAYGIAASRGADTVATAVHGGDHFIYPDCRPDFTQSFEAMQRHALDGVAEISLFTPYVHISKADIAAEGLKLGIDYRTTWSCYKGGEKHCGRCGTCVERREAFHLAGGIDPTDYADPEFWKAACNV

SEQ ID NO: 39042 - protein, 457 aa, Labrenzia alexandrii
  REGION 1..457: note = tr|A0A5E8H839|A0A5E8H839_LABAD Uncharacterized protein OS=Labrenzia alexandrii (strain DSM 17067 / NCIMB 14079 / DFL-11) OX=244592 GN=SADFL11_106 PE=4 SV=1
MSSGATQIWIPERSIEVVESGGAASCGWVPFDLGRDFEFSTEALETYAFASWEPLIYDAMVVAAAIEYGDRILKRPPRGWARRISLRIPVHDPDRWNESELSEALLDTAGFLTGDYWSVEFVARAKAAPSPQSAYLNLPVATEAIMAFSDGMDSRAVAGLIGSGLGPKLVRVRVGSNDIGRPDKKNRREPFTMVPYDVPCNMPNREASARSRGFKFALISGIAAYLSGASEIIIPESGQGAIGPAIAPVVHAYPDYRNHPRFTQRMERLLKALFGKEIRYVFPRLWNTKGETLRSFATLPEGSNWHTTRSCWRSNRWCSVNGKRRQCGVCAACMLRRLSVHAAGLTEADDAYVCTDLTAASLDEAVDRDFTRMTPAYRQYAIAGVLHLDHLADLASKDGLPVVRRHAALLGPALGLGKEQTKESLTRMLSEHTGEWKEFVRSMGSNSFVRQWVRAGL

SEQ ID NO: 39043 - protein, 229 aa, Labrenzia alexandrii
  REGION 1..229: note = tr|A0A5E8GZ50|A0A5E8GZ50_LABAD 7-cyano-7-deazaguanine synthase OS=Labrenzia alexandrii (strain DSM 17067 / NCIMB 14079 / DFL-11) OX=244592; GN = queC PE=3 SV=1
MKTLVICSGGMDSVTLAHKIAQENELIGLISFDYGQRHKKELDYAKACADALNTEHILIDITNIGRQLTGSALTDNIDVPDGHYAEDTMKITVVPNRNAIMLTIAYGIASARGAEAVATAVHGGDHFIYPDCRPAFTESFEEMQRNALEGMGEIKLYTPYVRVSKADIAAEGAKLGVDHTKSWSCYKGGDIHCGRCGTCVERREAFHLAGVDDPTTYADPNFWKGACNV

SEQ ID NO: 39044 - protein, 240 aa, Labrenzia marina
  REGION 1..240: note = tr|A0A2S3UXZ9|A0A2S3UXZ9_9RHOB 7-cyano-7-deazaguanine synthase OS=Labrenzia marina; OX = 281252 GN=queC PE=3 SV=1
MNEGDAIVLFSGGQDSTTCLAWALERFERIETVGFDYGQRHRIELDTRPVILEAVRNGFPRWASKLGVDHMIDLSVLGQVSETSLTRDVEISMQQNGLPNTFVPGRNLLFMTFAATIAYRRGAKHIVTGVCETDFSGYPDCRDDTMKALQLALNLGMDTRFVIHTPLMWIDKAETWRLSRDLGGDALVDLIREESHTCYQGDRTPHEWGRGCGTCPACDLRAKGYLRFKGEPSSEARDPK

SEQ ID NO: 39045 - protein, 229 aa, Labrenzia sp.
  REGION 1..229: note = tr|A0A4R7RM76|A0A4R7RM76_9RHOB 7-cyano-7-deazaguanine synthase OS=Labrenzia sp. PT13C1; OX = 2135612 GN=queC PE=3 SV=1
MKTLVICSGGMDSVTLAHKIAQEHELIGLISFDYGQRHKKELDYAKACADALNTEHILIDITNIGRQLTGSALTDNIDVPDGHYAEDTMKITVVPNRNAIMLTVAYGVASARGAEAVATAVHGGDHFIYPDCRPAFTESFEEMQRHALEGMGEIKLYTPYVRVSKADIAAEGAKLGVDHTKSWSCYKGGEIHCGRCGTCVERREAFHLSGVDDPTTYADPDFWKGACNV

SEQ ID NO: 39046 - protein, 233 aa, Labrenzia sp.
  REGION 1..233: note = tr|A0A161XMZ3|A0A161XMZ3_9RHOB 7-cyano-7-deazaguanine synthase OS=Labrenzia sp. OB1; OX = 1561204 GN=queC PE=3 SV=1
MKTLVICSGGLDSVSLAHITASEHQLTRLVSFDYGQRHRKEVDFAEAAAKRLGVQFHLIDMRGIGAALSGSALTDDIDVPDGHYAEETMKVTVVPNRNAIMLSIGFGIAAAQGDEAVATAVHGGDHFIYPDCRPGFTCAFDAMQQAALEGYAAVRLHTPFVEQSKAEIVRQGARHGTPFAETWSCYKGGELHCGRCGTCVERREAFHLAEVSDPTAYVDPDYWTTALATRRES

SEQ ID NO: 39047 - protein, 229 aa, unidentified
  source 1..229: note = Labrenzia suaedae
  REGION 1..229: note = tr|A0A1M7N3C2|A0A1M7N3C2_9RHOB 7-cyano-7-deazaguanine synthase OS=Labrenzia suaedae; OX = 735517 GN=queC PE=3 SV=1
MKTLVICSGGLDSVTLAHKVAQENELIGLVSFDYGQRHKKELAYAKACADALNTEHTLIDISNVGRLLSGSALTDNVDVPDGHYAEESMRITVVPNRNAIMLAIAFGVASSKGAEAVAAAVHGGDHFIYPDCRPGFVDAFDAMQRHALEGMGEIRLYTPFVHKTKGDIAAEAVRLGVDVTGTWSCYKGGEHHCGRCGTCVERREAFHLASAEDPTVYEDPEFWKTACHV

SEQ ID NO: 39048 - protein, 234 aa, Labrys neptuniae
  REGION 1..234: note = tr|A0A5C1WCV2|A0A5C1WCV2_9RHIZ 7-cyano-7-deazaguanine synthase OS=Labrys neptuniae; OX = 376174 GN=queC PE=3 SV=1
MSNKALVLFSAGQDSTTCLAWALKRFDSVETVGFDYGQRHGIELAMRPVVLAAFREAFPAWAARLGEDHLVDLGILGRISETSLTRDVEIAMQENGLPNSFVPGRNLLFLTFAATLAYRRGARHLVTGVCETDFSGYPDCRDDTMKAMQLALNLGMESRFVIHTPLMWIDKAQTWALARELGGDRLVDLVREQTHTCYNGDRSHRHDWGYGCGTCPACELRSSGYRRFMTESVS

SEQ ID NO: 39049 - protein, 234 aa, Labrys okinawensis
  REGION 1..234: note = tr|A0A2S9QD62|A0A2S9QD62_9RHIZ 7-cyano-7-deazaguanine synthase OS=Labrys okinawensis; OX = 346911 GN=queC PE=3 SV=1
MSDKALVLFSAGQDSTTCLAWALERFDSVETVGFDYGQRHGVELAMRPVVLAALREAFPAWAGRLGEDHLVDLGILGRISETSLTRDVEITMQENGLPNSFVPGRNLLFLTFAATLAYRRGARHLVTGVCETDFSGYPDCRDDTMKAMQLALNLGMESRFVIHTPLMWIDKAQTWALARELGGELLVDLVREHTHTCYNGDRSHRHDWGYGCGTCPACELRSSGYRRFVAESAS

SEQ ID NO: 39050 - protein, 229 aa, Laceyella sacchari
  REGION 1..229: note = tr|A0A4R4AJ56|A0A4R4AJ56_LACSH 7-cyano-7-deazaguanine synthase OS=Laceyella sacchari; OX = 37482 GN=queC PE=3 SV=1
MSKKAVIVLSGGLDSTTCMGIALAEGYELYPITFHYNQRHDKEVEHARKVAAHYGVAERHKVVDVSFLGQIGGSSLTDTAMEVPTEGVGEGIPSTYVPARNLIFLSLATAYAEVIGAQVLYTGVTAVDYSGYPDCRPEFIKSMEETINLATKLGVTSDEKLRIATPLISLTKGEIIARGLELGVPYELTTSCYQGEEEACGECDSCLLRLKGFKENGVQDPIPYKTKIG

SEQ ID NO: 39051 - protein, 229 aa, Laceyella sacchari
  REGION 1..229: note = tr|A0A2I7SV44|A0A2I7SV44_LACSH 7-cyano-7-deazaguanine synthase OS=Laceyella sacchari; OX = 37482 GN=queC PE=3 SV=1
MSKKAVIVLSGGLDSTTCMGIALAEGYELYPITFHYNQRHDKEVEHARKVAAHYGVAERHKVVDVSFLGQIGGSSLTDTAMEVPTEGVGEGIPSTYVPARNLIFLSLATAYAEVIGAQVLYTGVTAVDYSGYPDCRPEFIKSMEETINLATKLGVTSDEKLRIATPLISLTKGEIIARGLELGVPYELTTSCYQGEAEACGECDSCLLRLKGFKENGVQDPIPYKTKIG

SEQ ID NO: 39052 - protein, 229 aa, Laceyella sediminis
  REGION 1..229: note = tr|A0A2T0YHU9|A0A2T0YHU9_9BACL 7-cyano-7-deazaguanine synthase OS=Laceyella sediminis; OX = 573074 GN=queC PE=3 SV=1
MSKKAVIVLSGGLDSTTCMGIALAEGYELYPITFHYNQRHDKEVEHARKVAAHYGVAERHKVVDVSFLGQIGGSSLTDTAMEVPTEGVGEGIPSTYVPARNLIFLSLATAYAEVIGAQVLYTGVTAVDYSGYPDCRPEFIKSMEETINLATKLGVTSDAKLRIATPLISLTKGEIIARGLELGVPYELTTSCYQGEAEACGECDSCLLRLKGFKENGVQDPIPYKTKIG

SEQ ID NO: 39053 - protein, 230 aa, Lachnobacterium bovis
  REGION 1..230: note = tr|A0A1H3LS29|A0A1H3LS29_9FIRM 7-cyano-7-deazaguanine synthase OS=Lachnobacterium bovis DSM 14045 OX=1122142 GN=queC PE=3 SV=1
MRALVLCSGGIDSSTCLALAVDKYGKDNVVALSMSYGQKHKKEIESAEKICKYYGVELYKLDLKKIFQYSNCSLLENSTESIPKETYAKQLEKTHSQPVSTYVPFRNGLFLSSAASFALSKDCDVIYYGAHADDAAGNAYPDCSEAFNNAMNTAIYEGSGKKLKIEAPFIKENKAGVVKKGLELKVPYELTWSCYEGKDEPCLKCGTCIDRMKAFELNGTVDPLLKNSIN

SEQ ID NO: 39054 - protein, 230 aa, Lachnobacterium bovis
  REGION 1..230: note = tr|A0A1H9UMR5|A0A1H9UMR5_9FIRM 7-cyano-7-deazaguanine synthase OS=Lachnobacterium bovis; OX = 140626 GN=queC PE=3 SV=1
MKALVLCSGGIDSSTCLALAVDKYGKDNVVALSMSYGQKHKKEIESAEKICKYYGVELYKLDLHKIFQYSNCSLLETSTEDIPKETYAKQLEKTNSQPVSTYVPFRNGLFLSSAASFALSKDCEVIYYGAHSDDAAGNAYPDCSEEFNNAMNTAIYEGSGKKLRIEAPFLKENKAGVVKKGLELKVPYELTWSCYEGKDEPCLKCGTCIDRMKAFEINGTVDPILKKDNK

SEQ ID NO: 39055 - protein, 254 aa, unidentified
  source 1..254: note = Lachnoclostridium sp.
  REGION 1..254: note = tr|A0A1Y4TQW0|A0A1Y4TQW0_9FIRM TIGR00268 family protein OS=Lachnoclostridium sp. An118 OX=1965547; GN = B5E62_15200 PE=4 SV=1
MTLETFFREVPRAAVAFSGGTDSAFLLWAAKKYGCQIQAYYIHTAFQPEFELEDARRLAGELDIPMQVIDMDILGVQQAAENGPRRCYYCKRALFTRLKEQAAEDGYTVLLDGTNASDDAGDRPGMRALRELQVRSPLRECGITKDRVRSLSREAGLFTWEKPAYACLATRIPTGTKITRGDLQRAEQAEMALMALGFQDFRVRLSREGARLQMTGDQMSLAVERRNDIMQALKPLFPAVFLDLEERSPSVQRR

SEQ ID NO: 39056 - protein, 227 aa, unidentified
  source 1..227: note = Lachnoclostridium sp.
  REGION 1..227: note = tr|A0A3B9K4Q3|A0A3B9K4Q3_9FIRM 7-cyano-7-deazaguanine synthase OS=Lachnoclostridium sp.; OX = 2028282 GN=queC PE=3 SV=1
MKALVLSSGGVDSTTALGLAVQKYGKDNVYALSVSYGQKHDKEIEAAKAVAEYYGVEQMFLDLSLIFQYSDCSLLKQSEEAVPEKSYAEQIQETGGEAPVSTYVPFRNGLFLSSAASIALSRGCGEIWYGAHADDAAGAAYPDCSPVFNKAMGDAIWEGSGHQLRICAPFVEVNKAEVVRIGLSIGVPYELTWSCYEGGEVPCGKCGTCIDRAAAFAANGVKDPALK

SEQ ID NO: 39057 - protein, 236 aa, Lachnospira multipara
  REGION 1..236: note = tr|A0A1H5UE39|A0A1H5UE39_9FIRM 7-cyano-7-deazaguanine synthase OS=Lachnospira multipara; OX = 28051 GN=queC PE=3 SV=1
MAEKKEKALVLCSGGIDSTTCLGMAVDKYGKENVVALSISYGQKHDREVKSAKKVCEFYGVELYTLDLAKIFTYSNCSLLKGSEEEIPKESYAEQLKETDGKPVSTYVPFRNGLFLSSAASFALSKECSVIYYGAHADDAAGSAYPDCSTVFNDAMNKAIYEGSGKQLKIVAPFINSHKADVVKEGLRLGVPYKYTWSCYEGKDKPCGVCGTCIDRAEAFRLNGVPDPALTYEFED

SEQ ID NO: 39058 - protein, 225 aa, Lachnospira pectinoschiza
  REGION 1..225: note = tr|A0A174YUX0|A0A174YUX0_9FIRM 7-cyano-7-deazaguanine synthase OS=Lachnospira pectinoschiza OX=28052 GN=queC PE=3 SV=1
MKAMVLCSGGVDSTTCLGIAVDKYGAENVVALSIYYGQRHTKEIESADKVTEYYGVEHISLDLEKIFQYSDCSLLAHSDKEIPEESYAEQIKKTNGSPVSTYVPFRNGLFLSSAASIALSKGCEVIYYGAHSDDAAGSAYPDCSDEFNKAMNEAIYLGSGKQLKIEAPFINKTKSQVVKIGLDLKVPYEYTWSCYEGADKPCGVCGTCIDRAKAFEANGVKDPAL

SEQ ID NO: 39059 - protein, 236 aa, Lachnospira pectinoschiza; identical to SEQ ID NO: 39057
  REGION 1..236: note = tr|A0A1G9WXG1|A0A1G9WXG1_9FIRM 7-cyano-7-deazaguanine synthase OS=Lachnospira pectinoschiza OX=28052 GN=queC PE=3 SV=1

SEQ ID NO: 39060 - protein, 230 aa, unidentified
  source 1..230: note = Lachnospiraceae bacterium
  REGION 1..230: note = tr|A0A1I2Q5E9|A0A1I2Q5E9_9FIRM 7-cyano-7-deazaguanine synthase OS=Lachnospiraceae bacterium C7 OX=1792306 GN=queC PE=3 SV=1
MNKEKNALVLCSGGVDSTTCLGLAVEKYGKEHVVALSMSYGQKHVKEIESAKAVCKHYGVELFTLDLSKIFQYSDCSLLSHSEGEIPKESYAQQLEETDHAPVSTYVPFRNGLFLSSAASFALSKNCEVIYYGAHADDAAGNAYPDCSTVFNEAMNKAIYEGSGQQLHIEAPFINSTKAEVVKAGLAINVPYELTWSCYEGQDKPCMKCGTCLDRIKAFELNGTVDPLLK

SEQ ID NO: 39061 - protein, 230 aa, unidentified
  source 1..230: note = Lachnospiraceae bacterium
  REGION 1..230: note = tr|R9IWQ1|R9IWQ1_9FIRM 7-cyano-7-deazaguanine synthase OS=Lachnospiraceae bacterium 3-1 OX=397288; GN = queC PE=3 SV=1
MKVLVLSSGGIDSTVCLALAVEKYGYENVLSLSVSYGQKHSNELKAAQRIAQHYHVRHKELDMGMIFAGSDCTLLEGRGEIPKGTYASQLQESTGKPISTYVPFRNGLFLAAAASVALADGCEKIYYGAHADDSAGNAYPDTSEAFHEAISRAVYEGSGKQLEIEAPFLYSHKADVVRTGMGLQAPFAFTWSCYEGGEKPCGKCATCMDRRKAFELNEIQDPAEYEEEKK

SEQ ID NO: 39062 - protein, 226 aa, unidentified
  source 1..226: note = Lachnotalea glycerini
  REGION 1..226: note = tr|A0A255IT04|A0A255IT04_9FIRM 7-cyano-7-deazaguanine synthase OS=Lachnotalea glycerini; OX = 1763509 GN=queC PE=3 SV=1
MKALVLLSGGVDSSTCLGLAIEKYGRKNVVTLTVSYGQKHTKEIEAARKIADYYQVELIYLDLSKIFEYSDCSLLEHSKQEIPKETYVKQLEKRYGKPVSTYVPFRNGLFLSSAASIALSKGCGIIYYGAHSDDAAGNAYPDCSSAFQEAMNQAIYIGSGNQLKIEAPFVMWTKKKIVQEGLALKVPYELTWSCYEGDEKPCGKCGTCIDRINAFAENGVCDPANV

SEQ ID NO: 39063 - protein, 218 aa, unidentified
  source 1..218: note = Lacimicrobium alkaliphilum
  REGION 1..218: note = tr|A0A0U3B552|A0A0U3B552_9ALTE 7-cyano-7-deazaguanine synthase OS=Lacimicrobium alkaliphilum OX=1526571 GN=queC PE=3 SV=1
MTQRAVVIFSGGMDSFTVLNKAYRQGLELYALSFDYGQRHRKELDYARAVCQELGIAHKIVDISAINSLIGGSSLTDNMEVAEGHYAAENMKNTVVPNRNMILLSMAVGYAVSLNASQVFYGAHSGDHAIYPDCRPEFVHKMNDVCAIANYEPVEIACPYLDVSKTDILTDGLAMGLDYSKTWTCYNGREKACGKCGACNERLEAFAENGATDPLEYE

SEQ ID NO: 39064 - protein, 233 aa, unidentified
  source 1..233: note = Lactobacillus allii
  REGION 1..233: note = tr|A0A1P8Q2H7|A0A1P8Q2H7_9LACO 7-cyano-7-deazaguanine synthase OS=Lactobacillus allii; OX = 1847728 GN=queC PE=3 SV=1
MKAVVLLSGGMDSAVCLAKIIEEYGNNNVMAVGFRYGQKHQQNHYYAKKIADYFNVKMIDLDIDVRAFKGSDSTLLNDKKIKHESYAQVLKDSDTGIADTYVPFRNGLMLSQVAALAYSQKANYVVYGAHKDDYAGNAYPDTSPAFYKAMNEAINVGTNGKINVIAPLINMDKAGVVKLGTQLGVPFEFTRTCYEGDDVSCGECATCLDRINAFKQNDLVDPIPYAINIDWNN

SEQ ID NO: 39065 - protein, 234 aa, Lactobacillus aquaticus
  REGION 1..234: note = tr|A0A0R2CU56|A0A0R2CU56_9LACO 7-cyano-7-deazaguanine synthase OS=Lactobacillus aquaticus DSM 21051 OX=1423725 GN=queC PE=3 SV=1
MGQVVLLSGGMDSATCLALAIKKYGVEHVITLAFTYGQKHDLEIINARQVARFFGVKLLEAAVDRKIFTGSDSTLLKGNGAIEEKSYSEIMREKGAKIVDTYVPFRNGLMLSQAAALAYSSHLDEVAYGAHADDAAGNAYPDCSPAFYESMRAAIVAGTDGKVTMTAPLIELTKAGVVSLGHQLGVPFELTRSCYEGREYACGKCGTCRDRISAFKQNGLKDPIKYEQTPDWNA

SEQ ID NO: 39066 - protein, 241 aa, Lactobacillus capillatus
  REGION 1..241: note = tr|A0A0R1MCM1|A0A0R1MCM1_9LACO 7-cyano-7-deazaguanine synthase OS=Lactobacillus capillatus DSM 19910 OX=1423731 GN=queC PE=3 SV=1
MGQVVLLSGGMDSATCLALAVKQYGTKQVLALAFTYGQKHDAEIINARRVAQFFDVKLIEAAVDHKIFTGSDSTLLKGNGAIAEKSYAEIIEEQGEQVVDTYVPFRNGLMLSQAAALAYSSHLEEVVYGAHADDAAGNAYPDCSPAFYSAMNTAISTGTAGKIKVIAPLIKLNKAGVVKLGRQLKVPFELTRSCYEGREDACGKCGTCRDRINAFKENGLKDPIKYEQEPDWDNERYENEE

SEQ ID NO: 39067 - protein, 235 aa, Lactobacillus hordei
  REGION 1..235: note = tr|A0A3Q8CZ02|A0A3Q8CZ02_9LACO 7-cyano-7-deazaguanine synthase OS=Lactobacillus hordei; OX = 468911 GN=queC PE=3 SV=1
MGQVVLLSGGMDSAVCLALAIKKYGKENIIALAFSYGQKHSREIQNAQNVANYFDVKIVVANIDAQIFQGSSSTLLQGNGPIEHRSYGEIIKESGEGTVDTYVPFRNGLMLSQAAALAYSQELAEVSYGAHSDDAAGSAYPDCSPLFFESMAKAISAGTGGKVTLVAPLIRNNKAGVVKMGTKLSVPFELTRSCYETDSVSCGQCGTCRDRIEAFKKNGLKDPIEYAIKIEWNKD

SEQ ID NO: 39068 - protein, 235 aa, Lactobacillus hordei
  REGION 1..235: note = tr|A0A0R1MI46|A0A0R1MI46_9LACO 7-cyano-7-deazaguanine synthase OS=Lactobacillus hordei DSM 19519 OX=1423759 GN=queC PE=3 SV=1
MGQVVLLSGGMDSAVCLALAIRKYGKENIIALAFSYGQKHSREIQNAQNVANYFDVKIVVANIDAQIFQGSSSTLLQGNGPIEHRSYGEIIKESGEGTVDTYVPFRNGLMLSQAAALAYSQELAEVSYGAHSDDAAGSAYPDCSPLFFESMAKAISAGTGGNVTLVAPLIRNNKAGVVKMGIKLSVPFELTRSCYETDSVSCGQCGTCRDRIEAFKKNGLKDPIEYAIKIEWNKD

SEQ ID NO: 39069 - protein, 233 aa, Lactobacillus mali
  REGION 1..233: note = tr|J0UP68|J0UP68_9LACO 7-cyano-7-deazaguanine synthase OS=Lactobacillus mali KCTC 3596 = DSM 20444; OX = 1046596 GN=FD00_GL000780 PE=3 SV=1
MGQVVLLSGGMDSAVCLALAVKKYNKENVIALAFGYGQKHASEIQNARNVANYFGVKIVIASVDTQIFQGSDSTLLQGNGPIEHKSYGEILKESGGGTVDTYVPFRNGLMLSQAAALAYSQELAEVSYGAHSDDAAGSAYPDCSPLFFGAMASAISAGTAGKITLIAPLIENNKAGVVKLGTDLNVPFELTRSCYETDSVSCGKCGTCRDRIRAFKENGLKDPIEYATQIDWE

SEQ ID NO: 39070 - protein, 233 aa, Lactobacillus mali
  REGION 1..233: note = tr|A0A0R2FSR6|A0A0R2FSR6_9LACO 7-cyano-7-deazaguanine synthase OS=Lactobacillus mali; OX = 1618 GN=queC PE=3 SV=1
MGQVVLLSGGMDSAVCLALAIKKYNKENVIALAFSYGQKHASEIQNARNVANYFGVKIVIASVDTQIFQGSDSTLLQGNGPIEHKSYGEILKESGGGTVDTYVPFRNGLMLSQAAALAYSQELAEVSYGAHSDDAAGSAYPDCSPLFFGAMASAISAGTAGKVTLIAPLIENNKAGVVKLGTDLNVPFELTRSCYETDSVSCGKCGTCRDRIRAFKENGLKDPIEYATQIDWE

SEQ ID NO: 39071 - protein, 233 aa, Lactobacillus satsumensis
  REGION 1..233: note = tr|A0A0R1V1G4|A0A0R1V1G4_9LACO 7-cyano-7-deazaguanine synthase OS=Lactobacillus satsumensis DSM 16230 = JCM 12392 OX=1423801 GN=queC PE=3; SV = 1
MDEIILLSGGLDSAVCLAQAVATHGKNNVLALSFAYGQKHQLELENARKVAAYYQVEYVVAHIDHQLFNGSTSTLLTGNGAIAQQSYAAIIAEQGSGTVDTYVPFRNGLMLSQATALAYSQQAAQVCYGAHADDAAGQAYPDCTPEFYHAMNAAISAGTAGKVSLAAPLIKLNKAGVVKLGIALHVPFALTRSCYAGQQAACGKCATCRDRIAAFKANKLKDPIAYQTSITWS

SEQ ID NO: 39072 - protein, 136 aa, Lactobacillus sp.
  REGION 1..136: note = tr|A0A2A7QUA0|A0A2A7QUA0_9LACO 7-cyano-7-deazaguanine synthase (Fragment); OS = Lactobacillus sp. UMNPBX6 OX=2042041 GN=queC PE=3 SV=1
SITHNALMDNNETIQQKQGELPNTFVDGRNALFLLYAAIYAKGQGISDIITGVCETDFSGYPDCRDVFIKSMNVTLNLAMDYRFNIITPLMWLTKKETWALADQLGRLEYVMQHTHTCYEGVEGGCHHCPSCLLRE

SEQ ID NO: 39073 - protein, 234 aa, Lactobacillus sucicola
  REGION 1..234: note = tr|A0A023CXJ4|A0A023CXJ4_9LACO 7-cyano-7-deazaguanine synthase OS=Lactobacillus sucicola DSM 21376 = JCM 15457 OX=1423806 GN=queC PE=3 SV=1
MGQVVLLSGGMDSATCLALAVRKYGAEQVCALAFTYGQKHDLEIVNARQVAHFFDVKLVEAAIDRKIFTGSNSTLLKGNGDIEEKSYAEIIQEKGTGIVDTYVPFRNGLMLSQAAALAYSIQLDEVAYGAHKDDAAGDVYPDCSPGFYQSMNAAVAAGTAGKVTLIAPLIELNKAGVVRLGRKLGVPFELTRSCYEGRKYACGKCGTCRDRIKAFRDNGLKDPIRYEKEPDWDK

SEQ ID NO: 39074 - protein, 235 aa, Lactobacillus uvarum
  REGION 1..235: note = tr|A0A0R1PWZ2|A0A0R1PWZ2_9LACO 7-cyano-7-deazaguanine synthase OS=Lactobacillus uvarum DSM 19971 OX=1423812 GN=queC PE=3 SV=1
MMGQVVLLSGGMDSATCLALAIKKYGIEHVIALAFTYGQKHDLEIVNARQVARFFGAKLVEAAVDHKIFTGSDSTLLKGNGAIEEKSYAEIMQEKGAKVVDTYVPFRNGLMLSQAAALAYSSHLDEVAYGAHADDAAGNAYPDCSPVFFEAMRDAVVAGTAGKVTMAAPLIELTKAGVVSLGHKLGVPFELTRSCYEGHKYACGKCGTCRDRINAFKQNGLRDPIKYEKSPNWNN

SEQ ID NO: 39075 - protein, 235 aa, Lactobacillus vini
  REGION 1..235: note = tr|A0A0R2CMT1|A0A0R2CMT1_9LACO 7-cyano-7-deazaguanine synthase OS=Lactobacillus vini DSM 20605 OX=1133569 GN=queC PE=3 SV=1
MMKQVILLSGGLDSAVCLAQAVKAQGKENVIALSFAYGQKHQLELQTAQQVAQFYKVEHLIAKIDPQIFSGSSSTLLQGNGQIAQLSYQAIMQKNGSGIVDTYVPFRNGLMISQAAALAYSRRCSRIVYGAHVDDAAGNAYPDCSPSFYHAMNQAIVLGTDNQVHLAAPLITRNKAGVVQFGQQLKVPFELTRSCYEGQQFSCGKCATCRDRIKAFKINGLKDPIKYEIKIDWEH

SEQ ID NO: 39076 - protein, 145 aa, Lactococcus lactis
  REGION 1..145: note = tr|A0A0M2ZSZ6|A0A0M2ZSZ6_LACLC Queuosine biosynthesis protein QueC, queC OS=Lactococcus lactis subsp. cremoris OX=1359 GN=VN96_1044 PE=4 SV=1
MKIIKKIDETLTEVQVLIYAPNELAFSSLAEKIDERISFATVEGIIFLQRRELLYIKAQNNYLELGTEKKVYKMRSPLYQLEKRLGNKFIRVSRSFLINFDRLEKLDTDIFLGIKAQVGNIKVPVSKTYLKNINAKISEIERGEI

SEQ ID NO: 39077 - protein, 207 aa, unidentified
  source 1..207: note = Lacunisphaera limnophila
  REGION 1..207: note = tr|A0A1D8AZW1|A0A1D8AZW1_9BACT 7-cyano-7-deazaguanine synthase OS=Lacunisphaera limnophila OX=1838286 GN=queC_3 PE=3 SV=1
MRKVSVLLASGGLDSTTLAYWMMAKRVQFYPLFVNYGQHCATTELNTLRQVLPKRILRKLEIVDVAAIYAGSQSRLIRETNLWEESITKEDLYLPYRNILLLSIAAARVQSAGGGTVYTAFINSNHAEEIDCSARFFGRLSELLKSFGGVRVKMPFRYKSKAQVARIGIRLGAPIGETFSCQVNSRVPCGACPNCVDRLQGLAALGG

SEQ ID NO: 39078 - protein, 235 aa, unidentified
  source 1..235: note = Lacunisphaera limnophila
  REGION 1..235: note = tr|A0A1D8AZ02|A0A1D8AZ02_9BACT 7-cyano-7-deazaguanine synthase OS=Lacunisphaera limnophila OX=1838286 GN=queC_2 PE=3 SV=1
MKTVVIFSGGMDSTILVYDLIARGDTVKVLSVDYGQRHAKEIVCAKGIAAQLGIEHRVADLRSITPLLAGSSLTSADIAVPEGHYAEDNMKATVVPNRNMIMLAVATGWAISMRFDAVAFGAHSGDHTIYPDCRPEFASLMDSAIRLADWNEVRLIRPFVGQTKAELAKRGAELKVPFERTWSCYKGGEFHCGVCGTCVERREAFHLAGLADPTTYDTKAPTVAMMVRDNWRITA

SEQ ID NO: 39079 - protein, 233 aa, unidentified
  source 1..233: note = Lacunisphaera sp.
  REGION 1..233: note = tr|A0A4Q1C6E6|A0A4Q1C6E6_9BACT 7-cyano-7-deazaguanine synthase OS=Lacunisphaera sp. TWA-58 OX=2508720 GN=queC PE=3 SV=1
MKVVVLCSGGMDSVAALYWARAHHAVSAVLSFDYGSKHNHQEIPRAVEHARLLGFPHRTIRLDFIGQLFASDLLKSGGDIPEGHYADDNMRRTVVPFRNGIMLAAAAGFAESAEAQGLVIAAHTGDHTIYPDCREDFMRAMGDAMKAGTYAGIELLRPFIALTKGQIAAEGARLGVDFARTWSCYKGGAIHCGKCGTCVERREAFLQAGLVDPTEYEATPPLPDKPVEHKGAK

SEQ ID NO: 39080 - protein, 251 aa, unidentified
  source 1..251: note = Lampropedia cohaerens
  REGION 1..251: note = tr|A0A0U1Q266|A0A0U1Q266_9BURK 7-cyano-7-deazaguanine synthase OS=Lampropedia cohaerens; OX = 1610491 GN=queC PE=3 SV=1
MSATADSAQPQRALVLLSGGQDSATTLAWALARFAHVETIGFDYGQRHHVELACRQRLRDGMRALSPAWSQTLGEDHLLHVDVLKQLGTTAMTDDVAITLQDDGLPNTFVPGRNLLFFTLAAALAYRRGLTVLVGGMSQTDFSGYPDCRDNTLKALQVALSLGVDRPLVLATPLMWRDKAATWELAHALGGKPLVELIRTESHTCYLGSREHLHDWGYGCGACPACVLRAQGFARWRTHCALQATETAGNA

SEQ ID NO: 39081 - protein, 244 aa, Lampropedia hyalina
  REGION 1..244: note = tr|A0A1M4WY66|A0A1M4WY66_9BURK 7-cyano-7-deazaguanine synthase OS=Lampropedia hyalina DSM 16112 OX=1122156 GN=queC PE=3 SV=1
MSPSPCRAPRTLVLFSGGQDSATCLAWALHRYAHVETLGFDYGQRHRVELECRHRLREGMLALQPAWAERLGADHVLPVEVLAAVGSTAMTDDIAIQMQADGLPNTFVPGRNLLFFTLAAAMAYRRDLTVLVGGMSETDYSGYPDCRDNTLKALQVALSLGIDRPLRLETPLMWRDKAQTWALAHALGGTGLVELLRTQSHTCYLGQRDTLHDWGYGCGSCPACELRATGYRLWQAGKVARPTA

SEQ ID NO: 39082 - protein, 233 aa, Lampropedia sp.
  REGION 1..233: note = tr|A0A4S5BPL9|A0A4S5BPL9_9BURK 7-cyano-7-deazaguanine synthase OS=Lampropedia sp. YIM MLB12 OX=2562762 GN=queC PE=3 SV=1
MHTSALVLFSGGQDSATCLAWALERYAHVETLGFNYGQRHAVELECRSTFTQVLRQQFPQWAHKLGEDHLLDMGLLGQISDTALTQAKAIEFEQSGLPNTFVPGRNLLFFTFAAALAYRRGLTVLVGGMCETDYSGYPDCRDNTLKSLQVSLSLGLDTPLVLETPLMWLDKAATWQMAEQLGGPELVALIEEHTHTCYMGERSQRHAWGYGCGQCPACDLRRSGFEAYRGEAA

SEQ ID NO: 39083 - protein, 200 aa, Lampropedia sp.
  REGION 1..200: note = tr|A0A4V3YWD4|A0A4V3YWD4_9BURK 7-cyano-7-deazaguanine synthase OS=Lampropedia sp. YIM MLB12 OX=2562762 GN=E8K88_16655 PE=3 SV=1
MTSALLLSGGMDSLSIAWWKRPTHAITIDYGQKAAITERTVSAAICAEIGIVHHVVSVDCRSLGSGDMAGAAADAAAPASDWWPYRNQLLITLAAMKAIGLGAKVLYIGTVASDEGHRDGTKDFVRMIDELVLYQEGGLRIEAPAIGLTTVELVNEAKVPARVLAYAHSCHKADIPCGNCRGCNKYVESMDSLGYGCRTS

SEQ ID NO: 39084 - protein, 713 aa, Laribacter hongkongensis
  REGION 1..713: note = tr|A0A248LH54|A0A248LH54_9NEIS 7-cyano-7-deazaguanine synthase OS=Laribacter hongkongensis OX=168471 GN=LHGZ1_0968 PE=4 SV=1
MQDKRYILCGNASAKGVSEDPERDLRLRLSGKEGKGNITLRIEDVHRKMFQPVPSLFNDLLEVATYVYSADQVIRRGADDVDTFGDGWRRDLHFVVPVRNPDFWNSAPVQEVLCATLGFLSDDQYQFDFVKLDQDHPFQEYLGFDDTQQMYRKPEQVVMFSGGLDSLAGAIDEVVNQKRRVLLVTHKSTNKLNKRHQTLENLLAEKANGNAPPRISVRVHKSKELNHEYTQRSRSFLYVSIGATIAKMLGLNSVRFYENGVISLNLPVCAQVVGGRATRTTHPRVMKGFQDIISLVAGEAFTVENPYIWKTKADVVKVITDAGCEDLIRHSMTCTHTWEMTNQHTHCGGCSQCIDRRFAVLAAKADQYDPVDHYKFDVFTQSRDAQDQKKNVDKIMAAAYLERANQVRNLTDVAQFVSSYPDVGRVFKFLGGDTAQAAQRVFDLYKRHANEVMGALDELLSRHRTAIRERTLPGDSLVRTAYESASVVSMPTVVSAEKLPDNLFRKRGNVWEARFQGRGRHPILIQGADKGAEYINLLLAFPDRETSVYAIAVGSAANAIDLPANTGVAPEDIEEGFHVTQGIPLGDAGDVADRQALHEWRQRARELLGEIEEAREAGDHARIEEIEEEMAFLTKAMESGKGLGGRQRKSGDKRKNVRDAFRNAVDRAIKQIEKYDKPLGEHLKASIKHGNEVVYRPGVPIVWDVRPITNGQG

SEQ ID NO: 39085 - protein, 229 aa, Laribacter hongkongensis
  REGION 1..229: note = sp|C1D6L0|QUEC_LARHH 7-cyano-7-deazaguanine synthase; OS = Laribacter hongkongensis (strain HLHK9) OX=557598; GN = queC PE=3 SV=1
MDSLRDPEHALVVLSGGQDSTTCLYWALSRFAQVSAISFDYGQRHRVELDAARTIAAMAGVGHTIIPINTFSALGGNALTDQQMSPDTGPDAETLLPNTFVPGRNLVFLTFAAAWAWPRGIRHIVTGVAQTDYSGYPDCRENTLRALELAINLGMESRMRLHMPLMFLSKADTVTLARTVGAMPALAFSHTCYAGAVPPCGQCAACVLRAKGFAEAGIPDPLLNRLAGV

SEQ ID NO: 39086 - protein, 632 aa, Larkinella sp.
  REGION 1..632: note = tr|A0A368JHK4|A0A368JHK4_9BACT Uncharacterized protein OS=Larkinella sp. ZZJ9 OX=2315727 GN=DUE52_23480; PE = 4 SV=1
MKTDTRHIILCDGVALPDSLIGMLPPHRVLTLTNREELPDRNMTVKIHDFASRLIARIPDRTRDLIEIAAFIYAADRLIKRGETNQVEYENWARELTFCIPVRDFNFWQQAEVSNKLAEALVFVSGDKSYKFHFTSRIGIDPLTGLFHNMDTNPTSSDSNEHYPIALYSGGLDSLAGVVSLLETTSSKVVITSHRSNPSTTQVQKRVYAALSKAYPGRLRYHPLDCNLTHGERASEETQRTRFFLYTSVGFALAQAYSQHELNIFENGITSINLSKRQDLINGRASRTTHPKTLGLLQAVFSSISGQSFVINHPFIHLTKTEVVSLLKQYERPELITATVTCTKTFQKFKNRSGASHCGYCSQCVDRRFAMYAARLEKYDAVYDFDLATEAFPGKDAQTHVVDYIRHAHTFATTHFGEFCNTYLEPLADLTEYCQPDQAEEEVNALHQLYQRHSMAIERAYRRMVATHDSIFKPPKPNSIYEIVNARRFQRDRAECLATDVAQMLSTTLPIALASTVINHENALNNQIQALLRRDQADYEREYPAVRFSFATVVPDHSSTKADADLFIEAKYVRKTMMPSRITDQIAADLMKYPLGAYKLFIVYDPERRIKDDNGFKRDYEQRSNCTICVIR

SEQ ID NO: 39087 - protein, 228 aa, Lautropia mirabilis
  REGION 1..228: note = tr|E7S062|E7S062_9BURK 7-cyano-7-deazaguanine synthase OS=Lautropia mirabilis ATCC 51599 OX=887898; GN = queC PE=3 SV=1
MSSPQKAAVIFSGGQDSTTCLFLALHEFGPGNVEAITFQYGQRHAIELDKARWIAEDLGVKQTLIDTSVIKAITHNALLDESATISQEDGQPPNTFVDGRNALFLLYAAIHAKAQGIRTLYTGVCETDFSGYPDCRDVFVKSMNVTLNLAMDYTFDIRTPLMWLTKKDTWALADRLGAFDYIRQHTHTCYLGVEGGCGQCPSCVLRERGLHEYLTERDAAQTKEQRHA

SEQ ID NO: 39088 - protein, 286 aa, Lautropia sp.
  REGION 1..286: note = tr|A0A3R8LMU3|A0A3R8LMU3_9BURK 7-cyano-7-deazaguanine synthase OS=Lautropia sp. KCOM 2505; OX = 2490857 GN=queC PE=3 SV=1
MQAGSSESAAAPAQASRPEKAAVIFSGGQDSTTCLFLALRDFGRDNVEVITFQYGQRHAIELEKARWIAQDLGVKQTVIDTSVIRAITHNALLDGSVPIEQHGSEPPNTFVDGRNALFLLYAAIYAKGQGIHTLYTGVCENDFSGYPDCRDVFIKSMNVTLNLAMDYPFDIRTPLMWLTKKQTWALADELGAFDYIREHTHTCYLGVPGGCHECPSCVLRERGLQAYLAERTPAKAAASAATRTPATQPESQSKETRGAAPSPATATSPTSHGLVSHDAPPSGAAS

SEQ ID NO: 39089 - protein, 223 aa, Lautropia sp.
  REGION 1..223: note = tr|A0A1D2SJW1|A0A1D2SJW1_9BURK 7-cyano-7-deazaguanine synthase OS=Lautropia sp. SCN 69-89; OX = 1660104 GN=queC PE=3 SV=1
MRAVVLLSGGLDSATVLAMAREQGRECYALSLRYGQRHAAELDAAVRIAVALGAVRHEIIDLDLSRFGGSALTDASIAVPERPGAPGTIPVTYVPARNTIMLSIALGWAETLDAREIHFGANAVDYSGYPDCRPEYVAAFEQMANLATKAGAEGRPLRIAAPIIDMTKARIIREGVRLGVDYAMTVSCYQADDEGRACGGCDACRIRRDGFAAAGVGDPTRYR

SEQ ID NO: 39090 - protein, 238 aa, Lawsonia intracellularis
  REGION 1..238: note = sp|Q1MQ73|QUEC_LAWIP 7-cyano-7-deazaguanine synthase; OS = Lawsonia intracellularis (strain PHE/MN1-00) OX=363253; GN = queC PE=3 SV=1
MYHLNQKALLLFSGGQDSGTCLGWALSNFSHIITIGFSYGQRHSVEMQCRTNIRNKISKLSKIWEQRLGEDYIFSLDIFSQLGETAITSELEIVFDKQGLPNTFVPGRNIFFLTIAAAFAWRNSIRHLIIGTCETDFSGYPDCQDNSIKATQLALSLGLGEDITIHTPLMWLTKAQTWELALHLGGSKFVDLIRNETHSCYLNDHTTSHEWGYGCGTCPACKLRKNGWETFLMKKRAN

SEQ ID NO: 39091 - protein, 224 aa, unidentified
  source 1..224: note = Lebetimonas natsushimae
  REGION 1..224: note = tr|A0A292YDM2|A0A292YDM2_9PROT 7-cyano-7-deazaguanine synthase OS=Lebetimonas natsushimae; OX = 1936991 GN=queC PE=3 SV=1
MKAIVILSGGMDSTTTLFIALHQGYEVIPVHFNYGQRTEKRELKSFNDICEYAGIKNRYIIDIPFFKQIGASALVDENLEVPTGGLKPGIPITYVPFRNGIFLSIAAAIAEKEGANAIFIGVVEEDSSGYPDCREDFIKKMQDAINEGTKPETQIEIKTPLIHLKKEDIVKEAIKYNVPLELTWSCYQNEDEACGVCDSCRLRLKGFEKAGVKDKIPYKKMKEK

SEQ ID NO: 39092 - protein, 233 aa, Lechevalieria deserti
  REGION 1..233: note = tr|A0A316HWM0|A0A316HWM0_9PSEU 7-cyano-7-deazaguanine synthase OS=Lechevalieria deserti; OX = 531939 GN=queC PE=3 SV=1
MTIDPEHRHPEHAVVIASGGLDSTVLAYWLAARHSRLTLVSFDYGQRHRVELDHAAEIARLLLSPHRIIDLTSLGALLTGSALTDASVAVPDGHYTDESMAATVVPNRNAIMLDIAVAVAIAVRADAVAFGAHAGDHTIYPDCRPEFVERFARSVQAANEGLLVPGFQVLAPFLTLTKTDIVRVGEALEVPFARTWSCYRGRAVHCGTCGTCTERQEAFRDNGIADPTVYQAA

SEQ ID NO: 39093 - protein, 231 aa, Leclercia adecarboxylata
  REGION 1..231: note = tr|A0A514VE40|A0A514VE40_9ENTR 7-cyano-7-deazaguanine synthase OS=Leclercia adecarboxylata OX=83655 GN=queC PE=3 SV=1
MKRAVVVFSGGQDSTTCLVQALQQYDEVHCVTFDYGQRHSEEIEVAQKLAVKLGARAHKVLDVTLLNELAVSSLTRDSIPVPDYEPDAEGIPNTFVPGRNILFLTLTAIYAYQVKAEAIITGVCETDFSGYPDCRDEFVKALNHAVNLGMAKDIRFETPLMWLDKAETWALADYWGKLELIRNETLTCYNGIQGDGCGQCAACNLRANGLNHYLADKAGVMAALKKKTGLN

SEQ ID NO: 39094 - protein, 231 aa, Leclercia adecarboxylata
  REGION 1..231: note = tr|A0A358ZMK1|A0A358ZMK1_9ENTR 7-cyano-7-deazaguanine synthase OS=Leclercia adecarboxylata OX=83655 GN=queC PE=3 SV=1
MKRAVVVFSGGQDSTTCLVQALQQYDEVHCVTFDYGQRHSEEIEVAQKLAVKLGARAHKVLDVTLLNELAVSSLTRDSIPVPDYEPDAEGIPNTFVPGRNILFLTLTAIYAYQVKAEAVITGVCETDFSGYPDCRDEFVKALNHAVNLGMAKDIRFETPLMWLDKAETWALADYWGKLDLVRNETLTCYNGIQGDGCGQCAACNLRANGLNHYLADKAGVMAALKKKTGLN

SEQ ID NO: 39095 - protein, 231 aa, Leclercia sp.
  REGION 1..231: note = tr|A0A345CDV0|A0A345CDV0_9ENTR 7-cyano-7-deazaguanine synthase OS=Leclercia sp. W17; OX = 2282309 GN=queC PE=3 SV=1
MKRAVVVFSGGQDSTTCLVQALQQYDEVHCVTFDYGQRHSEEIEVAQKLAVKLGARAHKVLDVTLLNELAVSSLTRDSIPVPDYEPDAEGIPNTFVPGRNILFLTLTAIYAYQVKAEAIITGVCETDFSGYPDCRDEFVKALNHAVNLGMAKDIRFETPLMWLDKAETWALADYWGKLDLVRNETLTCYNGIKGDGCGQCAACNLRANGLNHYLADKAGVMAALKKKTGLN

SEQ ID NO: 39096 - protein, 231 aa, Leclercia sp.; identical to SEQ ID NO: 38098
  REGION 1..231: note = tr|A0A0J6M6D5|A0A0J6M6D5_9ENTR 7-cyano-7-deazaguanine synthase OS=Leclercia sp. LK8; OX = 1628210 GN=queC PE=3 SV=1

SEQ ID NO: 39097 - protein, 199 aa, Leeuwenhoekiella palythoae
  REGION 1..199: note = tr|A0A1M5ZCK4|A0A1M5ZCK4_9FLAO 7-cyano-7-deazaguanine synthase OS=Leeuwenhoekiella palythoae OX=573501 GN=SAMN04487999_2936 PE=3 SV=1
MQKNNSAILLSGGMDSIALAYLKRPKYAFTLDYGQKAALAEINAARQVSKELSIDHHIIRVDCGSLGSGDMSSKPSISMSPVSEWWPYRNQLLVTLACMKGVVLGINELIVGSVKTDDAHKDGTMEFYSYLSTLVQYQEGAIKISCPAIDLTTIELIRKSKLPESLLLWAHSCHTSNEPCMNCNGCKKYLFTLQSLNLD

SEQ ID NO: 39098 - protein, 209 aa, Leeuwenhoekiella sp.
  REGION 1..209: note = tr|A0A4Q0NT77|A0A4Q0NT77_9FLAO 7-cyano-7-deazaguanine synthase OS=Leeuwenhoekiella sp. R-50232 OX=2249425 GN=DSM04_104310 PE=3 SV=1
MQDFKKGVILVSGGLDSTTLCYLFMKKCVEFVPLIINYGQHCFKTELDRLNKVLPEQYVSKIEILDISDIYKYSNSKFIKASNLWEESITADDLYIPYRNVLILTVAASFARTLGLNNVYSAFINSNHAKEIDCSNDFFNNLESLLKDYGSVKIEMPFRDYSKFEVAKLGIELGAPIGKTFSCQASPDVPCGACPNCVDRLEALKRLSE

SEQ ID NO: 39099 - protein, 223 aa, Legionella adelaidensis
  REGION 1..223: note = tr|A0A0W0R1I2|A0A0W0R1I2_9GAMM 7-cyano-7-deazaguanine synthase OS=Legionella adelaidensis; OX = 45056 GN=queC PE=3 SV=1
MKKAVILLSGGLDSATCLAIAKQQGFACYALSFAYGQRHDFELEAAKKLAQSMHAVDHRIISLDIGQFGASALTDSSIVVEDYKGDNKIPVTYVPARNTVFLSIALSLAESINAFDIFIGANFIDYSGYPDCRPEYIEAFEKLANLATKAGVEGNQYTIHAPLLYLSKAEIIKTGTHLHVPYELTVSCYRLDKNGAACGKCDSCIFRARGFNEANIADPTHYF

SEQ ID NO: 39100 - protein, 227 aa, Legionella anisa
  REGION 1..227: note = tr|A0A2Z3KJ41|A0A2Z3KJ41_9GAMM 7-cyano-7-deazaguanine synthase OS=Legionella anisa; OX = 28082 GN=queC PE=3 SV=1
MKKAVVLLSGGLDSTTCLALARSKGFSCYAISFSYGQRHSAELLAAQRIAQHYHVVTHQIVTLDTALFRNSALTDSNIEVPSFQEGSDIPVTYVPARNTIFLAMALGFAESIGAREIFIGASSVDYSHYPDCRPEFIQAFQTLANLATKAGVSGDRFSIHAPLQHLSKVETIQLGLSLGVDYSLTVSCYQANDAGEACGQCDSCTFRKRGFLGAGIDDPTLYRRSDY

SEQ ID NO: 39101 - protein, 269 aa, Legionella beliardensis
  REGION 1..269: note = tr|A0A378HY26|A0A378HY26_9GAMM 7-cyano-7-deazaguanine synthase OS=Legionella beliardensis; OX = 91822 GN=queC PE=3 SV=1
MQDSTKFAYLSLSGGLDSTTLLLHLLARGYQVTAISFLYGQKHNIEIERAQDLIQYLNLKGFAIKHHIIHLNGLSNLLFSALVEGGNTVPEGLYSGENMAATVVPNRNKIFISILQAAALSCAIENNTTVHVALGIHAGDHAVYPDCRPEFIDADYQAFQLGNWHAEKVAPYMPYLNADKGGILQDGIKACKQLNLDFKEIYKRTITSYKPNTDGISDYKSASSIQRIAAFIKLNCIDPIIYADDRGIVDWETVKAHVLSVLDTADKQK

SEQ ID NO: 39102 - protein, 223 aa, Legionella birminghamensis
  REGION 1..223: note = tr|A0A378IMA5|A0A378IMA5_9GAMM 7-cyano-7-deazaguanine synthase OS=Legionella birminghamensis OX=28083 GN=queC PE=3 SV=1
MKNAVVLLSGGLDSTTCLAIAKAAGYQCHALSFSYGQRHNSEIEAARRVAAFFDVAEHRIVNLDINQFGGSALTDETISVPDYQPSQSIPVTYVPARNTIFLSIALGYAEVIGASDIFIGISSVDYSNYPDCRPDYMDAFKKMAALATRAGVEGKPLEIHTPLVSLSKCETIKLGASLGADYALTISCYQADSQGKACGRCDSCTFRRKGFIEAGLSDPTIYQ

SEQ ID NO: 39103 - protein, 223 aa, Legionella brunensis
  REGION 1..223: note = tr|A0A0W0SVI3|A0A0W0SVI3_9GAMM 7-cyano-7-deazaguanine synthase OS=Legionella brunensis; OX = 29422 GN=queC PE=3 SV=1
MKKAVVLLSGGLDSATCLAIAKAEGFTCYTLSFMYGQRHTAELAAASRVATHLQAAEHRIINLDIGQFGGSALTDKAIAVPEYTGSKAIPITYVPARNTIFLAMALAFAETLEAHDIFIGASSIDYSGYPDCRPEFMTAFEKVANLATKAGVAGDEFKIHAPLQYLTKAETILKGSSLGVDYSLTVSCYQATETGKACGYCDSCTFRKQGFKTANLPDPTPYK

SEQ ID NO: 39104 - protein, 271 aa, Legionella busanensis
  REGION 1..271: note = tr|A0A378JSM8|A0A378JSM8_9GAMM 7-cyano-7-deazaguanine synthase OS=Legionella busanensis; OX = 190655 GN=queC_2 PE=3 SV=1
MPNLKKSAYLALSGGMDSSTLLLHLLARDYQVNAISFLYGQKHKVEIDCAINLVKYLAEKGYKINHHLVHLDGLSELLFSALVDGGDVVPEGLYDGENMAATVVPNRNKIFISILQAAALSRAVEDNTTVCVALGIHSEDHAVYPDCRPEFVNTDYQAFQAGNWDAHKVINYMPYLHSDKYGILKDGEEACRQLNLDFNEIYKRTITSYKPNTEGISDYKSASSVQRIAAFIQLNRIDPVLYADENGIADWNTVKAHVLSVLEENKIKINL

SEQ ID NO: 39105 - protein, 225 aa, Legionella busanensis
  REGION 1..225: note = tr|A0A378JP82|A0A378JP82_9GAMM 7-cyano-7-deazaguanine synthase OS=Legionella busanensis; OX = 190655 GN=queC_1 PE=3 SV=1
MNKRVIVLLSGGMDSSTCLALVKSKNYDCYAISFDYGQPHQGELAAAKRVAEHIGVQEHKIFTFNMAAFGGTVLNNHNYGKTRTYLSKTLPVVQAPSHNPIFLAIAIGWGELIDAYDIFIGATTVDWANNPDCTPKFLNAFEKAANYGTKAGISGMRFKIHAPFNSMSKGEIVKKGLALDFDYSLTLSCYQPEKNNRACGVCHSCRERKEGFQEAGVFDPVLYAR

SEQ ID NO: 39106 - protein, 228 aa, Legionella cherrii
  REGION 1..228: note = tr|A0A0W0SB95|A0A0W0SB95_9GAMM 7-cyano-7-deazaguanine synthase OS=Legionella cherrii; OX = 28084 GN=queC PE=3 SV=1
MKKAVVLLSGGLDSTTCLALATSKGFSCYAISFAYGQRHSAELLAAQRIAQHYKVAKHHIVTLDTALFRNSALTDSSVEVPAFQGGSEIPVTYVPARNTIFLAMALGLAESIGARDIFIGASSVDYSHYPDCRPEFIDAFQTLANLATKAGVTGDHFSIHAPLQHLSKVQTIQLGTSLGVDYSLTVSCYQANDAGEACGECDSCTFRRRGFIGAGVADPTLYRNSSHR

SEQ ID NO: 39107 - protein, 226 aa, Legionella cincinnatiensis
  REGION 1..226: note = tr|A0A378IEH8|A0A378IEH8_9GAMM 7-cyano-7-deazaguanine synthase OS=Legionella cincinnatiensis OX=28085 GN=queC PE=3 SV=1
MKKSVILLSGGLDSTTCLALAASKGFTCYALSFSYGQRHSAELFAAQRIAKHYKVAEHHIVTLDTELFRNSALTDSNLNVPAFKEDTEIPVTYVPARNTIFLAMALGFAESIGARDIFIGASSVDYSHYPDCRPEFISTFQTLANLATKAGVTGDPFTIHAPLQYLSKVQTIQLGISLGVDYSLTVSCYQANDAGEACGQCDSCTFRQRGFIGAGIDDPTLYRRQE

SEQ ID NO: 39108 - protein, 223 aa, unidentified
  source 1..223: note = Legionella clemsonensis
  REGION 1..223: note = tr|A0A222P6A0|A0A222P6A0_9GAMM 7-cyano-7-deazaguanine synthase OS=Legionella clemsonensis; OX = 1867846 GN=queC PE=3 SV=1
MKKAVVLLSGGLDSATCLAIARQEGYACYALSFQYGQRHTAELVAATRVAQHLNVVEHRIVNLDIGQLAGSALTDQSIAVPEYSGAQEIPVTYVPARNTIFLALALAYAETIVANAIFIGVNSIDYSHYPDCRPEFIAAFEKAANLATKAAVSGHAVKIHAPLQFLNKAEIILKGTSLGVNYALTVSCYQATENGEACGVCDSCTFRKQGFKAAKLPDPTYYK

SEQ ID NO: 39109 - protein, 223 aa, unidentified
  source 1..223: note = Legionella donaldsonii
  REGION 1..223: note = tr|A0A378IZ31|A0A378IZ31_9GAMM 7-cyano-7-deazaguanine synthase OS=Legionella donaldsonii; OX = 45060 GN=queC PE=3 SV=1
MKKAVVLLSGGLDSTTCLAMAKAQGFACYALSFAYGQRHSVELSAARRVAAHFSVVEHRVVTLDLGQFGGSALTDETRSVPDYKGDGLIPVTYVPARNTVFLSIALSFAEVIGARDIFIGVSAVDYSGYPDCRPEYIAAFEHMANLATKAGVEGEGVKLHTPLQHLSKAETILAGKHLGVDYALTVSCYQATESGHACGRCDSCTYRRQGFEAAGVADPTLYL

SEQ ID NO: 39110 - protein, 223 aa, Legionella drancourtii
  REGION 1..223: note = tr|G9ETN9|G9ETN9_9GAMM 7-cyano-7-deazaguanine synthase OS=Legionella drancourtii LLAP12 OX=658187; GN = queC PE=3 SV=1
MKNAVVLLSGGLDSTTCLALAKAKGFACYAMSFSYGQRHTAELSAATRIAQHYAVKEHKIVTLDTQLFRNSALTDASMAVPDFQESAEIPITYVPARNTIFLSMALGFAESIGARDIYIGASSVDYSHYPDCRPEFIAAFQTLANLATKAGVSGDPFTIHAPLQHLSKVKTIELGLSLGVDYSLTVSCYQANDAGEACGQCDSCTFRKRGFANAGVADPTLYK

SEQ ID NO: 39111 - protein, 223 aa, Legionella drozanskii
  REGION 1..223: note = tr|A0A0W0SXL1|A0A0W0SXL1_9GAMM 7-cyano-7-deazaguanine synthase OS=Legionella drozanskii LLAP-1 OX=1212489 GN=queC PE=3 SV=1
MKKAVILLSGGLDSTTCLAIAKAESFECHALSFAYGQRHSAELAAARRVASHFRVAEHRIINLDLGQLGGSALTDESIQVPDYSASEEIPVTYVPARNTVFLSYALGYAEIIGARDIFIGVSSVDYSHYPDCRPEYISAFQAVANLATKAGVEGDYIQLHAPLQDLSKAETILLGSKLGVNYSLTVSCYQASDNGSACGRCDSCCFRKQGFETAGLADPTFYA

SEQ ID NO: 39112 - protein, 225 aa, Legionella erythra
  REGION 1..225: note = tr|A0A0W0TSM5|A0A0W0TSM5_LEGER 7-cyano-7-deazaguanine synthase OS=Legionella erythra; OX = 448 GN=queC PE=3 SV=1
MKKAIVLLSGGLDSTTCLAIAKSQGYACYALSFDYGQRHQAELEAAKRVADQLGAIEHRIFTLDIGQFKGSALTDASVAVPDYRGDGKIPVTYVPARNTIFLAVALGFAETLEAFDLFIGVSQIDYSGYPDCRPDYIAAFEAMANLATKAGVEGRKTVIHTPLIALSKAETIRQGLASGADYSLTVSCYQATPEGLACGRCDSCTYRKKGFKEAGIADPTRYVRD

SEQ ID NO: 39113 - protein, 224 aa, Legionella fallonii
  REGION 1..224: note = tr|A0A098GBT4|A0A098GBT4_9GAMM 7-cyano-7-deazaguanine synthase OS=Legionella fallonii LLAP-10 OX=1212491 GN=queC PE=3 SV=1
MKKAVVLFSGGLDSTTCLALAKSQGFHCYGLSFSYGQRHSAELLAAARIAQHMGIEHKIIKLDVNLFGGSALTDTTIEVPNYQESEAIPVTYVPARNTIFLSMALGLAESINARDIFIGVSSIDYSHYPDCRPEFIQAFQTLANLATKAGVEGDRFSIHAPLQHLSKAKTIELGNKLGVNYSLTVSCYQANDAGEACGQCDSCTFRRQGFAAAHVNDPTIYQKA

SEQ ID NO: 39114 - protein, 223 aa, Legionella feeleii
  REGION 1..223: note = tr|A0A378IP54|A0A378IP54_9GAMM 7-cyano-7-deazaguanine synthase OS=Legionella feeleii; OX = 453 GN=queC PE=3 SV=1
MKKAVVLLSGGLDSTTCLAMAKAQGFACYALSFAYGQRHSVELSAARRVAAHFSVVEHRVVTLDLGQFGGSALTDETLSVPDYKGDGLIPVTYVPARNTVFLSIALGFAEVIGARDIFIGVSAVDYSGYPDCRPEYIAAFEHMANLATKAGLEGEGVKLHTPLQHLSKAETILAGKHLGVDYALTVSCYQATECGHACGRCDSCTYRRQGFEAAGVADPTLYL

SEQ ID NO: 39115 - protein, 226 aa, Legionella feeleii
  REGION 1..226: note = tr|A0A0W0THY0|A0A0W0THY0_9GAMM 7-cyano-7-deazaguanine synthase OS=Legionella feeleii; OX = 453 GN=queC_2 PE=3 SV=1
MKKKAVVLLSGGLDSTTCLAFANSKSYECNALSFDYGQRHSSELNAAKKIAQHFNANQHEIISLDSLGKLGGSSLTDQTKKIEEYSGKTGIPSTYVPARNTIMLSIALGWAEIINADSIFIGVSSVDYSGYPDCRPEFIEAFMKMANLATKNSVLGEKINIETPLLYLSKADTVKLGKSLDVDYSMTVSCYQANQDGEACGKCDSCYLRKKGFQDADIQDPTRYIS

SEQ ID NO: 39116 - protein, 229 aa, Legionella geestiana
  REGION 1..229: note = tr|A0A0W0TP35|A0A0W0TP35_9GAMM 7-cyano-7-deazaguanine synthase OS=Legionella geestiana; OX = 45065 GN=queC PE=3 SV=1
MKKAVVLLSGGLDSATCLAMAREAGYETHALSFDYGQRHAGELHAARAVAAALGAAEHRVVTLDIGQFGGSALTDSRIAVPDHGEAGSGIPVTYVPARNTVFLAIALGFAESIGADVLYIGVNSVDYSGYPDCRPAFIEAFERLANLATKSGVEGQAFRIHAPLQHLDKADIIREGVRLGVDYALTVSCYRATPDNRACGRCDSCTFRREGFLRAGLSDPTRYQVEQVF

SEQ ID NO: 39117 - protein, 226 aa, Legionella gratiana
  REGION 1..226: note = tr|A0A378J053|A0A378J053_9GAMM 7-cyano-7-deazaguanine synthase OS=Legionella gratiana; OX = 45066 GN=queC PE=3 SV=1
MKKAVILLSGGLDSTTCLALAAAKGFSCYAISFSYGQRHSAELLAAQRIAAHYKVAEHQIVPLDTKLFRNSALTDPNLNVPAFKEGTEIPVTYVPARNTIFLAMALGFAESISARDIFIGASSVDYSHYPDCRPEFISAFQTLANLATQAGVSGDLFTIHAPLQQLSKVQTIQLGISLGVDYSLTVSCYQANDTGEACGQCDSCTFRHRGFIGAGIDDPTLYRHSE

SEQ ID NO: 39118 - protein, 223 aa, Legionella hackeliae
  REGION 1..223: note = tr|A0A0A8UP39|A0A0A8UP39_LEGHA 7-cyano-7-deazaguanine synthase OS=Legionella hackeliae; OX = 449 GN=queC PE=3 SV=1
MKKAVILLSGGLDSATCLALAKQEGYACYALSFRYGQRHPAELAAATRVAKHLSAVEHRITDLDIGQFGGSALTNNAIPVPEYSGSKEIPITYVPARNTIFLAMALAYAEILEARDIFIGVNAVDYSGYPDCRPEFVAAFEKMANLATKAGVSGDTVKIHAPLQFLTKEEIILKGTNLGLDYSLTVSCYQATEAGEACGICDSCTFRKQGFKAANLTDPTRYK

SEQ ID NO: 39119 - protein, 226 aa, Legionella israelensis
  REGION 1..226: note = tr|A0A516MYH0|A0A516MYH0_9GAMM 7-cyano-7-deazaguanine synthase OS=Legionella israelensis; OX = 454 GN=queC PE=3 SV=1
MKKKAIVLLSGGLDSTTCLAIARNQGYQCIALSFAYGQRHAVELMAAKRIAQSLGAHEHRVVHLDLGQFGASALTDNSLDVPSYQGNTEIPVTYVPARNTVFLSIALGLAEALCARDIFIGVSSIDYSHYPDCRPEFIKAFEQLSNLATKAGVEGDSFRIHAPLQYMSKAETILSGTKLGVDYALTISCYQANSEGAACGQCDSCTFRKQGFLQAGVPDPTVYLNI

SEQ ID NO: 39120 - protein, 226 aa, Legionella israelensis
  REGION 1..226: note = tr|A0A0W0WGW1|A0A0W0WGW1_9GAMM 7-cyano-7-deazaguanine synthase OS=Legionella israelensis; OX = 454 GN=queC PE=3 SV=1
MKKKAIVLLSGGLDSSTCLAIARNQGYQCIALSFAYGQRHAVELMAAKRIAQSLGAHEHRVVHLDLGQFGASALTDNSLDVPSYQGNTEIPVTYVPARNTVFLSIALGLAEALCARDIFIGVSSIDYSHYPDCRPEFIKAFEQLSNLATKAGVEGDSFRIHAPLQYMSKAETILSGTKLGVDYALTISCYQANSEGAACGQCDSCTFRKQGFLQAGVPDPTVYLNI

SEQ ID NO: 39121 - protein, 222 aa, Legionella jamestowniensis
  REGION 1..222: note = tr|A0A0W0UJM5|A0A0W0UJM5_9GAMM 7-cyano-7-deazaguanine synthase OS=Legionella jamestowniensis OX=455 GN=queC PE=3 SV=1
MKKAVVLLSGGLDSATCLAIARQEGYACYALSFQYGQRHTAELAAATRVAQQLHVAEHRIVNLDIGQLGGSALTDQSIAVPKYSGTQDIPVTYVPARNTIFLAMALAYAETIAASDIFIGVNSIDYSHYPDCRPEFITAFENVANLATKAAVSGHAVKIHAPLQFLNKADIILKGTHLGIDYALTVSCYQATDSGEACGICDSCTFRKQGFRAAHLPDPTRY

SEQ ID NO: 39122 - protein, 223 aa, Legionella jordanis
  REGION 1..223: note = tr|A0A0W0VD84|A0A0W0VD84_9GAMM 7-cyano-7-deazaguanine synthase OS=Legionella jordanis; OX = 456 GN=queC PE=3 SV=1
MKKAVVLLSGGLDSATVLAIAKAEGFACYALSFAYGQRHNAELLAAKRIAEVLSVAEHRIVQLDLSAFGGSALTDKSIAVPDYSGSKEIPITYVPARNTIFLSIALAMAEVIGARDIFIGVNSIDYSHYADCRPEFIDAFQQVANLGTKAGVEGDKFHLHAPLQHLDKSEIIRTGLRLGLDYSLTVSCYQATEEGRACGRCDSCIFRKQGFLMAGYPDPTKYL

SEQ ID NO: 39123 - protein, 223 aa, Legionella lansingensis
  REGION 1..223: note = tr|A0A0W0VLP4|A0A0W0VLP4_9GAMM 7-cyano-7-deazaguanine synthase OS=Legionella lansingensis; OX = 45067 GN=queC PE=3 SV=1
MKKAVVLLSGGLDSATCLAIAKTQGFACYALSFAYGQRHTAELTAACRVAKHLEAVEHRIVNLDIGQFGGSALTDKSIAVPNYSGAQTIPVTYVPARNTIFLAIAVGFAEVIDARDIFIGVSAIDYSGYPDCRSEFIEAFQKVANLGTKAGVAGDLFTLHAPLQFLSKAETILKGTSLGLDYSLTVSCYQATETGEACGRCDSCIFRKQGFAAAKWPDPTKYK

SEQ ID NO: 39124 - protein, 224 aa, Legionella londiniensis
  REGION 1..224: note = tr|A0A0W0VIE0|A0A0W0VIE0_9GAMM 7-cyano-7-deazaguanine synthase OS=Legionella londiniensis; OX = 45068 GN=queC PE=3 SV=1
MKKAVVLLSGGLDSATCLALAKAQGFSCYALSFDYGQRHAYELLAAKRIAERSAVCEHRIVKLDMEQFGGSALTDMSIDVPNYNASQNIPVTYVPARNTTFLAIALGYAEALGAFDIFIGVNAVDYSGYPDCRPEYIKAFEAMANLATKAAVEGARIRIAAPLLHLSKAEIIKTGTELLVDYSLTVSCYRLNNEGEACGACDSCVFRAEGFAKANVPDPTRYQK

SEQ ID NO: 39125 - protein, 223 aa, Legionella longbeachae
  REGION 1..223: note = tr|A0A378L3P3|A0A378L3P3_LEGLO 7-cyano-7-deazaguanine synthase OS=Legionella longbeachae; OX = 450 GN=queC PE=3 SV=1
MKKAVVLLSGGLDSATCLAIAKNQGFKCFALSFMYGQRHEYELNAARRIAVNMAAFEHRVVHLDIGQFGASALTDKRIDVPDYEGLGKIPVTYVPARNTVFLATALGLAEAVGAYDIFIGANAVDYSGYPDCRPEFITAFQHLANVATKAGVEGRAFTIQAPLLHLTKADIIRTGMQLGVDYSLTVSCYQLNQEGAACGHCDSCVLRAQGFKAAGVEDPTYYQ

SEQ ID NO: 39126 - protein, 226 aa, Legionella longbeachae
  REGION 1..226: note = tr|D3HNR3|D3HNR3_LEGLN 7-cyano-7-deazaguanine synthase OS=Legionella longbeachae serogroup 1 (strain NSW150) OX=661367 GN=queC PE=3 SV=1
MKKAVILLSGGLDSTTCLALAASKGFACYAISFSYGQRHSAELFAAQRIAKHYKAKTHQIVTLDTELFHNSALTDPSVDVPDFKEGSEIPVTYVPARNTIFLSMALGFAESIGARDIFIGASSVDYSHYPDCRPEFISAFQTLANLATKAGVTGDSFTIHAPLQYLSKVQTIQLGISLGVDYSLTVSCYQANEAGEACGQCDSCTFRKRGFIGAGIDDPTLYRHPE

SEQ ID NO: 39127 - protein, 223 aa, unidentified
  source 1..223: note = Legionella maceachernii
  REGION 1..223: note = tr|A0A0W0W1U1|A0A0W0W1U1_9GAMM 7-cyano-7-deazaguanine synthase OS=Legionella maceachernii; OX = 466 GN=queC PE=3 SV=1
MKKAVVLLSGGLDSTTCLAIAHKEGFACYALSFAYGQRHSAELAAARRVAQHFAVADHRIIALDIGQLGGSALTDESIQVPDYTGSSEIPVTYVPARNTIFLSYALGYAETIGARDIFIGVSAVDYSHYPDCRPEFIAAFQTLANLATKAGVEGDAFRLHAPLLHLSKAEAVRIGNRLNVDYALTVSCYQATESGKACGRCDSCCIRKQGFRAAGFKDPTIYV

SEQ ID NO: 39128 - protein, 223 aa, unidentified
  source 1..223: note = Legionella massiliensis
  REGION 1..223: note = tr|A0A078KXA7|A0A078KXA7_9GAMM 7-cyano-7-deazaguanine synthase OS=Legionella massiliensis; OX = 1034943 GN=queC PE=3 SV=1
MKKAVVLISGGLDSTTCLAIAKAEGFDCYALSFAYGQRHTAELIAAQRIAKHFAVSEHRIINLDIGQFGGSALTDQSIQVPEYSGSKEIPVTYVPARNTVFLAISLGYAEVLDAQDLFIGVSSVDYSGYPDCRPEYIAAFQNLANLATKSAVEGSPFRLHTPLLHLSKAETIRQGIKLGVDYSMTVSCYQATEDGKACGHCDSCTLRKQGFLEAYITDQTIYA

SEQ ID NO: 39129 - protein, 228 aa, Legionella moravica
  REGION 1..228: note = tr|A0A378K474|A0A378K474_9GAMM 7-cyano-7-deazaguanine synthase OS=Legionella moravica; OX = 39962 GN=queC PE=3 SV=1
MNKAVVLLSGGLDSTTCLALAKSRGFACYAISFSYGQRHSAELLAAARIAQHYGVVEHKIVNLDTQLFSGSALTDQSIDVPDYLDSPKIPVTYVPARNTIFLSMALGLAESIGARDIFIGASSVDFSHYPDCRPEFIQAFQNMANLATKAGIEGDSFRINTPLQHLSKIETIQLGIQLGVDYGMTVSCYQANNKGEACGSCDSCTFRKRGFSGSGIDDPTIYQIAGHN

SEQ ID NO: 39130 - protein, 223 aa, Legionella nautarum
  REGION 1..223: note = tr|A0A0W0WWK2|A0A0W0WWK2_9GAMM 7-cyano-7-deazaguanine synthase OS=Legionella nautarum; OX = 45070 GN=queC PE=3 SV=1
MKKAVILLSGGLDSTTCLAIAKAEGFACHALSFAYGQRHSAELAAARRVANHFKVAEHRIINLDIGQLGGSALTDETIQVPDYSASEEIPVTYVPARNTVFLAYALGYAESIGAQDIFIGVSSVDYSHYPDCRPEYISAFQAVANLATKVAVEGAPVQLHAPLQYLSKAETILRGSQLGVDYSLTVSCYQANEKGAACGRCDSCCFRKQGFKAAGLADPTFYI

SEQ ID NO: 39131 - protein, 228 aa, unidentified
  source 1..228: note = Legionella norrlandica
  REGION 1..228: note = tr|A0A0A2STF6|A0A0A2STF6_9GAMM 7-cyano-7-deazaguanine synthase OS=Legionella norrlandica; OX = 1498499 GN=queC PE=3 SV=1
MKKAIVLLSGGLDSTTCLALAKSQGFACYALSFSYGQRHSTELFASTRIAKRMGVVEHKIVTLDLTAFGGSALTDSAIEVPQFRESAEIPVTYVPARNTIFLAIALGYAESIDARDIFIGASSVDYSHYPDCRPEFIQVFQTLANLATKAGIEGDEFTIQAPLQHLSKAQTIQLGQELGVDYSLTISCYQANDAGEACGQCDSCAFRKRGFQSAGVADPTLYQKHVHI

SEQ ID NO: 39132 - protein, 223 aa, Legionella oakridgensis; identical to SEQ ID NO: 39125
  REGION 1..223: note = tr|A0A0W0X1I8|A0A0W0X1I8_9GAMM 7-cyano-7-deazaguanine synthase OS=Legionella oakridgensis; OX = 29423 GN=queC PE=3 SV=1

SEQ ID NO: 39133 - protein, 223 aa, Legionella oakridgensis; identical to SEQ ID NO: 39125
  REGION 1..223: note = tr|W0BD52|W0BD52_9GAMM 7-cyano-7-deazaguanine synthase OS=Legionella oakridgensis ATCC 33761 = DSM 21215; OX = 1268635 GN=queC PE=3 SV=1

SEQ ID NO: 39134 - protein, 227 aa, Legionella parisiensis
  REGION 1..227: note = tr|A0A1E5JM31|A0A1E5JM31_9GAMM 7-cyano-7-deazaguanine synthase OS=Legionella parisiensis; OX = 45071 GN=queC PE=3 SV=1
MKKAVVLLSGGLDSTTCLALARSKGFSCYAISFSYGQRHSAELLAAQRIAQHYQVVTHQIVPLDTALFRNSALTDSNIEVPSFQDGSDIPVTYVPARNTIFLAMALGFAESIGAREIFIGASSVDYSYYPDCRPEFIQAFQTLANLATKAGVSGDPFTIHAPLQHLSKVETIQLGIHLGIDYSLTVSCYQANDAGEACGQCDSCTFRKRGFLGAGIDDPTLYRHSDH

SEQ ID NO: 39135 - protein, 228 aa, Legionella pneumophila
  REGION 1..228: note = sp|Q5ZRJ5|QUEC_LEGPH 7-cyano-7-deazaguanine synthase; OS = Legionella pneumophila subsp. pneumophila (strain Philadelphia 1 / ATCC 33152 / DSM 7513) OX=272624 GN=queC P E=3 SV=2
MKKAVVLLSGGLDSTTCLALAKSQGFACYALSFSYGQRHSAELCAATRIAKHMGAADHKIVTLDIALFGGSALTDASIEVPEFKESPEIPVTYVPARNTIFLAMALGYAESIGARDIFIGASSVDYSHYPDCRPEFIESFQSLANLATKAGIEGDRFTINAPLQYLSKVQTIQLGTELGVDYGLTVSCYQANEAGEACGQCDSCTFRKRGFKSAGVDDPTRYQKCVHI

SEQ ID NO: 39136 - protein, 228 aa, Legionella pneumophila
  REGION 1..228: note = sp|A5II59|QUEC_LEGPC 7-cyano-7-deazaguanine synthase; OS = Legionella pneumophila (strain Corby) OX=400673 GN=queC; PE = 3 SV=1
MKKAVVLLSGGLDSTTCLALAKSQGFACYALSFSYGQRHSAELCAATRIAKHMDAADHKIVTLDTALFGGSALTDASIEVPEFKESPEIPVTYVPARNTIFLAMALGYAESIGARDIFIGASSVDYSHYPDCRPEFIESFQSLANLATKAGIEGDRFTINAPLQYLSKVQTIQLGTELGVDYGLTVSCYQANEAGEACGQCDSCTFRKRGFKSAGVNDPTRYQKCVHI

SEQ ID NO: 39137 - protein, 228 aa, Legionella quateirensis
  REGION 1..228: note = tr|A0A378L0L4|A0A378L0L4_9GAMM 7-cyano-7-deazaguanine synthase OS=Legionella quateirensis; OX = 45072 GN=queC PE=3 SV=1
MKKAVVLLSGGLDSTTCLALAKSKGFACFALSFSYGQRHSAELLAAARIAQHLGVVEHKTVTLDTQLFGGSALTDQSIDVPDFQDNSKIPVTYVPARNTIFLSMALGFAESIGARDIFIGASSVDFSHYPDCRPEFIQAFQDMANLATKAGIEGDSFRINAPLQYLSKIETIQLGMQLGVEYRLTVSCYQANNQGEACGSCDSCTFRKRGFSGAGIDDPTIYQRSVHN

SEQ ID NO: 39138 - protein, 225 aa, Legionella quinlivanii
  REGION 1..225: note = tr|A0A0W0Y5W8|A0A0W0Y5W8_9GAMM 7-cyano-7-deazaguanine synthase OS=Legionella quinlivanii; OX = 45073 GN=queC PE=3 SV=1
MRKAVVLLSGGLDSTTCLAVAKAAGYQCFALSFSYGQRHNSEIEAAKRVATWFEVAEHRIVNLDINQFGGSALTDETINVPDYQPTEGIPLTYVPARNTIFLAIALGYAEVIGANDLFIGISSVDYSNYPDCRPEYMEAFKKMAGLATRAGVEGNPLEIHTPLIKLSKAETVRLGAALGVDYALTVSCYQADEKGRACGRCDSCTFRQKGFVEAGIADPTLYKHN

SEQ ID NO: 39139 - protein, 225 aa, Legionella quinlivanii
  REGION 1..225: note = tr|A0A364LKW8|A0A364LKW8_9GAMM 7-cyano-7-deazaguanine synthase OS=Legionella quinlivanii; OX = 45073 GN=queC PE=3 SV=1
MRKAVVLLSGGLDSTTCLAVAKAAGYQCFALSFSYGQRHNSEIEAAKRVAACFKVAEHRIVNLDINQFGGSALTDETIEVPDYQPTDSIPLTYVPARNTIFLAIALGYAEVIGANDLFIGISSVDYSNYPDCRPEYMDAFKKMAGLATRAGVEGNPLEIHTPLIHLSKAETVRLGAGLGVDYALTVSCYQADEKGRACGRCDSCTFRQKGFVEAGIADPTLYQNN

SEQ ID NO: 39140 - protein, 225 aa, Legionella rubrilucens
  REGION 1..225: note = tr|A0A0W0XMV6|A0A0W0XMV6_9GAMM 7-cyano-7-deazaguanine synthase OS=Legionella rubrilucens; OX = 458 GN=queC PE=3 SV=1
MKKALVLLSGGLDSTTCLAIAKSQGYACYALSFDYGQRHNAELEAAKRVARQLGVIEHRVFTLDIGQFKGSALTDASVAVPDYCGDGKIPVTYVPARNTIFLAVALGFAETLEAFDLFIGVSQIDYSGYPDCRPEYIAAFEAMANLATKAGIEGHKTMIHTPLIAWSKAETIRQGIACGVDYSLTVSCYQATPEGLACGRCDSCAYRRKGFNEAGIIDPTRYVTD

SEQ ID NO: 39141 - protein, 226 aa, Legionella sainthelensi
  REGION 1..226: note = tr|A0A0W0YN14|A0A0W0YN14_9GAMM 7-cyano-7-deazaguanine synthase OS=Legionella sainthelensi; OX = 28087 GN=queC PE=3 SV=1
MKKAVILLSGGLDSTTCLALAASKGFTCYPISFSYGQRHSAELFAAQRIAAHYKAREHQIVTLDTELFRNSALTDTNLDVPEFKEGSEIPVTYVPARNTIFLAMALGYAESIGARDIFIGASSVDYSHYPDCRPEFITAFQTLANLATKAGVAGNSFTIHAPLQYLSKVQTIQLGISLGVDYSLTVSCYQANDAGEACGHCDSCTFRQRGFIGAGIDDPTRYRHLK

SEQ ID NO: 39142 - protein, 226 aa, Legionella sainthelensi
  REGION 1..226: note = tr|A0A2H5FIY1|A0A2H5FIY1_9GAMM 7-cyano-7-deazaguanine synthase OS=Legionella sainthelensi; OX = 28087 GN=queC PE=3 SV=1
MKKAVILLSGGLDSTTCLALAASKGFTCYTISFSYGQRHSAELLAAQRVATHYKAREHQIVTLDTELFRNSALTDVNLDVPEFKEGSEIPVTYVPARNTIFLAMALGFAESIGARDIFIGASSVDYSHYPDCRPEFISAFQTLANLATKAGVGGDSFTIHAPLQYLSKVQTIQLGISLGVDYSLTVSCYQASDAGEACGHCDSCTFRQRGFIGAGIDDPTRYRHNK

SEQ ID NO: 39143 - protein, 226 aa, Legionella santicrucis
  REGION 1..226: note = tr|A0A0W0ZDY0|A0A0W0ZDY0_9GAMM 7-cyano-7-deazaguanine synthase OS=Legionella santicrucis; OX = 45074 GN=queC PE=3 SV=1
MKKAVILLSGGLDSTTCLALAASKGFSCYAISFSYGQRHSAELFAAQRIAKHYKVAEHHIVTLDTELFRNSALTDTNLNVPAFKEDTEIPVTYVPARNTIFLAMALGFAESIGARDIFIGASSVDYSHYPDCRPEFISAFQTLANLATKAGVTGDSFTIHAPLQYLSKVQTIQLGISLGVDYSLTVSCYQANDAGEACGQCDSCTFRQRGFIGAGIDDPTLYRHPE

SEQ ID NO: 39144 - protein, 229 aa, Legionella shakespearei
  REGION 1..229: note = tr|A0A0W0YKT9|A0A0W0YKT9_9GAMM 7-cyano-7-deazaguanine synthase OS=Legionella shakespearei DSM 23087 OX=1122169 GN=queC PE=3 SV=1
MMKKAVVLLSGGLDSTTCLALAKSEGYECFALSFSYGQRHGAELLAAARIARHFAVKEHKIVNLDTGLFAGSALTDDTISVPDFQESTEIPVTYVPARNTIFLSMALGFAESIGARDIFIGASSVDFSHYPDCRPEFIQAFQTLANLATKAGVEGDSFVIHAPLQYLSKVQTIELGVTLGVDYGLTLSCYQANEAGEACGQCDSCTFRKRGFAKAGIADPTKYHNFDHK

SEQ ID NO: 39145 - protein, 225 aa, Legionella sp.
  REGION 1..225: note = tr|A0A1Q4D519|A0A1Q4D519_9GAMM 7-cyano-7-deazaguanine synthase OS=Legionella sp. 40-6; OX = 1895903 GN=queC PE=3 SV=1
MKKAVVLLSGGLDSTTCLAFAQAQGFSCYALSFAYGQRHSVELQAAKRIASHFAVTEHFITQIDTGLFRNNALTNTQIEVPAYNGDTQIPVTYVPAHNTIFLAMALGLAESVGARDIFIGVSSIDYSHYPDCRPEFIDAFTQMANLATKAGVEGDLFTVHAPLQHLSKIQTIELGIKLGVDYGMTISCYQADEEGRACGVCDSCSFRKQGFFGAGISDPTRYVSS

SEQ ID NO: 39146 - protein, 228 aa, Legionella sp.
  REGION 1..228: note = tr|A0A1Q3TWK8|A0A1Q3TWK8_9GAMM 7-cyano-7-deazaguanine synthase OS=Legionella sp. 39-23; OX = 1895902 GN=queC PE=3 SV=1
MKKAVVLLSGGLDSTTCLALATAKGFACAAISFAYGQRHSAELQAAQRIAHHYKVIKHHIVTLDTELFRNSALTDTNLDVPAFQEGSEIPVTYVPARNTIFLAMALGLAESIGARDLFIGASSVDYSHYPDCRPEFIEAFQTLANLATKAGVTGDRFSIHAPLQHLSKVQTIQLGISLGVDYSLTVSCYQANDAGEACGECDSCTFRRRGFSGAGVADPTLYHHATTK

SEQ ID NO: 39147 - protein, 224 aa, Legionella spiritensis
  REGION 1..224: note = tr|A0A0W0YW79|A0A0W0YW79_LEGSP 7-cyano-7-deazaguanine synthase OS=Legionella spiritensis; OX = 452 GN=queC PE=3 SV=1
MSKNAVVLLSGGLDSTTCLAVAREQGFACYALSFAYGQRHQAELQAAERVARAACVAEHRVVNLDISQFKGSALTDPDTAVPDYNGDGQIPSTYVPARNTVFLAIALGYAEVTGARDIFIGVSEVDYSGYPDCRPEFIAAFQNMANLATKAGIEGQKTIIHAPLQHLSKADTIRLGTRLGVDYGLTVSCYQASLSGAACGRCDSCVYRKKGFLAAGVPDPTPYM

SEQ ID NO: 39148 - protein, 228 aa, unidentified; identical to SEQ ID NO: 39146
  source 1..228: note = Legionella steelei
  REGION 1..228: note = tr|A0A0W0ZKC6|A0A0W0ZKC6_9GAMM 7-cyano-7-deazaguanine synthase OS=Legionella steelei; OX = 947033 GN=queC PE=3 SV=1

SEQ ID NO: 39149 - protein, 228 aa, Legionella steigerwaltii
  REGION 1..228: note = tr|A0A378L4G8|A0A378L4G8_9GAMM 7-cyano-7-deazaguanine synthase OS=Legionella steigerwaltii OX=460 GN=queC PE=3 SV=1
MKKAVVLLSGGLDSTTCLALATSKGFSCDAISFSYGQRHSAELHAAQRIAQHYKVLKHHIVTLDTELFRNSALTDSNMEVPAFQGGSEIPVTYVPARNTIFLAMALGLAESIGARDIFIGASSVDYSHYPDCRPEFIEAFQTLANLATKAGVTGDHFSIHAPLQHLSKVQTIQLGISLGVDYSLTVSCYQANDAGEACGECDSCTFRRRGFIGAGVADPTLYRHSTPK

SEQ ID NO: 39150 - protein, 225 aa, Legionella taurinensis
  REGION 1..225: note = tr|A0A3A5L9B3|A0A3A5L9B3_9GAMM 7-cyano-7-deazaguanine synthase OS=Legionella taurinensis; OX = 70611 GN=queC PE=3 SV=1
MKKAIVLLSGGLDSTTCLAIAKSQGYACYALSFDYGQRHNAELEAAKRVARQLGAIEHHVFTLDIGQFKGSALTDASVAVPDYCGDGKIPVTYVPARNTIFLSVALGFAETLAAFNLFIGVSQIDYSGYPDCRPEYIAAFETMANLATKAGIEGRKTVIHTPLIAWSKAETIRQGVACGADYSLTVSCYQATPEGVACGRCDSCTYRRKGFNEAGIIDPTRYVSG

SEQ ID NO: 39151 - protein, 226 aa, Legionella tucsonensis
  REGION 1..226: note = tr|A0A0W0ZSV9|A0A0W0ZSV9_9GAMM 7-cyano-7-deazaguanine synthase OS=Legionella tucsonensis; OX = 40335 GN=queC PE=3 SV=1
MKKAVVLLSGGLDSTTCLALAHSKGFSCYAISFSYGQRHSAELLAAQRIAQHYNVKHQIVTLDTALFRNSALTDSNMEVPSFQSGSDIPVTYVPARNTIFLAMALGFAESIGAREIFIGASSVDYSHYPDCRPEFIQAFQTLANLATKAGVNGEQFTIHAPLQHLSKVETIQLGISLNVDYSLTISCYQANDAGEACGQCDSCTFRKRGFLGAGIDDPTLYRRCNH

SEQ ID NO: 39152 - protein, 227 aa, Legionella wadsworthii
  REGION 1..227: note = tr|A0A378LMJ8|A0A378LMJ8_9GAMM 7-cyano-7-deazaguanine synthase OS=Legionella wadsworthii; OX = 28088 GN=queC PE=3 SV=1
MKKAVILLSGGLDSTTCLALAISKGFTCHAISFSYGQRHSAELLAAQRIARFYGVTHHILCLDTELFRNSALTDSNIEVPSFKGGSDIPVTYVPARNTIFLSMALGLAESIGARDIFIGASSVDYSHYPDCRPEFIEAFQTLANLATKAGVTGDQFTIHAPLQHLSKVQTIQLGINLNVDYSLTVSCYQANESGEACGHCDSCTFRHQGFAGAGIDDPTRYHNSHPK

SEQ ID NO: 39153 - protein, 238 aa, Legionella waltersii
  REGION 1..238: note = tr|A0A0W1A4U8|A0A0W1A4U8_9GAMM 7-cyano-7-deazaguanine synthase OS=Legionella waltersii; OX = 66969 GN=queC PE=3 SV=1
MSRQYLDLWGSYTMKKAVVLLSGGLDSTTCLALAKSKGFACYALSFSYGQRHSTELKAAARIAKQMDVIEHKIVNLDTGLFGGSALTDQAIDVPEFKESMDIPVTYVPARNTIFLAMALGYAESIAARDIYIGASSVDYSHYPDCRPEFIHAFETLANLATKAGIEGDLFSIHAPLQHLSKVQTIQLGAQLNVDYSMTVSCYQANDAGEACGSCDSCTFRKRGFLGAGVVDPTKYRHD

SEQ ID NO: 39154 - protein, 227 aa, Legionella worsleiensis
  REGION 1..227: note = tr|A0A0W1AKR7|A0A0W1AKR7_9GAMM 7-cyano-7-deazaguanine synthase OS=Legionella worsleiensis; OX = 45076 GN=queC PE=3 SV=1
MKKAVLLFSGGLDSTTVLAYAKNNGYECHPISFYYGQRHAAELNASQKIAEYFKVKEHKIITLPNDMFGSSALTRDDVHVPDFLENNSNTIPVTYVPARNTIFLSIALGYAESIGAHDIFLGVSFIDYSGYPDCRPEYISAFEKLANLATKDGVEGKKISIHTPLLYLTKAQTIELGIKNGVDYAMTVSCYNADPDTGAACGTCDSCSFRKKGFIDAGIKDPTVYRK

SEQ ID NO: 39155 - protein, 264 aa, unidentified
  source 1..264: note = Legionellaceae bacterium
  REGION 1..264: note = tr|A0A2E5Y954|A0A2E5Y954_9GAMM 7-cyano-7-deazaguanine synthase OS=Legionellaceae bacterium OX=2026753 GN=CMF38_03280 PE=3 SV=1
MTVKKTAILALSGGLDSSSLLLHLLREQYEVHAISFLYGQKHQVELEKAQELIGYLREHQLSVKHSLLHLEGLKALLFSALTTESAEIPEGHYSQESMRATVVPNRNKIFLSILQAAALSHANLHQEPVKIALGIHAGDEHTYPDCRGDFITQDFAAFHSGNWQSTKVEPYLPYLNYVKYDILKDGMRSCEVLGLSFDEVYRRTITSYHPNARGISDYKSGASVARIEAFMQLNRQDPITYADDTGLVTWETVQQYVSAVLKHP

SEQ ID NO: 39156 - protein, 224 aa, unidentified
  source 1..224: note = Legionellales bacterium
  REGION 1..224: note = tr|A0A2E2TKQ9|A0A2E2TKQ9_9GAMM 7-cyano-7-deazaguanine synthase OS=Legionellales bacterium; OX = 2026754 GN=queC PE=3 SV=1
MKKKAVILLSGGLDSTTCLAYAKAKGYECFALSFDYAQRHRTELNAAKHIAQYFNVNEHKIIPLDLSLIGGSALTDKKMNIEKYSAEQLIPTTYVPARNTIFFSVALGYAEVINADYIITGISAVDYSGYPDCRPECLNAFQTMADYATKKGVMDKSIRFLAPLIYLTKAETIKLGTKLGVNYAMTVSCYQANAQGAACGECDSCVLRKQGFEKAQLADPTCYR

SEQ ID NO: 39157 - protein, 225 aa, unidentified
  source 1..225: note = Legionellales bacterium
  REGION 1..225: note = tr|A0A2E0PYT5|A0A2E0PYT5_9GAMM 7-cyano-7-deazaguanine synthase OS=Legionellales bacterium; OX = 2026754 GN=queC PE=3 SV=1
MRNSKKAIILLSGGLDSATTLAIAKKLGFDCYALSFNYKQRHMSELNAAKNVAKKLKLTEHKIIEIDLTQIGGSALTDSKIDVPNSPTKGIPITYVPARNTMFLSYALAWAEVIGSSDIFIGVNAVDYSGYPDCRPEYIEAYEKLAALATKAGVEGVGFKIHAPLIKLSKSEIIKEGLALGVDFSQTVSCYQANDMGFACGLCDSCMFRKEGFDSAGVSDPTKYQ

SEQ ID NO: 39158 - protein, 210 aa, Leifsonia aquatica
  REGION 1..210: note = tr|U2TEY1|U2TEY1_LEIAQ 7-cyano-7-deazaguanine synthase OS=Leifsonia aquatica ATCC 14665 OX=1358026; GN = N136_00378 PE=3 SV=1
MAKLVGDAVVLLSGGVDSAALAAFTRPALALFVDYGQIPARAEARASRAIADRLGVPYRAVRLPLNDFGGGLLLDGVPLDDAPSPEWWPYRNQFLGTAGAAIALQHNLTKVLLGSVRGDGDRHMDGSPQFYRALTTLTSLQEGSVQVEAPALELTTVELVRKARLDSAILALTVSCHRAARPCGDCPGCWKRQQVFAELDVFQPTVTSNA

SEQ ID NO: 39159 - protein, 231 aa, unidentified
  source 1..231: note = Leifsonia flava
  REGION 1..231: note = tr|A0A4Y9QWG7|A0A4Y9QWG7_9MICO 7-cyano-7-deazaguanine synthase OS=Leifsonia flava; OX = 2561933 GN=queC PE=3 SV=1
MSKRKAVVLLSGGLDSTTVLAIAKNEGYEPYALSFRYGQRHVVELEAAKRVAEAQGVAQHVVCDIDLRTFGGSALTSATDVPKHDRAEDLSPDEIPVTYVPARNTIFLSFALAFAEVVGASDVFIGVNALDYSGYPDCRPEYIEAYETMANLATRAGVEGARLKIHTPLISMTKADIVRAGMELGVDYSLTLSCYDPDDEGKSCGHCDSCLLRIRGFQEAGSSDPVAYQAV

SEQ ID NO: 39160 - protein, 221 aa, Leifsonia sp.
  REGION 1..221: note = tr|A0A1H4E4W6|A0A1H4E4W6_9MICO 7-cyano-7-deazaguanine synthase OS=Leifsonia sp. 21MFCrub1.1 OX=1798223 GN=SAMN04515680_1604 PE=3 SV=1
MTAVMLSGGPDSTVLTYELVRAGTRPLAIVFDLGDEEAPRSVIFARRIAADLDLEILEVDLAAGMRDAYRKPFPQFLRAAQVMSHEIEPFGSGVALSIAASLAASRGHSELHYGVHRDDTMYRDNNAEYFSLLSRAISIETGRRFDIRAPFLNRTKAEVLQHGARLGVDLSGTWSCAHAGAIQCGTCLPCTLRQEAFSAAGLTDRTAYSHERLTPPTLVTT

SEQ ID NO: 39161 - protein, 244 aa, Leifsonia xyli
  REGION 1..244: note = tr|A0A2W5RC57|A0A2W5RC57_9MICO 7-cyano-7-deazaguanine synthase OS=Leifsonia xyli OX=1575; GN = queC PE=3 SV=1
MKVSALKVKEVVDYVKGKSAVVVLSGGQDSVTCLGLALRNFETVHAIGFSYGQKHEVEIHCAAQICAEHDVPFAVFEIPALQSIGNSALIRGTEQTDVSAQHAQNSKLPASFVPNRNALFLTTAHAYAQKVGADCLITGVCETDYSGYPDCRDIFIRSLEETLNLGYETNIKIYTPLMWLNKAETFALAKAVDFLMVVLEDSHTCYNGDHNTNFVWGYGCGECPACKLRAAGFEAFVAANPFNF

SEQ ID NO: 39162 - protein, 233 aa, unidentified
  source 1..233: note = Leisingera aquaemixtae
  REGION 1..233: note = tr|A0A0P1HDV5|A0A0P1HDV5_9RHOB 7-cyano-7-deazaguanine synthase OS=Leisingera aquaemixtae; OX = 1396826 GN=queC PE=3 SV=1
MKTIVICSGGLDSVSLAHMVAEEHQLTRLVSFDYGQRHRKELDYAAAAAKRLGVPHDIIDMRGIGAALSGSALTDDIDVPDGHYEEETMKVTVVPNRNAIMLTIAYGIAAANGDDAVATAVHGGDHFIYPDCRPAFTEAFDAMQRAALDGYADVRLYTPFVHRTKGDIVTAGAAHNTPFAETWSCYKGGEKHCGRCGTCVERREAFHLAGIEDPTDYADPDFWKAAIAAKDGA

SEQ ID NO: 39163 - protein, 233 aa, Leisingera methylohalidivorans
  REGION 1..233: note = tr|V9VUC3|V9VUC3_9RHOB 7-cyano-7-deazaguanine synthase OS=Leisingera methylohalidivorans DSM 14336; OX = 999552 GN=queC PE=3 SV=1
MKTIVICSGGLDSVSLAHMVAAEQQLTRLVSFDYGQRHRKELDFAAAAARRLGVPHDIIDMRTIGAALSGSALTDDIDVPDGHYAEDTMKVTVVPNRNAIMLTIAYGIAAANGDQAVATAVHGGDHFIYPDCRPAFTEAFDAMQRAALDGYADVRLYTPFVHQTKGDIVTAGAKHNTPFADTWSCYKGGDKHCGRCGTCVERREAFHLAGVKDPTEYADPDFWRQAIAGKDGG

SEQ ID NO: 39164 - protein, 233 aa, Leisingera sp.
  REGION 1..233: note = tr|A0A0B4CR82|A0A0B4CR82_9RHOB 7-cyano-7-deazaguanine synthase OS=Leisingera sp. ANG-Vp; OX = 1577896 GN=queC PE=3 SV=1
MKTIVICSGGLDSVSLAHMVAEEHQLTRLVSFDYGQRHRKELDYAAAAAERLGVPHDIIDMRGIGAALSGSALTDDIDVPDGHYEEETMKVTVVPNRNAIMLAIAYGIAAANGDDAVATAVHGGDHFIYPDCRPAFTEAFDAMQRAALDGYADVRLYTPFVHRTKGDIVTAGAKHSTPFAETWSCYKGGDKHCGRCGTCVERREAFHLAGVEDPTDYADPDFWKAAIAGKDGA

SEQ ID NO: 39165 - protein, 233 aa, Leisingera sp.
  REGION 1..233: note = tr|A0A481PJB2|A0A481PJB2_9RHOB 7-cyano-7-deazaguanine synthase OS=Leisingera sp. NJS204; OX = 2508307 GN=queC PE=3 SV=1
MKTIVICSGGLDSVSLAHMVADEHQLTRLVSFDYGQRHKKELDYAAAAAVRLGVPHDIIDMRSIGAALSGSALTDDIDVPDGHYEEDSMKVTVVPNRNAIMLTIAYGIAAANGDEAVATAVHGGDHFIYPDCRPAFTEAFDAMQRAALDGYADVRLYTPFVHRSKADIVTAGAKHNTPFADTWSCYKGGEKHCGRCGTCVERREAFHLAGAEDPTDYADPDFWQQAIAAKDGA

SEQ ID NO: 39166 - protein, 231 aa, unidentified
  source 1..231: note = Lelliottia amnigena
  REGION 1..231: note = tr|A0A3S5XYH0|A0A3S5XYH0_LELAM 7-cyano-7-deazaguanine synthase OS=Lelliottia amnigena; OX = 61646 GN=queC PE=3 SV=1
MKRAVVVFSGGQDSTTCLIQALHQYDEVHCVTFDYGQRHRAEIDVAQELALKLGARAHKVLDVTLLNELAVSSLTRDSIPVPDYEPDADGIPNTFVPGRNILFLTLTAIYAYQVKAEAIITGVCETDFSGYPDCRDEFVKALNHAVDLGMAKEIRFETPLMWLDKAETWALADYWEKLELVRTETLTCYNGIKGDGCGQCASCNLRSNGLNHYLTNKPAVMSAMKAKTGLK

SEQ ID NO: 39167 - protein, 231 aa, unidentified
  source 1..231: note = Lelliottia amnigena
  REGION 1..231: note = tr|A0A1A9F8Q6|A0A1A9F8Q6_LELAM 7-cyano-7-deazaguanine synthase OS=Lelliottia amnigena; OX = 61646 GN=queC PE=3 SV=1
MKRAVVVFSGGQDSTTCLIQALHQYDEVHCVTFDYGQRHRAEIDVARELALKLGARAHKVLDVTLLNELAVSSLTRDSIPVPDYEPDASGIPNTFVPGRNILFLTLTAIYAYQVKAEAVITGVCETDFSGYPDCRDEFVKALNHAVDLGMAKETRFETPLMWLDKAETWALADYWGKLDLVRAETLTCYNGIKGDGCGECAACHLRANGLNHYLADKPAIMAAMKQKTGLK

SEQ ID NO: 39168 - protein, 231 aa, unidentified; identical to SEQ ID NO: 38098
  source 1..231: note = Lelliottia nimipressuralis
  REGION 1..231: note = tr|A0A2L2JB34|A0A2L2JB34_9ENTR 7-cyano-7-deazaguanine synthase OS=Lelliottia nimipressuralis OX=69220 GN=queC PE=3 SV=1

SEQ ID NO: 39169 - protein, 231 aa, unidentified
  source 1..231: note = Lelliottia nimipressuralis
  REGION 1..231: note = tr|A0A4Y8IZD3|A0A4Y8IZD3_9ENTR 7-cyano-7-deazaguanine synthase OS=Lelliottia nimipressuralis OX=69220 GN=queC PE=3 SV=1
MKRAVVVFSGGQDSTTCLVQALHQYDEVHCVTFDYGQRHRAEIDVARELALKLGARAHKVLDVTLLNELAVSSLTRDSIPVPDYEPDASGIPNTFVPGRNILFLTLTAIYAYQVKAEAVITGVCETDFSGYPDCRDEFVKALNHAVNLGMAKDTRFETPLMWLDKAETWALADYWGKLDLVRSETLTCYNGIKGDGCGQCAACNLRANGLNHYLADKVGVMAAMQKKTGLK

SEQ ID NO: 39170 - protein, 231 aa, unidentified
  source 1..231: note = Lelliottia sp.
  REGION 1..231: note = tr|A0A2S5C3Z0|A0A2S5C3Z0_9ENTR 7-cyano-7-deazaguanine synthase OS=Lelliottia sp. 7254-16; OX = 2080842 GN=queC PE=3 SV=1
MKRAVVVFSGGQDSTTCLIQALQQYDEVHCVTFDYGQRHRAEIDVARELALKLGARAHKVLDVTLLNELAVSSLTRDSIPVPDYEPDSSGIPNTFVPGRNILFLTLTAIYAYQVKAEAVITGVCETDFSGYPDCRDEFVKALNHAVDLGMAKETRFETPLMWLDKAETWALADYWGKLDLVRNETLTCYNGIKGDGCGQCAACNLRANGLNHYLADKPGVMALMKKKTGLK

SEQ ID NO: 39171 - protein, 229 aa, Leminorella grimontii
  REGION 1..229: note = tr|A0A085HHE5|A0A085HHE5_9GAMM 7-cyano-7-deazaguanine synthase OS=Leminorella grimontii ATCC 33999 = DSM 5078 OX=1005999 GN=queC PE=3 SV=1
MKRAIVVFSGGQDSTTCLIQAMANFDEVHCVTFDYGQRHQAEIDCAKILAKRLGAAAHKVMDVTLLNELAISSLTRDNIPVPTQVENGIPNTFVPGRNILFLTLAGIYAYQVKAQAVITGVCETDFSGYPDCRDEFVKALNHALRLGMDYSLELVTPLMWLNKAETWALADYYDSLELVRQHTLTCYNGIQGDGCGECPACRLRANGLNQYLENRPQILKDVKRKLALA

SEQ ID NO: 39172 - protein, 229 aa, Leminorella grimontii; identical to SEQ ID NO: 39171
  REGION 1..229: note = tr|A0A485AM83|A0A485AM83_9GAMM 7-cyano-7-deazaguanine synthase OS=Leminorella grimontii; OX = 82981 GN=queC PE=3 SV=1

SEQ ID NO: 39173 - protein, 229 aa, Leminorella richardii
  REGION 1..229: note = tr|A0A2X4USH2|A0A2X4USH2_9GAMM 7-cyano-7-deazaguanine synthase OS=Leminorella richardii; OX = 158841 GN=queC PE=3 SV=1
MKRAVVVFSGGQDSTTCLIQALANYDEVHCVTFDYGQRHRAEIDCAKALALSLKAAAHKVMDVSLLNELAVSSLTRDNIPVPAQVEDGVPNTFVPGRNILFLTLAGIYAYQIKAEAVITGVCETDFSGYPDCRDEFVKALNVALRLGMDYDLKLVTPLMWLNKAETWALADYYDSLDLIRHQTLSCYNGIQGDGCGECAACRLRANGLNRYLENRPVILREVKQKLALP

SEQ ID NO: 39174 - protein, 220 aa, Lentibacillus sp.
  REGION 1..220: note = tr|A0A4Q3XCP5|A0A4Q3XCP5_9BACI 7-cyano-7-deazaguanine synthase OS=Lentibacillus sp. SSKP1-9 OX=2510307 GN=queC PE=3 SV=1
MFKDEKAVVVFSGGQDSTTCLFWAMQQFEEVVAVTFNYNQKHITEIECAKNITEELGIKHHILDMSLLNQLAPNALTRDDIEIKEGAGGELPSTFVPGRNLLFMSFAGVLASQINAKHIVTGVCETDFSGYPDCKDIFIKSLNVTLNLSMDEQFVIHTPLMWIDKAKTWELADNLGVLDFVRDKTLTCYNGIIANGCGECPACILRQKGLKEYLAKREER

SEQ ID NO: 39175 - protein, 226 aa, Lentisphaera araneosa
  REGION 1..226: note = tr|A6DLD5|A6DLD5_9BACT 7-cyano-7-deazaguanine synthase OS=Lentisphaera araneosa HTCC2155 OX=313628; GN = queC PE=3 SV=1
MKKAAVLISGGLDSTTLLHHVIKSLGYDEVYALSFDYGQKHSRELIVAKAQCDSLPEVKEHNVLDISYMGDFLGSSSALVKGGVEVPDLKDIAEGDLDQPVTYVPNRNMMLLSIAASFAESRDCRQLYYGAQAQDEYGYWDCTESFLARMNDVFSLNRRTGVHVEAPFVNMSKGHVAKIGLALGIDYAQTWTCYRGGDKPCEVCPSCVERALAFKECGIDDPLLKK

SEQ ID NO: 39176 - protein, 227 aa, unidentified
  source 1..227: note = Lentisphaerae bacterium
  REGION 1..227: note = tr|A0A1G0ZAT1|A0A1G0ZAT1_9BACT 7-cyano-7-deazaguanine synthase OS=Lentisphaerae bacterium GWF2_44_16 OX=1798571 GN=queC PE=3 SV=1
MAENKKAVVLLSGGLDSATCLAFALKEGFKAYALSFDYGQRHSFELNAAKKVASSMGIAEHVVINIDLRKWGGSALTSNSIDVPEAGTEKGIPPTYVPARNTIFLSFAVAWAEVLGARDIFIGVNSIDYSGYPDCRPQFIKAFETCATLGTKAADEGWEFTIQTPLQNKNKSEIIKLGHELGVDYSLTHSCYNPSPEGISCGKCDSCSFRLKGFREAGLTDPIKYQN

SEQ ID NO: 39177 - protein, 229 aa, unidentified
  source 1..229: note = Lentisphaerae bacterium
  REGION 1..229: note = tr|A0A1V5H2W6|A0A1V5H2W6_9BACT 7-cyano-7-deazaguanine synthase OS=Lentisphaerae bacterium ADurb.BinA184 OX=1852901 GN=queC PE=3 SV=1
MPTDTPAATVLLSGGLDSTVLLHHVACRLRRRPVYALSFRYGQRHRRELAMARWQAAAAGAEVRHAVLSIPCLAALAGDGSALVGGGPEIPDLAALSPDERRQPPTYVPNRNLILLALAGAFAEAHGCQELYYGAQAQDEYGYWDCTAEFVARLNATLALNRRTPVHVLAPFVGWRKAEIVRLGIELGVDFARTWSCYRGGRRPCGTCPTCVERQRAFREAGHPDPWER

SEQ ID NO: 39178 - protein, 224 aa, unidentified
  source 1..224: note = Lentisphaerales bacterium
  REGION 1..224: note = tr|A0A524N340|A0A524N340_9BACT 7-cyano-7-deazaguanine synthase OS=Lentisphaerales bacterium OX=2448604 GN=queC PE=3 SV=1
MKKALVLLSGGVDSSTLLFYVKQRINVASVYALSFLYGQKHARELDAARWQAVKAGVKDHRVVDISFLGELLAGAGCALLDPDVDVPDLSELDRDARSQPPTYVPNRNMILLSIAAAFSETLDISDMFYGAQAQDEYGYWDCSDRFVKRLNNALALNRKKPVLIHAPFASMTKAKVLGIGFDLGVDYAHTWSCYRGADKPCGTCPTCVERAKAFRENDTPDPLS

SEQ ID NO: 39179 - protein, 225 aa, unidentified
  source 1..225: note = Lentisphaeria bacterium
  REGION 1..225: note = tr|A0A3D3JNR0|A0A3D3JNR0_9BACT 7-cyano-7-deazaguanine synthase OS=Lentisphaeria bacterium; OX = 2053569 GN=queC PE=3 SV=1
MQAVVLVSGGMDSATLLYYVVQTLGYDEVYGVSYAYGQKHDREVEMAKWQCEQLAAVKDWRLIDVSVLGDLTLGASALTDRSIDVPALAALTEDELSQPPTYVPNRNMILLSLAAAYSESRGCRTVFYGAQAQDDYGYWDCTVDFLERLNRVLSLNRRHAVEIQAPFMTMRKVDELRIGQELGVDYGRTWSCYRGGEKACGNCPACVERLKAFAEFGTVDPVEYE

SEQ ID NO: 39180 - protein, 227 aa, unidentified
  source 1..227: note = Lentisphaeria bacterium
  REGION 1..227: note = tr|A0A3D1UP40|A0A3D1UP40_9BACT 7-cyano-7-deazaguanine synthase OS=Lentisphaeria bacterium; OX = 2053569 GN=queC PE=3 SV=1
MDAKKKAVVLLSGGLDSVTCLAVAKHEGFEVHALTFDYGQRHKVELDCARRSAEKIGVERFHLISFDLRMWGASALTSDKLEVPDYNPHSHSVPITYVPARNLIFLSFATALAEGLNARDIFIGVNSLDYSGYPDCRPEFIEAFRKCARLGTKAVDEEWEYNIRAPLQHLRKSGIIKLGLSLGVDYSMTHSCYNPGADGRACGRCDSCGLRRDAFHELGLEDPALMK

SEQ ID NO: 39181 - protein, 232 aa, unidentified
  source 1..232: note = Lentzea aerocolonigenes
  REGION 1..232: note = tr|A0A0F0H7Q6|A0A0F0H7Q6_LENAE 7-cyano-7-deazaguanine synthase OS=Lentzea aerocolonigenes; OX = 68170 GN=queC PE=3 SV=1
MNTPAIVLLSGGLDSTTTLAIAKQRGFLPYALSFSYGQRHSVELEAARRVAEQAGVARHIVADIDLRVFGGSALTDDIAVPKGRDEEQMAGEIPPTYVPGRNTIFLSFALAYAEVVGARDVFTGVNAVDYSGYPDCRPEYIEAYEAMANLATKSAVEGDGRIRVHAPLIDMTKADIIRKGIELGVDYSLTTSCYDPTDDGVSCGTCDTCVLRLKGFHEAGVADPVRYLAVPA

SEQ ID NO: 39182 - protein, 234 aa, unidentified
  source 1..234: note = Lentzea guizhouensis
  REGION 1..234: note = tr|A0A1B2HE32|A0A1B2HE32_9PSEU 7-cyano-7-deazaguanine synthase OS=Lentzea guizhouensis; OX = 1586287 GN=queC PE=3 SV=1
MTIDHPEHRHPEHAVVIASGGLDSTVLAYWLAARHSRLTLVSFDYGQRHRVELDHAAEIARLLLSPHRIIDLTSLGALLTGSALTDTSVAVPDGHYTDESMAATVVPNRNAIMLDIAVAVAIAVRADAVAFGAHAGDHTIYPDCRPPFVERFARSVQAANDGLLVPGFQVLAPFLTLTKADIVRVGEALAVPFARTWSCYRGEGVHCGTCGTCTERQEAFLDNGIPDPTVYRAA

SEQ ID NO: 39183 - protein, 230 aa, unidentified
  source 1..230: note = Leptolyngbya boryana
  REGION 1..230: note = tr|A0A1Z4JQ12|A0A1Z4JQ12_LEPBY 7-cyano-7-deazaguanine synthase OS=Leptolyngbya boryana NIES-2135 OX=1973484 GN=queC PE=3 SV=1
MPKAVVLLSGGLDSATVAAQAIADGYDVIALSFRYGQRHDRELQSAQDIVQHLKLLQHFIVDVNLAQWGGSALTDSAIEVPITGVQPDEIPITYVPGRNTVFIAIALSLAEAQNAAAIYLGINAIDYSGYPDCRPEYLAAFQTLAQLSSKAGLEGNAPKLIAPLITDSKTDIVKRAVKLGVPIEKTWSCYQGETEPCGICDSCRIRDRALIEAGYPEFATASGREFYQNY

SEQ ID NO: 39184 - protein, 223 aa, unidentified
  source 1..223: note = Leptolyngbya foveolarum
  REGION 1..223: note = tr|A0A2W4UMR4|A0A2W4UMR4_9CYAN 7-cyano-7-deazaguanine synthase OS=Leptolyngbya foveolarum; OX = 47253 GN=queC PE=3 SV=1
MIKAVVLLSGGLDSATCAAQAIADGYQVTALSFDYGQRHDRELKAAADIVAALGIAEHRVINVNLAQWGGSSLTDESWSLPTDGVKTDEIPSTYVPGRNTVFIAIALSLAEAIEAKAIYLGINAVDYSGYPDCRPAYLSAFQSLAALSSKAGLAGEAPALVAPLVMDSKVDIVKRALRLGVPIEKTWSCYQGDPQPCGVCDSCRIRDDALIKAGRQDLATRRS

SEQ ID NO: 39185 - protein, 233 aa, unidentified
  source 1..233: note = Leptolyngbya frigida
  REGION 1..233: note = tr|A0A2T1ECG1|A0A2T1ECG1_9CYAN 7-cyano-7-deazaguanine synthase OS=Leptolyngbya frigida ULC18 OX=2107698 GN=queC PE=3 SV=1
MMPPIAIVLLSGGLDSATAAAQAIADGYRIIALSLNYGQRHVRELLAAKQIAAQLGIQEHFIMVVNLAQWGGSSLTDQTVTMPHDGVQTNVIPNTYVPGRNTVFIAIALSLAEAKDADAIYLGINAVDYSGYPDCRPAYLEAFQHLARLSSKAGLEGNAPKLVAPLVMDSKADIVRRALKLGVPIAQTWSCYEGKEEPCGLCDSCRIRDRALIEAGHAALATAIGQTLHSPSL

SEQ ID NO: 39186 - protein, 222 aa, Leptolyngbya sp.
  REGION 1..222: note = tr|K9ELX2|K9ELX2_9CYAN 7-cyano-7-deazaguanine synthase OS=Leptolyngbya sp. PCC 7375 OX=102129 GN=queC; PE = 3 SV=1
MKKAVVLLSGGLDSATVAAQAIADGYGVIALSFRYGQRHSRELVAAKVIASHLGINQHFIVDVNLSQWGGSSLTDTQQTLPQDGVAPDVIPSTYVPGRNTVFISLALSLAEAQGAEAIYLGINAVDYSGYPDCRPEYLDAFQTLANLSSKVGVEGNSITLKAPLVMDSKVDIVKRAVALKVPIPQTWSCYAGGDTPCGRCDSCRIRDQALIEAGYPQWASNP

SEQ ID NO: 39187 - protein, 229 aa, Leptolyngbya sp.
  REGION 1..229: note = tr|A0A0S3U7G2|A0A0S3U7G2_9CYAN 7-cyano-7-deazaguanine synthase OS=Leptolyngbya sp. NIES-3755 OX=1752064 GN=queC PE=3 SV=1
MPKAIVLLSGGLDSATTTAQAISDGYEPIALSFRYGQRHDRELRAAQVLAKHFNLAQHFVIDVDLGQWGGSALTDRAIGVPTEGIQADVIPITYVPGRNTVFIAIALSLAEAQGAEAIYLGINAVDYSGYPDCRPEYLAAFQTLAQLSSKAGLEGKAPKLVAPLVMDSKTDIVKRAIALGVPIEKTWSCYQGEELPCGVCDSCRIRDRALIEAGHSELATPQGREFYRK

SEQ ID NO: 39188 - protein, 225 aa, unidentified
  source 1..225: note = Leptolyngbya valderiana
  REGION 1..225: note = tr|A0A166ULU9|A0A166ULU9_9CYAN 7-cyano-7-deazaguanine synthase OS=Leptolyngbya valderiana BDU 20041 OX=322866 GN=queC PE=3 SV=1
MGERKKAVVLLSGGLDSATVLAIAASEGYECHTLAVDYGQRHRSELEASEALSHSLGAASHRVVKVDLRAIGGSALTDDIDVPTELGEGIPVTYVPARNTLMLALALGHAEVQGALDLFIGVNAVDYSGYPDCRPQFIAAFEDLCSLATKVGDEGGRFSIHTPLIHLTKAEIIQRGTDLGVDYAQTVSCYQADEQGRACGVCDSCRLRRQGFADAGLTDVTRYRD

SEQ ID NO: 39189 - protein, 229 aa, unidentified
  source 1..229: note = Leptolyngbya valderiana
  REGION 1..229: note = tr|A0A166W903|A0A166W903_9CYAN 7-cyano-7-deazaguanine synthase OS=Leptolyngbya valderiana BDU 20041 OX=322866 GN=queC PE=3 SV=1
MSRAVVLLSGGLDSATCLALARQEGYECHALSFDYGQRHRGELRCAAAVASSLGAVSHTVYALDVGPFAGSSLTTGGDVPKDQAEPGSDGIPSTYVPARNLVFLSIATAYAETNEAQDVFIGVNAVDYSGYPDCRPDFIDAFARAATLATRRGTQGASPLRVRTPLLELSKADIVRAGAAAGVDFSLTTSCYDPADDGAGPIACGRCDACILRRRGFEAAGVHDPTRYA

SEQ ID NO: 39190 - protein, 247 aa, Leptonema illini
  REGION 1..247: note = tr|H2CAI6|H2CAI6_9LEPT 7-cyano-7-deazaguanine synthase OS=Leptonema illini DSM 21528 OX=929563 GN=queC; PE = 3 SV=1
MYDGSFSVRMAAVVLLSGGLDSVTTLFVAKAEGHEIYCISFDYGQRHRFELQCATEQARRAGALEHHTVKIDPVLFQDRSSHSATALIAGGAAVPENRSELLTGAAEKQIPVTYVPARNLLFLAYALSFAESRSAGYLYIGANALDYSGYPDCRPAFLQSFETTANLGTKAGIEGQGFSLKAPLVDDTKADIIRRGLKLGVDYSMTSSCYQPSDKGRPCGRCDSCLLREKGFAEVGVEDPLLLKDLA

SEQ ID NO: 39191 - protein, 239 aa, unidentified
  source 1..239: note = Leptospira adleri
  REGION 1..239: note = tr|A0A2M9YK08|A0A2M9YK08_9LEPT 7-cyano-7-deazaguanine synthase OS=Leptospira adleri; OX = 2023186 GN=queC PE=3 SV=1
MDSDKSKNSNRKKNDSKVKTSNNKAIVLLSGGLDSTTCLYQAIADGKEVRALSFDYGQRHRIELSYARKITRKLGIPHTIQKLKPELFLGSSLTQKSIKVPKNSLGKDEIPNTYVPGRNILFLSFATSLAEGTGSDSIYIGVNAMDYSGYPDCRPEFIKMFEMAIQLGTKKGSQGSPLKIITPLQNLTKKEIVLLGSKLNVPFQLTFSCYDPQNGKACGKCDACLLRKKGFQETGVSEK

SEQ ID NO: 39192 - protein, 239 aa, unidentified
  source 1..239: note = Leptospira adleri
  REGION 1..239: note = tr|A0A5F2CMG5|A0A5F2CMG5_9LEPT 7-cyano-7-deazaguanine synthase OS=Leptospira adleri; OX = 2023186 GN=queC PE=3 SV=1
MDSDKSKNSNRKKNDSKVKTSNNKAIVLLSGGLDSTTCLYQAIADGKEVRALSFDYGQRHRIELSYAKKITRKLGIPHTIQKLKPELFLGSSLTQKSIKVPKNSLGKDEIPNTYVPGRNILFLSFATSLAEGTGSDSIYIGVNAMDYSGYPDCRPEFIKMFEMAIQLGTKKGSQGSPLKIITPLQNLTKKEIVLLGSKLNVPFQLTFSCYDPQNGKACGKCDACLLRKKGFQETGVSEK

SEQ ID NO: 39193 - protein, 239 aa, Leptospira alexanderi
  REGION 1..239: note = tr|V6I1P6|V6I1P6_9LEPT 7-cyano-7-deazaguanine synthase OS=Leptospira alexanderi serovar Manhao 3 str. L 60 OX=1049759 GN=queC PE=3 SV=1
MNSRENKNSSRKNSDSSSESANDKAVVLLSGGLDSTTCLYQAIADGKKIQALSFDYGQRHKIELSYAKKITRRLGISHAIQKLKPELFLGSSLTQKSLRVPKNSLGKEEIPNTYVPGRNILFLSFAVCLAEGTGSSSIYIGVNAMDYSGYPDCRPEFIKMYETAIQLGTKKGSQGSPIKIVTPLQNLSKKEIVLLGNRLQVPFHLTFSCYDPKNRKACGRCDACLLRKKGFQETGVSEK

SEQ ID NO: 39194 - protein, 242 aa, unidentified
  source 1..242: note = Leptospira alstonii
  REGION 1..242: note = tr|M6CVC0|M6CVC0_9LEPT 7-cyano-7-deazaguanine synthase OS=Leptospira alstonii serovar Sichuan str. 79601; OX = 1218565 GN=queC PE=3 SV=1
MKKAALDSKKNKNVNRKNFKEESSDNKAVVLLSGGLDSTTCLYQAVADGKKVQALSFDYGQRHKIELSYAKKITRKLGIPHTIQKLKPELFLGSSLTQKSIKVPKNSLGKDEIPNTYVPGRNILFLSFAVSLAEGTGSDSIYIGVNAMDYSGYPDCRPEFIKMYEMAIQLGTKKGSQGSPIKIVTPLQNLSKKEIVLLGNQLKVPFHLTFSCYDPKDGKACGKCDACILRKKGFQETGVSEK

SEQ ID NO: 39195 - protein, 242 aa, unidentified; identical to SEQ ID NO: 39194
  source 1..242: note = Leptospira alstonii
  REGION 1..242: note = tr|T0G8U3|T0G8U3_9LEPT 7-cyano-7-deazaguanine synthase OS=Leptospira alstonii serovar Pingchang str. 80-412 OX=1218564 GN=queC PE=3 SV=1

SEQ ID NO: 39196 - protein, 235 aa, unidentified
  source 1..235: note = Leptospira andrefontaineae
  REGION 1..235: note = tr|A0A4R9H0H4|A0A4R9H0H4_9LEPT 7-cyano-7-deazaguanine synthase OS=Leptospira andrefontaineae OX=2484976 GN=queC PE=3 SV=1
MSSSSKSNGVRAKSHSKNPKAIVLFSGGLDSTTCLYQAIQDGYSPIALSFDYNQKHKQELKSAKKITKLLEVPHLIQKLNPEFFQGSSLTEKKIKVPKNSLGHSEIPNTYVPGRNILFLSFGVSLAEGIGAQRLYIGVNALDYSGYPDCRPEFIKAYSDAIRIGTKTGSEGHPLEICTPLQFLDKKEIVLLGSKLGVPFSMTHSCYDPVGGKPCGKCDSCLLRKKGFQEAGVPEK

SEQ ID NO: 39197 - protein, 251 aa, unidentified
  source 1..251: note = Leptospira bandrabouensis
  REGION 1..251: note = tr|A0A4Z1ATB0|A0A4Z1ATB0_9LEPT 7-cyano-7-deazaguanine synthase OS=Leptospira bandrabouensis OX=2484903 GN=queC PE=3 SV=1
MVSVKDSSLKSKSEKKGAVVLLSGGLDSTTCLYFAAKEFGFPKNKKLPLLALSFDYSQKHKIELIKSKKIAKTLGIKHVIQKLDPGFFLGSSLTEKKIKVRKNAKSLFSGKEEEIPNTYVPGRNILFLSFALSLAEGHGYDSIYIGVNALDYSGYPDCRPEFIESFQKMANLGTKKGVSGDGDSIQIKTPLLHLGKKEIIELGLEVGAPLQLTHSCYDPLKGKPCGKCDSCILRAKGFLEAGILDPALSIR

SEQ ID NO: 39198 - protein, 249 aa, unidentified
  source 1..249: note = Leptospira barantonii
  REGION 1..249: note = tr|A0A5F2AYH7|A0A5F2AYH7_9LEPT 7-cyano-7-deazaguanine synthase OS=Leptospira barantonii; OX = 2023184 GN=queC PE=3 SV=1
MNSTNDTNLKGKNSDTKNPKKSSKESSKDFSNNKAVVLLSGGLDSTTCLYQALADGKQIQALSFDYGQRHRIELSYAKKITRKLGIPHTIQKLKPELFLGSSLTQKSIKVPKNSLGKDEIPNTYVPGRNILFLSFAVSLAEGTGSDSIYIGVNAMDYSGYPDCRPEFIKMYEMAIQLGTKKGSQGSPIKILTPLQNLTKKEIVLLGNRLKVPFHLTFSCYDPKNGKACGKCDACLLRKKGFQETGVSEK

SEQ ID NO: 39199 - protein, 249 aa, unidentified
  source 1..249: note = Leptospira barantonii
  REGION 1..249: note = tr|A0A2M9Z432|A0A2M9Z432_9LEPT 7-cyano-7-deazaguanine synthase OS=Leptospira barantonii; OX = 2023184 GN=queC PE=3 SV=1
MNPTNDTNLKRKNSDTKNPKKSSKESSKNFSNNKAVVLLSGGLDSTTCLYQALADGKQIQALSFDYGQRHRIELSYAKKITRKLGIPHTIQKLKPELFLGSSLTQKSIKVPKNSLGKDEIPNTYVPGRNILFLSFAVSLAEGTGSDSIYIGVNAMDYSGYPDCRPEFIKMYEMAIQLGTKKGSQGSPIKILTPLQNLTKKEIVLLGNRLKVPFHLTFSCYDPKNGKACGKCDACLLRKKGFQETGVSEK

SEQ ID NO: 39200 - protein, 248 aa, Leptospira biflexa
  REGION 1..248: note = tr|A0A5F2CF49|A0A5F2CF49_LEPBI 7-cyano-7-deazaguanine synthase OS=Leptospira biflexa; OX = 172 GN=queC PE=3 SV=1
MVSILDSSFKSKTEKKGAVVLLSGGLDSTTCLYLAAKDFGYPKNKKLPLLALSFDYSQKHKIELTKSKKIAKTLGIKHVIQKLDPGFFLGSSLTESKIKVRKNAKSLFSGDETEIPNTYVPGRNILFLSFALSLAEGHGYDSIYIGVNALDYSGYPDCRPEFIDSFQKMANLGTKKGVSGTGDSIQIKTPLLHLGKKEIIELGMSVGAPLGLTHSCYDPVSGKPCGKCDSCILRAKGFLEVGLKDPAL

SEQ ID NO: 39201 - protein, 248 aa, Leptospira biflexa
  REGION 1..248: note = sp|B0SK77|QUEC_LEPBP 7-cyano-7-deazaguanine synthase; OS = Leptospira biflexa serovar Patoc (strain Patoc 1 / ATCC 23582 / Paris) OX=456481 GN=queC PE=3 SV=1
MVSILDSSFKSKTEKKGAIVLLSGGLDSTTCLYLAAKDFGYPKNKKLPLLALSFDYSQKHKIELTKSKKIAKTLGIKHVIQKLDPGFFLGSSLTESKIKVRKNAKSLFSGDETEIPNTYVPGRNILFLSFALSLAEGHGYDSIYIGVNALDYSGYPDCRPEFIDSFQKMANLGTKKGVSGTGDSIQIKTPLLHLGKKEIIELGMSVGAPLGLTHSCYDPVSGKPCGKCDSCILRAKGFLEVGLKDPAL

SEQ ID NO: 39202 - protein, 72 aa, Leptospira borgpetersenii
  REGION 1..72: note = tr|M6VW11|M6VW11_LEPBO Queuosine biosynthesis protein QueC-like protein OS=Leptospira borgpetersenii serovar Pomona str. 200901868 OX=1192866; GN = LEP1GSC133_0437 PE=4SV=1
MNSRKDKNSKGKNSDTKRKKSSQENDKAVVLLSGGLDSTTCLYQALADGKKSKLFPSTTDKNIKLNCLMRKK

SEQ ID NO: 39203 - protein, 176 aa, Leptospira borgpetersenii
  REGION 1..176: note = tr|M6VW92|M6VW92_LEPBO 7-cyano-7-deazaguanine synthase OS=Leptospira borgpetersenii serovar Pomona str. 200901868 OX=1192866 GN=LEP1GSC133_0438 PE=3 SV=1
MSYAKKITRQLGISHTIQKLKPELFLGSSLTQKSLRVPKNSLGKEEIPNTYVPGRNILFLSFAVCLAEGTGSNSIYIGVNAMDYSGYPDCRPEFIRTYETAIQLGTKKGNQGSPIKIVTPLQNLSKKEIVLLGNQLQVPFHLTFSCYDPKNRKACEKCDACLLRKKGFQETGVSEK

SEQ ID NO: 39204 - protein, 251 aa, unidentified
  source 1..251: note = Leptospira bourretii
  REGION 1..251: note = tr|A0A4R9IPW7|A0A4R9IPW7_9LEPT 7-cyano-7-deazaguanine synthase OS=Leptospira bourretii; OX = 2484962 GN=queC PE=3 SV=1
MVSVKDSSLNSKSEKKGAVVLLSGGLDSTTCLYFAAKEFGYPKNKKLPILALSFDYSQKHKIELIKSKKIAKTLGIKHVIQKLDPGFFLGSSLTEKKIKVRKNAKSLFSGIEEEIPNTYVPGRNILFLSFALSLAEGHGYDSIYIGVNALDYSGYPDCRPEFIESFQKMANLGTKKGVSGDGDSIQIKTPLLHLGKKEIIELGIQVDAPLHLTHSCYDPVRGKPCGKCDSCILRAKGFLEAGILDPAISLR

SEQ ID NO: 39205 - protein, 250 aa, unidentified
  source 1..250: note = Leptospira bouyouniensis
  REGION 1..250: note = tr|A0A4R9HQK9|A0A4R9HQK9_9LEPT 7-cyano-7-deazaguanine synthase OS=Leptospira bouyouniensis OX=2484911 GN=queC PE=3 SV=1
MVSVSDSNHKSLSEKKGAVVLLSGGLDSTTCLYIAAKEFGYPKHKKLPLLALSFDYSQKHKIELIKSKKIAKTLGIKHVIQKLDPGFFLGSSLTEKKIKVRKNAKSLFNGDEKEIPNTYVPGRNILFLSFALSLAEGHGYDSIYIGVNALDYSGYPDCRPEFIESFQKMANLGTKKGVSGKGDSIQIKTPLLHLGKKEIIELGMEVGAPLHLTHSCYDPIKGKPCGKCDSCILRAKGFSEIGLEDPALKI

SEQ ID NO: 39206 - protein, 246 aa, unidentified
  source 1..246: note = Leptospira brenneri
  REGION 1..246: note = tr|A0A2M9Y3P9|A0A2M9Y3P9_9LEPT 7-cyano-7-deazaguanine synthase OS=Leptospira brenneri; OX = 2023182 GN=queC PE=3 SV=1
MVSVMDSSPKSNSKGAVVLLSGGLDSTTCLYIAARDYGYPKNKKLPLLALSFDYSQKHKIELIKSKKIAKLLGIKHVTQKLDPGFFLGSSLTEKKIKVRKNAKFLLSGKEEEIPNTYVPGRNILFLSFALSLAEGHGYDSIYIGVNALDYSGYPDCRPEFIESFQKMANLGTKKGVSGKGDSIQIKTPLLHLGKKEIIELGIQVDAPLHLTHSCYDPIKGKPCGKCDSCILRAKGFLEAGLLDPAT

SEQ ID NO: 39207 - protein, 235 aa, Leptospira broomii
  REGION 1..235: note = tr|T0FAL5|T0FAL5_9LEPT 7-cyano-7-deazaguanine synthase OS=Leptospira broomii serovar Hurstbridge str. 5399 OX=1049789 GN=queC PE=3 SV=1
MATKKESNTARRNFSPDKPKAVVLFSGGLDSTTCLYQAIEDGYAPIALSFDYDQRHKVELKSAKKIANRLRIPHLIQKLQPKFFLGSSLTEKKIKVPKNALGKSGIPNTYVPGRNILFLSFGVSLAEGIQADRLYIGVNALDYSGYPDCRPEFLKAYSEAIRIGTKAGAEGHPLEIAAPLQYLGKKEIVLLGAKLGVPFSMTHSCYDPINGKPCGKCDSCLLRKKGFQEAGIPEK

SEQ ID NO: 39208 - protein, 251 aa, unidentified
  source 1..251: note = Leptospira congkakensis
  REGION 1..251: note = tr|A0A4Z1AAD8|A0A4Z1AAD8_9LEPT 7-cyano-7-deazaguanine synthase OS=Leptospira congkakensis; OX = 2484932 GN=queC PE=3 SV=1
MVSVTDSSPKSKSEKKGAVVLLSGGLDSTTCLYVAAKEFGYPKNKKLPILALSFDYSQKHKIELIKSKKIAKTLGIKHVIQKLDPGFFLGSSLTEKKIKVRKNAKFLFSGNEKEIPNTYVPGRNILFLSFALSLAEGHGYDSIYIGVNALDYSGYPDCRPEFIESFQKMANLGTKKGVSGDGDSIQIKTPLLHLGKKEIIELGIQVDAPLHLTHSCYDPVRGKPCGKCDSCILRAKGFLEAGILDPAIQSQ

SEQ ID NO: 39209 - protein, 239 aa, unidentified
  source 1..239: note = Leptospira dzianensis
  REGION 1..239: note = tr|A0A5F2EBY6|A0A5F2EBY6_9LEPT 7-cyano-7-deazaguanine synthase OS=Leptospira dzianensis; OX = 2484905 GN=queC PE=3 SV=1
MDSAKKKNVNRKRSDFQTTPSNNKAVVLLSGGLDSTTCLYQAIADGKEVQALSFDYGQRHRIELSYAKKITRKLGIPHTIQKLKPELFLGSSLTQKSIKVPKNSLGKDEIPNTYVPGRNILFLSFAVSLAEGTGSDSIYIGVNAMDYSGYPDCRPEFIKMYEMAIQLGTKKGSQGSPIKIVTPLQNLSKKEIVLLGNRLQVPFHLTFSCYDPKGGKACGKCDACLLRKKGFQETGVSEK

SEQ ID NO: 39210 - protein, 239 aa, unidentified
  source 1..239: note = Leptospira dzianensis
  REGION 1..239: note = tr|A0A5F2BPB2|A0A5F2BPB2_9LEPT 7-cyano-7-deazaguanine synthase OS=Leptospira dzianensis; OX = 2484905 GN=queC PE=3 SV=1
MDSAKKKNVNRKRSDFQTTPSNNKAVVLLSGGLDSTTCLYQAIADGKEVQALSFDYGQRHKIELSYAKKITRKLGIPHTIQKLKPELFLGSSLTQKSIKVPKNSLGKDEIPNTYVPGRNILFLSFAVSLAEGTGSDSIYIGVNAMDYSGYPDCRPEFIKMYEMAIQLGTKKGSQGSPIKIVTPLQNLSKKEIVLLGNRLQVPFHLTFSCYDPKGGKACGKCDACLLRKKGFQETGVSEK

SEQ ID NO: 39211 - protein, 235 aa, unidentified
  source 1..235: note = Leptospira dzoumogneensis
  REGION 1..235: note = tr|A0A4Z1AM21|A0A4Z1AM21_9LEPT 7-cyano-7-deazaguanine synthase OS=Leptospira dzoumogneensis OX=2484904 GN=queC PE=3 SV=1
MGPSSKSNSVRTKSHSKNPKAIVLFSGGLDSTTCLYQAIQDGYSPIALSFDYNQKHKQELKSAKKITKLLDIPHLIQKLNPEFFQGSSLTEKKIKVPKNSLGHSEIPNTYVPGRNILFLSFGVSLAEGIGAQRLYIGVNALDYSGYPDCRPEFVKAYSDAVRIGTKTGSEGHPLEICTPLQFLDKKEIVLLGSKLGVPFSMTHSCYDPVGGKPCGKCDSCLLRKKGFQEAGVPEK

SEQ ID NO: 39212 - protein, 250 aa, unidentified
  source 1..250: note = Leptospira ellinghausenii
  REGION 1..250: note = tr|A0A2P2DF63|A0A2P2DF63_9LEPT 7-cyano-7-deazaguanine synthase OS=Leptospira ellinghausenii OX=1917822 GN=queC PE=3 SV=1
MVSVSDSSQKSKFEKKGAVVLLSGGLDSTTCLYVAAKEFGYPKNKKLPILALSFDYSQKHKIELIKSKKIAKELGVKHVIQKLDPGFFLGSSLTEKKIKVRKNAKSLFNGNDKEIPNTYVPGRNILFLSFALSLAEGHGYDSIYIGVNALDYSGYPDCRPEFIESFQKMANLGTKKGVSGIGDSIQIRTPLLHLGKKEIIELGIQVDAPLHLTHSCYDPVVGKPCGKCDSCILRAKGFLEVGLPDPALKS

SEQ ID NO: 39213 - protein, 174 aa, unidentified
  source 1..174: note = Leptospira elllisii
  REGION 1..174: note = tr|A0A2N0B3K8|A0A2N0B3K8_9LEPT 7-cyano-7-deazaguanine synthase (Fragment) OS=Leptospira elllisii OX=2023197 GN=queC PE=3 SV=1
MASAKDKNSKERNSEPNRKSSKDKNDKAVVLLSGGLDSTTCLYQAIADGKEVRALSFDYGQRHRIELSYAKKIVRKLGIPHTIQKLKPDLFLGSSLTQKSIKVPKNSLGKDEIPNTYVPGRNILFLSFAVSLAEGTGSDSIYIGVNAMDYSGYPDCRPEFIKMYEMAIQLGTKK

SEQ ID NO: 39214 - protein, 242 aa, unidentified
  source 1..242: note = Leptospira elllisii
  REGION 1..242: note = tr|A0A2N0BG23|A0A2N0BG23_9LEPT 7-cyano-7-deazaguanine synthase OS=Leptospira elllisii; OX = 2023197 GN=queC PE=3 SV=1
MASAKDKNSKERNSEPNRKSSKDKNDKAVVLLSGGLDSTTCLYQAIADGKEVRALSFDYGQRHRIELSYAKKIVRKLGIPHTIQKLKPDLFLGSSLTQKSIKVPKNSLGKDEIPNTYVPGRNILFLSFAVSLAEGTGSDSIYIGVNAMDYSGYPDCRPEFIKMYEMAIQLGTKKGSQGSPIKIITPLQNLSKKEIVLLGNKLKVPFHLTFSCYDPQNGKACGKCDACLLRKKGFQETGVSEK

SEQ ID NO: 39215 - protein, 235 aa, Leptospira fainei
  REGION 1..235: note = tr|S3UTH8|S3UTH8_9LEPT 7-cyano-7-deazaguanine synthase OS=Leptospira fainei serovar Hurstbridge str. BUT 6 OX=1193011 GN=queC PE=3 SV=1
MAGKKESNTVRRNFSSEKPKAVVLFSGGLDSTTCLYQAIEDGYAPIALSFDYDQRHKVELKSAKKIANRLGIPHLIQKLQPKFFLGSSLTEKKIKVPKNSLGKSGIPNTYVPGRNILFLSFGVSLAEGTHADRLYIGVNALDYSGYPDCRPEFLKAYSEAIRIGTKAGSEGHPLEISAPLQYLGKKEIVLLGAKLGVPFSMTHSCYDPIDGKPCGKCDSCLLRKKGFQEAGIPEK

SEQ ID NO: 39216 - protein, 235 aa, unidentified
  source 1..235: note = Leptospira fletcheri
  REGION 1..235: note = tr|A0A4R9GGW1|A0A4R9GGW1_9LEPT 7-cyano-7-deazaguanine synthase OS=Leptospira fletcheri; OX = 2484981 GN=queC PE=3 SV=1
MLSKSESNSVLTVSKSERPKAVVLFSGGLDSTTCLYQAIEDGYHPTALSFDYEQKHKIELKSAKQIAKHLGIPHLIQKLQPKFFLGSSLTEKKLKVPKNSLGKAGIPNTYVPGRNILFLSFGVSLAEGIQAKRLYIGVNALDYSGYPDCRPEFLKAYADAVRQGTKAGVEGHPLEICAPLQHLGKKEIVLLGSKLGVPFSMTHSCYDPIGGKPCGRCDSCLLRKKGFQEAGIPEK

SEQ ID NO: 39217 - protein, 235 aa, unidentified
  source 1..235: note = Leptospira fluminis
  REGION 1..235: note = tr|A0A4V3JET2|A0A4V3JET2_9LEPT 7-cyano-7-deazaguanine synthase OS=Leptospira fluminis; OX = 2484979 GN=queC PE=3 SV=1
MLSKSESNSVLTSSKSEKPKAVVLFSGGLDSTTCLYQAIADGYHPTALSFDYEQKHKIELRSAKRIAKNLGIPHLIQKLQPKFFLGSSLTEKKLKVPKNSLGKTGIPNTYVPGRNILFLSFGVSLAEGIQAKRLYIGVNALDYSGYPDCRPEFLKAYADAVRLGTKAGAEGHPLEICAPLQHLGKKEIVLLGSKLGVPFSMTHSCYDPIGGKPCGRCDSCLLRKKGFQEAGIPEK

SEQ ID NO: 39218 - protein, 251 aa, unidentified
  source 1..251: note = Leptospira gomenensis
  REGION 1..251: note = tr|A0A5F1YS03|A0A5F1YS03_9LEPT 7-cyano-7-deazaguanine synthase OS=Leptospira gomenensis; OX = 2484974 GN=queC PE=3 SV=1
MNSAKDKNSKRKNSESDRKHSSRQTKKDGAKPNRDKAIVLLSGGLDSTTCLYQAIADGKEVRALSFDYGQRHRIELSYAKKITRKLEIPHTIQKLQPELFLGSSLTQRSIQVPKNSLGKDEIPNTYVPGRNILFLSFAVSLAEGTGSDSIYIGVNAMDYSGYPDCRPEFIKMYEMAIQLGTKKGSQGSPIKIVTPLQNLSKKEIVLLGNELNVPFHLTFSCYDPQNGKACGKCDACLLRKKGFQETGVSEK

SEQ ID NO: 39219 - protein, 235 aa, unidentified
  source 1..235: note = Leptospira haakeii
  REGION 1..235: note = tr|A0A2N0BZM4|A0A2N0BZM4_9LEPT 7-cyano-7-deazaguanine synthase OS=Leptospira haakeii; OX = 2023198 GN=queC PE=3 SV=1
MSSSSKSNSVRTKSHSKNPKAIVLFSGGLDSTTCLYQAIQDGYSPIALSFDYNQKHKQELKSAKKITKLLEVPHLIQKLNPEFFQGSSLTEKKIKVPKNSLGHSEIPNTYVPGRNILFLSFGVSLAEGIGAQRLYIGVNALDYSGYPDCRPEFIKAYSDAIRIGTKTGAEGHPLEICTPLQFLDKKEIVLLGSKLGVPFSMTHSCYDPAGGKPCGKCDSCLLRKKGFQEAGVPEK

SEQ ID NO: 39220 - protein, 251 aa, unidentified
  source 1..251: note = Leptospira harrisiae
  REGION 1..251: note = tr|A0A2N0AHG4|A0A2N0AHG4_9LEPT 7-cyano-7-deazaguanine synthase OS=Leptospira harrisiae; OX = 2023189 GN=queC PE=3 SV=1
MVSVKDSSPHSRSEKKGAVVLLSGGLDSTTCLYEAAREYGHPKNKKLPILALSFDYSQKHKIELVKSKKIAKLLGIKHVIQKLDPGFFLGSSLTEKNIKVRKNAKSLFSGVEKEIPNTYVPGRNILFLSFALSLAEGHGYDSIYIGVNALDYSGYPDCRPEFIESFQKMANLGTKKGVSGTGDSIQIKTPLLHLNKKEIIELGIEVDAPLHLTHSCYDPLRGKPCGKCDSCILRAKGFLEAGILDPALSIR

SEQ ID NO: 39221 - protein, 235 aa, unidentified
  source 1..235: note = Leptospira hartskeerlii
  REGION 1..235: note = tr|A0A2M9XIA2|A0A2M9XIA2_9LEPT 7-cyano-7-deazaguanine synthase OS=Leptospira hartskeerlii; OX = 2023177 GN=queC PE=3 SV=1
MSPSSKSNGVRTKSHSKNPQAVVLFSGGLDSTTCLYQAIQDGYSPIALSFDYNQKHKQELKSAKKITKLLEVPHLIQKLNPEFFQGSSLTERKIKVPKNSLGHSEIPNTYVPGRNILFLSFGVSLAEGIGAKRLYIGVNALDYSGYPDCRPEFIKAYADAIRLGTKTGSEGHPLEICTPLQFLDKKEIVLLGSKLGVPFSMTHSCYDPVGGKPCGKCDSCLLRKKGFQEAGVPEK

SEQ ID NO: 39222 - protein, 249 aa, unidentified
  source 1..249: note = Leptospira idonii
  REGION 1..249: note = tr|A0A4R9M395|A0A4R9M395_9LEPT 7-cyano-7-deazaguanine synthase OS=Leptospira idonii; OX = 1193500 GN=queC PE=3 SV=1
MGSQPNPKKENLPEAKGAVVLLSGGLDSTTCLYLAARDYGYPKNKKLPLLALSFDYSQKHKIEIQKSKKIAKLLGIKHLVQKLDPQFFLGSSLTEKKIKVRKNAKSLFSGEDKEIPNTYVPGRNILFLSFALSLAEGHGYDSIYIGVNALDYSGYPDCRPEFIESFQKMANLGTKKGVTGQGDSIRIKTPLLHLNKKEIVLAGLEVGVPFHLTHSCYDPVRGKACGKCDSCILRAKGFAEAGVIDTSLV

SEQ ID NO: 39223 - protein, 238 aa, unidentified
  source 1..238: note = Leptospira ilyithenensis
  REGION 1..238: note = tr|A0A4R9LS62|A0A4R9LS62_9LEPT 7-cyano-7-deazaguanine synthase OS=Leptospira ilyithenensis OX=2484901 GN=queC PE=3 SV=1
MSNSKGAVVLLSGGLDSTTCLYYAAKEYGYPKSKKLPLVALSFDYSQKHKIELTKSKKISKLLGIPHFTQKLDPGFFLGSSLTEKKLKVRKQTSVSRIEADKTIPNTYVPGRNILFLSFALSLAEGHGFDSIYIGVNALDYSGYPDCRPDFIEAYQNMANLGTKKGVTSRQENGIKIKTPLISLNKKEIIELGISLGAPFHLTHSCYDPVRGKPCGKCDSCLLRVKGFKEAGLVDPAL

SEQ ID NO: 39224 - protein, 235 aa, Leptospira inadai
  REGION 1..235: note = tr|V6HH93|V6HH93_9LEPT 7-cyano-7-deazaguanine synthase OS=Leptospira inadai serovar Lyme str. 10; OX = 1049790 GN=queC PE=3 SV=1
MATKKESNAVRRNFSPDKPKAVVLFSGGLDSTTCLYQAIEDGYSPIALSFDYDQRHKVELKSAKKIANRLGIPHLIQKLQPKFFLGSSLTEKKIKVPKNSLGKSGIPNTYVPGRNILFLSFGVSLAEGIHAKRLYIGVNALDYSGYPDCRPEFLKAYSEAIRIGTKAGSEGHPLEIAAPLQYLGKKEIVLLGAKLGVPFSMTHSCYDPINGRPCGICDSCLLRKKGFQEAGIPEK

SEQ ID NO: 39225 - protein, 242 aa, Leptospira interrogans
  REGION 1..242: note = sp|Q8F964|QUEC_LEPIN 7-cyano-7-deazaguanine synthase; OS = Leptospira interrogans serogroup Icterohaemorrhagiae serovar Lai (strain 56601) OX=189518 GN=queC PE=3 SV=1
MNSSSNEKNKDLNRKNFSSKTDSSNNKAVVLLSGGLDSTTCLYQAIADGKEIQALSFDYGQRHKIELSYAKKVTRKLGIPHTIQKLKPELFLGSSLTQKSLHVPKNSLRKEEIPNTYVPGRNILFLSFAVSLAEGTGSDSIYIGVNSMDYSGYPDCRPEFIKMFEMAIQLGTKKGSQGPSIKILTPLQNLSKKEIVLLGNQLKVPFHLTFSCYDPKNGKACGKCDACLLRKKGFQETGVSEK

SEQ ID NO: 39226 - protein, 242 aa, Leptospira interrogans; identical to SEQ ID NO: 39225
  REGION 1..242: note = sp|Q72VK9|QUEC_LEPIC 7-cyano-7-deazaguanine synthase; OS = Leptospira interrogans serogroup Icterohaemorrhagiae serovar copenhageni (strain Fiocruz L1-130) OX=267671 GN =queC PE=3 SV=1

SEQ ID NO: 39227 - protein, 250 aa, unidentified
  source 1..250: note = Leptospira jelokensis
  REGION 1..250: note = tr|A0A5F2B8N7|A0A5F2B8N7_9LEPT 7-cyano-7-deazaguanine synthase OS=Leptospira jelokensis; OX = 2484931 GN=queC PE=3 SV=1
MVSASDSNQTSQSNKKGAVVLLSGGLDSTTCLYVAAKEFGYPKNKKLPLLALSFDYSQKHKIELTKSKKIAKTLGIKHVIQKLDPGFFLGSSLTESKIKVRKNAKSLFSGDEKEIPNTYVPGRNILFLSFALSLAEGHGYDSIYIGVNALDYSGYPDCRPEFIESFQKMANLGTKKGVSGNGDSIQIKTPLLHLGKKEIIELGMSVGAPLQLTHSCYDPIKGKACGKCDSCLLRAKGFLELGLEDPALRF

SEQ ID NO: 39228 - protein, 250 aa, unidentified
  source 1..250: note = Leptospira jelokensis
  REGION 1..250: note = tr|A0A4Z1A2H3|A0A4Z1A2H3_9LEPT 7-cyano-7-deazaguanine synthase OS=Leptospira jelokensis; OX = 2484931 GN=queC PE=3 SV=1
MVSASDSNQTSQSNKKGAVVLLSGGLDSTTCLYVAAKEFGYPKNKKLPLLALSFDYSQKHKIELTKSKKIAKTLGIKHVIQKLDPGFFLGSSLTESKIKVRKNAKSLFSGDEKEIPNTYVPGRNILFLSFALSLAEGHGYDSIYIGVNALDYSGYPDCRPEFIESFQKMANLGTKKGVSGNGDSIQIKTPLLHLGKKEIIELGMSVGAPLQLTHSCYDPIKGKACGKCDSCLLRAKGFLELGLEDPALNS

SEQ ID NO: 39229 - protein, 235 aa, unidentified
  source 1..235: note = Leptospira johnsonii
  REGION 1..235: note = tr|A0A2P2D476|A0A2P2D476_9LEPT 7-cyano-7-deazaguanine synthase OS=Leptospira johnsonii; OX = 1917820 GN=queC PE=3 SV=1
MSSPSKSNSVRTKSHSKNPKAVVLFSGGLDSTTCLYQAIQDGYSPIALSFDYNQKHKQELKSAKKIAKLLDMPHLIQKLNPEFFQGSSLTERKIKVPKNSLGHSEIPNTYVPGRNILFLSFGVSLAEGIGAQRLYIGVNALDYSGYPDCRPEFIKAYSDAIRLGTKTGSEGHPLEICTPLQFLDKKEIVLLGSKLGVPFSMTHSCYDPVGGKPCGKCDSCLLRKKGFQEAGVPEK

SEQ ID NO: 39230 - protein, 251 aa, unidentified
  source 1..251: note = Leptospira kanakyensis
  REGION 1..251: note = tr|A0A4R9HP61|A0A4R9HP61_9LEPT 7-cyano-7-deazaguanine synthase OS=Leptospira kanakyensis; OX = 2484968 GN=queC PE=3 SV=1
MVSVTDSSPKSKSEKKGAVVLLSGGLDSTTCLYVAAKEFGYPKNKKLPILALSFDYSQKHKIELIKSKKIAKTLGIKHVIQKLDPGFFLGSSLTEKKIKVRKNAKSLFSGIEEEIPNTYVPGRNILFLSFALSLAEGHGYDSIYIGVNALDYSGYPDCRPEFIESFQKMANLGTKKGVSGDGDSIQIKTPLLHLGKKEIIELGIQVDAPLHLTHSCYDPIKGKPCGKCDSCILRAKGFLEAGILDPALSRQ

SEQ ID NO: 39231 - protein, 248 aa, unidentified
  source 1..248: note = Leptospira kemamanensis
  REGION 1..248: note = tr|A0A4R9JLB7|A0A4R9JLB7_9LEPT 7-cyano-7-deazaguanine synthase OS=Leptospira kemamanensis; OX = 2484942 GN=queC PE=3 SV=1
MVSDKDSSQKLKSEKKGAVVLLSGGLDSTTCLYVAAKEFGYPKNKKLPILALSFDYSQKHKIELIKSKKIAKTLGIKHVIQKLDPGFFLGSSLTEKKIKVRKNAKSLFSGIEEEIPNTYVPGRNILFLSFALSLAEGHGYDSIYIGVNALDYSGYPDCRPEFIESFQKMANLGTKKGVSGEGDSIQIRTPLLHLGKKEIIELGMEVEAPLHLTHSCYDPVKGKACGKCDSCILRAKGFAELEMTDPSL

SEQ ID NO: 39232 - protein, 220 aa, Leptospira kirschneri
  REGION 1..220: note = tr|M6FNW7|M6FNW7_9LEPT 7-cyano-7-deazaguanine synthase OS=Leptospira kirschneri serovar Bulgarica str. Nikolaevo OX=1240687 GN=queC PE=3 SV=1
MSNNKAVVLLSGGLDSTTCLYQAIADGKEIQALSFDYGQRHKIELSYARKVTRKLGIPHTIQKLKPELFLGSSLTQKSLQVPKNSLRKEEIPNTYVPGRNILFLSFAVSLAEGTGSDSIYIGVNSMDYSGYPDCRPEFIKMFEMAIQLGTKKGSQGPSIKILTPLQNLSKKEIVLLGKQLKVPFHLTFSCYDPKNGKACGKCDACLLRKKGFQETGVSEK

SEQ ID NO: 39233 - protein, 237 aa, Leptospira kirschneri
  REGION 1..237: note = tr|M6ID19|M6ID19_9LEPT 7-cyano-7-deazaguanine synthase OS=Leptospira kirschneri serovar Bim str. 1051; OX = 1049941 GN=queC PE=3 SV=1
MNSQKNRSLSRKNFKENLSNNKAVVLLSGGLDSTTCLYQAIADGKEIQALSFDYGQRHKIELSYAKKVTHKLGIPHTIQKLKPELFLGSSLTQKSLQVPKNSLRKEEIPNTYVPGRNILFLSFAVSLAEGTGSDSIYIGVNSMDYSGYPDCRPEFIKMFEMAIQLGTKKGSQGPSIKILTPLQNLSKKEIVLLGKQLKVPFHLTFSCYDPKNGKACGKCDACLLRKKGFQETGVSEK

SEQ ID NO: 39234 - protein, 249 aa, Leptospira kmetyi
  REGION 1..249: note = tr|A0A2M9XP00|A0A2M9XP00_9LEPT 7-cyano-7-deazaguanine synthase OS=Leptospira kmetyi; OX = 408139 GN=queC PE=3 SV=1
MNSANDPTLKRKNSETKNRKKSSKESSEEFSNDKAVVLLSGGLDSTTCLYQALADGKQIQALSFDYGQRHRIELSYAKKVTRKLGIPHTIQKLKPELFLGSSLTQKSIKVPKNSLGKDEIPNTYVPGRNILFLSFAVSLAEGTGSDSIYIGVNAMDYSGYPDCRPEFIKMYEMAIQLGTKKGSQGSPIKIVTPLQNLTKKEIVLLGNRLKVPFHLTFSCYDPKNGKACGKCDACLLRKKGFQETGVSEK

SEQ ID NO: 39235 - protein, 244 aa, unidentified
  source 1..244: note = Leptospira kobayashii
  REGION 1..244: note = tr|A0A2P2DT72|A0A2P2DT72_9LEPT 7-cyano-7-deazaguanine synthase OS=Leptospira kobayashii; OX = 1917830 GN=queC PE=3 SV=1
MSNSKGAVVLLSGGLDSTTCLYYAAKEYGYPKTKKLPLVALSFDYSQKHKIELTKSKKISKLLGIPHFTQKLDPGFFLGSSLTDKKLKVRKQTSVSRIETDKTIPNTYVPGRNILFLSFALSLAEGHGFDSIYIGVNALDYSGYPDCRPDFIEAYQNMANLGTKKGVTSRQENGIQIKTPLISLNKKEIVELGISLGAPFHLTHSCYDPVRGRPCGKCDSCLLRAKGFKEAGIPDPALSFQSRA

SEQ ID NO: 39236 - protein, 235 aa, unidentified
  source 1..235: note = Leptospira koniamboensis
  REGION 1..235: note = tr|A0A4R9J789|A0A4R9J789_9LEPT 7-cyano-7-deazaguanine synthase OS=Leptospira koniamboensis OX=2484950 GN=queC PE=3 SV=1
MRSSSKSNSVRTKSHSKNPKAIVLFSGGLDSTTCLYQAIQDGYSPIALSFDYNQKHKQELKSAKKITKLLEVPHLIQKLSPEFFQGSSLTEKKIKVPKNSLGHSEIPNTYVPGRNILFLSFGVSLAEGIGAQRLYIGVNALDYSGYPDCRPEFIKAYSDAIRIGTKTGSEGHPLEICTPLQFLDKKEIVLLGSKLGVPFSMTHSCYDPVGGKPCGKCDSCLLRKKGFQEAGVPEK

SEQ ID NO: 39237 - protein, 236 aa, unidentified
  source 1..236: note = Leptospira langatensis
  REGION 1..236: note = tr|A0A5F1ZV31|A0A5F1ZV31_9LEPT 7-cyano-7-deazaguanine synthase OS=Leptospira langatensis; OX = 2484983 GN=queC PE=3 SV=1
MKSERPSSKSNGVRKSSKLPKAVVLFSGGLDSTTCLYKAIQDGYSPTALSFDYNQKHKEELRSAKKIAKLLGIPHLIQKLQPDFFQGSSLTEKKIRVPKNALGHTKIPNTYVPGRNILFLSFGVSLAEGISAERLYIGVNALDYSGYPDCRPEFIKAYAEAIRLGTKMGAEGNPLEICTPLQYLDKKEIVLLGSRLGVPFSLTHSCYDPIQGKPCGKCDSCLLRKKGFQEAGIPEK

SEQ ID NO: 39238 - protein, 250 aa, unidentified
  source 1..250: note = Leptospira levettii
  REGION 1..250: note = tr|A0A5F2D9I7|A0A5F2D9I7_9LEPT 7-cyano-7-deazaguanine synthase OS=Leptospira levettii; OX = 2023178 GN=queC PE=3 SV=1
MVSVSDSTNKSQFGKKGAVVLLSGGLDSTTCLYVAAKEFGYPKNKKLPILALSFDYSQKHKIELIKSKKIAKELGVKHVIQKLDPGFFLGSSLTEKKIKVRKNAKSLFSGNDKEIPNTYVPGRNILFLSFALSLAEGHGYDSIYIGVNALDYSGYPDCRPEFIESFQKMANLGTKKGVSGIGDSIQIKTPLLHLGKKEIIELGIQVDAPLHLTHSCYDPVLGKPCGKCDSCILRAKGFSEVGLPDPALKN

SEQ ID NO: 39239 - protein, 250 aa, unidentified
  source 1..250: note = Leptospira levettii
  REGION 1..250: note = tr|A0A2N0AX69|A0A2N0AX69_9LEPT 7-cyano-7-deazaguanine synthase OS=Leptospira levettii; OX = 2023178 GN=queC PE=3 SV=1
MVSVSDSTNKSQFGKKGAVVLLSGGLDSTTCLYVAAKEFGYPKNKKLPILALSFDYSQKHKIELIKSKKIAKELGVKHVIQKLDPGFFLGSSLTEKKIKVRKNAKSLFSGNDKEIPNTYVPGRNILFLSFALSLAEGHGYDSIYIGVNALDYSGYPDCRPEFIESFQKMANLGTKKGVSGLGDSIQIKTPLLHLGKKEIIELGLHVNAPLHLTHSCYDPVLGKPCGKCDSCILRAKGFLELGLRDPAGVD

SEQ ID NO: 39240 - protein, 235 aa, Leptospira licerasiae
  REGION 1..235: note = tr|A0A5F2DWK3|A0A5F2DWK3_9LEPT 7-cyano-7-deazaguanine synthase OS=Leptospira licerasiae; OX = 447106 GN=queC PE=3 SV=1
MSSSSRSNSVRTKSHSKNPKAVVLFSGGLDSTTCLYQAVQDGYSPIALSFDYNQKHKQELKSAKKITKLLEVPHLIQKLNPEFFQGSSLTEKKIKVPKNSLGHSEIPNTYVPGRNILFLSFGVSLAEGIGAKRLYIGVNALDYSGYPDCRPEFIKAYSDAIRIGTKTGSEGHPLEICTPLQFLDKKEIVLLGSKLGVPFSMTHSCYDPVGGKPCGKCDSCLLRKKGFQEAGVPEK

SEQ ID NO: 39241 - protein, 235 aa, Leptospira licerasiae
  REGION 1..235: note = tr|I0XVY9|I0XVY9_9LEPT 7-cyano-7-deazaguanine synthase OS=Leptospira licerasiae serovar Varillal str. VAR 010 OX=1049972 GN=queC PE=3 SV=1
MSSSSRSNSVRTKSHSKNPKAVVLFSGGLDSTTCLYQAVQDGYSPIALSFDYNQKHKQELKSAKKITKLLEVPHLIQKLNPEFFQGSSLTEKKIKVPKNSLGHSEIPNTYVPGRNILFLSFGVSLAEGIGAKRLYIGVNALDYSGYPDCRPEFIKAYSDAIRIGTKTGSEGHPLEICTPLQFLDKKEIVLLGSKLGVPFSMTHSCYDPIGGKPCGKCDSCLLRKKGFQEAGVPEK

SEQ ID NO: 39242 - protein, 250 aa, unidentified
  source 1..250: note = Leptospira macculloughii
  REGION 1..250: note = tr|A0A2N0C6R9|A0A2N0C6R9_9LEPT 7-cyano-7-deazaguanine synthase OS=Leptospira macculloughii OX=2023202 GN=queC PE=3 SV=1
MVSVSDSTNKSQFEKKGAVVLLSGGLDSTTCLYVAAKEFGYPKNKKLPILALSFDYSQKHKIELIKSKKIAKELGVKHVIQKLDPGFFLGSSLTEKKIKVRKNAKSLFSGNDKEIPNTYVPGRNILFLSFALSLAEGHGYDSIYIGVNALDYSGYPDCRPEFIESFQKMANLGTKKGVSGIGDSIQIKTPLLHLGKKEIIELGIQVDAPLHLTHSCYDPVLGKPCGKCDSCILRAKGFSEVGLPDPALKS

SEQ ID NO: 39243 - protein, 251 aa, unidentified
  source 1..251: note = Leptospira macculloughii
  REGION 1..251: note = tr|A0A2N0C4Z1|A0A2N0C4Z1_9LEPT 7-cyano-7-deazaguanine synthase OS=Leptospira macculloughii OX=2023202 GN=queC PE=3 SV=1
MVSVKDSSPKSKSEKKGAVVLLSGGLDSTTCLYVAAKEFGYSKNKKLPLLALSFDYSQKHKIELIKSKKIAKTLGIKHVIQKLDPGFFLGSSLTEKKIKVRKNAKSLFSGDETEIPNTYVPGRNILFLSFALSLAEGHGYDSIYIGVNALDYSGYPDCRPEFIEAFQKMANLGTKKGVSGEGDSIQIKTPLLYLGKKEIIELGIQVDAPLHLTHSCYDPIKGKPCGKCDSCILRAKGFLEAGILDPTISLR

SEQ ID NO: 39244 - protein, 239 aa, unidentified
  source 1..239: note = Leptospira mayottensis
  REGION 1..239: note = tr|A0A3S9KNI3|A0A3S9KNI3_9LEPT 7-cyano-7-deazaguanine synthase OS=Leptospira mayottensis 200901116 OX=1192864 GN=queC PE=3 SV=1
MNSRKNKNSSRKHSDPSSKSANDKAVVLLSGGLDSTTCLYQAIADGKKIQALSFDYGQRHKIELSYAKKITRQLGISHTIQKLKPELFLGSSLTQKSLKVPKNSLGKEKIPNTYVPGRNILFLSFAVCLAEGTGSSSIYIGVNAMDYSGYPDCRPEFIKMYEMAIQLGTKKGSQGSSIKIVTPLQNLSKKEIVLLGNRLQVPFHLTFSCYDPKNKKACGRCDACLLRKKGFQETGVSEK

SEQ ID NO: 39245 - protein, 239 aa, unidentified; identical to SEQ ID NO: 39244
  source 1..239: note = Leptospira mayottensis
  REGION 1..239: note = tr|A0A5F2EM81|A0A5F2EM81_9LEPT 7-cyano-7-deazaguanine synthase OS=Leptospira mayottensis; OX = 1137606 GN=queC PE=3 SV=1

SEQ ID NO: 39246 - protein, 251 aa, Leptospira meyeri
  REGION 1..251: note = tr|A0A4R8MXQ8|A0A4R8MXQ8_LEPME 7-cyano-7-deazaguanine synthase OS=Leptospira meyeri; OX = 29508 GN=queC PE=3 SV=1
MVSVKDSSPKSKSEKKGAVVLLSGGLDSTTCLYVAAKEFGYPKNKKLPLLALSFDYSQKHKIELIKSKKIAKTLGIKHVIQKLDPGFFLGSSLTEKKIKVRKNAKSLFSGDETEIPNTYVPGRNILFLSFALSLAEGHGYDSIYIGVNALDYSGYPDCRPEFIEAFQKMANLGTKKGVSGDGDSIQIKTPLLHLGKKEIIELGIQVNAPLHLTHSCYDPIKGKPCGKCDSCILRAKGFLEAGILDPTISLR

SEQ ID NO: 39247 - protein, 251 aa, Leptospira meyeri
  REGION 1..251: note = tr|A0A5F1ZLB1|A0A5F1ZLB1_LEPME 7-cyano-7-deazaguanine synthase OS=Leptospira meyeri; OX = 29508 GN=queC PE=3 SV=1
MVSVKDSSPKSKSEKKGAVVLLSGGLDSTTCLYVAAKEFGYPKNKKLPLLALSFDYSQKHKIELIKSKKIAKTLGIKHVIQKLDPGFFLGSSLTEKKIKVRKNAKSLFSGDETEIPNTYVPGRNILFLSFALSLAEGHGYDSIYIGVNALDYSGYPDCRPEFIEAFQKMANLGTKKGVSGEGDSIQIKTPLLHLGKKEIIELGIQVDAPLHLTHSCYDPIKGKPCGKCDSCILRAKGFLEAGILDPTISLR

SEQ ID NO: 39248 - protein, 248 aa, unidentified
  source 1..248: note = Leptospira montravelensis
  REGION 1..248: note = tr|A0A4Z0ZB87|A0A4Z0ZB87_9LEPT 7-cyano-7-deazaguanine synthase OS=Leptospira montravelensis OX=2484961 GN=queC PE=3 SV=1
MVSAKDSSSHSKSEKKGAVVLLSGGLDSTTCLYFAAKEFGYPKNKKLPILALSFDYSQKHKIELIKSKKIAKLLGIKHVIQKLDPGFFLGSSLTEKKIKVRKNAKSLFSGIEKEIPNTYVPGRNILFLSFALSLAEGHGYDSIYIGVNALDYSGYPDCRPEFIESFQNMANLGTKKGVSGDGDSIQIKTPLLHLNKKEIIELGIEVDAPLHLTHSCYDPINGKPCGKCDSCILRAKGFLEAGILDPTF

SEQ ID NO: 39249 - protein, 251 aa, unidentified
  source 1..251: note = Leptospira mtsangambouensis
  REGION 1..251: note = tr|A0A5F2DEL1|A0A5F2DEL1_9LEPT 7-cyano-7-deazaguanine synthase OS=Leptospira mtsangambouensis OX=2484912 GN=queC PE=3 SV=1
MVSVKDSSLKSKSEKKGAVVLLSGGLDSTTCLYYAAKEFGYPKNKKLPLLALSFDYSQKHKIELIKSKKIAKTLGIKHVIQKLDPGFFLGSSLTEKKIKVRKNAKSLFSGIEEEIPNTYVPGRNILFLSFALSLAEGHGYDSIYIGVNALDYSGYPDCRPEFIESFQKMANLGTKKGVSGDGDSIQIKTPLLHLGKKEIIELGIQVDAPLHLTHSCYDPVRGKPCGKCDSCILRAKGFLEAGILDPAISLR

SEQ ID NO: 39250 - protein, 235 aa, unidentified
  source 1..235: note = Leptospira neocaledonica
  REGION 1..235: note = tr|A0A2N0A212|A0A2N0A212_9LEPT 7-cyano-7-deazaguanine synthase OS=Leptospira neocaledonica OX=2023192 GN=queC PE=3 SV=1
MSSSSKSNGVRTKSHSKNPKAIVLFSGGLDSTTCLYQAIQDGYSPIALSFDYNQKHKQELKSAKKITKLLDIPHLIQKLNPEFFQGSSLTEKKIKVPKNSLGHSDIPNTYVPGRNILFLSFGVSLAEGIGAQRLYIGVNALDYSGYPDCRPEFIKAYSETIRLGTKMGSEGHPLEICTPLQFLDKKEIVLLGSKLGVPFSMTHSCYDPVGGKPCGKCDSCLLRKKGFQEAGVPEK

SEQ ID NO: 39251 - protein, 242 aa, Leptospira noguchii
  REGION 1..242: note = tr|A0A540SYB1|A0A540SYB1_9LEPT 7-cyano-7-deazaguanine synthase OS=Leptospira noguchii; OX = 28182 GN=queC PE=3 SV=1
MNFSSNEKNKNLNRKNSSSKTNPPNNKAVVLLSGGLDSTTCLYQAIEDGKEIQALSFDYGQRHKIELTYAKKVTRKLGIPHTIQKLKPELFLGSSLTQKSLQVPKNSLRKEEIPNTYVPGRNILFLSFAVSLAEGTGSDSIYIGVNSMDYSGYPDCRPEFIKMFEMAIQLGTKKGSQGPSIKILTPLQNLSKKEIVLLGNRLKVPFHLTFSCYDPKNGKACGKCDACLLRKKGFQETGVSEK

SEQ ID NO: 39252 - protein, 242 aa, Leptospira noguchii
  REGION 1..242: note = tr|V6GR82|V6GR82_9LEPT 7-cyano-7-deazaguanine synthase OS=Leptospira noguchii str. Cascata OX=1193054; GN = queC PE=3 SV=1
MNFLSNEKNKNLNRKNSSSKTNPPNNKAVVLLSGGLDSTTCLYQAIEDGKEIQALSFDYGQRHKIELTYAKKVTRKLGIPHTIQKLKPELFLGSSLTQKSLQVPKNSLRKEEIPNTYVPGRNILFLSFAVSLAEGTGSDSIYIGVNSMDYSGYPDCRPEFIKMFEMAIQLGTKKGSQGPSIKILTPLQNLSKKEIVLLGNRLKVPFHLTFSCYDPKNGKACGKCDACLLRKKGFQETGVSEK

SEQ ID NO: 39253 - protein, 251 aa, unidentified
  source 1..251: note = Leptospira noumeaensis
  REGION 1..251: note = tr|A0A4R9I7M6|A0A4R9I7M6_9LEPT 7-cyano-7-deazaguanine synthase OS=Leptospira noumeaensis; OX = 2484964 GN=queC PE=3 SV=1
MVSVKDSSPKSKSEKKGAVVLLSGGLDSTTCLYVAAKEFGYPKNKKLPILALSFDYSQKHKIELIKSKKIAKTLGIKHVIQKLDPGFFLGSSLTEKKIKVRKNAKFLFSGNEKEIPNTYVPGRNILFLSFALSLAEGQGYDSIYIGVNALDYSGYPDCRPEFIESFQKMANLGTKKGVSGDGDSIQIKTPLLHLGKKEIIELGIQVDAPLHLTHSCYDPVRGKPCGKCDSCILRAKGFLEAGILDPAIQSQ

SEQ ID NO: 39254 - protein, 234 aa, unidentified
  source 1..234: note = Leptospira ognonensis
  REGION 1..234: note = tr|A0A4R9JVG3|A0A4R9JVG3_9LEPT 7-cyano-7-deazaguanine synthase OS=Leptospira ognonensis; OX = 2484945 GN=queC PE=3 SV=1
MPGAVVLLSGGLDSTTCLYLAARDYGYPKKKNLPILALSFNYSQKHKIEISKSRKITKELGVKHLIQKLDPNFFLGSSLTEKKIKVRKNAAFESLGDHSEIPNTYVPGRNILFLSFALSLAEGHNFDSIYIGVNALDYSGYPDCRPEFIEAYQKMANLGTKAGIGGKGRVKIITPLLELNKKEIILLGQKVGAPLHLTHSCYDPQKGKPCGKCDSCLLRAKGFKEAGLRDPANL

SEQ ID NO: 39255 - protein, 248 aa, unidentified
  source 1..248: note = Leptospira perdikensis
  REGION 1..248: note = tr|A0A4R9JKN5|A0A4R9JKN5_9LEPT 7-cyano-7-deazaguanine synthase OS=Leptospira perdikensis; OX = 2484948 GN=queC PE=3 SV=1
MVSVKDSSPKSKSEKKGAVVLLSGGLDSTTCLYLAAKDYGYPKSKHLPLLALSFDYSQKHKIELIKSKKIAKLLGIKHVIQKLDPGFFLGSSLTEKKIKVRKNAKSLFSGIEEEIPNTYVPGRNILFLSFALSLAEGHGYDSIYIGVNALDYSGYPDCRPEFIESFQKMADLGTKKGVSEADDSIQIKTPLLRLGKKEIIELGIQVGAPLHLTHSCYDPIKGKPCGKCDSCTLRNKGFAELGMTDPSL

SEQ ID NO: 39256 - protein, 228 aa, unidentified
  source 1..228: note = Leptospira perolatii
  REGION 1..228: note = tr|A0A2M9ZTG6|A0A2M9ZTG6_9LEPT 7-cyano-7-deazaguanine synthase OS=Leptospira perolatii; OX = 2023191 GN=queC PE=3 SV=1
MPKTESNTAKRPKAVVLFSGGLDSTTCLYKAIKDGYNPTALSFDYGQRHKIELKSAKKIAKMLGITHLIQKLQPELFKGSSLTERKLKVPKNALDYSHIPNTYVPGRNILFLSFAVSLAEGIGADSLYIGVNALDYSGYPDCRPEFLQAYSEAIAKGTKSGVEGKPIQIKAPLQYLSKKEIILLGDSLGVPFSLTHSCYDPVNGAPCGKCDSCLLRKKGFQEAGIPEK

SEQ ID NO: 39257 - protein, 239 aa, unidentified
  source 1..239: note = Leptospira putramalaysiae
  REGION 1..239: note = tr|A0A4R9L297|A0A4R9L297_9LEPT 7-cyano-7-deazaguanine synthase OS=Leptospira putramalaysiae OX=2484984 GN=queC PE=3 SV=1
MNSDKSKNPNRKKSDSKMKNSGNKAIVLLSGGLDSTTCLYQAIADGKEVRALSFDYGQRHRIELSFAKKITRKLGIPHTIQKLKPELFLGSSLTQKSIKVPKNSLGKDEIPNTYVPGRNILFLSFATSLAEGTGSDSIYIGVNAMDYSGYPDCRPEFIKMFEMAIQLGTKKGSQGSPLKIITPLQNLTKKEIVLLGSKLNVPFHLTFSCYDPQNGKACGKCDACLLRKKGFQETGVSEK

SEQ ID NO: 39258 - protein, 236 aa, unidentified
  source 1..236: note = Leptospira ryugenii
  REGION 1..236: note = tr|A0A2P2E2P8|A0A2P2E2P8_9LEPT 7-cyano-7-deazaguanine synthase OS=Leptospira ryugenii; OX = 1917863 GN=queC PE=3 SV=1
MKDTNGAVVLLSGGLDSTTCLYLAAHDFGYPKQKKLPILALSFLYSQKHKIEIAKSKLIAEKLGVKHLVQKLDPEFFLGSSLTEERLKVRKNVQLNQLQKDKEIPNTYVPGRNTLFLSFALSLAEGHGYDSIYIGVNALDYSGYPDCRPEFIQAFQTVADLGTKTGVSGRKKIQIKTPLLKLNKKEIVLLANRYHVPFELTHSCYDPVKGKPCGKCDSCLLRKKGFEEAGILDPTA

SEQ ID NO: 39259 - protein, 235 aa, unidentified
  source 1..235: note = Leptospira saintgironsiae
  REGION 1..235: note = tr|A0A2M9YGV5|A0A2M9YGV5_9LEPT 7-cyano-7-deazaguanine synthase OS=Leptospira saintgironsiae OX=2023183 GN=queC PE=3 SV=1
MSSSSKSNSVRTKSQSKNPKAIVLFSGGLDSTTCLYQAIQDGYSPIALSFDYNQKHKQELKSAKKITKLLEVPHLIQKLNPDFFQGSSLTEKKIKVPKNSLGHSKIPNTYVPGRNILFLSFGVSLAEGIGAQRLYIGVNALDYSGYPDCRPEFIKAYSDAIRIGTKTGSEGHPLEICTPLQFLDKKEIVLLGSKLGVPFSMTHSCYDPVGGKPCGKCDSCLLRKKGFQEAGIPEK

SEQ ID NO: 39260 - protein, 237 aa, Leptospira santarosai
  REGION 1..237: note = tr|M6ZG99|M6ZG99_9LEPT 7-cyano-7-deazaguanine synthase OS=Leptospira santarosai str. 200702252; OX = 1049977 GN=queC PE=3 SV=1
MFLNSKENKNSSRKSSEPTNDKAVVLLSGGLDSTTCLYQAIEDGKKIRALSFDYGQKHKIELSYAKKITRQLGIPHTIQKLKPELFLGSSLTQKSLRVPKNSLGKEKIPNTYVPGRNILFLSFAVCLAEGTDSSSVYIGVNAMDYSGYPDCRPEFIKMYETAIQLGTKKGSQGSPIKIVTPLQNLSKKEIVLLGNRLKVPFHLTFSCYDPKKGKACGKCDACLLRKKGFQETGVFEK

SEQ ID NO: 39261 - protein, 237 aa, Leptospira santarosai
  REGION 1..237: note = tr|A0A2P1QUW7|A0A2P1QUW7_9LEPT 7-cyano-7-deazaguanine synthase OS=Leptospira santarosai; OX = 28183 GN=queC PE=3 SV=1
MFLNSKENKNSSRKSSEPTNDKAVVLLSGGLDSTTCLYQAIADGKKIRALSFDYGQKHKIELSYAKKITRQLGIPHTIQKLKPELFLGSSLTQKSLRVPKNSLGKEKIPNTYVPGRNILFLSFAVCLAEGTGSSSVYIGVNAMDYSGYPDCRPEFIKMYETAIQLGTKKGSQGSPIKIVTPLQNLSKKEIVLLGNRLKVPFHLTFSCYDPKKGKACGKCDACLLRKKGFQETGVFEK

SEQ ID NO: 39262 - protein, 235 aa, unidentified
  source 1..235: note = Leptospira sarikeiensis
  REGION 1..235: note = tr|A0A4R9K9E5|A0A4R9K9E5_9LEPT 7-cyano-7-deazaguanine synthase OS=Leptospira sarikeiensis; OX = 2484943 GN=queC PE=3 SV=1
MSRSIKSNTVRKKSSSKDPKAIVLFSGGLDSTTCLYKAIEDGYSPIALSFDYNQKHKQELKSAKKITKLLNIPHLVQKLNPDFFQGSSLTEKKIKVPKNSLGTSEIPNTYVPGRNILFLSFGVSLAEGIGAQRLYIGVNALDYSGYPDCRPEFIKAYADAIRLGTKTGSQGHPLEICTPLQFLDKKEIVLLGSKLGVPFSMTHSCYDPIQGKPCGKCDSCLLRKKGFQEAGVPEK

SEQ ID NO: 39263 - protein, 235 aa, unidentified
  source 1..235: note = Leptospira selangorensis
  REGION 1..235: note = tr|A0A4R9G9K0|A0A4R9G9K0_9LEPT 7-cyano-7-deazaguanine synthase OS=Leptospira selangorensis OX=2484982 GN=queC PE=3 SV=1
MSPSSKSNSVRTKSHSKNPKAIVLFSGGLDSTTCLYQAIQDGYSPIALSFDYNQKHKQELKSAKKITKLLEVPHLIQKLNPEFFQGSSLTEKKIKVPKNSLGHSEIPNTYVPGRNILFLSFGVSLAEGIGAQRLYIGVNALDYSGYPDCRPEFIKAYSDAIRIGTKTGAEGHPLEICTPLQFLDKKEIVLLGSKLGVPFSMTHSCYDPVGGKPCGKCDSCLLRKKGFQEAGVPEK

SEQ ID NO: 39264 - protein, 235 aa, unidentified
  source 1..235: note = Leptospira selangorensis
  REGION 1..235: note = tr|A0A5F2C1B6|A0A5F2C1B6_9LEPT 7-cyano-7-deazaguanine synthase OS=Leptospira selangorensis OX=2484982 GN=queC PE=3 SV=1
MSPSSKSNSVRTKSHSKNPKAIVLFSGGLDSTTCLYQAIQDGYSPIALSFDYNQKHKQELKSAKKITKLLEVPHLIQKLNPEFFQGSSLTEKKIKVPKNSLGHSEIPNTYVPGRNILFLSFGVSLAEGIGAQRLYIGVNALDYSGYPDCRPEFIKAYSDAIRIGTKTGSEGHPLEICTPLQFLDKKEIVLLGSKLGVPFSMTHSCYDPVGGKPCGKCDSCLLRKKGFQEAGVPEK

SEQ ID NO: 39265 - protein, 236 aa, unidentified
  source 1..236: note = Leptospira semungkisensis
  REGION 1..236: note = tr|A0A4R9G7Z7|A0A4R9G7Z7_9LEPT 7-cyano-7-deazaguanine synthase OS=Leptospira semungkisensis OX=2484985 GN=queC PE=3 SV=1
MSFQKPSSKLNGVQKNSKGPKAVVLFSGGLDSTTCLYKAIKDGYSPTALSFDYNQKHKEELKSAKKIAKLLGIPHLIQKLQPDFFKGSSLTEKKIRVPKNSLGHTKIPNTYVPGRNILFLSFGVSLAEGISAERLYIGVNALDYSGYPDCRPEFIKAYAEAIRLGTKMGAEGNPLEICTPLQYLDKKEIVLLGSSLGVPFSLTHSCYDPIQGKPCGKCDSCLLRKKGFQEAGIPEK

SEQ ID NO: 39266 - protein, 237 aa, Leptospira sp.
  REGION 1..237: note = tr|M5UX35|M5UX35_9LEPT 7-cyano-7-deazaguanine synthase OS=Leptospira sp. Fiocruz LV4135 OX=1193013; GN = queC PE=3 SV=1
MFLNSKENKNSSRKSSEPTNDKAVVLLSGGLDSTTCLYQAIEDGKKIRALSFDYGQKHKIELSYAKKITRQLGIPHTIQKLKPELFLGSSLTQKSLRVPKNSLGKEKIPNTYVPGRNILFLSFAVCLAEGTGSSSVYIGVNAMDYSGYPDCRPEFIKMYETAIQLGTKKGSQGSPIKIVTPLQNLSKKEIVLLGNRLKVPFHLTFSCYDPKKGKACGKCDACLLRKKGFQETGVFEK

SEQ ID NO: 39267 - protein, 234 aa, Leptospira sp.
  REGION 1..234: note = tr|A0A2M8HNA7|A0A2M8HNA7_9LEPT 7-cyano-7-deazaguanine synthase OS=Leptospira sp. OX=178; GN = queC PE=3 SV=1
MKSISPDKIAVVLLSGGLDSTTCLYLAKQQSEKIYAISFDYGQKHSIELKRAKKIAKSQNIEHTIIKIQTELFQGTSLTDPKLKVPKDSLKKHLQKNTIPNTYVPGRNILFLSYALSYAESRQAGQIYIGVNALDYSGYPDCRPEFIEAYQNMIDLGTKSGSKSGKSEKSIQIITPLIHLSKKEIVSLAAHLKVPFQDTISCYDPDPRTGKPCGHCDSCILRKKGFAEAGVVDG

SEQ ID NO: 39268 - protein, 239 aa, unidentified; identical to SEQ ID NO: 39257
  source 1..239: note = Leptospira stimsonii
  REGION 1..239: note = tr|A0A5E8TTV5|A0A5E8TTV5_9LEPT 7-cyano-7-deazaguanine synthase OS=Leptospira stimsonii; OX = 2202203 GN=queC PE=3 SV=1

SEQ ID NO: 39269 - protein, 239 aa, unidentified
  source 1..239: note = Leptospira stimsonii
  REGION 1..239: note = tr|A0A396ZAU0|A0A396ZAU0_9LEPT 7-cyano-7-deazaguanine synthase OS=Leptospira stimsonii; OX = 2202203 GN=queC PE=3 SV=1
MDSDKSKNSNRKKNDSKVKTSSNKAVVLLSGGLDSTTCLYQAIADGKEVRALSFDYGQRHRIELSFAKKITRKLGIPHTIQKLKPELFLGSSLTQKSIKVPKNSLGKDEIPNTYVPGRNILFLSFATSLAEGTGSDSIYIGVNAMDYSGYPDCRPEFIKMFEMAIQLGTKKGSQGSPLKIITPLQNLSKKEIVLLGSKLNVPFHLTFSCYDPQNGKACGKCDACLLRKKGFQETGVSEK

SEQ ID NO: 39270 - protein, 238 aa, unidentified
  source 1..238: note = Leptospira terpstrae
  REGION 1..238: note = tr|N1VWQ4|N1VWQ4_9LEPT 7-cyano-7-deazaguanine synthase OS=Leptospira terpstrae serovar Hualin str. LT 11-33 = ATCC 700639 OX=1257025 GN=queC PE=3 SV=1
MSSKSSGAVVLLSGGLDSTTCLYEALEEYGYPKVKKPPILAISFHYSQKHIIELKKSKLITNRLGIRHVVQKLDPGFFLGSSLTEKKIKVRKNAKSLLTGEEKEIPNTYVPGRNILFLSFAISLAEGHGYDSVYIGVNALDYSGYPDCRPEFIRAYQSMVNLGTKTGVTGEHSIQIKTPLLTMSKKEIIQRALELQVPLKDTHSCYDPVRGKPCGKCDSCLLRNKGFAELGMTDPSLG

SEQ ID NO: 39271 - protein, 239 aa, unidentified
  source 1..239: note = Leptospira tipperaryensis
  REGION 1..239: note = tr|A0A1D7V151|A0A1D7V151_9LEPT 7-cyano-7-deazaguanine synthase OS=Leptospira tipperaryensis OX=2564040 GN=queC PE=3 SV=1
MNSDKIKNPNRKKSDSKLKSSNNKAVVLLSGGLDSTTCLYQAIADGKEVQALSFDYGQRHRIELTYAKKITRKLGIPHTIQKLKPELFLGSSLTQKSIKVPKNSLGKDEIPNTYVPGRNILFLSFATSLAEGTGSDSIYIGVNAMDYSGYPDCRPEFIKMFEMAIQLGTKKGSQGSPLKIITPLQNLSKKEIVLLGSKLNVPFHLTFSCYDPQNGKACGRCDACLLRKKGFQETGVSEK

SEQ ID NO: 39272 - protein, 241 aa, unidentified
  source 1..241: note = Leptospira vanthielii
  REGION 1..241: note = tr|N1WDU0|N1WDU0_9LEPT 7-cyano-7-deazaguanine synthase OS=Leptospira vanthielii serovar Holland str. Waz; Holland = ATCC 700522 OX=1218591 GN=queC PE=3 SV=1
MATKSRGAVILLSGGLDSTTCLYIAAKDYGYPKDKKLPLLALSFDYSQKHKIELQKSKKIAKLLGIKHVIQKLDPGFFLGSSLTEKKIKVRKNAKSLLSGAEKEIPNTYVPGRNILFLSFALSLAEGHGFDSIYIGVNALDYSGYPDCRPEFIKAFQKMANLGTKKGVSEKGNSIQIKTPLLHSNKKDIVLKAMEVGAPIHLTHSCYDPIQGKPCGKCDSCILRAKGFLEAGFLDPAISIR

SEQ ID NO: 39273 - protein, 241 aa, unidentified
  source 1..241: note = Leptospira vanthielii
  REGION 1..241: note = tr|A0A4R9LF38|A0A4R9LF38_9LEPT 7-cyano-7-deazaguanine synthase OS=Leptospira vanthielii; OX = 293085 GN=queC PE=3 SV=1
MATKSRGAVILLSGGLDSTTCLYIAAKDYGYPKDKKLPLLALSFDYSQKHKIELQKSKKIAKLLGIKHVIQKLDPGFFLGSSLTEKKIKVRKNAKSLLSGAEKEIPNTYVPGRNILFLSFALSLAEGHGFDSIYIGVNALDYSGYPDCRPEFIKAFQKMANLGTKKGVSEKGNSIQIKTPLLHSNKKDIVLKAMEVGAPIHLTHSCYDPIQGKPCGKCDSCILRAKGFLEAGLLDPAISIR

SEQ ID NO: 39274 - protein, 244 aa, Leptospira weilii
  REGION 1..244: note = tr|M6FG38|M6FG38_9LEPT 7-cyano-7-deazaguanine synthase OS=Leptospira weilii str. 2006001855 OX=996804; GN = queC PE=3 SV=1
MSKNLETNPKKTRKEKNDKTKPSKDKNNKAVVLLSGGLDSTTCLYQAVSDGKKVQALSFDYGQRHKIELSYAKKIARKLGIPHTIQKLKPELFLGSSLTQKSIRVPKNSLGKDEIPNTYVPGRNILFLSFAVSLAEGTGSDSIYIGVNAMDYSGYPDCRPEFIKMYEMAIQLGTKKGSQGSPIKIVTPLQNLSKKEIVLLGQKLKVPFHLTFSCYDPQNGKACGKCDACILRKKGFQETGVSEK

SEQ ID NO: 39275 - protein, 244 aa, Leptospira weilii
  REGION 1..244: note = tr|M3GYV0|M3GYV0_9LEPT 7-cyano-7-deazaguanine synthase OS=Leptospira weilii serovar Topaz str. LT2116; OX = 1088540 GN=queC PE=3 SV=1
MRGSFLNSRENKNSNQKNSDPSLEPANDKAVVLLSGGLDSTTCLYQAIADGKKIQALSFDYGQRHKIELSYAKKITRQLGISHAIQKLKPELFLGSSLTQKSLRVPKNSLGKEEIPNTYVPGRNILFLSFAVCLAEGTGSSSIYIGVNAMDYSGYPDCRPEFIKMYETAIQLGTKKGSQGSPIKIVAPLQNLSKKEIVLLGSRLQVPFHLTFSCYDPKNGKACGRCDACLLRKKGFQETGVSEK

SEQ ID NO: 39276 - protein, 238 aa, Leptospira wolbachii
  REGION 1..238: note = tr|R8ZZR4|R8ZZR4_9LEPT 7-cyano-7-deazaguanine synthase OS=Leptospira wolbachii serovar Codice str. CDC; OX = 1218599 GN=queC PE=3 SV=1
MSTKSKGAVVLLSGGLDSTTCLYEALQEYGYPKVKKPPILAISFNYSQKHIIELKKSKLITSRLGIPHVVQKLDPEFFLGSSLTEKKLKVRKNAGKILDSNSTEIPNTYVPGRNILFLSFAISLAEGHGYDSVYIGVNALDYSGYPDCRPEFIRAYQAMVNLGTKTGVTGDHSIQIKTPLLTMSKKEIIQRALELQVPLKDTHSCYDPVRGKPCGKCDSCLLRNKGFAELGMTDPSLG

SEQ ID NO: 39277 - protein, 233 aa, Leptospira wolffii
  REGION 1..233: note = tr|S3UZT5|S3UZT5_9LEPT 7-cyano-7-deazaguanine synthase OS=Leptospira wolffii serovar Khorat str. Khorat-H2 OX=1193069 GN=queC PE=3 SV=1
MATPRKSNGVRNSSALPKAVVLFSGGLDSTTCLYQCIEDGYSPTALSFDYNQRHREELKSAKKIAKLLQVPHMIQKLQPEFFLGSSLTERRIKVPKNALGDKKIPNTYVPGRNILFLSFGVSLAEGIGAERLYIGVNALDYSGYPDCRPEFIRAYAEAVRLGTKMGAEGRPLEIRTPLQHLDKKEIVLLGSKLGVPFSLTHSCYDPIQGKPCGKCDSCLLRKKGFQEAGIPEK

SEQ ID NO: 39278 - protein, 233 aa, Leptospira wolffii
  REGION 1..233: note = tr|A0A2M9ZDY9|A0A2M9ZDY9_9LEPT 7-cyano-7-deazaguanine synthase OS=Leptospira wolffii; OX = 409998 GN=queC PE=3 SV=1
MATPRKSNGVRNSSALPKAVVLFSGGLDSTTCLYQCIEDGYSPTALSFDYNQRHKEELKSAKKIAKLLQVPHMIQKLQPEFFLGSSLTERRIKVPKNALGDKKIPNTYVPGRNILFLSFGVSLAEGIGADRLYIGVNALDYSGYPDCRPEFIRAYAEAVRLGTKMGAEGRPLEIQTPLQHLDKKEIVLLGSKLGVPFSLTHSCYDPIQGKPCGKCDSCLLRKKGFQEAGIPEK

SEQ ID NO: 39279 - protein, 250 aa, unidentified
  source 1..250: note = Leptospira yanagawae
  REGION 1..250: note = tr|A0A4R9IZM4|A0A4R9IZM4_9LEPT 7-cyano-7-deazaguanine synthase OS=Leptospira yanagawae; OX = 293069 GN=queC PE=3 SV=1
MGPVSDSSLGSKSKKKGAVVLLSGGLDSTTCLYVAAKEFGYPKTKNLPLLALSFDYSQKHKIELTKSKKIAKTLGIKHVIQKLDPGFFLGSSLTEKKIKVRKNAKSLFSGDETEIPNTYVPGRNILFLSFALSLAEGHGYDSIYIGVNALDYSGYPDCRPEFIESYQKMANLGTKKGVTGAGDSIQIKTPLLHLGKKEIIELGMEVGAPLYLTHSCYDPIKGKPCGKCDSCILRAKGFLELGLEDPALNS

SEQ ID NO: 39280 - protein, 250 aa, unidentified
  source 1..250: note = Leptospira yanagawae
  REGION 1..250: note = tr|A0A5E8HEB7|A0A5E8HEB7_9LEPT 7-cyano-7-deazaguanine synthase OS=Leptospira yanagawae serovar Saopaulo str. Sao Paulo = ATCC 700523 OX=1249483; GN = queC PE=3 SV=1
MGPVSDSSLGSKSKKKGAVVLLSGGLDSTTCLYVAAKEFGYPKTKNLPLLALSFDYSQKHKIELTKSKKIAKTLGIKHVIQKLDPGFFLGSSLTEKKIKVRKNAKSLFSGDETEIPNTYVPGRNILFLSFALSLAEGHGYDSIYIGVNALDYSGYPDCRPEFIESYQKMANLGTKKGVTGAGDSIQIKTPLLHLGKKEIIELGMEVGAPLHLTHSCYDPIKGKPCGKCDSCILRAKGFLELGLEDPALNS

SEQ ID NO: 39281 - protein, 239 aa, unidentified; identical to SEQ ID NO: 39209
  source 1..239: note = Leptospira yasudae
  REGION 1..239: note = tr|A0A418ABF3|A0A418ABF3_9LEPT 7-cyano-7-deazaguanine synthase OS=Leptospira yasudae; OX = 2202201 GN=queC PE=3 SV=1

SEQ ID NO: 39282 - protein, 221 aa, unidentified
  source 1..221: note = Leptospiraceae bacterium
  REGION 1..221: note = tr|A0A357J1T5|A0A357J1T5_9LEPT 7-cyano-7-deazaguanine synthase OS=Leptospiraceae bacterium OX=2026757 GN=queC PE=3 SV=1
MVLLSGGLDSATTLYYALSRDLSVYTLSFDYGQRHSVELESARKIAAEAGVPHTILTLDTQIFQQSALTDVSIDIPQDRDESAMSSSIPVTYVPGRNILFLSFGLSYCESRNLDSIFIGANAVDYSGYPDCRPQFIEAFQQMANIGTRAGDEGHPIKIEAPLINMTKAEIISMGIKLGVDYSLTSSCYQPSSSGKPCGRCDSCLLRAQGFAAAGVPDPLTA

SEQ ID NO: 39283 - protein, 218 aa, unidentified
  source 1..218: note = Leptospiraceae bacterium
  REGION 1..218: note = tr|A0A2E5S075|A0A2E5S075_9LEPT 7-cyano-7-deazaguanine synthase OS=Leptospiraceae bacterium OX=2026757 GN=queC PE=3 SV=1
MSGGLDSATTLYHALSRGLRAYALSFDYGQRHSVELESARRIAAATGVEHAIISLDTQIFQKSALTDVSIDIPQDRDERSMSSSIPVTYVPGRNILFLSFGVSYCESRNLGSIFIGANAVDYSGYPDCRPEFIQAFQSMASIGTRAGDEGHPIKIEAPLIHMTKAQIISLGLELGVDYSLTSSCYQPADKGKPCGRCDSCILRAHGFAAAGVPDPLTA

SEQ ID NO: 39284 - protein, 241 aa, Leptospirillum ferriphilum
  REGION 1..241: note = tr|A0A059XS11|A0A059XS11_9BACT 7-cyano-7-deazaguanine synthase OS=Leptospirillum ferriphilum YSK OX=1441628 GN=queC PE=3 SV=1
MLHRDPDEIENQKAGGKGSVVLVSGGMDSAVTAAMAIRESPRVAFLHVRYGARAQDSEERAFRNIARHWGVDRVQVIDLAPLGALGGSALTDRSMEVPAANPDAPGIPSTYVPFRNAHFLAIATSWCEVLKFDRIWIGAVEEDSSGYPDCRRIFYDAFEVAIRLGTRPGTGIRIMTPVIHLNKGEIVSEGVRLGVPFEHTWSCYREGTRACGRCDSCALRLRGFSRAGIRDPLEYEISETP

SEQ ID NO: 39285 - protein, 241 aa, Leptospirillum ferriphilum
  REGION 1..241: note = tr|A0A1V3SUQ9|A0A1V3SUQ9_9BACT 7-cyano-7-deazaguanine synthase OS=Leptospirillum ferriphilum OX=178606 GN=queC PE=3 SV=1
MLHRDPDEIENQKAGGKGSVVLVSGGMDSAVTAAMAIRESPRVAFLHVRYGARAQDSEERAFRNIARHWGVDRVQVIDLAPLGALGGSALTDRSMEVPAANPDAPGIPSTYVPFRNAHFLAIATSWCEVLKFDRIWIGAVEEDSSGYPDCRRIFYDAFEEAIRLGTRPGTGIRIMTPVIHLNKGEIVSEGVRLGVPFEHTWSCYREGTRACGRCDSCALRLRGFSRAGIRDPLEYEISETP

SEQ ID NO: 39286 - protein, 229 aa, unidentified
  source 1..229: note = Leptospirillum ferrodiazotrophum
  REGION 1..229: note = tr|C6HYH6|C6HYH6_9BACT 7-cyano-7-deazaguanine synthase OS=Leptospirillum ferrodiazotrophum OX=412449; GN = queC PE=3 SV=1
MATGGRGVVLVSGGMDSAVTAALARKECDFLGFLHVRYGGRTQRREEQSFRALCDHFRPDRTLITDAPSLAAVGGSALTDGNLEIPEGDLERTGIPVTYVPFRNAHFLSVAVSWAEVLSCDRIYIGAVEEDSSGYPDCRRSFYDAFEQAARLGTAMEMEGSSLSIVTPVIHMDKGEIVRTGLSLSVPFALTWSCYREGEKACGHCDSCLLRLRGFSRAGVSDPLPYDLS

SEQ ID NO: 39287 - protein, 228 aa, Leptospirillum ferrooxidans
  REGION 1..228: note = tr|I0IKD9|I0IKD9_LEPFC 7-cyano-7-deazaguanine synthase OS=Leptospirillum ferrooxidans (strain C2-3); OX = 1162668 GN=queC PE=3 SV=1
MSRLKSSGAVVLVSGGMDSAVTAAIALSENERVSFLHIRYGARAQRREESAFRALCQFWNVTDFQVTDLPSLSSFGGSALTDSSISLPEGSLDREGIPVTYVPFRNAHFLATATSLAEIKGANRIYIGAVEEDSSGYPDCRRVFYDAFTEAIRQGTKPDADISIVTPVITFRKSRIVQEGLRLGVPFIHTWSCYQGVTDACGHCDSCLLRLRGFSEAGVSDPLEYLKK

SEQ ID NO: 39288 - protein, 241 aa, Leptospirillum sp.; identical to SEQ ID NO: 39285
  REGION 1..241: note = tr|A0A0K0WJB4|A0A0K0WJB4_9BACT 7-cyano-7-deazaguanine synthase OS=Leptospirillum sp. Group II 'CF-1' OX=1660083 GN=queC PE=3 SV=1

SEQ ID NO: 39289 - protein, 241 aa, Leptospirillum sp.
  REGION 1..241: note = tr|B6AMY1|B6AMY1_9BACT 7-cyano-7-deazaguanine synthase OS=Leptospirillum sp. Group II '5-way CG'; OX = 419541 GN=queC PE=3 SV=1
MLLRDPDDTEKQKAGGKGSVVLVSGGMDSAVTAAMAIRESPRIAFLHVRYGARAQDSEERAFRNIARHWGVDRVQVVDLAPLGVLGGSALTDRSMEVPAANPDAPGIPSTYVPFRNAHFLAIATSWCEVLKFDRIWIGAVEEDSSGYPDCRRIFYDAFEEAIRLGTRPGTGIRIMTPVIHLNKGEIVSEGIRLGVPFEHTWSCYREGTRACGRCDSCALRLRGFSRAGIRDPLEYEVSGTL

SEQ ID NO: 39290 - protein, 235 aa, Leptothrix cholodnii
  REGION 1..235: note = sp|B1Y8J4|QUEC_LEPCP 7-cyano-7-deazaguanine synthase; OS = Leptothrix cholodnii (strain ATCC 51168 / LMG 8142 / SP-6) OX=395495 GN=queC PE=3 SV=1
MNRDSRTALVLFSGGQDSTTCLAWALTRFAHVETLAFDYGQRHRIELDCRLTVLAQLREQFPDWAERLGADHLLDLSLLAQISDTALTTEREIELQANGLPNTFVPGRNLLFLGMAATLAYRRSASVLVGGMCETDYSGYPDCRDNTLKALQVALSLGLAAPMTIETPLMFLTKAQTWTLAEDLGGAPLVELITEHTHTCYLGERGQRHAWGHGCGHCPACELRHAGHAAWLGGR

SEQ ID NO: 39291 - protein, 235 aa, Leptothrix mobilis
  REGION 1..235: note = tr|A0A4V2EW58|A0A4V2EW58_9BURK 7-cyano-7-deazaguanine synthase OS=Leptothrix mobilis; OX = 47994 GN=queC PE=3 SV=1
MSRDPRTALVLFSGGQDSTTCLAWALDRYARVETVAYDYGQRHRIELDCRLTVRAEIRRRFPDWADRLGDDHLLDLSVLGQVGDSALTVEREIALQADGLPNTFVPGRNLLFLTLAGALAYRRGASVLVGGMCETDYSGYPDCRDNTLKALQVALSLGLATPMTLETPLMFLTKAQTWTLAEDLGGTALVELLVEHSHTCYLGERGQRHPWGYGCGHCPACALRAAGHAAWLSGR

SEQ ID NO: 39292 - protein, 235 aa, unidentified
  source 1..235: note = Leucothrix pacifica
  REGION 1..235: note = tr|A0A317C609|A0A317C609_9GAMM 7-cyano-7-deazaguanine synthase OS=Leucothrix pacifica; OX = 1247513 GN=queC PE=3 SV=1
MKAMIVCSGGLDSVTLAYKVAAEGSLTSLVSFQYGQRHDKELGYAARCAEHFGVPHHIIDISNVGAQLTGSALTDDVDVPDGHYAEDSMKLTIVPNRNAIMLTIAYGMAASQGADTVAIAVHGGDHFIYPDCRPDFIEQFAKMQKMALDGYADIDIYAPFLHGSKADIAAAGAALNVPFEDTWSCYKGGEKHCGKCGTCVERAEAFHEAGVVDPTDYEDPDFWRTAVAAHDSGAA

SEQ ID NO: 39293 - protein, 235 aa, Leucothrix sp.
  REGION 1..235: note = tr|A0A317C948|A0A317C948_9GAMM 7-cyano-7-deazaguanine synthase OS=Leucothrix sp. IMCC9719; OX = 1481894 GN=queC PE=3 SV=1
MKAIIVCSGGLDSVTLAYKVAVEAEITSLVSFNYGQRHDKELNYAALCAKDLNVPHHVVDISHVGAQLTGSALTDDIDVPDGHYAEDSMKVTVVPNRNAIMLTIAYGMAASQNADTVAIAVHGGDHFIYPDCRPDFIEQFAKMQKMAMDGYADVSIYAPFLHGTKGDIVTAGTAINVPYKNTWSCYKGGDKHCGRCGTCVERAEAFYDAGVTDPTDYADSDFWQNAVKQRAEAEA

SEQ ID NO: 39294 - protein, 197 aa, Lewinella sp.
  REGION 1..197: note = tr|A0A5C7FDI8|A0A5C7FDI8_9BACT 7-cyano-7-deazaguanine synthase OS=Lewinella sp. SSH13; OX = 2602767 GN=FUA23_18290 PE=3 SV=1
MNNKLLLLSGGMDSIAVAHWKKPKYAVTIDYGQKPAKAEISAAKSVCATLKIEHFVINANCSDLGSGDLSDNPQISVGPVSEWWPYRNQLLLTLAAMKALHLDVKQLIIGSVSTDSIHVDGTLEFYREINELISMQEGNLIVETPAISMTTTELIKTSKVPYSTLLYAHSCHKSNHPCMHCRGCQKYLYNIQQLELD

SEQ ID NO: 39295 - protein, 1376 aa, Lewinella sp.
  REGION 1..1376: note = tr|A0A180EKE8|A0A180EKE8_9BACT Carrier domain-containing protein OS=Lewinella sp. 4G2 OX=1803372; GN = A3850_003800 PE=4 SV=1
MKGAGYQELTKGQQVLWAGQQLAWGQPLYNMAFAFHLRGPLDVARFNGAFNQLCAASDAMRTVFTTVDGRPQQRVLPTAPRQLAILRAEDIDGNLEDYLRARTQTVFPLDRYAYDAAVIKVSEEEHIFFLNQHHLITDAWGISVQYRLLREFYLGAAAGAGLGGQVNKTSPPSYGGYLERERTRAQQEPSSYWAEQPNPGKPTLYGRRPQQTVTASNRTTVLLGAERQQKLEALLTQANIKHWTRDLTLFNVLATLVFAYLSRVVEEQTLTIGTPAHNRTNRKSQDTPGCFIEVLPLTVEVTPGRNFLSLLETVRTQTNAFLAEARPGLVTPDLLRSVGVILNYIHVKFGDFTEDISARTEWIHPGHADAAHQVRVQAYDFGNGDGLRLELDLNADIFPDGGDHVATEILALLDAFLEDPSRTIAAVPLADGSAMEAGPIRTEAPGLVPDLFSSRALSHPETLALDFAGGELSYGDLERQSEQLAHFLRGRVNGGNVAVHLPRGPELFVALFGCWKAGLAYLPVPASTPAQRGTTLLEQGEARFVLTVASLTEVTAGVGVPTLQLDTDWGLVSATRPTTDLPAVKATDPAYVMFTSGSTGTPKGVVISHGALANYVAYARETYVTVPAPAFPLFTMIGFDLTVTSLFTPLTCGGHVLIYEEPPAGQPDLALFRVLDDNRSDVIKLTPSHLALLSGRQYPEALVSTLIVGGENFRWGLAVETAQTFPAGVKIYNEYGPTEATVGCIVHQFDIGAPPQPSVPIGRAIPGTFAVILDEYGHPSPPGVSGELYLGGSGLAKAYYGDAERTAERFVHYAGVPGERLYRTGDVARRHRNGDLVFLGRADRQVKWRGFRIELNEVEAALATHPAVSNVAVEMVDARQTGMRKEAHYCTKCGLPANYPSAVFDEAGVCQLCLGFEDYQKQVQHYFRTKEDLRQLFTPQPSAGAAEYDCIMLLSGGKDSTYALGQLVQMGLKVLAFTLDNGYISQQALANVRRVAAALGVDCHVGSTPAMNAIFTDSLHRHCNVCNGCFKTIYTLSTQLALEKNIPYIVTGLSRGQFFETRLTEELFLNGNSGKDIDAAILEARKVYHQADDAVKQLLDTSMFDDAAVFDRVQFIDFYRYTDVTLDEMLRDLDERLPWDRPTDTGRSTNCLINQLGIYVHKKEKGYNNYAFPYSWDVRVGHKQRNAALEEINEEVDEREVKRMMREIGYSNAQENLENRHLVAYYTAEDGVSADELRRYLAERLPDYSLPSHFVAIPSMPLTPNGKVDRKALLAAEEIRGEVAVATYVAPEGEFEEMLAEIWGDVLNLEQISATEKFLDLGGHSLTAIRLAARIQDTFELEVPIPVVFSHPTIKEQAIYLESTIEALLAEMEVDE

SEQ ID NO: 39296 - protein, 240 aa, unidentified
  source 1..240: note = Liberibacter asiaticus
  REGION 1..240: note = tr|C6XGK1|C6XGK1_LIBAP 7-cyano-7-deazaguanine synthase OS=Liberibacter asiaticus (strain psy62); OX = 537021 GN=queC PE=3 SV=1
MNDIIKKAPSALLLFSGGQDSSTCLSWALDRFDRVETLSFDYGQRNKVELECRLCVRKKIVELMPKWKDSLGEDHILPLAILGDISHSSLTKNVAMKIQDNNLPNTFVPGRNIIFLVFAATLAYRLGITNIVIGVCETDYSGYPDCRHDTIRAIETAINLGMESHVTVHTPLMWLKKYETWKLAQDIGGQDLVNLILEESHTCYLGKRDKRYEWGYGCNSCPACYLRQKGWMEFKEKYQD

SEQ ID NO: 39297 - protein, 238 aa, unidentified
  source 1..238: note = Liberibacter crescens
  REGION 1..238: note = tr|L0EV75|L0EV75_LIBCB 7-cyano-7-deazaguanine synthase OS=Liberibacter crescens (strain BT-1) OX=1215343; GN = queC PE=3 SV=1
MDGALVLFSGGQDSSTCLAWALNQFDVVETLAFDYGQRNLIELECRIRLRDRIISLNPDWKNRLGKDHFLPLKTLGALSETALTRDIPIKTEENGLPNTFVPGRNLIFLIFAAALAYRRNIRNIVVGVCETDYSGYPDCRNETIQALQTAINLGMDNDFTLHTPLMWIDKSATWDLAYQIGGKALVELIIEESHTCYLGKRGQRHAWGYGCGTCLACKIREKGWTKYTISKQNCQPLS

SEQ ID NO: 39298 - protein, 243 aa, unidentified
  source 1..243: note = Liberibacter solanacearum
  REGION 1..243: note = tr|E4UAY1|E4UAY1_LIBSC 7-cyano-7-deazaguanine synthase OS=Liberibacter solanacearum (strain CLso-ZC1); OX = 658172 GN=queC PE=3 SV=1
MNNNREKTSSALLLFSGGQDSSTCLSWALDKFDKVETLSFDYGQRNKVELECRLRLREKIVQLTPKWKDSLGADHILPLATLGDISHSSLTKNIEIKIQENNLPNTFVPGRNIIFLVFAAALAYRRGITNIIAGMCEMDYSGYPDCRNETIKALEMTLNLGMESNFTIHTPLMHLKKHETWKLVQDIGGQNLVDLILEESHTCYLGTRDKRYEWGYGCNSCPSCNLRQKGWVEFKEKYQRTPT

SEQ ID NO: 39299 - protein, 228 aa, unidentified
  source 1..228: note = Lihuaxuella thermophila
  REGION 1..228: note = tr|A0A1H8C2B1|A0A1H8C2B1_9BACL 7-cyano-7-deazaguanine synthase OS=Lihuaxuella thermophila; OX = 1173111 GN=queC PE=3 SV=1
MKEKAVIVLSGGLDSTTCMGIARDRGYELYPITFFYNQRHHKEVEHAKRVAEHYGVADRHKVVNVSFLGEIGGSALTDETIAVRTSGVDEEIPETYVPARNLIFLSLAVAYGEVIGARTIYTGVNAVDYSGYPDCRPEFIRSLTETVNLATKMGVTSEQKIKIETPLIHLTKADIIRIGLALKVPYELTTSCYQGEEEACGVCDSCLLRLKGFAENNAVDPIPYKSIS

SEQ ID NO: 39300 - protein, 232 aa, unidentified
  source 1..232: note = Limimaricola cinnabarinus
  REGION 1..232: note = tr|A0A2G1MH49|A0A2G1MH49_9RHOB 7-cyano-7-deazaguanine synthase OS=Limimaricola cinnabarinus OX=1125964 GN=queC PE=3 SV=1
MKTYVICSGGLDSVSLAHKVAAEHELAGLISFDYGQRHSKELDFARACAERLGVPFHLIDMRGIGAHLTGSALTDDVEVPDGHYAEETMKSTVVPNRNAIMLTVAFGLAAAQKADAVATAVHGGDHFIYPDCRPEFTESFEAMQRHALDGYADIRLYTPFVRAPKSAIVTEGAKHDTPFAETWSCYKGGEKQCGRCGTCVERREAFHLAGVDDPTEYADPDYWAEAVKKGAN

SEQ ID NO: 39301 - protein, 232 aa, unidentified
  source 1..232: note = Limimaricola cinnabarinus
  REGION 1..232: note = tr|U2Z2Z4|U2Z2Z4_9RHOB 7-cyano-7-deazaguanine synthase OS=Limimaricola cinnabarinus LL-001 OX=1337093; GN = queC PE=3 SV=1
MKTYVICSGGLDSVSLAHKVAAENELAGLISFDYGQRHSKELDFARAAADRLDVPFHLIDMRSIGAHLSGSALTDDVEVPDGHYAEETMKTTVVPNRNAIMLAVAFGLAAAQKADAVATAVHGGDHFIYPDCRPAFTEAFDAMQKQALDGYADVTLYTPFVREPKSAIVTEGAKHGTPFAETWSCYKGGDKHCGRCGTCVERREAFHLAGVEDPTDYADPDFWLEAVARGAK

SEQ ID NO: 39302 - protein, 232 aa, unidentified
  source 1..232: note = Limimaricola hongkongensis
  REGION 1..232: note = tr|A0A017HDU3|A0A017HDU3_9RHOB 7-cyano-7-deazaguanine synthase OS=Limimaricola hongkongensis DSM 17492 OX=1122180 GN=queC PE=3 SV=1
MKTYVICSGGLDSVSLAHKVAAEHELAGLISYDYGQRHAKELDFARACAERLGVPFHLIDMRGVGAHLTGSALTDDVDVPDGHYAEETMKSTVVPNRNAIMLAVAFGLAAAQKADAVATAVHGGDHFIYPDCRPEFTQAFEAMQKQALDGYADIRLYTPFVHEPKSAIVTAGAQHGTPFAETWSCYKGNDLHCGRCGTCVERREAFHLAGVEDPTTYADPDYWIEAIEKGAN

SEQ ID NO: 39303 - protein, 232 aa, unidentified
  source 1..232: note = Limimaricola soesokkakensis
  REGION 1..232: note = tr|A0A1X6YZ97|A0A1X6YZ97_9RHOB 7-cyano-7-deazaguanine synthase OS=Limimaricola soesokkakensis OX=1343159 GN=queC PE=3 SV=1
MKTYVICSGGLDSVSLAHKVAAENELAGLISFDYGQRHSKELDFARAAAERLGVPFHLIDMRSIGAHLSGSALTDDVEVPDGHYAEDTMKTTVVPNRNAIMLTVAFGLAAAQKADAVATAVHGGDHFIYPDCRPAFTEAFDAMQRQALDGYADVRLYTPFVHEPKSAIVTEGAKHGTPFAETWSCYKGGDLHCGRCGTCVERREAFHLAGVADPTEYADPDFWVEAVARGAK

SEQ ID NO: 39304 - protein, 238 aa, unidentified
  source 1..238: note = Limimonas halophila
  REGION 1..238: note = tr|A0A1G7R6N4|A0A1G7R6N4_9PROT 7-cyano-7-deazaguanine synthase OS=Limimonas halophila; OX = 1082479 GN=queC PE=3 SV=1
MRDDAALLLFSGGQDSATCLAWALTRFAHVETVGFAYGQRHDVEMRCREDVRAAVPASLDADAGTLGEDHLVEASGLAQVAESALTSERAIEMADDGLPSTFVPGRNLIFLTYAAALGYRRGLRHLVGGMCETDYSGYPDCRDDTVKAMQVALNLGMAARFVLHTPLMWRDKAATWALAEQLGGGELVETIRVRTHTCYRGDRSVEHAWGYGCGTCPACELRAEGWRRYRAGEATDGV

SEQ ID NO: 39305 - protein, 234 aa, Limnobacter sp.
  REGION 1..234: note = tr|A0A151QG59|A0A151QG59_9BURK 7-cyano-7-deazaguanine synthase OS=Limnobacter sp. CACIAM 66H1 OX=1813033 GN=queC PE=3 SV=1
MNKKALVLFSGGQDSTVCLAWALSKFEHVETIGFDYGQRHRIELECRLTVLERVREQFPEWAHKLGEDRVINLSWLGQISDCALTEEREIELNETGLPNTFVPGRNLVFFLISSAVAYRRGLSTLVGGMCQTDFSGYPDCREDTLKALQVATNLGMAGSFRFETPLMWIDKTETFQLGEQLGGKKLLEIIVRDTHTCYTGDRSHKHDWGFGCGECPACDLRKRGWNNYISQQNQ

SEQ ID NO: 39306 - protein, 234 aa, Limnobacter sp.
  REGION 1..234: note = tr|A0A520TI53|A0A520TI53_9BURK 7-cyano-7-deazaguanine synthase OS=Limnobacter sp.; OX = 2003368 GN=queC PE=3 SV=1
MNKKALVLFSGGQDSTVCLAWALSKFEHVETIGFDYGQRHRIELECRLTVLDRVREQFPEWAQKLGEDRVIDLSWLGQISDCALTEEREIELNETGLPNTFVPGRNLVFFLISSAVAYRRGLSTLVGGMCQTDFSGYPDCREDTLKALQVATNLGMASSFRFETPLMWIDKTETFQLGEQLGGKKLLEIIVRDTHTCYTGDRSHEHEWGFGCGECPACDLRKRGWKNYISQQNQ

SEQ ID NO: 39307 - protein, 229 aa, unidentified
  source 1..229: note = Limnobaculum parvum
  REGION 1..229: note = tr|A0A2Y9U2E9|A0A2Y9U2E9_9ENTR 7-cyano-7-deazaguanine synthase OS=Limnobaculum parvum; OX = 2172103 GN=queC PE=3 SV=1
MKRAVVVFSGGQDSTTCLIQALTQYDEVHCVTFDYGQRHQAEIEVAKSLAKQLGVTAHKVMDVGLLNQLAISSLTRDNIPVPTHVDDGIPNTFVPGRNILFLTLAAIYAYQIKAQAVITGVCETDFSGYPDCRDEFVKALNHAVALGMDYPVSFETPLMWLNKSETWALADYYGQLALIRHQTLTCYNGIQGDGCGECPACHLRANGLKTYQDNHQQVMAQLKRKLTLK

SEQ ID NO: 39308 - protein, 237 aa, Limnohabitans curvus
  REGION 1..237: note = tr|A0A315ETZ8|A0A315ETZ8_9BURK 7-cyano-7-deazaguanine synthase OS=Limnohabitans curvus; OX = 323423 GN=queC PE=3 SV=1
MHRNALVLFSGGQDSTTCLAHALAQYERVETLAFDYRQRHLVELEARLQVLAQVRAQFPQWANKLGEDHLLDLGVLGQVSETSLTRDMAFKMEASGLPNTFVPGRNLLFLTLAAALAYRRDLDVIVTGVCETDFSGYPDCRDDTMKAMQIALSLGMDRRLLIETPLMWIDKAQTWQLAYDLGQKAHADGGDQLVDLIVEHTHTCYMGDRTHRHNWGYGCGTCPACDLRAKGWERWKA

SEQ ID NO: 39309 - protein, 239 aa, Limnohabitans parvus
  REGION 1..239: note = tr|A0A315EDQ7|A0A315EDQ7_9BURK 7-cyano-7-deazaguanine synthase OS=Limnohabitans parvus II-B4 OX=1293052 GN=queC PE=3 SV=1
MHTSALVLFSGGQDSTTCLAHALSRYERVETLAFDYGQRHKVELDARLNVLAAIKARFPQWAPKMGEDHLLDAGILGQISETSLTRDTAIEMESSGLPNTFVPGRNLLFLTLAGALAYRRGLQVIVTGVCETDFSGYPDCRDDTMKAMQVALSLGMDRKLLIETPLMWIDKAQTWQLAHDLGQKVDPAQGGQALVDLIVEHTHTCYLGDRTQRHDWGYGCGQCPACQLRAAGFARYAKP

SEQ ID NO: 39310 - protein, 239 aa, Limnohabitans planktonicus
  REGION 1..239: note = tr|A0A2T7UCA8|A0A2T7UCA8_9BURK 7-cyano-7-deazaguanine synthase OS=Limnohabitans planktonicus II-D5 OX=1293045 GN=queC PE=3 SV=1
MHTSALVLFSGGQDSTTCLAHALNRYERVETLAFDYGQRHKVELDARLNVLAAIKSRFPQWATKMGEDHLLDAGILGQISETSLTRDTAIVMETSGLPNTFVPGRNLLFLTLAAALAYRRGLQVIVTGVCETDFSGYPDCRDDTMKAMQVALSLGMDRRLLIETPLMWIDKAQTWQLAHDLGQKADADGGGQALVDVIVEHSHTCYLGERTQRHDWGYGCGQCPACQLRAAGFGRWTSR

SEQ ID NO: 39311 - protein, 239 aa, Limnohabitans sp.
  REGION 1..239: note = tr|A0A2M6VYY1|A0A2M6VYY1_9BURK 7-cyano-7-deazaguanine synthase OS=Limnohabitans sp. 15K; OX = 1100706 GN=queC PE=3 SV=1
MHTSALVLFSGGQDSTTCLAHALSRYERVETLAFDYGQRHKVELDARLNVLAAIKVRFPQWAPKMGEDHLLDAGILGQISETSLTRDTAIEMESTGLPNTFVPGRNLLFLTLAAALAYRRGLQVIVTGVCETDFSGYPDCRDDTMKAMQVALSLGMDRKLLIETPLMWIDKAQTWQLAHDLGQKADPAQGGQALVDLIVEHTHTCYLGDRTQRHDWGYGCGQCPACQLRAAGFARFQKS

SEQ ID NO: 39312 - protein, 239 aa, Limnohabitans sp.
  REGION 1..239: note = tr|A0A2M6VFB1|A0A2M6VFB1_9BURK 7-cyano-7-deazaguanine synthase OS=Limnohabitans sp. G3-2; OX = 1100711 GN=queC PE=3 SV=1
MHTSALVLFSGGQDSTTCLAHALSRYDRVETLAFDYGQRHKVELDARLNVLAAIKAHFPQWASKMGEDHLLDAGILGQISETSLTRDTAIEMESSGLPNTFVPGRNLLFLTLAAALAYRRGLQVIVTGVCETDFSGYPDCRDDTMKAMQVALSLGMDRKLLIETPLMWIDKAQTWQLAHDLGQKAQPQGGGSALVDLIVEHSHTCYLGDRTQRHDWGYGCGQCPACQLRSAGFDRFQKA

SEQ ID NO: 39313 - protein, 229 aa, unidentified
  source 1..229: note = Limnoraphis robusta
  REGION 1..229: note = tr|A0A0F5Y7P7|A0A0F5Y7P7_9CYAN 7-cyano-7-deazaguanine synthase OS=Limnoraphis robusta CS-951 OX=1637645 GN=queC PE=3 SV=1
MKAVILLSGGLDSSTVLYQAKADGYECYAISFDYQQRHQRELTSAQQIAESAGIVEHQVVKFDLTLWGGSALTDRKIDLPRDRSLDQMSETIPITYVPARNTIFLSFALGYAETVNASRVYIGVNALDYSGYPDCRPDYIDAMQDVFRLGTKQGREGNPILIYSPLIHLKKTEIIQLGNQLGVPWEKTWSCYAGEEKACGVCDSCKLRLAAFQELGLTDPIPYIEGIVN

SEQ ID NO: 39314 - protein, 226 aa, unidentified; identical to SEQ ID NO: 36109
  source 1..226: note = Limnospira indica
  REGION 1..226: note = tr|H1WHY5|H1WHY5_9CYAN 7-cyano-7-deazaguanine synthase OS=Limnospira indica PCC 8005 OX=376219 GN=queC; PE = 3 SV=1

SEQ ID NO: 39315 - protein, 224 aa, unidentified
  source 1..224: note = Limnothrix rosea
  REGION 1..224: note = tr|A0A1Q4QZX6|A0A1Q4QZX6_9CYAN 7-cyano-7-deazaguanine synthase OS=Limnothrix rosea IAM M-220 OX=454133 GN=queC PE=3 SV=1
MKKAVVLLSGGLDSATSAAQAIADGFEVIALSFRYGQKHSRELDAAGNIATQLGIREHFVMDVNLSQWGGSSLTDAAQEIPKDGVQADVIPSTYVPGRNTVFLALALSLAEAKEAEAIYLGINAVDYSGYPDCRPEYLEAYQQLANLSSKAGIEGHAPQLVAPLVLDSKVEIVKKAIALGVDIAETWSCYQGSEKPCGLCDSCRIRDEALTQAGYPELTSQAKA

SEQ ID NO: 39316 - protein, 238 aa, unidentified
  source 1..238: note = Limnothrix sp.
  REGION 1..238: note = tr|A0A372DDN7|A0A372DDN7_9CYAN 7-cyano-7-deazaguanine synthase OS=Limnothrix sp. CACIAM 69d OX=1890733 GN=queC PE=3 SV=1
MPSARSPQCQPPKAVVLLSGGLDSSTVLYQAKADGCDCYALSFDYQQRHRRELQAAVAIAQAAGVAAHQVVRFDLTQWGGSALTDAALELPSDRPLDGMAAEIPITYVPARNTIFLSFALAYAEAIDAQRVYIGVNALDYSGYPDCRPDYLAAMQLVFQLGTRQGREGQPIEIVAPLVELRKTDIIELGNRLGVPWAETWSCYAGGDRSCGRCDSCRLRLAAFAELGLTDPVPYEAHG

SEQ ID NO: 39317 - protein, 225 aa, unidentified
  source 1..225: note = Limnothrix sp.
  REGION 1..225: note = tr|A0A1C0VAX4|A0A1C0VAX4_9CYAN 7-cyano-7-deazaguanine synthase OS=Limnothrix sp. P13C2; OX = 1880902 GN=queC PE=3 SV=1
MLLSGGLDSSTVLYQAKADGCDCYALSFDYQQRHRRELQAAVAIAQAAGVVAHQVVRFDLTQWGGSALTDNQLDLPSDRPLDGMATEIPITYVPARNTIFLSFALAYAEAIDAQRVYIGVNALDYSGYPDCRPDYLAAMQSVFQLGTRQGREGQPIEIVAPLVELRKTDIIELGNRLGVPWADTWSCYAGGDRSCGRCDSCRLRLAAFAELGLTDPVPYEVLPSQ

SEQ ID NO: 39318 - protein, 224 aa, unidentified
  source 1..224: note = Listeria booriae
  REGION 1..224: note = tr|A0A099WFV6|A0A099WFV6_9LIST 7-cyano-7-deazaguanine synthase OS=Listeria booriae; OX = 1552123 GN=queC PE=3 SV=1
MKMTNKKALVIFSGGQDSTTCLFQAIQDYGKENVEVITFFYGQRHAIELSKAKWIVRDLNVKQTVIDTSVIKQTTNNALMDDSMEISQGESEEYPNTFVDGRNALFLLLAGTYAKGQGITDIIIGVCETDFSGYPDCRDVFVKSMNVTLNLAMDFPFVVKTPLMYLTKAETWALADELGRLDYVREHTHTCYMGVDGGCGECPSCELREKGLTEYLAQKAGTAL

SEQ ID NO: 39319 - protein, 222 aa, unidentified
  source 1..222: note = Listeria cornellensis
  REGION 1..222: note = tr|W7BTU9|W7BTU9_9LIST 7-cyano-7-deazaguanine synthase OS=Listeria cornellensis FSL F6-0969 OX=1265820; GN = queC PE=3 SV=1
MTNKKALVVFSGGQDSTTCLFQAIQDYGKENVEVITFFYGQRHAIELEKAKWIVRDLNVKQTMIDTSVIKQTTNNALMDDSMEISQGESEEYPNTFVDGRNALFLLLAGTYAKGQGITDIIIGVCETDFSGYPDCRDVFVKSMNVTLNLAMDFPFVVKTPLMYLTKAETWALADELGRLDYVREHTHTCYMGVDGGCGECPSCLLREQGLKEYLAAKAGSAI

SEQ ID NO: 39320 - protein, 222 aa, unidentified
  source 1..222: note = Listeria grandensis
  REGION 1..222: note = tr|W7B6N3|W7B6N3_9LIST 7-cyano-7-deazaguanine synthase OS=Listeria grandensis FSL F6-0971 OX=1265819; GN = queC PE=3 SV=1
MTNKKALVVFSGGQDSTTCLFQAIQDYGKENVEVITFFYGQRHAIELEKAKWIVRDLNVKQTMIDTSVIKQTTNNALMDDSMEISQGESEEYPNTFVDGRNALFLLLAGTYAKGQGITDIIIGVCETDFSGYPDCRDVFVKSMNVTLNLAMDFPFVVKTPLMYLTKAETWALADELGRLDYVRDHTHTCYMGVDGGCGECPSCELREKGLTEYLAQKAGSAL

SEQ ID NO: 39321 - protein, 222 aa, Listeria rocourtiae
  REGION 1..222: note = tr|A0A4R6ZL20|A0A4R6ZL20_9LIST 7-cyano-7-deazaguanine synthase OS=Listeria rocourtiae; OX = 647910 GN=queC PE=3 SV=1
MTNKKALVIFSGGQDSTTCLFQAIQDYGKENVEVITFFYGQRHVIELEKAKWIVQDLNVKQTVIDTSVIKQTTNNALMDESLEISQGESEEYPNTFVDGRNALFLLLAGTYAKGQGITDIIIGVCETDFSGYPDCRDVFVKSMNVTLNLAMDYPFVVKTPLMYLTKAQTWALADDLGRLDYVREHTHTCYMGVDGGCGKCPSCELREKGLTEYLAQKAGSAI

SEQ ID NO: 39322 - protein, 224 aa, Listeria sp.
  REGION 1..224: note = tr|A0A3N9TSK8|A0A3N9TSK8_9LIST 7-cyano-7-deazaguanine synthase OS=Listeria sp. SHR_NRA_18; OX = 2269046 GN=queC PE=3 SV=1
MKMTNKKALVVFSGGQDSTTCLFQAIQDYGKENVEVITFFYGQRHVIELEKAKWIVQDLNVKQTVIDTSVIKQTTNNALMDESMEISQGKSEEYPNTFVDGRNALFLLLAGTYAKGQGITDIIIGVCETDFSGYPDCRDVFVKSMNVTLNLAMDYPFVVKTPLMYLTKAETWRLADELGRLDYVREHTHTCYMGVEGGCGECPSCELREKGLTEYLEQKAGSAI

SEQ ID NO: 39323 - protein, 224 aa, unidentified; identical to SEQ ID NO: 39322
  source 1..224: note = Listeriaceae bacterium
  REGION 1..224: note = tr|A0A099WAT8|A0A099WAT8_9LIST 7-cyano-7-deazaguanine synthase OS=Listeriaceae bacterium FSL A5-0209 OX=1497679 GN=queC PE=3 SV=1

SEQ ID NO: 39324 - protein, 616 aa, Litoreibacter janthinus
  REGION 1..616: note = tr|A0A1I6H0D9|A0A1I6H0D9_9RHOB 7-cyano-7-deazaguanine synthase (Queuosine biosynthesis); OS = Litoreibacter janthinus OX=670154 GN=SAMN04488002_2255; PE = 4 SV=1
MVGVAPQPEYRVKCLPPITFGGGDERLIFEVNGRRKGVSLKIRQLSRQLVAALPDRALDLIEIAALVYAVDASVSRGGLTDQHMGAKWHRRFLIEMPVLDLSLWTSPDLQRDLEETLMFLSGDKFEFKFVQREGRTIKQSGFFDYGPDSAWVPDTVMMFSGGLDSFAGALEELVERKNKVALISHFSSSKIAPIQQTLQKAISEKLGPGKSMHFPMRVQLQDGTNSEGTHRTRSLLFAALGVATALSFGKDKVSFYENGIVSLNLPPVGNVLGTRATRTTHPQTLIRFSKLFSSIFNAKLIIDNPFFWRTKTDIVSKIHQLGMGDQIANTRSCADVHNQTKQYAHCGRCSQCIDRRFAILAAGLQAQDPQEAYRVDLMTGVRKAVQDKEAALSYVRNAFGFEAMTSSDLEQRFPPILDAVEHLHEPASTALSRLTELLRRHGTAVAGVMRETMDGKRPDQFPKDSLPFLFGEQQRETYFTPQIPLFPNTTSEPSLEKFMLVFDEQRKCLTINDAIEVKGADYGLFICLAKEHLRAAGLGLDPLDYPTTTARKLARALQVEASEAVRRRILRARNALAKKATSAGLDPHRAKALIENLPSHGYRLAPDLVIVRMPTA

SEQ ID NO: 39325 - protein, 110 aa, unidentified
  source 1..110: note = Litoricolaceae bacterium
  REGION 1..110: note = tr|A0A520RZV4|A0A520RZV4_9GAMM 7-cyano-7-deazaguanine synthase (Fragment); OS = Litoricolaceae bacterium OX=2510333 GN=EVA61_02845 PE=3; SV = 1
ANAVDYSGYPDCRPAFIEQFESLANVATAAVDGGERWVIEAPLMTMSKSDIVTTGNALGVDYSMTVSCYQADEEGAACGACDACRLRRKGFLDAGLYDPTKYRRGISPKI

SEQ ID NO: 39326 - protein, 233 aa, unidentified
  source 1..233: note = Litoricolaceae bacterium
  REGION 1..233: note = tr|A0A520S7Z4|A0A520S7Z4_9GAMM 7-cyano-7-deazaguanine synthase OS=Litoricolaceae bacterium OX=2510333 GN=queC PE=3 SV=1
MGQPKAVILLSGGLDSATVLAMAKSRGFDCYTISFDYGQKHNAELRAAHRIAETMGQHPHKVIRLDLKAIGGSALTSDEFEVPVGGVAEAGIPVTYVPARNTVFLSIALGYGEVIGATHLFIGANAVDYSGYPDCRPAFIEQFERLANVATAAVDGGVRWVVEAPLMSMSKSDIVKTGAALGVDYSLTVSCYQADDSGAACGACDACRLRHKGFLDAGLQDPTAYQVGISPKI

SEQ ID NO: 39327 - protein, 221 aa, unidentified
  source 1..221: note = Litorilituus sediminis
  REGION 1..221: note = tr|A0A4P6P393|A0A4P6P393_9GAMM 7-cyano-7-deazaguanine synthase OS=Litorilituus sediminis; OX = 718192 GN=queC PE=3 SV=1
MTEKVVVIYSGGMDSFTVLNRALKDGKQVYALSFDYGQRHVKELDCARTVCNKLKIEHKVIDISAINQLLAGSSLTDDIEIPEGHYEAENMKSTVVPNRNMILLSLAVGYAVSVGASQVYYGAHSGDHAIYPDCRPEFVMKMNDVCKIANYESVEIFSPYLTVDKTAILADGLAMGLDYSNTWTCYNGREKACGKCGACQERLEAFRDNNEVDPISYESSL

SEQ ID NO: 39328 - protein, 218 aa, unidentified
  source 1..218: note = Litorilituus sp.
  REGION 1..218: note = tr|A0A502KTA1|A0A502KTA1_9GAMM 7-cyano-7-deazaguanine synthase OS=Litorilituus sp. RZ04; OX = 2491017 GN=queC PE=3 SV=1
MAEKVVVIYSGGMDSFTVLNRAIKDGKQVYALSFDYGQRHVKELTCARTVCTQLDIPHKVIDISAINELLAGSSLTDDIEIPEGHYEAENMKSTIVPNRNMILLSLAVGYAVSVGAGQVYYGAHSGDHAIYPDCRPEFVLKMNDVCKIANYESVEIFSPYLEVNKTAILTDGIAMGLDYSNTWTCYNGREKACGKCGACQERLEAFADNNVNDPISYE

SEQ ID NO: 39329 - protein, 232 aa, Litorimonas taeanensis
  REGION 1..232: note = tr|A0A420WJU4|A0A420WJU4_9RHOB 7-cyano-7-deazaguanine synthase OS=Litorimonas taeanensis; OX = 568099 GN=queC PE=3 SV=1
MRDVTKALLLFSGGQDSATCLAWALDKYDYVETVGFHYGQRHDIEMTCRETIRQTMPSFKSDWKNRLGPDHVLDLSVLGQMSETALTRDVEIKMNADGMPNTFVPGRNLVFLTFAGALAYRRGINDLVGGMCEADFSGYPDCRKETLDAQMQALSLGLDRPMTLSTPLMHLSKAQAWGLCQTLGGDDLVSLVNEKTHSCYKGNHKDQHSWGFGCGECPACELRAAGWNEFTS

SEQ ID NO: 39330 - protein, 233 aa, Loktanella sp.
  REGION 1..233: note = tr|A0A1H9HDV3|A0A1H9HDV3_9RHOB 7-cyano-7-deazaguanine synthase OS=Loktanella sp. DSM 29012 OX=1881056 GN=queC PE=3 SV=1
MKTIVICSGGLDSVSLAHMVAAEHQLTRLVSFDYGQRHRKELDFAARCAGRLGVPHDVIDLRGIGAALTGSALTDDVDVPDGHYAEESMRITVVPNRNAIMLAVAFGVAAANGDDAVATAVHGGDHFIYPDCRPAFTQAFEAMQKAALDGYADVSLYTPFVNRTKADIVTAGARHSTPFADTWSCYKGGEVHCGRCGTCVERREAFDLAGITDPTTYADPDFWAHAIAAKEGV

SEQ ID NO: 39331 - protein, 233 aa, Loktanella sp.
  REGION 1..233: note = tr|A0A0F4RJK4|A0A0F4RJK4_9RHOB 7-cyano-7-deazaguanine synthase OS=Loktanella sp. S4079; OX = 579483 GN=queC PE=3 SV=1
MKTIVICSGGLDSVSLAHVVANEGNLSRLVSFDYGQRHRKELDFAAACAERLGVPHHIIDMRQIGAALSGSALTDDIDVPDGHYAEETMKITVVPNRNAIMLTIAYGIAAANGDDAVATAVHGGDHFIYPDCRPAFTESFDRMQRAALDGYADVALSTPFVHRSKADIVTEGARVGTPFAQTWSCYKGGEKQCGRCGTCVERREAFHLAGVTDPTEYEDPEFWRAAIETHGGN

SEQ ID NO: 39332 - protein, 243 aa, Lonepinella koalarum
  REGION 1..243: note = tr|A0A4R1L0V3|A0A4R1L0V3_9PAST 7-cyano-7-deazaguanine synthase OS=Lonepinella koalarum; OX = 53417 GN=queC PE=3 SV=1
MQLFNPNHDRKAVVIFSGGQDSTTCLIQAIQQYGKQNLETITFKYGQRHAIELDKAQWICQDLGIKQTLIDMESTQIFSANAMMSDSPIKTGNNGVPNTLVDGRNALFLLYAAIYAKGQGITDIITGVCETDFSGYPDCRDIFIKSMNVTLNLAMDYNFRIITPLMYLTKAQTWQLADELDALDYVQQHSHTCYLGIDGGCGECPSCQLRNKGLNEYLALKSAVKNANEIGRNNSVNSTSIGG

SEQ ID NO: 39333 - protein, 235 aa, unidentified
  source 1..235: note = Longibacter salinarum
  REGION 1..235: note = tr|A0A2A8CUX1|A0A2A8CUX1_9BACT 7-cyano-7-deazaguanine synthase OS=Longibacter salinarum; OX = 1850348 GN=queC PE=3 SV=1
MPHPDSTDRSALVLFSGGQDSTTCLFWALDRFASVHALGFHYGQKHAVETEQARKIAVKADVPFEIIDMEGTLSGSALTEHEKDMSAAHERNEDLPASFVPGRNALFLSTAASYAYNRGIHDLVGGMCQTDYSGYPDCRRVFIDSMQTSLSLAMDEDLRIHTPLMYLTKAETWKLAADLVTVAGCDVLETVRVMSHTDYNGDRSELHEWGYGQLDNPASKLRAKGYREAKEKGWV

SEQ ID NO: 39334 - protein, 231 aa, unidentified
  source 1..231: note = Longimonas halophila
  REGION 1..231: note = tr|A0A2H3P8F9|A0A2H3P8F9_9BACT 7-cyano-7-deazaguanine synthase OS=Longimonas halophila; OX = 1469170 GN=queC PE=3 SV=1
MPTDSAALVLFSGGQDSTTCLFWALQRFDQVQALGFTYGQKHAVEVEQARKIADKAGVPYDCIDLTGALEGSALTEHGKDMNAPHARNEDLPASFVPGRNALFLSTAASYAYNRGITQLVGGMCQTDYSGYPDCRRTFISAMQTSLSLAMDADLQIYTPLMDRTKAETWKLAADLGTVAGCDVLETVRVMSHTDYNGDRSQLNEWGYGQLDNPASKLRAKGYEEAKEKGWV

SEQ ID NO: 39335 - protein, 231 aa, unidentified
  source 1..231: note = Lonsdalea britannica
  REGION 1..231: note = tr|A0A1X3RZI0|A0A1X3RZI0_9GAMM 7-cyano-7-deazaguanine synthase OS=Lonsdalea britannica; OX = 1082704 GN=queC PE=3 SV=1
MTSAVVVFSGGQDSTTCLIQALKQYDHVHCVTFDYGQRHRAEIDVAAELAQRLGACAHKVLDVRLLNELAVSSLTRDNIPVPDFDENLKGLPSTFVPGRNILFLTLAAIYAYQVGADTVITGVCETDFSGYPDCRDEFVKALNKGVALGLAKDIRFVTPLMWLDKAETWALADHYAQLETIRHHTLTCYNGIKGDGCGQCAACHLRQKGLELYQQNPEGVRASLFKKTGLK

SEQ ID NO: 39336 - protein, 231 aa, unidentified
  source 1..231: note = Lonsdalea iberica
  REGION 1..231: note = tr|A0A1X3RMD6|A0A1X3RMD6_9GAMM 7-cyano-7-deazaguanine synthase OS=Lonsdalea iberica; OX = 1082703 GN=queC PE=3 SV=1
MTSAVVVFSGGQDSTTCLIQALKQYDHVHCVTFDYGQRHRAEIDVAAELAQRLGACAHKVLDVRLLNELAVSSLTRDNIPVPDFDEKPDGLPSTFVPGRNILFLTLAAIYAYQVGADTVITGVCETDFSGYPDCRDEFVKALNKGVALGLAKDIRFVTPLMWLDKAETWALADYYHQLDTIRHHTLTCYNGIKGDGCGQCAACHLRKKGLELYQQNPEGVRASLAKKTELE

SEQ ID NO: 39337 - protein, 231 aa, unidentified
  source 1..231: note = Lonsdalea populi
  REGION 1..231: note = tr|A0A3N0U8U7|A0A3N0U8U7_9GAMM 7-cyano-7-deazaguanine synthase OS=Lonsdalea populi; OX = 1172565 GN=queC PE=3 SV=1
MRSAVVVFSGGQDSTTCLIQALKQYDHVHCVTFDYGQRHRAEIGVAAELAQRLGACAHKVLDVRLLNELAVSSLTRDNIPVPDFDEKPDGLPSTFVPGRNILFLTLAAIYAYQVGADTVITGVCETDFSGYPDCRDEFVKALNKGVALGLAKDIRFITPLMWLDKAETWALADYYQQLETIRYHTLTCYNGVKGDGCGQCAACHLRQKGLDQYQLNPEDVRASLAKKTGLK

SEQ ID NO: 39338 - protein, 231 aa, unidentified
  source 1..231: note = Lonsdalea quercina
  REGION 1..231: note = tr|A0A1H3W8L3|A0A1H3W8L3_9GAMM 7-cyano-7-deazaguanine synthase OS=Lonsdalea quercina; OX = 71657 GN=queC PE=3 SV=1
MTSAVVVFSGGQDSTTCLIQALKQYDHVHCVTFDYGQRHRAEIDVAAELAQRLGACAHKVLDVRLLNELAVSSLTRDNIPVPDFDENQDGLPSTFVPGRNILFLTLAAIYAYQVGADTVITGVCETDFSGYPDCRDEFVKALNEGVALGLAKDIRFLTPLMWLDKAETWALADYYQQLDTIRHHTLTCYNGIKGDGCGQCAACHLRQKGLEQYQQNPESVRASLSKKTGLK

SEQ ID NO: 39339 - protein, 219 aa, unidentified
  source 1..219: note = Lucifera butyrica
  REGION 1..219: note = tr|A0A498R151|A0A498R151_9FIRM 7-cyano-7-deazaguanine synthase OS=Lucifera butyrica; OX = 1351585 GN=queC PE=3 SV=1
MTAYKDQGALVVFSGGQDSTTCLFWARKQFNRVEAVTFDYNQRHRREIDCAREIARELSLEHTILDLGLLNQLAPNALTRSEITVKAGESGQLPNTFVDGRNLLFLSFTAVVAKQRNIRHIVTGVCETDFSGYPDCRDVFIKSLNVTLNLAMDYQFVIHTPLMWINKMETWAMADELGVLDFVRQKTLTCYNGIIGDGCGECPACKLRNAGLKEYLCRK

SEQ ID NO: 39340 - protein, 224 aa, unidentified
  source 1..224: note = Luminiphilus syltensis
  REGION 1..224: note = tr|B8KS56|B8KS56_9GAMM 7-cyano-7-deazaguanine synthase OS=Luminiphilus syltensis NOR5-1B OX=565045; GN = queC PE=3 SV=1
MSSKKAVVLVSGGLDSATVLAMAAAAGRQCFALSFDYGQRHRAELKAAAHVASSVPGTVHKVVQLDLSTIGGSALTDTSIAVPTSPTEGIPVTYVPARNTVFLSIALGWAEVLDADEIHIGVNAVDYSGYPDCRPAFIDAFRSLAAVATKAGVEGHPLAVCTPIIDMTKGDIIRAGTELGVDYALTVSCYQPDGEGLACGRCDSCRLRRAGFREAGVEDPTRYG

SEQ ID NO: 39341 - protein, 227 aa, unidentified
  source 1..227: note = Luteibacter pinisoli
  REGION 1..227: note = tr|A0A4Y5Z9D7|A0A4Y5Z9D7_9GAMM 7-cyano-7-deazaguanine synthase OS=Luteibacter pinisoli; OX = 2589080 GN=queC PE=3 SV=1
MNASTPSRKAVILVSGGMDSAVTIAMAREQGFDVHALSVAYGQRHSSELEASERVSKLLGAVEHKTVVVDLRSIGGSALTADIDVPEDGGEGIPVTYVPARNTIMLSIALGWAEVLGSTDIFCGVNAVDYSGYPDCRPAFIDAFQALANVATKAGVEGAGIRIHAPLMAMGKGDIVREGMRLGVDFSETVSCYQADAQGRACGHCDACRLRAEGFAKAGVPDPTHYV

SEQ ID NO: 39342 - protein, 227 aa, Luteibacter rhizovicinus
  REGION 1..227: note = tr|A0A1L3EPM7|A0A1L3EPM7_9GAMM 7-cyano-7-deazaguanine synthase OS=Luteibacter rhizovicinus DSM 16549 OX=1440763 GN=queC PE=3 SV=1
MNASNPSRKAVILVSGGMDSAVTIAMAREQGFEVYALSVAYGQRHSSELEASERVATMLGAVTHKTVHVDLRSIGGSALTADIDVPEDGGTGIPVTYVPARNTIMLSIALGWAEVLGSSDIFCGVNAVDYSGYPDCRPAFIESFQSLANVATKAGVEGAGIRIHAPLMDMGKGDIVREGMRLGVDFAATVSCYQADAQGRACGHCDACRLRAEGFAKAGVPDPTHYV

SEQ ID NO: 39343 - protein, 227 aa, Luteibacter rhizovicinus
  REGION 1..227: note = tr|A0A4R3YNM3|A0A4R3YNM3_9GAMM 7-cyano-7-deazaguanine synthase OS=Luteibacter rhizovicinus OX=242606 GN=queC PE=3 SV=1
MNASSPSRKAVILVSGGMDSAVTIAMAREQGFEVYALSVAYGQRHSSELEASERVAKMLGAVVHKTVHVDLRSIGGSALTADIDVPEEGGEGIPVTYVPARNTIMLSIALGWAEVLGSSDIFCGVNAVDYSGYPDCRPAFIESFQTLANVATKAGVEGAGIVVHAPLMNMGKAQIVREGERLGVDFAATVSCYNADAQGRACGHCDACRLRAQGFHEAGVVDPTHYV

SEQ ID NO: 39344 - protein, 227 aa, Luteibacter sp.
  REGION 1..227: note = tr|A0A2T5LI94|A0A2T5LI94_9GAMM 7-cyano-7-deazaguanine synthase OS=Luteibacter sp. OK325; OX = 2135670 GN=queC PE=3 SV=1
MNASTPSRKAVILVSGGMDSAVTIAMAREQGFEVYALSVAYGQRHSSELEASERVAKMLGAVTHKTVNVDLRSIGGSALTADIDVPEDGGAGIPVTYVPARNTIMLSIALGWAEVLGSSDIFCGVNAVDYSGYPDCRPAFIESFQSLANVATKAGVEGAGIRIHAPLMDMGKGDIVREGMRLGVDFAATVSCYQADSQGRACGHCDACRLRAEGFAKAGVPDPTRYA

SEQ ID NO: 39345 - protein, 227 aa, Luteibacter sp.
  REGION 1..227: note = tr|A0A1I0NU85|A0A1I0NU85_9GAMM 7-cyano-7-deazaguanine synthase OS=Luteibacter sp. 329MFSha OX=1798239 GN=queC PE=3 SV=1
MNAPNAPRKAVILVSGGMDSAVTIAMAREQGFEVYALSVAYGQRHSSELEASERVSNLLGAVVHKTVHVDLRSIGGSALTADIDVPEEGGDGIPVTYVPARNTIMLSIALGWAEVLGSTDIFCGVNAVDYSGYPDCRPAFIEAFEALANVATKAGVEGAGIRIHAPLMQMGKGDIVREGMRLGVDFAETVSCYQADAQGRACGHCDACRLRAEGFAKAGVPDPTRYV

SEQ ID NO: 39346 - protein, 227 aa, Luteibacter yeojuensis
  REGION 1..227: note = tr|A0A0F3KKV3|A0A0F3KKV3_9GAMM 7-cyano-7-deazaguanine synthase OS=Luteibacter yeojuensis; OX = 345309 GN=queC PE=3 SV=1
MNAPNPTPKAVILVSGGMDSAVTIAMAREQGFEVYALSVAYGQRHSSELEASERVSKLLGAVAHKTVHVDLRSIGGSALTADIDVPEDGGEGIPVTYVPARNTIMLSIALGWAEVLGSNDIFCGVNAVDYSGYPDCRPAFIEAFETLANVATKAGVEGAGIRIHAPLMKMGKGDIVTEGVRLGVDFAETVSCYQADAQGRACGHCDACRLRAEGFAKAGVPDVTRYV

SEQ ID NO: 39347 - protein, 227 aa, Luteibacter yeojuensis
  REGION 1..227: note = tr|A0A561GZA5|A0A561GZA5_9GAMM 7-cyano-7-deazaguanine synthase OS=Luteibacter yeojuensis; OX = 345309 GN=queC PE=3 SV=1
MNTTNTSRKAVILVSGGMDSAVTIAMAREQGFEVYALSVAYGQRHSSELEASARVAKMLGAVTHKTVHVDLRSIGGSALTADIDVPEEGGEGIPVTYVPARNTIMLSIALGWAEVLGSSDIFCGVNAVDYSGYPDCRPAFIESFQALANVATKAGVEGAGIRIHAPLMQMGKGDIVREGMRLGVDFAETVSCYQADAQGRACGHCDACRLRAEGFAKAGVADPTRYA

SEQ ID NO: 39348 - protein, 466 aa, Luteimonas aestuarii
  REGION 1..466: note = tr|A0A4R5TY86|A0A4R5TY86_9GAMM 7-cyano-7-deazaguanine synthase OS=Luteimonas aestuarii; OX = 453837 GN=E2F46_06215 PE=3 SV=1
MCRWSLPDRNRLRRRIVLVELPTQLHVRYANGRLEVQGDTTRRMSISAQAMIHDLLACVDDRSIDLISIAAGAYAIDRIHRRKVSIKNEAGLRTIPVCFHVADLAYWSQPHVVDQLAELLHFLSGDFWLISFSPHERPAPAVGQTTLDFGPHLKPSRVALYSGGLDSAAGLAASLQSGQRDIMLLTAGHQSAIRRRAMDQIKLLKHVLPQAGSISHASFVLGLERSGRIRDQETTQRSRGFLFCASGAVLASVCGVDVVHVYENGHGAINLPLGGAPLSNGLSTRGAHPTFLAMMTQVASDALERPVRFELPFARVTKAAMIEALVHTPGLVQWAQQSRSCVHTSWREAGVTHCGYCAACIERHQAFVGAGARDLTPYSRPLWEREDAMNDDYFRSYVWQAQRWAEGDLGMRDRLGDHCAPSQLSAPFEDLVLLHQKHAEEVLSVYARHADPSPSGRARQAQLRAA

SEQ ID NO: 39349 - protein, 223 aa, Luteimonas aestuarii
  REGION 1..223: note = tr|A0A4R5TIP5|A0A4R5TIP5_9GAMM 7-cyano-7-deazaguanine synthase OS=Luteimonas aestuarii; OX = 453837 GN=queC PE=3 SV=1
MKKKAVVLLSGGMDSAVVFAIAREQGYAVHALSVSYGQRHTSELAAAGRLAQAMGAVAQKVVGVDLRSIGGSALTDDIDVPEAGGSGIPVTYVPARNTIMLSVALGWAEVLGAADIFCGVNAVDYSGYPDCRPEFIAAFERLANLATKAGVEGVGLRIHAPLLHMGKDRIVQEGVRLGVDFAHTVSCYDADAEGRACGRCDACRLRAAGFADAGIPDPTRYVA

SEQ ID NO: 39350 - protein, 243 aa, unidentified
  source 1..243: note = Luteimonas cucumeris
  REGION 1..243: note = tr|A0A562L4Z3|A0A562L4Z3_9GAMM 7-cyano-7-deazaguanine synthase OS=Luteimonas cucumeris; OX = 985012 GN=queC PE=3 SV=1
MPKSPDPSPQSRRNAVVLVSGGMDSAVVLAIARERGHAVHALSVSYGQRHTSELDAAARVANALGAVQHKTVVVDLRTIGGSALTDDIDVPLDTDQHPVGTAAARDDIPVTYVPARNTIMLSVALGWAEVLGASDIYCGVNAVDYSGYPDCRPEFVEAFERLANLATKAGVEGAGLRVQAPLQYMSKADIVREGLRLGVDFAQTVSCYQADAQGRACGHCDACRLRAEGFAAAGVADPTRYVG

SEQ ID NO: 39351 - protein, 222 aa, Luteimonas marina
  REGION 1..222: note = tr|A0A5C5U0V2|A0A5C5U0V2_9GAMM 7-cyano-7-deazaguanine synthase OS=Luteimonas marina; OX = 488485 GN=queC PE=3 SV=1
MKKAVVLVSGGMDSAVVLAIAREQGFAVHALSVSYGQRHTSELEAADRVSRTLGALEHKTVQVDLRAFGGSALTDDIDVPEAGGPGIPVTYVPARNSIMLSLALGWAEVLGANDLFCGVNAVDYSGYPDCRPEFIEAFERLANLATRAGVEGAGIRVHAPLLRMGKADIVREGQRLGVDFAATVSCYRADADGRACGHCDACRLRADGFVAAGIADPTRYVA

SEQ ID NO: 39352 - protein, 224 aa, Luteimonas sp.
  REGION 1..224: note = tr|A0A1B3W567|A0A1B3W567_9GAMM 7-cyano-7-deazaguanine synthase OS=Luteimonas sp. JM171; OX = 1896164 GN=queC PE=3 SV=1
MKNAVVLLSGGMDSAVVLAMARERGFAAHALSVDYGQRHPSELQAAARVARAQGAVAHKVVAVDLRGIGGSALTDDIAVPDGSEHAPGDIPVTYVPARNTIMLSIALGWAEVLGAADIFCGVNAVDYSGYPDCRPEFIAAFQALANLATKAGVEGAGIRVHAPLMALGKDGIVREGVRLGVDFSSTVSCYSADLDGRACGRCDACRLRAQGFAGAGVPDPTRYA

SEQ ID NO: 39353 - protein, 226 aa, Luteimonas sp.
  REGION 1..226: note = tr|A0A0H1AMP8|A0A0H1AMP8_9GAMM 7-cyano-7-deazaguanine synthase OS=Luteimonas sp. FCS-9; OX = 1547516 GN=queC PE=3 SV=1
MKNAVVLLSGGMDSAAVVAIAREQGFAVHALSVRYGQRHTSELDAAARVAAALGAVAHKTVDVDLRAFGGSALTDDIEVPEAGSAGIPVTYVPARNTIMLSLALGWAEVIGAADLFCGVNAVDYSGYPDCRPEFVAAFERLANLATKAGVEGAGIRVHAPLQHMSKADIVREGLRLGVDFGLTVSCYRADAQGRACGHCDACRLRADGFAAAGAADPTHYVPTVAG

SEQ ID NO: 39354 - protein, 225 aa, unidentified
  source 1..225: note = Luteimonas terrae
  REGION 1..225: note = tr|A0A4R5U738|A0A4R5U738_9GAMM 7-cyano-7-deazaguanine synthase OS=Luteimonas terrae; OX = 1530191 GN=queC PE=3 SV=1
MKKAVVLLSGGMDSAAVVAIAQEQGFDVHALSVRYGQRHTSELDAAARVAAAMGVTAHKTVDVDLRSIGGSALTDDIDVPEAGSAGIPVTYVPARNTIMLSLALGWAEVLGAADIFCGVNAVDYSGYPDCRPEFVDAFERLANLATKAGVEGAGISVHAPLQHMGKGDIVREGVRLGVDFGLTVSCYNADAQGLACGHCDACRLRADGFDAAGVPDPTHYAHAPG

SEQ ID NO: 39355 - protein, 222 aa, unidentified
  source 1..222: note = Luteitalea pratensis
  REGION 1..222: note = tr|A0A143PIG0|A0A143PIG0_9BACT 7-cyano-7-deazaguanine synthase OS=Luteitalea pratensis; OX = 1855912 GN=queC_2 PE=3 SV=1
MLCSGGLDSVVLAADLATTAPVQPIYVASGLAWEAQERAMLERALACLPDRTRVAPLHVLDASVRDVYAPTHWSLAGTPPSWDTPDEDVYLVGRNIVLLGKAAVYCALRKIGRIALGPLAGNPFPDATAEFYESMARALSLGLAHPIAIETPYRTLHKSDVIRRGHAIGAPMALTLSCMNPLERIHCGACSKCRERHDAFMEALGQDQTIYAADRGTSTIKG

SEQ ID NO: 39356 - protein, 230 aa, unidentified
  source 1..230: note = Luteitalea pratensis
  REGION 1..230: note = tr|A0A143PHB5|A0A143PHB5_9BACT 7-cyano-7-deazaguanine synthase OS=Luteitalea pratensis; OX = 1855912 GN=queC_1 PE=3 SV=1
MTTVAPAAILLLSGGLDSYTAGAMARADGFRLFALTVRYGQTHVQEVEAARRAAQALGVERHVELDLDLRDIARSALTGASAVPLDRDVAHEHDIPSTYVPARNTIFLSLALAWAETVGASVIVIGVNALDYSGYPDCRPEYIEAFERMGRLATAAGVGGTALRILAPLQHLSKADIVRRGVDLGLDYSLTHSCYAPTPDGRPCGRCDSCQLRARGFAEAGIPDPALERS

SEQ ID NO: 39357 - protein, 248 aa, Lutispora thermophila
  REGION 1..248: note = tr|A0A1M6BAX1|A0A1M6BAX1_9CLOT Uncharacterized protein OS=Lutispora thermophila DSM 19022 OX=1122184; GN = SAMN02745176_00366 PE=4 SV=1
MTLYDFFVKNPKVAVAFSGGVDSSYLLYAAKQYAQKVCAYYVKSQFQPRFELDDVVRLADELKADLKIMNINVLQAPCVSDNPTDRCYYCKKAIFNEIIRVAKSDGFLVLLDGTNASDDADDRPGMKALHELSVFSPLRECGLTKAEIRRLSKEAGLFTWDKPAYACLATRIPTGEKITSEKLEATEAAEDFLFSLGFTDFRVRWQDGNAKIQLLEDQWPLLLEHRKAIMDKLKMYYKSVVLDLEVRG

SEQ ID NO: 39358 - protein, 224 aa, Lyngbya aestuarii
  REGION 1..224: note = tr|U7QMA5|U7QMA5_9CYAN 7-cyano-7-deazaguanine synthase OS=Lyngbya aestuarii BL J OX=1348334 GN=queC PE=3; SV = 1
MKAVILLSGGLDSSTVLYQAKAEGYECYAISFDYQQRHQRELASAQQIAQSAGVVEHQVVKFDLSLWGGSALTDRKINLPHDRSLNQMSENIPITYVPARNTIFLSFALGYAETVNASRVYIGVNALDYSGYPDCRPDYIAAMQDVFRLGTKQGREGNPITINSPLIHLKKTEIIQLGNRLRVPWEKTWSCYAGEEKACGVCDSCKLRLAAFKELGLTDPIPYV

SEQ ID NO: 39359 - protein, 229 aa, Lyngbya sp.
  REGION 1..229: note = tr|A0YPN3|A0YPN3_LYNSP 7-cyano-7-deazaguanine synthase OS=Lyngbya sp. (strain PCC 8106) OX=313612; GN = queC PE=3 SV=1
MKAVILLSGGLDSSTVLYQAKAEGYECYAISFDYQQRHQRELASAQQIAQSAGVVEHQVVKFDLSLWGGSALTDRKIDLPNDRSLNQMSENIPITYVPARNTIFLSFALGYAETVNASRVYIGVNALDYSGYPDCRPDYIAAMQDVFRLGTKQGREGNPILIHSPLIHLKKTEIIQLGNRLRVPWEKTWSCYAGEEKSCGVCDSCKLRLAAFKELGLTDPIPYVEDVLK

SEQ ID NO: 39360 - protein, 488 aa, Lyngbya sp.
  REGION 1..488: note = tr|A0YNH9|A0YNH9_LYNSP Uncharacterized protein; OS = Lyngbya sp. (strain PCC 8106) OX=313612 GN=L8106_12405; PE = 4 SV=1
MNYAPSRTPKSDKSDRNNYTLNFKPVLNSNGSVEFIDHCENKILTVSFGVDDQDFQYRVRAEFPSIIADIVDLAVAIHVSDRLAFHDLNKKLRHLNIVLPVRHPELLSTEPFYTKLQDLLRWATGSKWVFDFQKRTVSELSVEQQSILLPTVPEGCEVALWSGGLDALAGLYTRLQTSHTVPFMLFGTGSSKSVYARQEKVFQAIIKSFPTHLYLCRVPINFLNSKLLRKNKITRARGVVFTLLGAACAYLMGQRTLSVYENGIGAINLPYRASAVGLDHSRSVHPLTLLMVSDVVSELLGENFRVYNPFLFLTKAQICRALAENQENDLVAITQSCDSRHRKSQQPTQCGYCSSCILRKQALAASKIEDKTRYLVPHGDPPASDPSKHLLNMLAQVETFRALLTSSNKIDLQWEALTREFPILDDIVDRSAGVENLSPAEMRSRLIDLYQRYITEWDIAESQITTGILNKSSNQQTLDRCLTEATHA

SEQ ID NO: 39361 - protein, 219 aa, Lysinibacillus boronitolerans
  REGION 1..219: note = tr|A0A0A3IKE5|A0A0A3IKE5_9BACI 7-cyano-7-deazaguanine synthase OS=Lysinibacillus boronitolerans JCM 21713 = 10a = NBRC 103108 OX=1294264; GN = queC PE=3 SV=1
MKKEKAIVVFSGGQDSTTCLFWAKERFEEIEAVTFDYGQRHRLEIDCAKAITEELGIKHHILDMSLLNQLAPNALTRQDIKVKDGENGELPSTFVPGRNLLFLSFAGVLASQVGAKHIVTGVCETDFSGYPDCRDVFIKSLNVTLNLSMDDSFVIDTPLMWLNKAQTWELADQLGALEFVRERTLTCYNGVIADGCGECPACKLRNKGLDEYLSYRKES

SEQ ID NO: 39362 - protein, 221 aa, unidentified
  source 1..221: note = Lysinibacillus chungkukjangi
  REGION 1..221: note = tr|A0A318U4E3|A0A318U4E3_9BACI 7-cyano-7-deazaguanine synthase OS=Lysinibacillus chungkukjangi OX=1202712 GN=queC PE=3 SV=1
MKQGKAIVVFSGGQDSTTCLFWAKERYAEVEAVTFDYGQRHCLEIECAKEIAKELDVKHHILDMSLLNQLAPNALTRTDIEVADGEDGELPSTFVPGRNLLFMSFAGVLASQVGAKHIVTGVCETDFSGYPDCRDIFIKSLNVTLNLSMDDTFVIETPLMWLNKAQTWELADKLGALDFVRERTLTCYNGVIADGCGECPSCKLRQNGLDEYLTLKKGLKA

SEQ ID NO: 39363 - protein, 219 aa, unidentified
  source 1..219: note = Lysinibacillus composti
  REGION 1..219: note = tr|A0A3N9U747|A0A3N9U747_9BACI 7-cyano-7-deazaguanine synthase OS=Lysinibacillus composti; OX = 720633 GN=queC PE=3 SV=1
MKQEKAVVVFSGGQDSTTCLFWAKERFAEVEAVTFNYGQRHALEIECAKEIAEELGVKHHILDMSLLNQLAPNALTRDDIKVEEGDEGELPSTFVPGRNLLFLSFAGVLASQVGAKHIVTGVCETDFSGYPDCRDIFIKSLNVTLNLSMDDSFVIHTPLMWLNKAETWELADQLQAFEFVREKTLTCYNGVIADGCGECPACKLRKRGLDEYLSVKKED

SEQ ID NO: 39364 - protein, 219 aa, Lysinibacillus fusiformis
  REGION 1..219: note = tr|A0A4Y4IID9|A0A4Y4IID9_9BACI 7-cyano-7-deazaguanine synthase OS=Lysinibacillus fusiformis OX=28031 GN=queC PE=3 SV=1
MKQEKAIVVFSGGQDSTTCLFWAKERFAEIEAVTFDYGQRHRLEIDCAKLIAEELGIKHHILDMSLLNQLAPNALTRQDIKVEDGKNGELPSTFVPGRNLLFLSFAGVLASQVGAKHIITGVCETDFSGYPDCRDVFIKSLNVTLNLSMDDSFVIDTPLMWLDKAQTWELADQFGALEFVRERTLTCYNGVIADGCGECPACKLRKKGLDDYLSNRKEF

SEQ ID NO: 39365 - protein, 219 aa, Lysinibacillus fusiformis
  REGION 1..219: note = tr|D7WZC8|D7WZC8_9BACI 7-cyano-7-deazaguanine synthase OS=Lysinibacillus fusiformis ZC1 OX=714961; GN = queC PE=3 SV=1
MKKEKAIVVFSGGQDSTTCLFWAKERFEEIEAVTFDYGQRHRLEIDCAKVITEELGIKHHILDMSLLNQLAPNALTRQDIKVKDGENGELPSTFVPGRNLLFLSFAGVLASQVGAKHIVTGVCETDFSGYPDCRDVFIKSLNVTLNLSMDDSFVIDTPLMWLNKAQTWELADQLGALEFVRERTLTCYNGVIADGCGECPACKLRNKGLDEYLSYRKES

SEQ ID NO: 39366 - protein, 219 aa, unidentified
  source 1..219: note = Lysinibacillus halotolerans
  REGION 1..219: note = tr|A0A3M8H400|A0A3M8H400_9BACI 7-cyano-7-deazaguanine synthase OS=Lysinibacillus halotolerans OX=1368476 GN=queC PE=3 SV=1
MKQGKAVVVFSGGQDSTTCLFWAKERFEEVVAVTFDYGQRHRLEIECAKEITKELGISHHILDMSLLNQLAPNALTRGTIPVEDGEGGELPSTFVPGRNLLFLSFAGVLAKQIGAKHIVTGVCETDFSGYPDCRDIFIKSLNVTLNLSMDDTFVIETPLMWLNKAQTWELADQLGALEFVREKTLTCYNGIKADGCGECPACKLRKRGLDEYLNSKVES

SEQ ID NO: 39367 - protein, 191 aa, Lysinibacillus macroides
  REGION 1..191: note = tr|A0A0N0CVN3|A0A0N0CVN3_9BACI 7-cyano-7-deazaguanine synthase OS=Lysinibacillus macroides OX=33935 GN=ADM90_13265 PE=3 SV=1
MTRENDSVLVLASGGIDSTALIEYYASKKYKVSALFFDYGQISRTKELQAVRKVCSYYGIKLEEAQLGFTLKNTSGEFIGRNALFITSAFNFLPNNYSKISIGIHSGTPYYDCSKTFVEDFQRIVDGYFEGTVLIDVPFVEFTKGQIIEYCLQENVPINLTYSCENGYEKNCGKCLSCLDRREFLGKSDLM

SEQ ID NO: 39368 - protein, 221 aa, Lysinibacillus macroides
  REGION 1..221: note = tr|A0A0M9DHH2|A0A0M9DHH2_9BACI 7-cyano-7-deazaguanine synthase OS=Lysinibacillus macroides OX=33935 GN=queC PE=3 SV=1
MKKQKAIVVFSGGQDSTTCLFWALQQFGEVEAVTFDYGQKHRLEIDCAKNITQQLGVKHHILDISLLNQLAASALTREDIDIEEGQDGGLPSTFVPGRNLLFFSFAGVLASQVGAKHIVTGVCETDFSGYPDCRDQFVKSFNVTLNLAMDEPFVLHTPLMWLDKAQAWALADELDAFDFVREQTLTCYNGIMADGCGECPACKLRQNGLQSYLATKAGQEA

SEQ ID NO: 39369 - protein, 219 aa, unidentified
  source 1..219: note = Lysinibacillus massiliensis
  REGION 1..219: note = tr|A0A0A3JV88|A0A0A3JV88_9BACI 7-cyano-7-deazaguanine synthase OS=Lysinibacillus massiliensis 4400831 = CIP 108448 = CCUG 49529 OX=1211035; GN = queC PE=3 SV=1
MKQGKAIVVFSGGQDSTTCLFWAKERFSQVEAVTFDYGQRHRLEIECATQIAKELGVKHHILDMSLLNQLAPNALTRNDIEIVDGKDGELPSTFVPGRNLLFLSFAGILAKQVGAKHIVTGVCETDFSGYPDCRDIFIKSLNVTLNLSMDDSFVIETPLMWLNKAETWELADELGALDFVRERTLTCYNGIIADGCGECPACKLRKNGLEEYLGFKQGL

SEQ ID NO: 39370 - protein, 204 aa, unidentified
  source 1..204: note = Lysinibacillus massiliensis
  REGION 1..204: note = tr|A0A0A3ILN4|A0A0A3ILN4_9BACI 7-cyano-7-deazaguanine synthase OS=Lysinibacillus massiliensis 4400831 = CIP 108448 = CCUG 49529 OX=1211035; GN = CD30_19380 PE=3 SV=1
MSGGLDSTTLAYELLEQNKSILPVFLDYGQHFKEKELNSLLKVIPQKIKPYLRVVNIKDIYKNSSSRMIIEPNLWMENVNSDDLYLPYRNLLFLTIASSIAQSEDITKVYAAFINSNHAKEIDCSKEFFDKLGVLLNDYGSVEICLPYRDLSKAEVIQRGIRLNVPMAITYSCQANSEVPCGVCPNCVDRENAISFISTVNVDN

SEQ ID NO: 39371 - protein, 219 aa, unidentified
  source 1..219: note = Lysinibacillus odysseyi
  REGION 1..219: note = tr|A0A0A3INP7|A0A0A3INP7_9BACI 7-cyano-7-deazaguanine synthase OS=Lysinibacillus odysseyi 34hs-1 = NBRC 100172 OX=1220589 GN=queC PE=3 SV=1
MIQEKAIVVFSGGQDSTTCLFWAQKQFAEIEAVTFDYGQRHRLEIECAAEIAKELQIKHHILDMSLLNQLAPSALTRTDMEVRDGKDDELPSSFVPGRNLVFLTFAGILAAQVGAKHIVTGVCETDFSGYPDCRDSFIKSLNVSLNLSMDKTFVIDTPLMWLTKAQTWELADSLGAFEFVRERTLTCYNGIKADGCGQCPACKLRQRGLEEYMNSKKHE

SEQ ID NO: 39372 - protein, 221 aa, unidentified
  source 1..221: note = Lysinibacillus saudimassiliensis
  REGION 1..221: note = tr|A0A078MD57|A0A078MD57_9BACI 7-cyano-7-deazaguanine synthase OS=Lysinibacillus saudimassiliensis OX=1461583 GN=queC PE=3 SV=1
MQLNQDKAVVVFSGGQDSTTCLFWALQNFKEVMTLSFDYGQRHQQELAHAEAIAKELGVSFHIMPMHSINELSPNALTKKNIPIAKRDDGLPNTFVPGRNHIFFSFAALYAYAVDARHIITGVSETDFSGYPDCRDNFMKSLNVTLNLAMDADFVLHTPLMWRDKAKVWALSDELGAFDFVREKTLTCYEGIAADGCGECPACVLRREGLVQYLASKDATQ

SEQ ID NO: 39373 - protein, 222 aa, unidentified
  source 1..222: note = Lysinibacillus sinduriensis
  REGION 1..222: note = tr|A0A0A3HVF4|A0A0A3HVF4_9BACI 7-cyano-7-deazaguanine synthase OS=Lysinibacillus sinduriensis BLB-1 = JCM 15800 OX=1384057 GN=queC PE=3 SV=1
MKQEKAVVVFSGGQDSTTCLFWAKERFSEVEAVTFDYGQRHRLEIECAKEIAKELGVKHHILDMSLLSQLAPNALTRNDISVADGENGELPSTFVPGRNLLFMSFAGVLASQVGAKHIVTGVCETDFSGYPDCRDIFIKSLNVTLNLSMDETFVIETPLMWLNKTETWGLADELGALDFVRERTLTCYNGVIADGCGHCASCKLRQKGLETYLSTQKELSNG

SEQ ID NO: 39374 - protein, 222 aa, Lysinibacillus sp.
  REGION 1..222: note = tr|A0A544UPS5|A0A544UPS5_9BACI 7-cyano-7-deazaguanine synthase OS=Lysinibacillus sp. SDF0063 OX=2133753 GN=queC PE=3 SV=1
MKKEKAVVVFSGGQDSTTCLFWAKEQFGEVETLTFDYGQRHKLEIECAQQIAAELGVKNSVLDMSLLNQLAPNALTRTDIDITQEEGQLPSTFVDGRNLLFLSFAGVFAKQRGARHLITGVCETDFSGYPDCRDAFIKSLNVTLNLSMDYPFVIHTPLMWLNKAQTWKLADDLGAFTYIRENTLTCYNGIKGDGCCDCPACHLRKAGLDTYLSEKNQPGEKA

SEQ ID NO: 39375 - protein, 219 aa, Lysinibacillus sp.
  REGION 1..219: note = tr|A0A4R7U5Q5|A0A4R7U5Q5_9BACI 7-cyano-7-deazaguanine synthase OS=Lysinibacillus sp. YR326 OX=1855296 GN=queC PE=3 SV=1
MKQGKAIVVFSGGQDSTTCLFWAKEHFEEVEAVTFDYGQRHRLEIDCAKMIAGELGVKHHILDMSLLNQLAPNALTRQDIKVEDGENGELPSTFVPGRNLLFLSFAGVLASQVGAKHIVTGVCETDFSGYPDCRDVFIKSLNVTLNLSMDDSFVIDTPLMWLNKAQTWELADQFGALEFVREKTLTCYNGVIADGCGECPACQLRNKGLDEYLSYRKES

SEQ ID NO: 39376 - protein, 219 aa, Lysinibacillus sphaericus
  REGION 1..219: note = sp|B1HPF6|QUEC_LYSSC 7-cyano-7-deazaguanine synthase; OS = Lysinibacillus sphaericus (strain C3-41) OX=444177; GN = queC PE=3 SV=1
MKQEKAIVVFSGGQDSTTCLFWAKERFAEIEAVTFNYGQRHRLEIECAEQIAEELGIKHHILDMTLLNQLAPNALTRQDIKVEDGQNGELPSTFVPGRNLLFLSFAGVLASQIGAKHIVTGVCETDFSGYPDCRDVFIKSLNVTLNLSMDNSFVIDTPLMWLNKAQTWELADQFGALEFVRERTLTCYNGVIADGCGECPACKLRKKGLDEYLSYRKEF

SEQ ID NO: 39377 - protein, 370 aa, Lysinibacillus sphaericus
  REGION 1..370: note = tr|A0A2X0XJV9|A0A2X0XJV9_LYSSH NAD synthetase; OS = Lysinibacillus sphaericus OX=1421 GN=NCTC7582_02308; PE = 4 SV=1
MAKYQICTKCVMDTTDSQIKFDQNGVCNHCQNAEALGKKIWFPNEVGSQKLNAILSEIKENGKNKKYDAIVGLSGGIDSSYIVYKAKEWGLRLLAVHVDGGWNTDISVNNVKTVCEYANVDLKIVTIDWEDMKKMQLAFLKAAVPNQDIPQDHAFFTVLYSYAVENDIKYVLNGSNWETESILPRSWGYNAMDGKHVSDIYKKNGDGIKTNFPIIDLYKVKIYYPYVKKMKIVKPLNLMPYNKEQAMKELIDNTEWRYYGGKHYESVWTKFLQAYYLPTKFNIDKRRAHLSSLIVSNQITREEALAELEKPLYDPNEIEKEKEIIADKLEISIDEFNQLLSIRIGKHSDYYCTGDSLLYKMLFKINKAIK

SEQ ID NO: 39378 - protein, 219 aa, Lysinibacillus xylanilyticus
  REGION 1..219: note = tr|A0A2M9Q9L8|A0A2M9Q9L8_9BACI 7-cyano-7-deazaguanine synthase OS=Lysinibacillus xylanilyticus OX=582475 GN=queC PE=3 SV=1
MKKEKAIVVFSGGQDSTTCLFWAKERFKEVEAVTFDYGQRHRLEIECAKVIAKELGIKHHILDMSLLNQLAPNALTRQDIKVEDGENGELPSTFVPGRNLLFLSFAGVLASQVGAKHIVTGVCETDFSGYPDCRDVFIKSLNVTLNLSMDDSFVIDTPLMWLNKAQTWELADQFGALEFVRERTLTCYNGVIADGCGECPACQLRKKGLDEYLSYRKES

SEQ ID NO: 39379 - protein, 219 aa, Lysinibacillus xylanilyticus
  REGION 1..219: note = tr|A0A0K9FD90|A0A0K9FD90_9BACI 7-cyano-7-deazaguanine synthase OS=Lysinibacillus xylanilyticus OX=582475 GN=queC PE=3 SV=1
MKQEKAIVVFSGGQDSTTCLFWAKERFEEVEAVTFDYGQRHRLEIECAKVIAGELGIKHHILDMSLLNQLAPNALTRQDIKVEDGENGELPSTFVPGRNLLFLSFAGVLASQVGAKHIVTGVCETDFSGYPDCRDVFIKSLNVTLNLSMDDSFVIDTPLMWLNKAQTWELADQFGALEFVRERTLTCYNGVIADGCGECPACQLRKKGLDEYLSYRKES

SEQ ID NO: 39380 - protein, 231 aa, unidentified
  source 1..231: note = Lysobacter aestuarii
  REGION 1..231: note = tr|A0A508ARV8|A0A508ARV8_9GAMM 7-cyano-7-deazaguanine synthase OS=Lysobacter aestuarii; OX = 1706195 GN=queC PE=3 SV=1
MKKAVVLVSGGMDSAVVIAIAREQGYAVHALSVRYGQRHTSELDAAERVARDLGAVEHKTVSVDLRSIGGSALTDDIEVPTDADGHPVGDAAPEGHIPVTYVPARNTIMLSMALGWAEVIGAADIFCGVNAVDYSGYPDCRPAFIEAFQVLANLATKAGVEGAGLQVHAPLQHMSKADIVREGLRLGVDFSTTVSCYQADADGRACGHCDACRLRAEGFAAADAVDTTRYS

SEQ ID NO: 39381 - protein, 221 aa, Lysobacter antibioticus
  REGION 1..221: note = tr|A0A0S2F7B4|A0A0S2F7B4_9GAMM 7-cyano-7-deazaguanine synthase OS=Lysobacter antibioticus; OX = 84531 GN=queC PE=3 SV=1
MDSAVVIAIAREQGYAVHALSVRYGQRHTSELDAAARLADSLGAVAHKTVSVDLRSIGGSALTDEAISVPLDNDGHAIGTAAAKDDIPVTYVPARNTIMLSIALGWAEVLGANDIFCGVNAVDYSGYPDCRPEFVEAFERLANLATKAGVEGAGLRVQAPLQFMSKADIVREGVRLGVDFAETVSCYQADADGRACGHCDACRLRAEGFSAAGVADPTRYV

SEQ ID NO: 39382 - protein, 225 aa, unidentified
  source 1..225: note = Lysobacter arseniciresistens
  REGION 1..225: note = tr|A0A0A0F099|A0A0A0F099_9GAMM 7-cyano-7-deazaguanine synthase OS=Lysobacter arseniciresistens ZS79 OX=913325 GN=queC PE=3 SV=1
MKNAVVLVSGGMDSAVVLAIAREQGFAVHALSVRYGQRHTSELDAADRVARALGAVAHKTVNVDLRSIGGSALTDEIDVPLDHVPAAEEIPVTYVPARNTIMLSVALGWAEVLGAADIFCGVNAVDYSGYPDCRPEFIEAFERLANLATRAGVEGAGIRVHAPLQHMSKADIAREGVRLGVDFADTVSCYQADADGRACGHCDACRLRAEGFAAAGIADPTRYMR

SEQ ID NO: 39383 - protein, 232 aa, Lysobacter capsici
  REGION 1..232: note = tr|A0A108UCN2|A0A108UCN2_9GAMM 7-cyano-7-deazaguanine synthase OS=Lysobacter capsici AZ78; OX = 1444315 GN=queC PE=3 SV=1
MKKAVVLVSGGMDSAVVIAIAREQGFAVHALSVRYGQRHTSELDAAALVAQSLGAVAHKTVSVDLRSIGGSALTDESISVPLDNDGHAIGAAAAKDDIPVTYVPARNTIMLSIALGWAEVLGANDIFCGVNAVDYSGYPDCRPEFVEAFERLANLATKAGVEGAGLRVQAPLQFMSKADIVREGQRLGVDFSQTVSCYQADDAGRACGHCDACRLRAEGFNAAGVADPTRYV

SEQ ID NO: 39384 - protein, 232 aa, Lysobacter capsici; identical to SEQ ID NO: 39383
  REGION 1..232: note = tr|A0A0S2FVB5|A0A0S2FVB5_9GAMM 7-cyano-7-deazaguanine synthase OS=Lysobacter capsici; OX = 435897 GN=queC PE=3 SV=1

SEQ ID NO: 39385 - protein, 441 aa, Lysobacter concretionis
  REGION 1..441: note = tr|A0A0A0EPB6|A0A0A0EPB6_9GAMM 7-cyano-7-deazaguanine synthase OS=Lysobacter concretionis Ko07 = DSM 16239 OX=1122185 GN=N792_03875 PE=3 SV=1
MPTDLSSIVVRYEPGRVALSGAVEQDVTITAQSMLNHLLETASQRSIDLVAIATGIYAIDRACKRKLTRHNECGVRTLRVVFEVSDLAFWQQPDIVEQLTDILCVLSGDTWLVSFAKRSEPHQTTAVQRSLDLQQPLPTRVALYSGGLDSAAGLANQLVANDQTYMLLTVGHHVAVRSKCLDQVKKLRQILRTPMLHHASFMVRFDGGVAGKMKSQEKSQRARGFLFCAAAALLADACDIEDIELFENGVGAINLPLTEGGLTDGLSTRGAHPGFLAKMGALVSAVLETPLRFSLPFLSATKAEMVQPLVARPLLAEWLQQSCSCIHTSLRVRGKRHCGHCPACIERRQAFRGGGIEEGAKDYEVDLFSGGVPKDFAYFMSYLENARWWSTGHARVKSRLARHCILTDSTHVPIDQIESMLVRHANESLLTYGGVELLEAA

SEQ ID NO: 39386 - protein, 224 aa, Lysobacter concretionis
  REGION 1..224: note = tr|A0A0A0ERG2|A0A0A0ERG2_9GAMM 7-cyano-7-deazaguanine synthase OS=Lysobacter concretionis Ko07 = DSM 16239 OX=1122185 GN=queC PE=3 SV=1
MKNAVVLVSGGMDSAVVIAMAREQGFAVHALSLDYGQRHTSELAAADRVAKALGVVAHKTVSVDLRSIGGSALTDEIDVPLDEASGADAIPVTYVPARNTIMLSVALGWAEVLGAADLFCGVNAVDYSGYPDCRPEFIAAFEKLANLATKAGVEGAGIRVHAPLQFMSKADIVREGLRLGVDFADTVSCYKADDEGRACGHCDACRLRAEGFAGAGIPDPTRYA

SEQ ID NO: 39387 - protein, 231 aa, Lysobacter daejeonensis
  REGION 1..231: note = tr|A0A0A0EVU7|A0A0A0EVU7_9GAMM 7-cyano-7-deazaguanine synthase OS=Lysobacter daejeonensis GH1-9 OX=1385517 GN=queC PE=3 SV=1
MKKAVVLVSGGMDSAVVIAIAREQGFAVHALSVSYGQRHTSELDAADRVSKALGAVAHKTVNVDLRSIGGSALTDDIEVPLDTDGHPVGQAAAKDAIPVTYVPARNTIMLSIALGWAEVLGANDIFCGVNAVDYSGYPDCRPEFVAAFERLANLATKAGVEGAGLRVHAPLQFMSKADIVREGVRLGVDFAQTVSCYKADEAGRACGHCDACRLRAEGFAVAGVVDPTRYV

SEQ ID NO: 39388 - protein, 213 aa, Lysobacter defluvii
  REGION 1..213: note = tr|A0A0A0M706|A0A0A0M706_9GAMM 7-cyano-7-deazaguanine synthase OS=Lysobacter defluvii IMMIB APB-9 = DSM 18482 OX=1385515 GN=queC PE=3 SV=1
MDSAVVLAMARAQGFRCHALSVRYGQRHTSELEAAARVARELGAVEHKVVDVDLRSIGGSALTADIDVPTSEEAAADPIPVTYVPARNTIMLSVALGWAEVLGAADIFCGVNAVDYSGYPDCRPEFIEAFERLANLATRAGVEGAGIRIHAPLQHMGKDAIVSEGLRLGVDFSHTVSCYQADPDGRACRVCDACRLRAAGFERAGAVDSTRYV

SEQ ID NO: 39389 - protein, 267 aa, Lysobacter dokdonensis
  REGION 1..267: note = tr|A0A0A2WEX2|A0A0A2WEX2_9GAMM Uncharacterized protein OS=Lysobacter dokdonensis DS-58 OX=1300345; GN = LF41_279 PE=4 SV=1
MQHVAPVELFWTSGWDSTFRLLQLLLDHRVPVAPIYVVDPTRGSAAIERLSLERLRDALFDAHPHTRVLLQPVREVPMSDLAQDAAVTAAFHRIASHVPLGDQYEWLARYCKQYGVRGVELSCEHTYQGPHAVLHSIAERVIDPHGLDNWRVPPEYADEDVQAIFGAYTMPLFEMTKEQTAVLAREKGWLDLLGLTWFCHRPTGNDQPCGLCNPCMYAIKQGFGWRISPTRRAASAVYKRTLYPVRRMARRMLMRSHAGPTPLPSAH

SEQ ID NO: 39390 - protein, 225 aa, Lysobacter dokdonensis
  REGION 1..225: note = tr|A0A0A2WKK5|A0A0A2WKK5_9GAMM 7-cyano-7-deazaguanine synthase OS=Lysobacter dokdonensis DS-58 OX=1300345 GN=queC PE=3 SV=1
MNNGNKRAVILVSGGMDSAVVLAIAREQGYEPYALSVRYGQRHTSELDAADRVSNALGAAHKTVVVDLRSIGGSALTDDIDVPEAGGPGIPVTYVPARNTIMLSVALGWAEVLGAADLFCGVNAVDYSGYPDCRPEFIEAFEKLANVATKAGVEGAGIRVHAPLLRMSKADIVREGNRLGVDFAQTVSCYQADAQGRACRHCDACRLRAEGFAAAGVEDPTRYVG

SEQ ID NO: 39391 - protein, 232 aa, Lysobacter enzymogenes
  REGION 1..232: note = tr|A0A1J1E332|A0A1J1E332_LYSEN 7-cyano-7-deazaguanine synthase OS=Lysobacter enzymogenes; OX = 69 GN=queC PE=3 SV=1
MKKAVVLVSGGMDSAVVAAIAREQGFLVHALSVRYGQRHTSELDAAARIAESIGAAAHKTVSVDLRSIGGSALTDESIQVPLDDDGHAIGQDAAKDAIPVTYVPARNTIMLSIALGWAEVLGANDIFCGVNAVDYSGYPDCRPEFVEAFERLANLATKAGVEGAGLRVVAPLQFLSKADIVREGVRLGVDFGQTVSCYKADDAGRACGHCDACRLRAEGFHAAGVADPTRYV

SEQ ID NO: 39392 - protein, 232 aa, Lysobacter enzymogenes
  REGION 1..232: note = tr|A0A3N2RJ96|A0A3N2RJ96_LYSEN 7-cyano-7-deazaguanine synthase OS=Lysobacter enzymogenes; OX = 69 GN=queC PE=3 SV=1
MKKAVVLVSGGMDSAVVAAIAREQGFVVHALSVRYGQRHTSELDAAARIAESIGAAAHKTVSVDLRSIGGSALTDESIQVPLDDDGHPVGQDAAKDAIPVTYVPARNTIMLSIALGWAEVLGANDIFCGVNAVDYSGYPDCRPEFVEAFERLANLATKAGVEGAGLRVVAPLQFLSKADIVREGVRLGVDFGQTVSCYKADDTGRACGHCDACRLRAEGFHAAGVADPTRYV

SEQ ID NO: 39393 - protein, 232 aa, Lysobacter gummosus
  REGION 1..232: note = tr|A0A0S2GAS3|A0A0S2GAS3_9GAMM 7-cyano-7-deazaguanine synthase OS=Lysobacter gummosus; OX = 262324 GN=queC PE=3 SV=1
MKNAVVLVSGGMDSAVVIAIAREQGFAVHALSVRYGQRHTSELDAAARVAVSLGAVAHKTVSVDLRSIGGSALTDETISVPLDNDGHAIGAAAAKDDIPVTYVPARNTIMLSIALGWAEVLGANDIFCGVNAVDYSGYPDCRPEFVEAFERLANLATKAGVEGAGLRVQAPLQFMSKADIVREGLRLGVDFSQTVSCYQADDAGRACGHCDACRLRAEGFNAAGVADPTHYV

SEQ ID NO: 39394 - protein, 229 aa, unidentified
  source 1..229: note = Lysobacter lycopersici
  REGION 1..229: note = tr|A0A516V7S7|A0A516V7S7_9GAMM 7-cyano-7-deazaguanine synthase OS=Lysobacter lycopersici; OX = 1324796 GN=queC PE=3 SV=1
MSAHKPAVVLVSGGMDSAVVLAIAREAGYDVHALSVRYGQRHTSELDAADRVSTALGAVAHKTVHVDLRSIGGSALTDDIDVPTDDDGHVIGQGIPSTYVPARNTIMLSVALGWAEVLGATDLFCGVNAVDYSGYPDCRPEFIAGFEALANLATKAGVEGSRFRVHAPLMRMSKADIVREGLRLGVDFSQTVSCYQADADGRACGHCDACRLRAQGFAEAGVADPTRYR

SEQ ID NO: 39395 - protein, 237 aa, unidentified
  source 1..237: note = Lysobacter maris
  REGION 1..237: note = tr|A0A508ATI9|A0A508ATI9_9GAMM 7-cyano-7-deazaguanine synthase OS=Lysobacter maris; OX = 1605891 GN=queC PE=3 SV=1
MKKAVVLVSGGMDSAVVIAIAREQGYAVHALSVRYGQRHTSELDAADRVARSLGAVAHKTVDVDLRSIGGSALTDDIEVPTDADGHPVGEAAQADPAYRDLIPVTYVPARNTIMLSMALGWAEVLGAADIFCGVNAVDYSGYPDCRPEFIEAFQALANLATRAGVEGAGIRVHAPLQHLSKADIVREGLRLGVDFSQTVSCYQADAEGRACGHCDACRLRAEGFAAAAAADTTRYRD

SEQ ID NO: 39396 - protein, 226 aa, unidentified
  source 1..226: note = Lysobacter maris
  REGION 1..226: note = tr|A0A2U9T6L9|A0A2U9T6L9_9GAMM 7-cyano-7-deazaguanine synthase OS=Lysobacter maris; OX = 1605891 GN=queC PE=3 SV=1
MDSAVVIAIAREQGYAVHALSVRYGQRHTSELDAADRVARSLGAVAHKTVDVDLRSIGGSALTDDIEVPTDADGHPVGEAAQADPAYRDLIPVTYVPARNTIMLSMALGWAEVLGAADIFCGVNAVDYSGYPDCRPEFIEAFQALANLATRAGVEGAGIRVHAPLQHLSKADIVREGLRLGVDFSQTVSCYQADAEGRACGHCDACRLRAEGFAAAGAADTTRYRD

SEQ ID NO: 39397 - protein, 234 aa, unidentified
  source 1..234: note = Lysobacter pythonis
  REGION 1..234: note = tr|A0A3M2HYJ8|A0A3M2HYJ8_9GAMM 7-cyano-7-deazaguanine synthase OS=Lysobacter pythonis; OX = 2483112 GN=queC PE=3 SV=1
MKTTMPKRAVVLVSGGMDSAVVAAIARARGFEVFALSVAYGQRHESELAAAERVAAMTGCARHKTVDVDLRAIGGSALTDEVIPVPTDDDGHEIGGDAIPSTYVPARNTIMLSVALGWAEVLGARDIFCGVNAVDYSGYPDCRPVFIEAFERLANLATKAGVEEGGIRIHAPLMRMTKGEIVREGVRLGVDFSRTVSCYQADADGRACGHCDACRLRALGFVEAGIADNTRYIV

SEQ ID NO: 39398 - protein, 231 aa, Lysobacter ruishenii
  REGION 1..231: note = tr|A0A562M2S1|A0A562M2S1_9GAMM 7-cyano-7-deazaguanine synthase OS=Lysobacter ruishenii; OX = 686800 GN=queC PE=3 SV=1
MKKAVVLVSGGMDSAVVIAIAREQGFAVHALSVSYGQRHTSELDAAGRVSKSLGAVAHKTVNVDLRSIGGSALTDDIEVPLDTDGHPVGQAAAKDAIPVTYVPARNTIMLSIALGWAEVLGANDIFCGVNAVDYSGYPDCRPEFVSAFERLANLATKAGVEGAGLRVHAPLQFMSKADIVREGERLGVDFAQTVSCYKADEAGRACGHCDACRLRAEGFAAAGVADPTRYA

SEQ ID NO: 39399 - protein, 441 aa, Lysobacter ruishenii
  REGION 1..441: note = tr|A0A562LP36|A0A562LP36_9GAMM 7-cyano-7-deazaguanine synthase OS=Lysobacter ruishenii; OX = 686800 GN=IP93_02016 PE=3 SV=1
MSADPTTIRVRYDAGHVMLSGAVEQELVITAQTMLNQLLETASQRSTDSIAIATGAYAIDRVIKRTSDINNECGIRTFRVVFEVADAAFWSAPDITEMLTDILWHLTGDTWLVSFSQRDMLYQTSSVQRLLGLKDPRPTRAALYSGGLDSAAGLANQVISTDETYILLTVGHHPSIRSSSLHQVATLRNLLHPKPLHHASFIVKFNGGVAGKMKAQETSQRVRGLLFYTTAAVLAEACGIEEIEVFENGVGAINLPLTEGGMVDGLSTRGAHPGVLAKIGQLLSKTLDKPIRFSLPFLHSTKAEMLRTLADRAHLPDWLKLSRSCIHSSLRISGKRHCGQCAACIERRQAFRAAGITEDIRDYDFDLFGGATPKEPGYLLTYLENARWWITEHPRVRSRLERHRILSDMTQLPLASIESLLMRHAKESLDTYGDLDLRDAA

SEQ ID NO: 39400 - protein, 227 aa, unidentified
  source 1..227: note = Lysobacter silvestris
  REGION 1..227: note = tr|A0A2K1Q2T3|A0A2K1Q2T3_9GAMM 7-cyano-7-deazaguanine synthase OS=Lysobacter silvestris; OX = 1645665 GN=queC PE=3 SV=1
MTPAVILVSGGMDSAVVLALAREQGFAAHALSVRYGQRHLSELDAAQRVAKVLGAVEHKIVEIDLRAIGGSALTSDIDVPTDADGHEIGTGDIPVTYVPARNTLMLSAALGWAEVLGANDIFCGVNAVDYSGYPDCRPEFIAAFEALANLATRAGVEGTRFHVHAPLMRMTKADIAREGERLGVDFAQTVSCYQADEAGRACGHCDACLLRARGFADAGLADPTRYR

SEQ ID NO: 39401 - protein, 201 aa, unidentified
  source 1..201: note = Lysobacter silvestris
  REGION 1..201: note = tr|A0A2K1Q1D5|A0A2K1Q1D5_9GAMM 7-cyano-7-deazaguanine synthase OS=Lysobacter silvestris; OX = 1645665 GN=Lysil_0488 PE=3 SV=1
MKTALLLSGGMDSIALAWWKRPKQAFTVDYGQLAATAEIDASVAICRVLDIPHTVIHFDAKALGSGDMAGTLPDPNAPASDWWPYRNQLLVTLVAMKAVASGTQRLWMGAVASDGVHKDGTPEFFMHISRLLSYQEGGIVVEAPAIGLRTVDLVRKSNIPRSMLAWAHSCHKADVPCCDCRGCNKYFEVLQELDRDVATGD

SEQ ID NO: 39402 - protein, 232 aa, Lysobacter soli
  REGION 1..232: note = tr|A0A3D8V9A1|A0A3D8V9A1_9GAMM 7-cyano-7-deazaguanine synthase OS=Lysobacter soli; OX = 453783 GN=queC PE=3 SV=1
MKKAVVLVSGGMDSAVVVAIARAQGFDVHALSVRYGQRHTSELDAAQRVADSLGAVAHKTVNVDLRSIGGSALTDETITVPTDADGHAVGQDAPKDAIPVTYVPARNTIMLSVALGWAEVLGANDLFCGVNAVDYSGYPDCRPEFVEAFEKLANLATKAGVEGAGIRVHAPLQFMSKADIVREGVRLGVDFAQTVSCYQADDEGRACGHCDACRLRAEGFAAAGVADPTRYV

SEQ ID NO: 39403 - protein, 239 aa, Lysobacter sp.
  REGION 1..239: note = tr|A0A3M8SY81|A0A3M8SY81_9GAMM 7-cyano-7-deazaguanine synthase OS=Lysobacter sp. ZS60; OX = 1327343 GN=queC PE=3 SV=1
MKPAVVLVSGGMDSAVVVAIAREMGFAVHALSVRYGQRHTSELEAADRVATALGAVAHKTVNVDLRSIGGSALTDESISVPTDEDGHAIGSDAVKDAIPVTYVPARNTIMLSVALGWAEVLGAADIFCGVNAVDYSGYPDCRPEFVAAFEALANLATKAGVEGAGLRVHAPLQHLSKADIVREGLRLGVDFAQTVSCYQADADGRACGHCDACRLRAEGFAAAGVPDPTRYVNPPARQG

SEQ ID NO: 39404 - protein, 213 aa, Lysobacter sp.
  REGION 1..213: note = tr|A0A345ZP18|A0A345ZP18_9GAMM 7-cyano-7-deazaguanine synthase OS=Lysobacter sp. TY2-98; OX = 2290922 GN=queC PE=3 SV=1
MDSAVVVAMAKAQGFDVYALSVRYGQRHTSELDAAARVATSLGAAAHKTVVVDLGTIGGSALTDASIDVPTAGDTGDTIPVTYVPARNTIMLSIALGWAEVLGANDIFCGVNAVDYSGYPDCRPEFVAAFERLANLATKAGVEGAGLRVHAPLQFMSKADIAREGMRLGVDFGLTVSCYQADADGRACGACDACRLRAQGFEAAGVPDPTRYA

SEQ ID NO: 39405 - protein, 225 aa, Lysobacter spongiicola
  REGION 1..225: note = tr|A0A1T4QXV1|A0A1T4QXV1_9GAMM 7-cyano-7-deazaguanine synthase OS=Lysobacter spongiicola DSM 21749 OX=1122188 GN=queC PE=3 SV=1
MKNAVVLVSGGMDSAVVLAIARERGFAVHALSVRYGQRHTSELEAAARVARAMGAVAHKTVGVDLGSIGGSALTDAGIDVPMDQAPGDGEIPVTYVPARNTIMLSIALGWAEVLGAADIFCGVNAVDYSGYPDCRPEFIEAFERLANLATRAGVEGAGIRVHAPLQHLGKDDIVREGVRLGVDFADTVSCYAADAAGKACGHCDACRLRAAGFDAAGVADPTRYA

SEQ ID NO: 39406 - protein, 232 aa, unidentified
  source 1..232: note = Lysobacter tolerans
  REGION 1..232: note = tr|A0A1N6NHX2|A0A1N6NHX2_9GAMM 7-cyano-7-deazaguanine synthase OS=Lysobacter tolerans; OX = 1604334 GN=queC PE=3 SV=1
MSEVSKRAVVLVSGGMDSAVVAAIARAEGFDVYALSVAYGQRHQSELAAAQRVAVMTGATQHKTVDVDLRSIGGSALTDVIDVPTDEDGHKIGTGDIPSTYVPARNTIMLSVALGWAEVLGAKDIFCGVNAVDYSGYPDCRPAFIEAFERLANLATKTGVEEGGLRVQAPLMSMTKADIVREGVRLGVDFAQTVSCYQADAEGRACGHCDACLLRAQGFDEAGIADNTRYIG

SEQ ID NO: 39407 - protein, 222 aa, unidentified
  source 1..222: note = Macrococcus bohemicus
  REGION 1..222: note = tr|A0A4R5Y044|A0A4R5Y044_9STAP 7-cyano-7-deazaguanine synthase OS=Macrococcus bohemicus; OX = 1903056 GN=queC PE=3 SV=1
MEKQLNNNKALVVFSGGQDSTTCLFWAMERYSDVEVVTFNYGQRHALEIDVAKQIANEHGIKHHILDMSLLTQLSPNALTNHNAIITDDGEVPNTFVPARNLLFMSFAAALAYQIEAKHIITGVCETDFSGYPDCRDNFIKSLNVTINLSMDVNFEIHTPLMWLDKKETWALADTLGKLDYVRNKTLTCYEGIAADGCGECPSCKLRNKGLNDYLNEKEVLS

SEQ ID NO: 39408 - protein, 222 aa, unidentified
  source 1..222: note = Macrococcus bohemicus
  REGION 1..222: note = tr|A0A328A7M8|A0A328A7M8_9STAP 7-cyano-7-deazaguanine synthase OS=Macrococcus bohemicus; OX = 1903056 GN=queC PE=3 SV=1
MEKQLNNNKALVVFSGGQDSTTCLFWAMERYSDVEVVTFNYGQRHALEIDVAKQIANEQGIKHHILDMSLLTQLSPNALTSHDVAITHDNNVPNTFVPARNLLFMSFAAALAYQIEAKHIITGVCETDFSGYPDCRDNFIKSLNVTINLSMDVNFEIHTPLMWLNKKETWALADALGKLDYVRNKTLTCYEGIPADGCGECPSCILRNKGLKDYLNEKEVLS

SEQ ID NO: 39409 - protein, 218 aa, Macrococcus bovicus
  REGION 1..218: note = tr|A0A4R6C159|A0A4R6C159_9STAP 7-cyano-7-deazaguanine synthase OS=Macrococcus bovicus; OX = 69968 GN=queC PE=3 SV=1
MKLNNDKALVVFSGGQDSTTCMFHALKHYQEVELVTFSYGQRHALEIEVATNIAAEQGLKHHVLDMSLLSQLSPNALTDHSMAIEDGDIPNTFVPARNLLFMSFAAALAYQIGAKHIITGVCETDFSGYPDCRDIFIKSLNVTVNLAMDEDFVIHTPLMWLDKKETWQLADELGQLDYVRFKTLTCYEGIMADGCGECPSCQLRKAGLEAYLAERGTK

SEQ ID NO: 39410 - protein, 218 aa, Macrococcus brunensis
  REGION 1..218: note = tr|A0A4R6BGL8|A0A4R6BGL8_9STAP 7-cyano-7-deazaguanine synthase OS=Macrococcus brunensis; OX = 198483 GN=queC PE=3 SV=1
MKLNNDKALVVFSGGQDSTTCMFHALKHYKEVELVTFNYGQRHALEITVAQNIAEEQGLKHHVLDMSLLSQLSPNALTDHTMAIEEGNIPNTFVPARNLLFMSFAAALAYQIGAKHIITGVCETDFSGYPDCRDIFIKSLNVTVNLAMDENFVIHTPLMWLDKKETWQLADELGQLDYVRNNTLTCYEGIMADGCGECPSCQLRNAGFTAYLAERGAK

SEQ ID NO: 39411 - protein, 222 aa, unidentified
  source 1..222: note = Macrococcus canis
  REGION 1..222: note = tr|A0A4P9CHI6|A0A4P9CHI6_9STAP 7-cyano-7-deazaguanine synthase OS=Macrococcus canis; OX = 1855823 GN=queC PE=3 SV=1
MKQLNSNKALVVFSGGQDSTTCMFYAMHHYDEVELVTFNYGQRHALEIDIAKQIAEEQNLKHHVLDMSLLSQLSPNALTHHDIEIEDDDIPNTFVPARNLLFMSFAAALAYQINAQHIITGVCETDFSGYPDCRDNFIKSLNVTINLSMDLNFEIHTPLMWLDKKETWALADTLGQLDYVRNKTLTCYNGIPADGCGECPSCKLRNNGLTQYLQEKESGEIK

SEQ ID NO: 39412 - protein, 221 aa, unidentified
  source 1..221: note = Macrococcus canis
  REGION 1..221: note = tr|A0A4R6C5Y4|A0A4R6C5Y4_9STAP 7-cyano-7-deazaguanine synthase OS=Macrococcus canis; OX = 1855823 GN=queC PE=3 SV=1
MKKLNSNKALVVFSGGQDSTTCMFYAMHHYDEVELVTFNYGQRHALEIDIAKQIAVEQGLKHHVLDMSLLSQLSPNALTHHDFQIEGDDIPNTFVPARNLLFMSFAAALAYQINAKHIITGVCETDFSGYPDCRDNFIKSLNVTINLSMDLNFEIHTPLMWLDKKETWSLADTLGQLDYVRNKTLTCYNGVPADGCGECPSCKLRNNGLNQYLQEKESGDL

SEQ ID NO: 39413 - protein, 218 aa, Macrococcus carouselicus
  REGION 1..218: note = tr|A0A4R6BPI8|A0A4R6BPI8_9STAP 7-cyano-7-deazaguanine synthase OS=Macrococcus carouselicus OX=69969 GN=queC PE=3 SV=1
MNLNPDKALVVFSGGQDSTTCMFHALKHYKEVEVVTFNYGQRHALEIEVAKKIADEQGLKHHILDMSLLSQLAPNALTDHTLEIEGGDIPNTFVPARNLLFMSFAAALAYQIEAKHIITGVCETDFSGYPDCRDIFIKSLNVTVNLAMDQNFVIHTPLMWLDKKETWQLADELGQLDYIRNNTLTCYKGIIADGCGECPSCQLRKTGLEAYLAERGTK

SEQ ID NO: 39414 - protein, 222 aa, Macrococcus caseolyticus
  REGION 1..222: note = tr|A0A3B0F3K7|A0A3B0F3K7_9STAP 7-cyano-7-deazaguanine synthase OS=Macrococcus caseolyticus OX=69966 GN=queC PE=3 SV=1
MKQLNSNKALVVFSGGQDSTTCMFYAMHHYDEVELVTFNYGQRHALEIDIAKQIAEEQGLKHHVLDMSLLSQLSPNALTHHDLTIEDNDIPNTFVPARNLLFISFAAALAYQINAKHIITGVCETDFSGYPDCRDNFIKSLNVTINLSMDLNFEIHTPLMWLDKKETWALADTLGQLDYVRNKTLTCYNGIPADGCGECPSCKLRNNGLNQYLQEKESGDLK

SEQ ID NO: 39415 - protein, 222 aa, Macrococcus caseolyticus
  REGION 1..222: note = tr|B9EAB1|B9EAB1_MACCJ 7-cyano-7-deazaguanine synthase OS=Macrococcus caseolyticus (strain JCSC5402); OX = 458233 GN=queC PE=3 SV=1
MKQLNSNKALVVFSGGQDSTTCMFYAMHHYDEVELVTFNYGQRHALEIDIAKQIAEEQGLKHHVLDMSLLSQLSPNALTHHDLTIENNDIPNTFVPARNLLFMSFAAALAYQINAKHIITGVCETDFSGYPDCRDNFIKSLNVTINLSMDLNFEIHTPLMWLDKKETWALADTLGQLDYIRNKTLTCYNGIPADGCGECPSCKLRNNGLNQYLQEKESGDLK

SEQ ID NO: 39416 - protein, 222 aa, unidentified
  source 1..222: note = Macrococcus epidermidis
  REGION 1..222: note = tr|A0A327ZYG7|A0A327ZYG7_9STAP 7-cyano-7-deazaguanine synthase OS=Macrococcus epidermidis; OX = 1902580 GN=queC PE=3 SV=1
MEKQLNNNKALVVFSGGQDSTTCLFWAMERYSDVEVVTFNYGQRHALEIDIAKQVANEQGIKHHILDLSLLSQLSPNALTHHNVAITHDNNVPNTFVPARNLLFMSFAAALAYQIEAKHIITGVCETDFSGYPDCRDNFIKSLNVTINLSMDVNFEIHTPLMWLDKKETWALADALGKLDYVRNKTLTCYEGIPADGCGECPSCKLRNKGLNDYLNEKEVLS

SEQ ID NO: 39417 - protein, 222 aa, unidentified
  source 1..222: note = Macrococcus goetzii
  REGION 1..222: note = tr|A0A395G8W0|A0A395G8W0_9STAP 7-cyano-7-deazaguanine synthase OS=Macrococcus goetzii; OX = 1891097 GN=queC PE=3 SV=1
MEKQLNSNKALVVFSGGQDSTTCLFWAMERYSDVEVVTFNYGQRHALEIDIAKQIANEQGIKHHILDMSLLSQLSPNALTNHDVAITHDNNVPNTFVPARNLLFMSFAAALAYQIEAKHIITGVCETDFSGYPDCRDNFIKSLNVTINLSMDVNFEIHTPLMWLNKKETWALADALGKLDYVRNKTLTCYEGIPADGCGECPSCKLRNKGLNDYLNEKEVLS

SEQ ID NO: 39418 - protein, 222 aa, unidentified
  source 1..222: note = Macrococcus goetzii
  REGION 1..222: note = tr|A0A4R6CEH4|A0A4R6CEH4_9STAP 7-cyano-7-deazaguanine synthase OS=Macrococcus goetzii; OX = 1891097 GN=queC PE=3 SV=1
MEKQLNNNKALVVFSGGQDSTTCLFWAMERYSDVEVVTFNYGQRHALEIDIAKQIANEQGIKHHILDMSLLSQLSPNALTNHDVAITHDNNVPNTFVPARNLLFMSFAAALAYQIEAKHIITGVCETDFSGYPDCRDNFIKSLNVTINLSMDVNFEIHTPLMWLNKKETWALADALSKLDYVRNKTLTCYEGIPADGCGECPSCKLRNKGLNDYLNEKEVLS

SEQ ID NO: 39419 - protein, 221 aa, Macrococcus hajekii
  REGION 1..221: note = tr|A0A4R6BIZ4|A0A4R6BIZ4_9STAP 7-cyano-7-deazaguanine synthase OS=Macrococcus hajekii; OX = 198482 GN=queC PE=3 SV=1
MINMNLKSNKALVVFSGGQDSTTCLFHALEHYDEVELVTFNYGQRHALEIKVAKSIAKEQGLKHHVLDMSLLSQLAPNALTDHHMQIEDDEIPNTFVPARNLLFMSFAAALAYQIEAKHIITGVCETDFSGYPDCRDIFIKSLNVTINLSMDQDFVIHTPLMWLDKKQTWALADSLGQLDYIRNNTLTCYEGIMTDGCGECPSCKLRNAGLKAYLTERGAR

SEQ ID NO: 39420 - protein, 221 aa, Macrococcus lamae
  REGION 1..221: note = tr|A0A4V3BFC6|A0A4V3BFC6_9STAP 7-cyano-7-deazaguanine synthase OS=Macrococcus lamae; OX = 198484 GN=queC PE=3 SV=1
MNGQLSNSKALVVFSGGQDSTTCLFYALKQFQEVELVTFNYGQRHALEIDVARQIADDQQLKHHVLDMSLLSQLAPNALTDHTMNISAESELPNTFVPARNLLFMSFAGALAYQIGAKHIITGVCETDFSGYPDCRDMFVKSLNVTLNLSMDKEFVIHTPLMWLDKKQTWQLADELGQLDYIRANTLTCYEGIIADGCGTCPSCLLRNNGLRAYMKERETK

SEQ ID NO: 39421 - protein, 221 aa, Macrococcus sp.
  REGION 1..221: note = tr|A0A4V1M1Z3|A0A4V1M1Z3_9STAP 7-cyano-7-deazaguanine synthase OS=Macrococcus sp. DPC7161; OX = 2507060 GN=queC PE=3 SV=1
MEKQLNNNKALVVFSGGQDSTTCVFHALKQYDTVELVTFNYGQRHALEIEVAKNIASDLGLKHHILDMSLLSQLSPNALTDHTLAIESNSTVPNTFVPARNLLFMSFAAALAYQIEARHIITGVCETDFSGYPDCRDNFIKSLNLTINLSMDMNFEIHTPLMWLDKKETWALADELGRLDYIRNQTLTCYEGIIGDGCGECPSCKLRKNGLDQYLQSRGGL

SEQ ID NO: 39422 - protein, 228 aa, unidentified
  source 1..228: note = Magnetococcus marinus
  REGION 1..228: note = sp|A0L4R8|QUEC_MAGMM 7-cyano-7-deazaguanine synthase; OS = Magnetococcus marinus (strain ATCC BAA-1437 / JCM 17883 / MC-1) OX=156889 GN=queC PE=3 SV=1
MPTIMSAVVLLSGGLDSATVLRMAHATGQRIHALSFRYGQRHTMELEMARKQALSLPGVAHRIMDLQLSLFGGSALTADIPVPKGGVDENTIPVTYVPARNMVFLSLALAWAESLGAQHLYIGVNAVDYSGYPDCRPEFIQSFQQTANLATKAGVEGHPFTVHTPLINLTKAQIIQQGLALGVDYGLTRSCYDPDAQGAGCGLCDACRLRLQGFAEAGVPDPAPYQGP

SEQ ID NO: 39423 - protein, 225 aa, unidentified
  source 1..225: note = Magnetococcus massalia
  REGION 1..225: note = tr|A0A1S7LL73|A0A1S7LL73_MAGMO 7-cyano-7-deazaguanine synthase OS=Magnetococcus massalia (strain MO-1) OX=451514 GN=queC PE=3 SV=1
MPRSAVILLSGGLDSATVLHMAHQQGLQLYALSFRYGQRHTLELEMAAKQAAALPHVTHRVLDLNLSAFGGSALTDEIPVPKEGVEPGIPVTYVPARNTVFLSLALAWAETLGAADIFIGVNAIDYSGYPDCRPDFIHAFNELANLATREGVEGEGFKIHAPLIEMSKAEIIQTGLKLGVDYSLTRSCYDPDEKGDACGRCDACRLRLEGFMGAGISDPSPYQQR

SEQ ID NO: 39424 - protein, 235 aa, unidentified
  source 1..235: note = Magnetofaba australis
  REGION 1..235: note = tr|A0A1Y2K262|A0A1Y2K262_9PROT 7-cyano-7-deazaguanine synthase OS=Magnetofaba australis IT-1 OX=1434232 GN=queC PE=3 SV=1
MIAMDGTPRAVILLSGGLDSATALRMAHNQGYELYALSFRYGQRHSHELTCAAQLAAQLPDVTHRILDLDLTVFGGSALTADIPVPKDGVGDGIPVTYVPARNTVFLSLSLSWAEALGAHDIFVGVNAVDYSGYPDCRPQYIEAFETLANLATRDGVEGRRFRIHAPLIHLTKGQIIAQGLALGVDYGLTTSCYDPDEQGRGCGLCDACRLRLAGFAEAGAADPARYVPNASPGA

SEQ ID NO: 39425 - protein, 634 aa, unidentified
  source 1..634: note = Magnetospirillum caucaseum
  REGION 1..634: note = tr|M2ZRK5|M2ZRK5_9PROT Uncharacterized protein; OS = Magnetospirillum caucaseum OX=1244869 GN=H261_10472; PE = 4 SV=1
MLMAERLVICGGVTGVPGARNVLEMDVNAPEGTPQKVNLRLGDLCARMVQDVPAVLADLLEVASYVYCADQFTRRGRDGMRSMGAEWRRQFRFIIPVRRPDLWNRRDVIEALCETLGFLSEDAYALEFVEHGSPATGLQPYLDLGHSADRGFVPDEVMLFSGGLDSFAGAVDSLIGNGRKVALVSHRGSSMVTSRQSALLIALRNRTRASQLFHVYVSVNKGQEEAVEFTQRTRSFLFASLGLVVAHLFGQRTIRFYENGVVSINLPLAEHVLGARATRTTHPHVLADFTSLFSLLLGEAVLVENPYLWLTKSDVVGVIAKHGCADLIAETFSCTRVREATKRKRHCGVCSQCLDRHFGILGAGLGEYESAEAYSVDLFKGERKPGTDVVMAESYVLNAMKLAGMSEQGFFSTFGQAFRVLPYLPGPPDEAAAKIYDLLRRHGQTVARVVDWELGNNASLTHTLGLPDTSLLMLLKSTSMRSMETVDPAEVEPPASEQAAADVSRRSANGLFFAVDEEKERILFRGGVELAGAGFKLLRALVADFAADVTAGLPHEEHRLIKSDALAERLGIEEPTLRKRVVRTRNAIEKQFLDKLDVQIADDAVIQNVNWRGYRLNPYLLQIQPGQLGDIGSD

SEQ ID NO: 39426 - protein, 227 aa, unidentified
  source 1..227: note = Magnetospirillum caucaseum
  REGION 1..227: note = tr|M3AF30|M3AF30_9PROT 7-cyano-7-deazaguanine synthase OS=Magnetospirillum caucaseum OX=1244869 GN=queC; PE = 3 SV=1
MRPAVVLLSGGLDSATVLAIAKAEGFAPAALTFRYGQRHAVEIRAAERVAAAMGIADHRIADIDLRVFGGSALTSDIAVPKGNLDEAIPAGIPVTYVPARNTIMLSFALAFAEVIGAADIFVGVNAVDYSGYPDCRPDYIGAFEAMANLATKAAVEGTRLRLHTPLIDLSKADIIRRGLGLGVDYSITSTCYDPDPGGRACGHCDSCRLRLKGFAEAGLADPAEYSP

SEQ ID NO: 39427 - protein, 230 aa, Magnetospirillum gryphiswaldense
  REGION 1..230: note = tr|V6F5X3|V6F5X3_MAGGM 7-cyano-7-deazaguanine synthase OS=Magnetospirillum gryphiswaldense (strain DSM 6361 / JCM 21280 / NBRC 15271 / MSR-1) OX=431944 GN=queC; PE = 3SV=1
MTKKAVILLSGGLDSATVLALATERGFDCAALSFRYGQRHQVELACAAKVAAAAGITDHRIADIDLRLFGGSALTADIAVPKDRAEAEMDAEIPVTYVPARNTIMLSFALAFAEVLGAADIFVGVNAVDYSGYPDCRPEYIKAFETMANLATKAGVEGRRLTIHAPLISLTKAQIIAEGKRLGVDYGLTSSCYDPDVHGHACGRCDACRLRLKGFADAGLSDPAPYAGGV

SEQ ID NO: 39428 - protein, 230 aa, Magnetospirillum gryphiswaldense
  REGION 1..230: note = tr|A4TUU2|A4TUU2_9PROT 7-cyano-7-deazaguanine synthase OS=Magnetospirillum gryphiswaldense OX=55518; GN = queC PE=3 SV=1
MTKKAVILLSGGLDSATVLALATEWGFDCAALSFRYGQRHQVELACAAKVAAAAGVADHRIADIDLRLFGGSALTADIAVPKDRLEAEMEAEIPVTYVPARNTIMLSFALAFAEVLGAADIFVGVNAVDYSGYPDCRPEYIKAFETMANLATKAGVEGRRLTIHAPLISLTKAQIIAEGKRLGVDYGLTSSCYDPDVHGHACGRCDACRLRLKGFADAGLSDPAPYAGGV

SEQ ID NO: 39429 - protein, 231 aa, unidentified
  source 1..231: note = Magnetospirillum kuznetsovii
  REGION 1..231: note = tr|A0A364NXW0|A0A364NXW0_9PROT 7-cyano-7-deazaguanine synthase OS=Magnetospirillum kuznetsovii OX=2053833 GN=queC PE=3 SV=1
MKPAVVLLSGGLDSATTLAMAKADGFAPAALTFRYGQRHAVEIDAARRVALAIGVSDHRIADIDLRVFGGSALTSDLAVPKGRADAEISTGIPVTYVPARNTIMLSFALAFAEVIGAADIFVGVNAVDYSGYPDCRPDYIKAFEDMANLATKAAVEGRRLTLHTPLINLTKGEIIKKGLALGVDYAITSTCYDPDPLGHACGQCDSCRLRLKGFAEAGLADPAPYAARPMK

SEQ ID NO: 39430 - protein, 227 aa, unidentified
  source 1..227: note = Magnetospirillum magneticum
  REGION 1..227: note = sp|Q2W000|QUEC_MAGSA 7-cyano-7-deazaguanine synthase; OS = Magnetospirillum magneticum (strain AMB-1 / ATCC 700264) OX=342108 GN=queC PE=3 SV=1
MKPAIVLLSGGLDSATVLAIAKAEGFAPAALTFRYGQRHAVEIRAAERVAAALGIRDHRIADIDLRVFGGSALTSDIAVPKGELDEAIPAGIPVTYVPARNTIMLSFALAFAEVLGAADIFVGVNAVDYSGYPDCRPDYIKAFEAMANLATKAAVEGTRLTIHTPLIDLTKGQIIRRGLDLGVDYSITSTCYDPTPDGKACGHCDSCRLRLKGFAEAGLADPAEYAS

SEQ ID NO: 39431 - protein, 229 aa, Magnetospirillum magnetotacticum
  REGION 1..229: note = tr|A0A0C2YIU5|A0A0C2YIU5_MAGMG 7-cyano-7-deazaguanine synthase OS=Magnetospirillum magnetotacticum MS-1 OX=272627 GN=queC PE=3 SV=1
MTVRPAIVLLSGGLDSATVLAIAKAEGFTPSALTFRYGQRHAVEIRAAERVAAALRVSDHRVADIDLRVFGGSALTSDIAVPKGNLDEAIPEGIPVTYVPARNTIMLSFALAFAEVLGAADIFVGVNAVDYSGYPDCRPDYIKAFEAMANLATKAAVEGTRMTLHTPLIDLTKADIIRRGLALGVDYSLTSTCYDPDPMGRACGHCDSCRLRLKGFAEAGLADPAEYAP

SEQ ID NO: 39432 - protein, 226 aa, unidentified
  source 1..226: note = Magnetospirillum marisnigri
  REGION 1..226: note = tr|A0A178MKJ1|A0A178MKJ1_9PROT 7-cyano-7-deazaguanine synthase OS=Magnetospirillum marisnigri OX=1285242 GN=queC PE=3 SV=1
MKPAVVLLSGGLDSATTLAIAKAQGFAPAALTFRYGQRHAVEIDAARRVALAIGVADHRIADIDLRVFGGSALTSDIAVPKGRDDAEMAAGIPVTYVPARNTIMLSFALAFAEVIGADDIFVGVNAVDYSGYPDCRPDYIQAFEAMANLATKAAVEGRKLTLHTPLITLTKGEIIRQGLALGVDYAITSTCYDPDPLGRACGQCDSCKLRLKGFAEAGLRDPAPYA

SEQ ID NO: 39433 - protein, 228 aa, unidentified
  source 1..228: note = Magnetospirillum moscoviense
  REGION 1..228: note = tr|A0A178M757|A0A178M757_9PROT 7-cyano-7-deazaguanine synthase OS=Magnetospirillum moscoviense OX=1437059 GN=queC PE=3 SV=1
MTRRAVVLLSGGLDSATVLAMAQKAGFECWALSFRYGQRHAVELAAAARVAAALGAARHRVAEIDLRAFGGSALTADIDVPKDRDDAAIAGGIPVTYVPARNTIMLSFALAWAEVLEAFDIFVGVNAVDYSGYPDCRPEYVAAFERMANLATKAGVEGHKLTIHTPLIDLTKAQIIAKGVELGVDYALTSSCYDPDHQGRACGRCDSCRLRRKGFEQAGIPDPTSYTD

SEQ ID NO: 39434 - protein, 227 aa, Magnetospirillum sp.
  REGION 1..227: note = tr|A0A0U5MET3|A0A0U5MET3_9PROT 7-cyano-7-deazaguanine synthase OS=Magnetospirillum sp. XM-1 OX=1663591 GN=queC PE=3 SV=1
MKPAVVLLSGGLDSATVLAIAKAEGFAPAALTFRYGQRHAVEIRAAQRVAAAMGVGDHRIADIDLRVFGGSALTSDIAVPKGDLDEAIPAGIPVTYVPARNTIMLSFALAFAEVIGAADIFVGVNAVDYSGYPDCRPDYIKAFEAMANLATKAAVEGTPLRLHTPLIDLTKGQIIRRGLDLGVDYSITSTCYDPDAQGRACGHCDSCRLRLKGFAEAGLSDPAEYGP

SEQ ID NO: 39435 - protein, 230 aa, Magnetospirillum sp.
  REGION 1..230: note = tr|A0A1M3LJ27|A0A1M3LJ27_9PROT 7-cyano-7-deazaguanine synthase OS=Magnetospirillum sp. 64-120 OX=1895778 GN=queC PE=3 SV=1
MKPKAVILLSGGLDSATVLAMAQEQGYDCAALSFRYGQRHHVELDCAARVAKAAGVVDHRIVDIDLRGFGGSALTSDIAVPKDRDEAQMDAEIPVTYVPARNTIMLSFALAFAEVIGAADIFVGVNAVDYSGYPDCRPEYVKAFEAMANLATKAGVEGHKLTIHAPLMSLGKGQIIAEGTRLGVDYSLTSSCYDPDDQGRACGRCDSCQLRRKGFADAGIADPTPYSPQV

SEQ ID NO: 39436 - protein, 235 aa, unidentified
  source 1..235: note = Magnetovibrio blakemorei
  REGION 1..235: note = tr|A0A1E5QC40|A0A1E5QC40_9PROT 7-cyano-7-deazaguanine synthase OS=Magnetovibrio blakemorei OX=28181 GN=queC PE=3 SV=1
MPQSLNKNAVLLLSGGLDSTTVLAIAQDAGYSVHALSFRYGQRHSFELECATRIAKAARVAQHVILDLDLSQFGGSALTSDIAVPKDRNAQEMQGSIPVTYVPARNTVFLSCALGWAETLGTGDIFIGVNALDYSGYPDCRPEYIAAFETLANLATKGGVEGTAPVRIHTPLIHMSKAEIIAKGTQLQVDYGLTISCYDPDVTGAACGHCDACQLRLKGFHEAGLVDPMRYQEGS

SEQ ID NO: 39437 - protein, 242 aa, unidentified
  source 1..242: note = Magnetovibrio sp.
  REGION 1..242: note = tr|A0A2E3P6B9|A0A2E3P6B9_9PROT 7-cyano-7-deazaguanine synthase OS=Magnetovibrio sp.; OX = 2024836 GN=queC PE=3 SV=1
MNGETAVVLLSGGLDSTTVLAIARDKGYRLLALSFRYGQRHSVELDVAARIARQMGVARHAVADIDLTVYGGSALTADIDVPKDRDADAMADGIPVTYVPARNTIFLAHALALAETGGARNIFIGVNALDYSGYPDCRPAFIKAFQRLANLATKEGVEAMARGTDGPFHVQAPLMDMTKAEIIRHGMALGVDYAQTWSCYDPHPGAGGAADAPVHCGRCDSCQLRKKGFAEAGVDDPTAYAV

SEQ ID NO: 39438 - protein, 240 aa, unidentified
  source 1..240: note = Magnetovibrio sp.
  REGION 1..240: note = tr|A0A2D7AAQ0|A0A2D7AAQ0_9PROT 7-cyano-7-deazaguanine synthase OS=Magnetovibrio sp.; OX = 2024836 GN=queC PE=3 SV=1
MAEKAGSEKKQRAIVLLSGGLDSATVFAVAYQEGYQIVALSFDYGQRHVRELEAARAIAQGWGVQHHAIVNLDLRAFGGSALTDNIEVPKGRSDKEIGEGIPVTYVPARNTIFLSHALALAEVEGARDIFIGVNALDYSGYPDCRPEYISAFQTMANLATKACIEETPGLLIRSPLQDFTKAKIVELGTHLGVDFANTLSCYDPPGGRGDFSHCGICDACQLRRKGFEEASIHDPTRYKN

SEQ ID NO: 39439 - protein, 249 aa, Malikia granosa
  REGION 1..249: note = tr|A0A2S9K687|A0A2S9K687_9BURK 7-cyano-7-deazaguanine synthase OS=Malikia granosa; OX = 263067 GN=queC PE=3 SV=1
MHTTALVLFSGGQDSTTCLAHALQRYQRVETLGFHYGQRHAVEMEARLSVLAELRRQFPAWAGRLGDDHVLDVGVLGQVSETSLTREMAFQIEASGLPNTFVPGRNLVFLTLAAALAYRRGLQVVVTGVCETDFSGYPDCRDDTIKALQVALSLGLDRRLLLETPLMWIDKAQTWALAEQLGAESGVAGGGQALVDLIVEHSHTCYLGDREHRHDWGWGCGSCPACELRARGWQRWRAGLSNAMGGPAT

SEQ ID NO: 39440 - protein, 249 aa, Malikia spinosa
  REGION 1..249: note = tr|A0A2S9KHX0|A0A2S9KHX0_9BURK 7-cyano-7-deazaguanine synthase OS=Malikia spinosa; OX = 86180 GN=queC PE=3 SV=1
MHTTALVLFSGGQDSTTCLAHALQRYQRVETLGFHYGQRHAVEMEARLCVLSELRRQFPAWTERLGQDHVLDVGVLGQVSETSLTREMAFQIEASGLPNTFVPGRNLVFLTLAAALAYRRGLQVIVTGVCETDFSGYPDCRDDTIKALQVALSLGLDRRLLLETPLMWIDKAQTWALAEQLGADSGVAGGGQALVDLIVEHSHTCYLGDREHRHDWGWGCGSCPACELRARGWQRWRAGLSDGIAGLAN

SEQ ID NO: 39441 - protein, 573 aa, unidentified
  source 1..573: note = Maliponia aquimaris
  REGION 1..573: note = tr|A0A238K3E4|A0A238K3E4_9RHOB 7-cyano-7-deazaguanine synthase OS=Maliponia aquimaris; OX = 1673631 GN=queC PE=4 SV=1
MTSEIGPRLLDLLEIAATVFCADTTFPRGALDQPREGRAWRRDLHFRFAVRDIAFWDRPVVRQALRETIEFMTDDCVDCAFVAAEFSPTLQSYFRFENTSSDKTRIDDVIMFSGGLDSLAGTLKVLCGSQKRVALVTHFSAQKTIRRQAELIEQLKTRFRDRLLWIPVHVHRRRSPAKESTQRSRSLLFAALGCVVARMLGVDHLQFYENGIVSQNLPLAPPIVGTLATRTTHPRTLMLLSDFLSQVSGRPFEVNNPFEWLTKTEVVQSIAELKMTNMIGRTVSCNHTFKRTAAERHCGSCSQCLDRRFAILANGLAASDRAEDYATDVLFGVRDNEQERALAVEWVRHAIDLAEMPPEKFNETFMDELLRVTSPVQDRKAAFSRSFDMHQRHGRAVVGVLNTLPSSDMDEFPDRSIAAMFASHARTEVSVTPAIAPGPEAPPPRMERSIASDNIVEVVRRGPSSFDVLGIQGYSGPRARILSCLLDVLIEDRQQGRPIREFRGLTGRALADKLNATEYNIRQDIHRIKSDFRASWTAIYDMPPPKDLLIGNRSDKGYFLNPKIHVVTPENVG

SEQ ID NO: 39442 - protein, 226 aa, Malonomonas rubra
  REGION 1..226: note = tr|A0A1M6JS46|A0A1M6JS46_MALRU 7-cyano-7-deazaguanine synthase OS=Malonomonas rubra DSM 5091 OX=1122189 GN=queC PE=3 SV=1
MKKAVVLYSGGLDSTTCMAIARAEGFEPYALSFSYGQRHTVELDKAREYAPKIGAKEHMVIDVDMRQMGGSALTADIDVPKDGESPDEIPVTYVPARNTIFLSFALGWAEVLGASDIYIGVNALDYSGYPDCRPEFVEAFQTMANLSTKAGVEGNPYNIHAPLIDLTKAQIIEKGLSLGVDYGLTHSCYDPTPEGLSCGHCDSCILRLKGFADAGAEDPVAYVDRG

SEQ ID NO: 39443 - protein, 233 aa, Mameliella alba
  REGION 1..233: note = tr|A0A0B3RPF5|A0A0B3RPF5_9RHOB 7-cyano-7-deazaguanine synthase OS=Mameliella alba; OX = 561184 GN=queC PE=3 SV=1
MNTLVICSGGLDSVSLAHIVAAEHRLTRLVSFDYGQRHRKELDFAAAAAHRLGVPHHLIDMRTIGAALTGSALTDDIDVPDGHYAEETMRITVVPNRNAIMLAIGFGVAAANGDNAVATAVHGGDHFIYPDCRPAFTQAFDAMQRMALDGYADVRLFTPFVERTKADIVTEGARHGTPFAETWSCYKGGAVHCGRCGTCVERREAFHLADVEDPTTYADPDFWARAVAEKEER

SEQ ID NO: 39444 - protein, 231 aa, unidentified
  source 1..231: note = Mangrovibacter phragmitis
  REGION 1..231: note = tr|A0A1B7L0W4|A0A1B7L0W4_9ENTR 7-cyano-7-deazaguanine synthase OS=Mangrovibacter phragmitis OX=1691903 GN=queC PE=3 SV=1
MKRAVVVFSGGQDSTTCLIQALHQYDEVHCVTFDYGQRHRAEIDIARELALKLGARAHKVLDVGLLNELAVSSLTRDSIPVPDYDPNASGIPNTFVPGRNILFLTLAAIYAWQVKAEAVITGVCETDFSGYPDCRDEFVKALNHAVNLGMACEIRFETPLMWIDKAQTWALADYWGKLDLIRTETLTCYNGIKGDGCGECAACNLRANGLKHYLADKTAVMAAMKQKTGLR

SEQ ID NO: 39445 - protein, 231 aa, Mangrovibacter plantisponsor
  REGION 1..231: note = tr|A0A317PYS0|A0A317PYS0_9ENTR 7-cyano-7-deazaguanine synthase OS=Mangrovibacter plantisponsor OX=451513 GN=queC PE=3 SV=1
MKRAVVVFSGGQDSTTCLIQALHQYDEVHCVTFDYGQRHRAEIDIARELALKLGARAHKVLDVGLLNELAVSSLTRDSIPVPDYDPNASGIPNTFVPGRNILFLTLAAIYAWQVKAEAVITGVCETDFSGYPDCRDEFVKALNHAVNLGMASEIRFETPLMWIDKAQTWALADYWGKLDLIRTETLTCYNGIKGDGCGECASCNLRANGLKRYLADKTAVMAAMKQKTGLR

SEQ ID NO: 39446 - protein, 231 aa, Mangrovibacter sp.; identical to SEQ ID NO: 39445
  REGION 1..231: note = tr|A0A071LTX7|A0A071LTX7_9ENTR 7-cyano-7-deazaguanine synthase OS=Mangrovibacter sp. MFB070 OX=1224318 GN=queC PE=3 SV=1

SEQ ID NO: 39447 - protein, 226 aa, unidentified
  source 1..226: note = Mangrovibacterium diazotrophicum
  REGION 1..226: note = tr|A0A419W8D2|A0A419W8D2_9BACT 7-cyano-7-deazaguanine synthase OS=Mangrovibacterium diazotrophicum OX=1261403 GN=queC PE=3 SV=1
MNNKSKALVVFSGGQDSTTCLFWAKKEFGEVEAISFDYGQKHRLELELAAKIAREAGVPFQVMQLEMLGKITNNALTNPDMEVETDKPDNRPPNTLVEGRNMLFLTYAAIYAKSKDIHHLVTGVGQADYSGYPDCRDEFIRSLNQTLNLSMDYEYEIHTPLMWRDKEAVWQLSDELGVFDLVRTQTLTCYNGIVGEGCGHCPACKLRKNGLDSYLLKKNHKSDQSQ

SEQ ID NO: 39448 - protein, 224 aa, unidentified
  source 1..224: note = Mangrovibacterium marinum
  REGION 1..224: note = tr|A0A2T5BYH3|A0A2T5BYH3_9BACT 7-cyano-7-deazaguanine synthase OS=Mangrovibacterium marinum OX=1639118 GN=queC PE=3 SV=1
MSDKRKALVVFSGGQDSTTCLFWAIREFDEVEAISFDYGQRHKLELEVASKIAREAQVPLRILKLDMLSQITDNALTNPDLEVEAEKPADRPPNTLVEGRNMLFLTYAAIYAKSKDIHHLVTGVGQADYSGYPDCRDEFVRSLNQTLNLSMDYPYEIHTPLMWKNKEEIWQLSDELEVFDLVRTQTLTCYNGIVGDGCGHCPSCKLRKNGLDSYLLKKKHKSDQ

SEQ ID NO: 39449 - protein, 218 aa, Mannheimia granulomatis
  REGION 1..218: note = tr|A0A011M0S4|A0A011M0S4_9PAST 7-cyano-7-deazaguanine synthase OS=Mannheimia granulomatis; OX = 85402 GN=queC PE=3 SV=1
MTNQTPKAVVIFSGGQDSTTCLFQAIAEFGRENVEVVTFQYGQRHSIELEKAAWIAQDLGVKQTLIDTSVIKAITTNALMDNKADIQQHGSTPNTFVDGRNALFLLYAAIYAKGQGIQTIFTGVCETDFSGYPDCRDIFVKSMNVTLNLAMDYNFNIRTPLMYLTKKETWALADRLGAFDYIREHTHTCYLGVEGGCHTCPSCVLREKGLHEYLAERG

SEQ ID NO: 39450 - protein, 222 aa, Mannheimia haemolytica
  REGION 1..222: note = tr|A0A248ZY04|A0A248ZY04_MANHA 7-cyano-7-deazaguanine synthase OS=Mannheimia haemolytica; OX = 75985 GN=queC PE=3 SV=1
MTHQKPKAVVIFSGGQDSTTCLFQAIAEFGKENVEVVTFQYGQRHSIELEKARWISNDLGVKQTLIDTSVIKAITTNALMDNNAEIQQQGSTPNTFVDGRNALFLLYTAIYAKGQGIQTIFTGVCETDFSGYPDCRDVFVKSMNVTLNLAMDYNFNIRTPLMYLTKKETWALADKLGAFDYIRDHTHTCYLGVEGGCHDCPSCVLREKGLNEYLAEREVSNV

SEQ ID NO: 39451 - protein, 222 aa, Mannheimia sp.
  REGION 1..222: note = tr|W0Q3B5|W0Q3B5_9PAST 7-cyano-7-deazaguanine synthase OS=Mannheimia sp. USDA-ARS-USMARC-1261 OX=1432056; GN = queC PE=3 SV=1
MTIQTPKAVVIFSGGQDSTTCLFQAIAEFGKENVEVLTFQYGQRHSIELEKAEWIAKDLGVKQTLIDTSVIKAITTNALMDNSAKIEQQGSTPNTFVDGRNALFLLYTAIYAKGQGIQTIFTGVCETDFSGYPDCRDVFVKSMNVTLNLAMDYNFNIRTPLMYLTKKETWALADKLGAFDYIREHTHTCYLGIEGGCHDCPSCILREKGLNEYLAERGQSNV

SEQ ID NO: 39452 - protein, 222 aa, unidentified
  source 1..222: note = Mannheimia succiniciproducens
  REGION 1..222: note = sp|Q65RE8|QUEC_MANSM 7-cyano-7-deazaguanine synthase; OS = Mannheimia succiniciproducens (strain MBEL55E); OX = 221988 GN=queC PE=3 SV=2
MNITNPNGDRKAVVIFSGGQDSTTCLLKAIADYGVENVEAVTFQYGQRHAIELEKAKWIAQDLGIKQTLIDTSVIKTITANAMMDNIKITKDEAGMPNTFVDGRNALFLLYTAIYAKGQGIRDIITGVCETDFSGYPDCRDVFIKSMNVTLNLAMDYQFNIHTPLMYLTKAQTWQLADELGALNYVREHTHTCYLGVEGGCGSCPSCILRENGLQQYLASKQ

SEQ ID NO: 39453 - protein, 222 aa, Mannheimia varigena
  REGION 1..222: note = tr|W0QC15|W0QC15_9PAST 7-cyano-7-deazaguanine synthase OS=Mannheimia varigena USDA-ARS-USMARC-1296; OX = 1433287 GN=queC PE=3 SV=1
MTSQTSKAVVIFSGGQDSTTCLFQAIAEFGQENVEVVTFQYGQRHSIELEKAAWIANDLGVKQTLIDTSVIKAITTNALMSDNAEIKQEGSTPNTFVDGRNALFLLYTAIYAKGQGIKTIFTGVCETDFSGYPDCRDVFVKSMNVTLNLAMDYNFNIRTPLMYLTKKETWALADKLGAFDYIREHTHTCYLGVEGGCHTCPSCVLREKGLNEYLAERGQTNV

SEQ ID NO: 39454 - protein, 444 aa, Maribius pelagius
  REGION 1..444: note = tr|A0A1H8MF23|A0A1H8MF23_9RHOB Queuosine biosynthesis protein QueC OS=Maribius pelagius OX=387096; GN = SAMN04488011_11614 PE=4 SV=1
MTSVACLADPAALRSSNADRRVRLFGRRRDVPDAAATGARLYDQMRRLEGTISPKAFDFLSIALSAVTADVFVPRASSANGFSRAIELTTSVQDPAFWKAQASDLEEALNFLTGDRWEMTFVGEGRSAPTAASRKGLRQRTKLLDSNCVCLFSGGLDSLLGAIDLIEDANRSPFLVSRESTGDKMYQTNLRALLPSRPHLGANDAPQGPEGQYGAYPREDTTRARSLLFLAMGVCVASAIAERNGLLSAAGQVPLYIPENGFIALNPPLSPRRVGALSTRTAHPEFLSGIQRILDAGSIPVTIENPFRHKTKGEMLRGNSNAPLARSLASNTVSCGRWKRKRMQCGHCVPCLIRRAAFHASNVTDGTQYWLGDLKQVMNKPDRRADLLSVIYAIRRSRTESIARWVIRAGTLPINSNERAQLLQVVERGRDELAVFIRSQGVAA

SEQ ID NO: 39455 - protein, 243 aa, Maricaulis maris
  REGION 1..243: note = sp|Q0ARS7|QUEC_MARMM 7-cyano-7-deazaguanine synthase; OS = Maricaulis maris (strain MCS10) OX=394221 GN=queC PE=3; SV = 1
MTDTSTPDHANRTALVLFSGGQDSATCLAWALQRYARVETVGFDYGQRHHVEMTARERVRSGLAASFPHWGDRLGEDFVIDLAGYGAIADSALTADRAIEMQANGLPSTFVPGRNLVFLTVASALAYRRGHGVLVGGMCETDFSGYPDCRRNTIDAMQTALGLGLEMAVEIATPLMHLDKAATWALAHQLGGDALIGLIEEDSHTCYRGERGKRHAWGYGCGDCPACELRANGHAAWQNSVPA

SEQ ID NO: 39456 - protein, 243 aa, Maricaulis maris
  REGION 1..243: note = tr|A0A495DMC9|A0A495DMC9_9RHOB 7-cyano-7-deazaguanine synthase OS=Maricaulis maris; OX = 74318 GN=queC PE=3 SV=1
MSDTSSPVPAERSALVLFSGGQDSATCLAWALDRYDRVETVGFDYGQRHHVEMQARERIRGGMATALPDAAARLGEDFVIDLSGYGAIAESALTADRAIEMEASGLPSTFVPGRNLVFLTVASALAYRRGHGVLVGGMCETDYSGYPDCRRETIDAMQTTLALGLATPLEIATPLMQLDKAQTWALAERLGGRALTALIEEDSHTCYRGERGERHSWGYGCGHCPACELRARGHAAWKASLPA

SEQ ID NO: 39457 - protein, 239 aa, Maricaulis salignorans
  REGION 1..239: note = tr|A0A1G9MW05|A0A1G9MW05_9RHOB 7-cyano-7-deazaguanine synthase OS=Maricaulis salignorans; OX = 144026 GN=queC PE=3 SV=1
MDTRPTSTSALLLFSGGQDSATCLAWALSRYDRVETVGFDYGQRHHVEMQARLDVRAAMAAAFPDWATRLGEDHVVDIAGYGAIAESALTADRAIEMAADGLPTTFVPGRNLVFLTIASALAYRRGHGAMVGGMCETDFSGYPDCRRATIDAMQQTLSLGLATDITIETPLMWLDKAQSWALTHELGGDILVEIIRKRSHSCYRGDRSELHDWGYGCGTCPACELRAAGWQHWRSGDGA

SEQ ID NO: 39458 - protein, 237 aa, Maricaulis sp.
  REGION 1..237: note = tr|A0A2D7Y1B3|A0A2D7Y1B3_9RHOB 7-cyano-7-deazaguanine synthase OS=Maricaulis sp.; OX = 1486257 GN=queC PE=3 SV=1
MTTQSTSASALVLFSGGQDSATCLAWALDRYERVETVGFDYGQRHSVELQARQDVRAAMSAMPGGDRLGEDFVIDLTGYGAIAESALTADRAIEMEASGLPSTFVPGRNLVFLTVASALAYRRGHGVLVGGMCETDYSGYPDCRRETLDAMQSALTLGLDTGMAVETPLMHLDKAQTWALAETLGGRDLVEIIRTQTHTCYRGERGELHDWGYGCGTCPACDLREKGWQAWPGSVPA

SEQ ID NO: 39459 - protein, 243 aa, Maricaulis sp.
  REGION 1..243: note = tr|A0A1Q8FWK3|A0A1Q8FWK3_9RHOB 7-cyano-7-deazaguanine synthase OS=Maricaulis sp. W15; OX = 1772333 GN=queC PE=3 SV=1
MSDTSSPVPAERSALVLFSGGQDSATCLAWALDRYDRVETVGFDYGQRHHVEMQARERIRGGMATALPDATARLGEDFVIDLSGYGAIAESALTADRAIEMEASGLPSTFVPGRNLVFLTVASALAYRRGHGVLVGGMCETDYSGYPDCRRETIDAMQTTLALGLATPLEIATPLMQLDKAQTWALAERLGGRALTALIEEDSHTCYRGERGERHSWGYGCGHCPACELRARGHAAWKASLPA

SEQ ID NO: 39460 - protein, 231 aa, Marichromatium gracile
  REGION 1..231: note = tr|A0A4R4AIC7|A0A4R4AIC7_MARGR 7-cyano-7-deazaguanine synthase OS=Marichromatium gracile; OX = 1048 GN=queC PE=3 SV=1
MTPAVVLLSGGLDSTTVLAIAKDQGFAPHALSFRYGQRHGCELDAAARVAAQLGVVEHVIADIDLRRFGGSALTADIAVPKGRSAEEMDSAIPVTYVPARNTVFLSFALAWAETLGASDIFIGVNALDYSGYPDCRPEYIAAYEQMANLATVAGVEGRQRLRIHTPLIDLTKAGIIQRGLALGVDYALTSSCYDPDAHGRPCGGCDSCLLRAKGFAEAGVADPLLNRFENP

SEQ ID NO: 39461 - protein, 231 aa, Marichromatium purpuratum
  REGION 1..231: note = tr|W0E4Z8|W0E4Z8_MARPU 7-cyano-7-deazaguanine synthase OS=Marichromatium purpuratum 984 OX=765910; GN = queC PE=3 SV=1
MTPAVVLLSGGLDSTTVLAIAKDQGFAPHALSFRYGQRHGCELDAAARVAAQLGVVEHVIADIDLRRFGGSALTADIAVPKGRDPEEMETTIPVTYVPARNTVFLSFALAWAETLGASDIFIGVNALDYSGYPDCRPEYIAAYEQMANLATVAGVEGRQRLRIHTPLIDLTKAGIIRRGLALGVDYALTSSCYDPDAHGRPCGGCDSCLLRAKGFAEAGIADPLLNRFETP

SEQ ID NO: 39462 - protein, 221 aa, unidentified
  source 1..221: note = Unknown
  REGION 1..221: note = tr|A0Z4X7|A0Z4X7_9GAMM 7-cyano-7-deazaguanine synthase OS=marine gamma proteobacterium HTCC2080; OX = 247639 GN=queC PE=3 SV=1
MKAVVLTSGGLDSATVLAMAHAAGRQCYALSFDYGQRHRAELSAAARVAASFEGIIHKTVSLDLRGIGGSALTDDAIDVPVEPTEGIPVTYVPARNTVFLSIALGWAEVIGASEIYIGVNAVDYSGYPDCRPEFIDAFGALAAVATKAGVEGDPIKICTPIIDLTKAEIIARGMDLGVDYEQTVSCYQASDEGKACGRCDSCRLRAQGFFEAGVSDPTRYV

SEQ ID NO: 39463 - protein, 218 aa, unidentified
  source 1..218: note = Unknown
  REGION 1..218: note = tr|A0YGA1|A0YGA1_9GAMM 7-cyano-7-deazaguanine synthase OS=marine gamma proteobacterium HTCC2143; OX = 247633 GN=queC PE=3 SV=1
MKIVVIYSGGIDSFTILNKALQEGHDVLAISFNYGQRHNKELDYAARACKELGIVHKLVDISAMQTLMSNSSLMAKSDVIIPEGHYEAENMKSTVVPNRNMILISLAIGYAVNEGASEVWYGAHAGDHTIYPDCRPEFVEAMSKASLLANFEPIAVVAPYLNTDKIAIVKEGLAMGLDYGKTWTCYNGREKACGKCGSCVERLEAFAENGVTDTLSYE

SEQ ID NO: 39464 - protein, 268 aa, unidentified
  source 1..268: note = Mariniblastus fucicola
  REGION 1..268: note = tr|A0A5B9PA69|A0A5B9PA69_9PLAN 7-cyano-7-deazaguanine synthase OS=Mariniblastus fucicola; OX = 980251 GN=queC PE=3 SV=1
MERPRPAVICLSGGMDSTSLLVRMLAERRKVFGLCFDYGQKHRIELKRLYDNIEYLRENDIEMSCETIEIPKLGDLFHSALTDSNWQVPKGHYEQENMRQTVVPNRNAIFASIAYGYALSIAIQHDTHVDFCLGVHSGDHAIYPDCRPEFYQSIFHAFSIGNWDNEKVHLHIPYINGDKYTILQEAAVSIEKLGLDFDTIFRNTCTSYQPDASGRSHGLTGSDVERILAFHKFDRRDPIDYVDSWEVVVEKALELEAQYRAESEENDD

SEQ ID NO: 39465 - protein, 239 aa, unidentified
  source 1..239: note = Marinicauda algicola
  REGION 1..239: note = tr|A0A4S2H4L7|A0A4S2H4L7_9RHOB 7-cyano-7-deazaguanine synthase OS=Marinicauda algicola; OX = 2029849 GN=queC PE=3 SV=1
MTRADPSRNAALVLFSGGQDSATCLAWALDRYRRVETIGFAYGQRHGVEMQARTRVRAGVAERFPGWAEKLGPDTVVDLSGYGALAESALTAEREIEMGEKGLPTTFVPGRNLVFLTVAAAHAYRRAIPVLVGGMCETDYSGYPDCRRATIEAQEKAISLGLGEAMRIETPLMALDKAETWALADELGGKALVDLIVEESHTCYRGERGTRHAWGHGCGTCPACELRAAGWEKYLETAR

SEQ ID NO: 39466 - protein, 237 aa, unidentified
  source 1..237: note = Marinicauda pacifica
  REGION 1..237: note = tr|A0A4S2HB57|A0A4S2HB57_9RHOB 7-cyano-7-deazaguanine synthase OS=Marinicauda pacifica; OX = 1133559 GN=queC PE=3 SV=1
MSETDSSSALVLFSGGQDSATCLAWALQRYERVETIGFDYGQRHEVELRARERVREQIVQINSDWAVRLGDDLLVDLFGYGRLAESALTAEREIEMGEKGLPTTFVPGRNLVFLTVAAAHAYRRGTAVLVGGMCQTDYSGYPDCRADTLAAQERALALGLDQPIKIETPLMDLTKAETWQLAQSLGGDRLVHLIVEETHTCYRGVRGTLHAWGYGCGDCPACELRAHGWNGFSGGAS

SEQ ID NO: 39467 - protein, 241 aa, unidentified
  source 1..241: note = Marinicauda sp.
  REGION 1..241: note = tr|A0A2U2BRU2|A0A2U2BRU2_9RHOB 7-cyano-7-deazaguanine synthase OS=Marinicauda sp. WD6-1; OX = 2135793 GN=queC PE=3 SV=1
MTDATSSPNRSALVLFSGGQDSATCLAWALDRYDAVETIGFDYGQRHAVEMGARESVREEIARRFPDWAGRLGPDIVVDLAGYGALADSALTTDRAIEMDAQGLPTTFVPARNLVFLAVAAAHAWRRGIETLVGGMCQTDYSGYPDCRAETIAAQQRALSLGLDAEMAVETPLMHLTKAETWALADELGGDSLVELIVADTHTCYRGERGVLHEWGYGCGDCPACELRARGWAEWRAEAAS

SEQ ID NO: 39468 - protein, 241 aa, unidentified
  source 1..241: note = Marinicaulis flavus
  REGION 1..241: note = tr|A0A2S7K964|A0A2S7K964_9PROT 7-cyano-7-deazaguanine synthase OS=Marinicaulis flavus; OX = 2058213 GN=queC PE=3 SV=1
MRKLDPSRALILFSGGQDSSISLAWALDRFAHVETVGFVYGQRHSIELGARLTVRKAMADAFPRWAGKLGEDMLVDARGLKDLGETAMTHETEIVMGEDGLPTTFVPGRNLVFLSLAGGLAYRRNLGRLVAGMCETDYSGYPDCREPALNAQLEALRLGMDADFGLETPLMHIDKAESWRLAESLGGEKLVALINEHSHTCYRGERGARHNWGYGCGECPACVLRAKGWAAYSAGTESARP

SEQ ID NO: 39469 - protein, 226 aa, Marinicella litoralis
  REGION 1..226: note = tr|A0A4R6XYS7|A0A4R6XYS7_9GAMM 7-cyano-7-deazaguanine synthase OS=Marinicella litoralis; OX = 644220 GN=queC PE=3 SV=1
MSKKCVVLLSGGLDSSTCLAVAKDHGYDCYTLSIDYGQRHVAELEASKTIAKNITPNPHKVVQINLDAIGGSALTDDDIDVPDYGDSNDAIPVTYVPARNTIFLSTALAYAEVVGANAIFIGVTAVDYSGYPDCRAEYIQAFETMANLATKAGVEGQKLSIITPLIDLDKSQIIQLGHHLGFDYGLTVSCYSANRKGEACGVCDSCHYRRKGFEAAGLKDPTRYAS

SEQ ID NO: 39470 - protein, 209 aa, Marinilabilia salmonicolor
  REGION 1..209: note = tr|A0A368UN94|A0A368UN94_9BACT 7-cyano-7-deazaguanine synthase OS=Marinilabilia salmonicolor OX=989 GN=DFO77_12612 PE=3 SV=1
MQNLKKGIILASGGLDSTTLCYLFIKKNIEFVPLIINYGQHCFKTELERLKKVLPENNVNKIEILNVSEIYKYSNSKFINASNLWEEKITADDLYIPYRNVLILTIAASFARTLGLNYVYSAFINSNHAKEIDCSNEFFNNLENLLKEYGSVKIEMPFKDFSKFEVAKLGIELGAPIGKTFSCQASPDIPCGACPNCVDRLEALKRLSE

SEQ ID NO: 39471 - protein, 223 aa, Marinilabilia salmonicolor
  REGION 1..223: note = tr|A0A2T0XPU9|A0A2T0XPU9_9BACT 7-cyano-7-deazaguanine synthase OS=Marinilabilia salmonicolor OX=989 GN=queC PE=3 SV=1
MKRAVVLLSGGLDSAVALYLAKSRGFEIHALSFDYGQRHDRELHAAKAIAQEAGVAAHQVVSLKLDQWGGSSLTDKSMEVENGDVTRQDIPVTYVPARNMVFLSVAASYAEAIQATEIFIGVSQVDYSGYVDCRQEFIEAMENAVNKGTVMGAEQNRPIRIHAPFVHKTKAEEIQLGRELGVPFELTWSCYRGGEKPCETCDSCLLRAKAFAEAGIEDKALIR

SEQ ID NO: 39472 - protein, 222 aa, Marinilabilia sp.
  REGION 1..222: note = tr|A0A2U2BCK8|A0A2U2BCK8_9BACT 7-cyano-7-deazaguanine synthase OS=Marinilabilia sp. WTE; OX = 2162893 GN=queC PE=3 SV=1
MKKAVVLLSGGLDSAVTLYMVKSQGYEVHALSFDYGQRHSRELKAAKSLAQEAGVVSHQVVSLRLDQWGGSSLTDSTMQVEDGNVNREDIPVTYVPARNMVFLSVAASFAEAVKAQDIFIGVSQVDYSGYVDCREEFIEAMENAVNKGTVMGAEQNIPIRIHAPFIHKTKSEEIQMGKELGVPFELTWSCYRGGTKPCGTCDSCLLRAKAFEDAGVVDKALV

SEQ ID NO: 39473 - protein, 626 aa, unidentified
  source 1..626: note = Marinilabiliaceae bacterium
  REGION 1..626: note = tr|A0A359FZQ0|A0A359FZQ0_9BACT Uncharacterized protein OS=Marinilabiliaceae bacterium OX=2053574; GN = DEG09_10660 PE=4 SV=1
MSQQTPDVIRVNCGELCTSRDCTASEINLLHRENGDITPNITIGYAKFVKDADELPERILDLLQIAAYVFCGDRMANRGSRKSVNNEAWARSFEFHIPVLDLDFWSDTKTKKALNDALTFMTGDRGYSFIFSQSDKNPAEILNKQISLFSGEYQSIDEAENTDIMLFSGGLDSLAGAVQRLNENMERSLCVVSHKSNKTVTHTQRVLIDELNKQYGNRVKPYSFECCNHDGLKSKDETQRTRIFLFSAIAFSMCHCFSKNSFYVYENGITSMNLSKQADVINARASRTTHPKTLELLRRFYKLLKPSFDIIAPYYNHTKAEIMEVFKEYNSLHLIASSVSCSSSRTKPGQAPHCGCCSQCIDRRFSLYAAGINEYDAEYANDFIHSFPDDDNNETKQRIYSTMRLANLEDIPTQNAFVRKYPDDVTDLVAYWRGSNADDKLDEIYDLVCRYGKSVIDAATRMRNKYDDLSLPINKNSLLGVISERQYKKSPIIIRIEEIDTFLRETIPIMFQRERPANENDLNDKIEAILKGQGSFTREHPALQFWRTEYRPDHAQGDLLVESKYVRDSTTPSKITEGIAADMTKAPSDMGFMFIVYDPDRQISDDMQFARAFEGKRNDCFVRVYR

SEQ ID NO: 39474 - protein, 221 aa, unidentified
  source 1..221: note = Marinilabiliaceae bacterium
  REGION 1..221: note = tr|A0A359FYK0|A0A359FYK0_9BACT 7-cyano-7-deazaguanine synthase OS=Marinilabiliaceae bacterium OX=2053574 GN=queC PE=3 SV=1
MKRAVILLSGGLDSAVALWLAKSEGYEVYSLSFFYGQKHDKELKAAEALALAAGVKKHRVVSINIDQWGGSSLTDKDMEVEDGDIDRTDIPVTYVPARNMIFLSIAASYAEAIAAQSIFIGVSQADYSGYVDCREPFIRSMEQTINEGTVMAAEHKKPIKIHAPFINKTKSEEIRLGARLGVPFGLTWSCYRGGEKPCGKCDSCLLRARAFNEAGIIDESL

SEQ ID NO: 39475 - protein, 340 aa, unidentified
  source 1..340: note = Marinilabiliales bacterium
  REGION 1..340: note = tr|A0A2N5YTA0|A0A2N5YTA0_9BACT Uncharacterized protein OS=Marinilabiliales bacterium OX=2053303; GN = C0596_12905 PE=4 SV=1
MKETKICKRCIMPESKPDIYINDEGICNICVAHDNSRESINEQKPLESDLLKILDKHKGRKKFDCMVMCSGGKDSTAALYFMKKRYNLNILAFMFDHGFETKEARANVESAVQKLGVDFLLYKSSYMKPMFARMIESESKAIICHTCSIWYMELAFDVAARYDIPLIVAGWTKGQYKKQNIVSKYGTDDGTCEFKAMSESTRSFLDNNISDMHQYKNFPKSMDEVIKKARKKHKAKVISPHWFLPYGPDEYVKIIEDELEWKAPDLSYPKGSTNCTLNFISVHQSIKHYGYTHYVVEASKLIREGVITREEALEQVKINFDDKTLKEVASGLCIDFSTYL

SEQ ID NO: 39476 - protein, 230 aa, unidentified
  source 1..230: note = Marinilabiliales bacterium
  REGION 1..230: note = tr|A0A2J6HR34|A0A2J6HR34_9BACT 7-cyano-7-deazaguanine synthase OS=Marinilabiliales bacterium OX=2053303 GN=queC PE=3 SV=1
MDISEKKRKAVVLLSGGLDSATALYVAKNEGFEVHALSFEYGQKHDRELQAARQTAKKAGVKSHRIVSMDIGQWGGSSLTDRNMEIENGIPGREDIPLTYVPARNMVFLSVAASFAEAIEAYDIFIGVSEVDYSGYVDCRQKFLDAMENAINNGTVCAVEQGKKITIHAPFINMKKSEEITLGMKLGVDYSDTWSCYRGGEKPCGECDSCLLRAEAFIEAGVKDPGLPPR

SEQ ID NO: 39477 - protein, 221 aa, unidentified
  source 1..221: note = Marinimicrobia bacterium
  REGION 1..221: note = tr|A0A101IAW6|A0A101IAW6_9BACT 7-cyano-7-deazaguanine synthase OS=Marinimicrobia bacterium 46_43 OX=1635280 GN=queC PE=3 SV=1
MKTLVLLSGGQDSSTCLFWSLRYANQTEAVFFNYEQRHKIEWECARRLCEENKVPLHVLDVPAFQQIGGTAMIEETDIQMTNKGVPNTFVPGRNIVFLTLAASLAYRLNFDSVIVGVNDEDYSGYPDCRASFIHIMESTLREGLDYPIRITTPLQHLSKKEIWALSDELGVMQTIVEKTHTCYRGDHFTRHAWGYGCGSCPACLLRKTGYEAYLRTRYENS

SEQ ID NO: 39478 - protein, 221 aa, unidentified; identical to SEQ ID NO: 39477
  source 1..221: note = Marinimicrobia bacterium
  REGION 1..221: note = tr|A0A101GB51|A0A101GB51_9BACT 7-cyano-7-deazaguanine synthase OS=Marinimicrobia bacterium 46_47 OX=1635279 GN=queC PE=3 SV=1

SEQ ID NO: 39479 - protein, 226 aa, Marinimicrobium koreense
  REGION 1..226: note = tr|A0A3N1NI65|A0A3N1NI65_9GAMM 7-cyano-7-deazaguanine synthase OS=Marinimicrobium koreense OX=306545 GN=queC PE=3 SV=1
MANPKAVILVSGGLDSTTALAIARSEGYDCYTISFDYGQRHRAELHAAELTARAGGAIEHKVVKLDLQSIGGSALTDDSIAVPETEGEGIPVTYVPARNTIFLSIALGWAEVLGANDIFIGVNAVDYSGYPDCRPEYVAAYEAMANLATKSGVEGQKLHIRAPLMRWSKGEIIRQGQSLGVDYALTVSCYQANEAGEACGRCDSCRLRRAGFEEAGVPDPTRYRAG

SEQ ID NO: 39480 - protein, 226 aa, Marinimicrobium sp.
  REGION 1..226: note = tr|A0A2D8WNR3|A0A2D8WNR3_9GAMM 7-cyano-7-deazaguanine synthase OS=Marinimicrobium sp.; OX = 2024837 GN=queC PE=3 SV=1
MANPKAVILVSGGLDSTTALAIARSEGYDCYTISFDYGQRHRAELHAAELTARAGGAIEHKVVKLDLQSIGGSALTDDSIAVPETEGEGIPVTYVPARNTIFLSIALGWAEVLGANDIFIGVNAVDYSGYPDCRPEYVAAYETMANLATKSGVEGQKLHIRAPLMRWSKGEIIRQGQSLGVDYALTVSCYQANEAGEACGRCDSCRLRRAGFEEAGVPDPTRYRAG

SEQ ID NO: 39481 - protein, 225 aa, unidentified
  source 1..225: note = Marininema halotolerans
  REGION 1..225: note = tr|A0A1I6SMK9|A0A1I6SMK9_9BACL 7-cyano-7-deazaguanine synthase OS=Marininema halotolerans; OX = 1155944 GN=queC PE=3 SV=1
MAKKAVIVLSGGLDSTTCMGLAKEQGYDLYPVTFCYGQRHDREVEQAKEVARFYEVGEHRIVDISFLSQIGGSALTEEGIQVPTDPEEGIPSTYVPARNLIFLSLAAAYAEVIGAEAVYTGVSAVDYSGYPDCRPEFIAHLEETIRLATKTGAEGGKIQLKTPLIHLSKADTIREGLRLNVPYQLTTSCYQGAELACGECDSCRLRLKGFADAGATDLIEYKAVN

SEQ ID NO: 39482 - protein, 225 aa, Marininema mesophilum
  REGION 1..225: note = tr|A0A1H3BB30|A0A1H3BB30_9BACL 7-cyano-7-deazaguanine synthase OS=Marininema mesophilum; OX = 1048340 GN=queC PE=3 SV=1
MAKKAVIVLSGGLDSTTCMGLAKKTGYELYPITFSYGQRHDREVTQAKEVAQFYEVPEHRIVDISFLSQIGGSALTEESIEVPTEAKEGIPSTYVPARNLIFLSLAAAYAEVIGAEAVYTGVSAVDYSGYPDCRPEFIAHLEETIHLATKTGVEGGKIHLATPLIHWSKGETIQEGLRLGVPYHLTTSCYQGDEEACGECDSCRLRLKGFADAGATDPISYGVKK

SEQ ID NO: 39483 - protein, 219 aa, unidentified
  source 1..219: note = Marinisporobacter balticus
  REGION 1..219: note = tr|A0A4R2KJJ8|A0A4R2KJJ8_9CLOT 7-cyano-7-deazaguanine synthase OS=Marinisporobacter balticus OX=2018667 GN=queC PE=3 SV=1
MNREKALVIFSGGQDSTTCLFWAKKKFKEVIAISFDYNQKHKLELECAKELCKKYHVEHHILDLNLLNQLAPNSLTRTDIEVDKDAPKEGLPNSFVDGRNMLFLTFGAIFAKQRGIYHMVTGVSESDYSGYPDCRDVFIKSTNVTLNLAMDYQFEIHTPLMWINKEETWKMADDLEVLHIIKEETLTCYNGIKGNGCGECPACYLRKKGYLDFKKSREN

SEQ ID NO: 39484 - protein, 233 aa, Marinithermus hydrothermalis
  REGION 1..233: note = tr|F2NQ95|F2NQ95_MARHT 7-cyano-7-deazaguanine synthase OS=Marinithermus hydrothermalis (strain DSM 14884 / JCM 11576 / T1) OX=869210 GN=queC PE=3 SV=1
MKPKAVALLSGGLDSATAAAQALADGYEVIALSFAYGQRHTRELTAAKEVAKALGIQEHYVLEVNLAQWGGSALTDPTIQVPTGGVNPEVIPPTYVPGRNTVFLAIALSLAEARGAEAIYLGINAVDYSGYPDCRPEYLEAFQRLANLATKAGLEGQAPRLVAPLVMDTKADIVRRALALGVPIERTWSCYQGGEEPCGLCDSCRIRDRALIEAGRPDLATPKGRELYAQEAR

SEQ ID NO: 39485 - protein, 221 aa, Marinobacter adhaerens
  REGION 1..221: note = tr|A0A1E3CEX3|A0A1E3CEX3_9ALTE 7-cyano-7-deazaguanine synthase OS=Marinobacter adhaerens; OX = 1033846 GN=queC PE=3 SV=1
MTDTVVVIYSGGMDSYTLLHLARERGHQVHALSFNYGQRHVRELECARSVCESLGIPHKVIDIRAMSEVMAGSSLTSDLDVPEGHYEEDSMKATVVPNRNMILLSLATGYAVTAGAGAVWYGAHGGDHAIYPDCRPEFVEKMDAVCRVANYEPVAIEAPFMAMDKGQILSEGLRLGLDYSQTWTCYNGREQACGRCGSCVERLEAFAANGVDDPLDYEDAS

SEQ ID NO: 39486 - protein, 221 aa, Marinobacter adhaerens
  REGION 1..221: note = tr|A0A349SZR5|A0A349SZR5_9ALTE 7-cyano-7-deazaguanine synthase OS=Marinobacter adhaerens; OX = 1033846 GN=queC PE=3 SV=1
MTDTVVVIYSGGMDSYTLLHLARERGYQVHALSFNYGQRHVRELECARSVCEALGVPHKVIDIRAMSEVMAGSSLTSDIDVPEGHYEEDSMKATVVPNRNMILLSLATGYAVTAGAGAVWYGAHGGDHAIYPDCRPEFVDKMDAVCRVANYEPVGIEAPFMTMDKGQILAEGLRLGLDYAQTWTCYNGRERACGRCGSCVERLEAFAANGVKDPLDYEAAS

SEQ ID NO: 39487 - protein, 221 aa, Marinobacter algicola
  REGION 1..221: note = tr|A6F335|A6F335_9ALTE 7-cyano-7-deazaguanine synthase OS=Marinobacter algicola DG893 OX=443152 GN=queC; PE = 3 SV=1
MTETVVVIYSGGMDSFTLLHLARARGYRVHALSFDYGQRHVRELECARQVCEALSVPHKVIDIRALSEVMAGSALTDAVDVPEGHYEEDNMKATVVPNRNMILLSLATGYAVTAGAVAVWYGAHGGDHAIYPDCRPEFVEKMDAVCQVANYEPVKIEAPFMGSDKGAILAEGLKLGLDYSRTWTCYNGRDRACGVCGSCVERLEAFAANGVSDPLPYEVET

SEQ ID NO: 39488 - protein, 221 aa, unidentified
  source 1..221: note = Marinobacter antarcticus
  REGION 1..221: note = tr|A0A1M6PS63|A0A1M6PS63_9ALTE 7-cyano-7-deazaguanine synthase OS=Marinobacter antarcticus OX=564117 GN=queC PE=3 SV=1
MTDTVVVIYSGGMDSFTLLHCARARGLRVHALSFNYGQRHVRELDVARSVCADLDIPHKVIDIRAMSEVMSGSALTSGEDIPEGHYEEENMKATVVPNRNMILLSLATGYAVTVNAGAVWYGAHGGDHAIYPDCRPEFVEKMDAVCRVANYEPVGIEAPFMHIRKGEILAEGLKLGLDYANTWTCYNGREQACGLCGSCVERLEAFAENGLPDPLAYEAGR

SEQ ID NO: 39489 - protein, 221 aa, unidentified
  source 1..221: note = Marinobacter confluentis
  REGION 1..221: note = tr|A0A4Z1BIM3|A0A4Z1BIM3_9ALTE 7-cyano-7-deazaguanine synthase OS=Marinobacter confluentis OX=1697557 GN=queC PE=3 SV=1
MNRTVVVIYSGGMDSFTLLHRALAQGLNVHALSFDYGQRHVRELDCARQVCKALSVPHKVVDIRSLGAVMAGSALTSELAVPEGHYEEDSMKATVVPNRNMILLSLATGYAVTAEADAVWYGAHGGDHAIYPDCRPEFVEKMDAVCRVANYQPVAIEAPFMGSDKGNILSEGLRLGLDYSQTWTCYNGRERACGRCGSCVERLEAFATNGVTDPVPYEEEA

SEQ ID NO: 39490 - protein, 221 aa, Marinobacter daqiaonensis
  REGION 1..221: note = tr|A0A1I6IHE9|A0A1I6IHE9_9ALTE 7-cyano-7-deazaguanine synthase OS=Marinobacter daqiaonensis OX=650891 GN=queC PE=3 SV=1
MSKTVVVIYSGGMDSFTLLHRALAEGHRVHALSFDYGQRHVRELEAASEVCEGLGIPHRVIDIRSLETVMSGSSLTGGGPVPEGHYEEETMKSTVVPNRNMILLSLATGYAVTVKGDAVWFGAHGGDHAIYPDCRPEFIEKMDAVCRVANYEPVAVEAPYMLADKSEILAEGLAMGLDYSQTWTCYNGREKACGVCGSCVERLEAFAANGKTDPLAYEARN

SEQ ID NO: 39491 - protein, 227 aa, Marinobacter excellens
  REGION 1..227: note = tr|A0A0N8KLE1|A0A0N8KLE1_9ALTE 7-cyano-7-deazaguanine synthase OS=Marinobacter excellens HL-55 OX=1305731 GN=queC PE=3 SV=1
MTDTVVVIYSGGMDSFTLLHLARARGFNVHALSFNYGQRHVRELESARAVCQAHSIPHKVIDIRAMNDVMAGSSLTSDIDIPEGHYQEDSMKSTVVPNRNMILLSLATGYAVTVGARSVWYGAHGGDHAIYPDCRPEFVEKMDAVCRIANYEPVAIEAPFMAFDKGQILGEGLKLGLDYSQTWTCYNGREQACGVCGSCVERLEAFAAHGLADPLAYEAVETGKGSA

SEQ ID NO: 39492 - protein, 221 aa, Marinobacter excellens
  REGION 1..221: note = tr|A0A137SEF9|A0A137SEF9_9ALTE 7-cyano-7-deazaguanine synthase OS=Marinobacter excellens LAMA 842 OX=1306954 GN=queC PE=3 SV=1
MTDTVVVIYSGGMDSFTLLHLARARGHKVHALSFNYGQRHVRELEAAAAVCQAEAIPHKVIDIRAMSEVMAGSSLTSDIAVPEGHYQEDSMKSTVVPNRNMILLSLATGYAVTAGAQAVWFGAHGGDHAIYPDCRPEFIEKMDAVCRVANYQPVAVEAPFMALDKGEILGEGLKLGLDYSQTWTCYNGRELACGRCGSCVERLEAFAAHGLKDPLAYESRA

SEQ ID NO: 39493 - protein, 221 aa, Marinobacter flavimaris
  REGION 1..221: note = tr|A0A3D8H496|A0A3D8H496_9ALTE 7-cyano-7-deazaguanine synthase OS=Marinobacter flavimaris; OX = 262076 GN=queC PE=3 SV=1
MTDTVVVIYSGGMDSYTLLHLARERGYQVHALSFNYGQRHVRELECARSVCEALGVPHKVIDIRAMSEVMAGSSLTSDIDVPEGHYEEDSMKSTVVPNRNMILLSLATGYAVTAGAGAVWYGAHGGDHAIYPDCRPEFVDKMDAVCRVANYEPVGIEAPFMTMDKGQILAEGLRLGLDYAQTWTCYNGRERACGRCGSCVERLEAFAANGVKDPLDYEAAS

SEQ ID NO: 39494 - protein, 221 aa, unidentified
  source 1..221: note = Marinobacter fuscus
  REGION 1..221: note = tr|A0A2T1KUR5|A0A2T1KUR5_9ALTE 7-cyano-7-deazaguanine synthase OS=Marinobacter fuscus; OX = 2109942 GN=queC PE=3 SV=1
MTDTVVVIYSGGMDSFTLLHMARARGLDVHALSFNYGQRHVRELEVARAVCKAEGIPHKVIDIRAMSDVMSGSALTSEVAVPEGDYEEESMKATVVPNRNMILLSLATGYAVTVGAGAVWYGAHGGDHAIYPDCRPEFVEKMDAVCRIANYEPVTIDAPLIAMDKGQILAEGLALGLDYGRTWTCYNGRDKACGRCGSCVERLEAFASNGLADPLAYEELA

SEQ ID NO: 39495 - protein, 222 aa, Marinobacter gudaonensis
  REGION 1..222: note = tr|A0A1I6H353|A0A1I6H353_9ALTE 7-cyano-7-deazaguanine synthase OS=Marinobacter gudaonensis OX=375760 GN=queC PE=3 SV=1
MTDTVVVIYSGGMDSYTLLHLARSRGYQVHALSFNYGQRHVRELDCARSVCEAHGIPHQTIDIRAMSEVVMAGSSLTSDLQVPEGHYQEDSMKATVVPNRNMILLSLATGYAVTVGAGAVWYGAHGGDHAIYPDCRPEFVAKMDAVCRIANYEAVGIEAPFMAMDKGQILAEGLRLGLDYRHTWTCYNGRERACGRCGSCVERLEAFAANGVTDPLDYEVAH

SEQ ID NO: 39496 - protein, 221 aa, Marinobacter guineae
  REGION 1..221: note = tr|A0A2G1VDW5|A0A2G1VDW5_9ALTE 7-cyano-7-deazaguanine synthase OS=Marinobacter guineae; OX = 432303 GN=queC PE=3 SV=1
MTDTVVVIYSGGMDSYTLLHLARIRGCRVHALSFNYGQRHVRELEYARSVCETQGIPHKVIDIRAMSEVMSGSSLTSDRDVPEGHYEEESMKATVVPNRNMILLSLATGYAVTVGGGTVWYGAHGGDHAIYPDCRPEFVAKMDAVCRVANYEPVGIEAPFMAMDKGQILAEGLRLGLDYSQTWTCYNGRERACGRCGSCVERLEAFAANGVTDPLEYEDSR

SEQ ID NO: 39497 - protein, 227 aa, unidentified
  source 1..227: note = Marinobacter halophilus
  REGION 1..227: note = tr|A0A2T1KK37|A0A2T1KK37_9ALTE 7-cyano-7-deazaguanine synthase OS=Marinobacter halophilus; OX = 1323740 GN=queC PE=3 SV=1
MTDTVVVIYSGGMDSFTLLNLARAQGRNVHALSFNYGQRHVRELEAARSVCQAERIPHKVIDIRAMNEVMAGSSLTSDINIPEGHYQEDSMKSTVVPNRNMILLSLATGYAVTVGAQSVWYGAHGGDHAIYPDCRPEFVEKMDAVCRIANYEPVGIEAPFMDLDKGEILAEGLKLGLDYSQTWTCYNGREQACGVCGSCVERLEAFAVHGLEDPLSYEAPERNEDDA

SEQ ID NO: 39498 - protein, 221 aa, Marinobacter hydrocarbonoclasticus
  REGION 1..221: note = sp|A1TWU4|QUEC_MARHV 7-cyano-7-deazaguanine synthase; OS = Marinobacter hydrocarbonoclasticus (strain ATCC 700491 / DSM 11845 / VT8) OX=351348 GN=queC PE=3 SV=1
MTDSVVVIYSGGMDSFTLLHLARARGLKVHALSFNYGQRHVRELDVAADVCRAEGIPHKVIDIRAMSEVMSGSSLTSDIEVPEGHYEEDTMKATVVPNRNMILLSLATGYAVTTGAGAVWYGAHGGDHAIYPDCRPEFVEKMDAVCRVANYEPVGIEAPFMAMDKGQILAEGLKLGLDYSQTWTCYNGRDKACGRCGSCVERLEAFAANGVTDPLAYERLA

SEQ ID NO: 39499 - protein, 221 aa, Marinobacter hydrocarbonoclasticus
  REGION 1..221: note = tr|A0A455W967|A0A455W967_MARHY 7-cyano-7-deazaguanine synthase OS=Marinobacter hydrocarbonoclasticus OX=2743 GN=queC PE=3 SV=1
MTDTVVVIYSGGMDSFTLLHLARARGHKVHALSFNYGQRHVRELEAAAAVCQAEAIPHKVIDIRAMSEVMAGSSLTSDIAVPEGHYQEDSMKSTVVPNRNMILLSLAAGYAVTAGAQAVWFGAHGGDHAIYPDCRPEFIEKMDAVCRVANYQPVAVEAPFMALDKGEILGEGLKLGLDYSQTWTCYNGRELACGRCGSCVERLEAFAAHGLKDPLAYESRA

SEQ ID NO: 39500 - protein, 221 aa, Marinobacter lipolyticus
  REGION 1..221: note = tr|R8B0M8|R8B0M8_9ALTE 7-cyano-7-deazaguanine synthase OS=Marinobacter lipolyticus SM19 OX=1318628; GN = queC PE=3 SV=1
MSETVVVIYSGGMDSFTLLHLARARGHQVHALSFDYGQRHVRELEYARNVCEEAGIPHKVIDISALGAVMAGSALTADVDVPEGHYEEDSMKATVVPNRNMILLSLATGYAVTAGAGAVWYGAHGGDHAIYPDCRPEFVEKMDAVCRVANYEPVAIEAPFMAMDKSAILAEGLKLNLDYSQTWTCYNGRDRACGRCGSCVERREAFATHGLVDPLPYEDAD

SEQ ID NO: 39501 - protein, 221 aa, Marinobacter litoralis
  REGION 1..221: note = tr|A0A3M2RBY8|A0A3M2RBY8_9ALTE 7-cyano-7-deazaguanine synthase OS=Marinobacter litoralis; OX = 187981 GN=queC PE=3 SV=1
MTDTVVVIYSGGMDSFTLLHLARAQGHNVHALSFNYGQRHVRELDAARAVCEAEGIPHKVIDIRAMSEVMSGSALTSDIEIPEGHYEEDNMKATVVPNRNMILLSLATGYAVTVNAQAVWYGAHGGDHAIYPDCRPEFVEKMDAVCRVANYEPVAVKAPFMTLDKGEILAEGLKLGLDYGQTWTCYNGREKACGQCGSCVERLEAFAAHGIKDPLAYERGA

SEQ ID NO: 39502 - protein, 221 aa, Marinobacter lutaoensis
  REGION 1..221: note = tr|A0A1V2DUY7|A0A1V2DUY7_9ALTE 7-cyano-7-deazaguanine synthase OS=Marinobacter lutaoensis; OX = 135739 GN=queC PE=3 SV=1
MTDTVVVIYSGGMDSFTLLHRALARGLRVHALSFDYGQRHVRELACARQVCQALAIPHKVLDIRAMSEVMSGSSLTSDIDVPEGHYEEESMKATVVPNRNMILLSLATGYAVTVGAQAVWYGAHGGDHAIYPDCRPEFVEKMDAVCRIANYEPVAIEAPFMHMDKGQILAEGLKLGLDYRHTWTCYNGRERACGRCGSCVERLEAFAANGVRDPLEYEVPV

SEQ ID NO: 39503 - protein, 221 aa, unidentified; identical to SEQ ID NO: 39486
  source 1..221: note = Marinobacter manganoxydans
  REGION 1..221: note = tr|G6YZ24|G6YZ24_9ALTE 7-cyano-7-deazaguanine synthase OS=Marinobacter manganoxydans MnI7-9 OX=1094979; GN = queC PE=3 SV=1

SEQ ID NO: 39504 - protein, 222 aa, Marinobacter mobilis
  REGION 1..222: note = tr|A0A1H2W3B8|A0A1H2W3B8_9ALTE 7-cyano-7-deazaguanine synthase OS=Marinobacter mobilis; OX = 488533 GN=queC PE=3 SV=1
MKETVVVIYSGGMDSFTLLHKALAEGHAVHALSFNYGQRHVRELDCARTVCESLGIPHRVIDIRALSEVMAGSALTGEVEVPEGHYEEDSMKSTVVPNRNMILLSLATGYAVTVEAQAVWFGAHGGDHAIYPDCRPEFMEKMDAVCRVANYQPVAIAAPYIRADKGEILAEGLAMGLDYSHTWTCYNGRNKACGRCGSCVERLEAFASNGLRDPLPYEESVR

SEQ ID NO: 39505 - protein, 221 aa, unidentified
  source 1..221: note = Marinobacter nanhaiticus
  REGION 1..221: note = tr|N6W4N8|N6W4N8_9ALTE 7-cyano-7-deazaguanine synthase OS=Marinobacter nanhaiticus D15-8W OX=626887; GN = queC PE=3 SV=1
MSEKVVVIYSGGMDSFTLLHRARAAGHEVHALSFNYGQRHVRELECAETVCKALGIPHKVVDMSPMASLMTGSALTDAIDVPEGHYEEDSMKATVVPNRNMILLSLATGYAVSVDAQTVWYGAHGGDHAIYPDCRPEFVEKMDAVCRVANYEPVRIEAPYMKLDKGQILAEGLALDLDYSQTWTCYNGREKACGRCGSCVERLEAFASHGLKDPLPYEVEV

SEQ ID NO: 39506 - protein, 221 aa, unidentified
  source 1..221: note = Marinobacter nitratireducens
  REGION 1..221: note = tr|A0A072MXZ3|A0A072MXZ3_9ALTE 7-cyano-7-deazaguanine synthase OS=Marinobacter nitratireducens OX=1137280 GN=queC PE=3 SV=1
MTDTVVVIYSGGMDSYTLLHLARARGLKVHALSFNYGQRHVRELDCARAVCEAHDIPHKVVDIRAMSEVMEGSALTSDIDVPEGHYEEDSMKSTVVPNRNMILLSLATGYAVTVGAGEVWYGAHGGDHAIYPDCRPEFVEKMDAVCRVANYDPVGIAAPFMTLDKSEILAKGLELGLDYGQTWTCYNGRDKACGRCGSCVERLEAFAAHGATDPLPYEDGV

SEQ ID NO: 39507 - protein, 221 aa, Marinobacter pelagius
  REGION 1..221: note = tr|A0A366GQE5|A0A366GQE5_9ALTE 7-cyano-7-deazaguanine synthase OS=Marinobacter pelagius; OX = 379482 GN=queC PE=3 SV=1
MTETVVVIYSGGMDSFTLLHLARARGYQVHALSFNYGQRHVRELDCARQVCADLGIPHKEIDIRAMSEVMSGSSLTSDIEVPEGHYEEDSMKATVVPNRNMILLSLATGYAVTAGASAVWFGAHGGDHAIYPDCRPEFVEKMDAVCRVANYEPVGIEAPLIRMDKREILAEGLKLGLDYSQTWTCYNGRDKACGRCGSCVERLEAFAANGVTDPLEYEEQA

SEQ ID NO: 39508 - protein, 221 aa, Marinobacter pelagius
  REGION 1..221: note = tr|A0A1I4RUC7|A0A1I4RUC7_9ALTE 7-cyano-7-deazaguanine synthase OS=Marinobacter pelagius; OX = 379482 GN=queC PE=3 SV=1
MTETVVVIYSGGMDSFTLLHLARARGYQVHALSFNYGQRHVRELDCARQVCADLGIPHKEIDIRAMSEVMSGSSLTSDTEVPEGHYEEDSMKSTVVPNRNMILLSLATGYAVTAGASEVWFGAHGGDHAIYPDCRPEFVEKMDAVCRVANYEPVGIEAPFIRMDKGEILAEGLKLGLDYSQTWTCYNGRDKACGRCGSCVERLEAFAANAVTDPLEYEEQV

SEQ ID NO: 39509 - protein, 221 aa, unidentified
  source 1..221: note = Marinobacter persicus
  REGION 1..221: note = tr|A0A1I3V7A6|A0A1I3V7A6_9ALTE 7-cyano-7-deazaguanine synthase OS=Marinobacter persicus; OX = 930118 GN=queC PE=3 SV=1
MTDTVVVIYSGGMDSFTLLHLARARGYQVHALSFNYGQRHVRELEAARAVCQAEGIPHKVIDIRAMSEVMSGSSLTSDIDIPEGHYAEDNMKSTVVPNRNMILLSLATGYAVTVGAQSVWYGAHGGDHAIYPDCRPEFVEKMDAVCRVANYEPVAIEAPFMQLDKGEILAEGLKLGLDYRQTWTCYNGREQACGRCGSCVERLEAFAAHGIRDPLDYEAEA

SEQ ID NO: 39510 - protein, 221 aa, unidentified
  source 1..221: note = Marinobacter persicus
  REGION 1..221: note = tr|A0A2S6GAL3|A0A2S6GAL3_9ALTE 7-cyano-7-deazaguanine synthase OS=Marinobacter persicus; OX = 930118 GN=queC PE=3 SV=1
MADTVVVIYSGGMDSFTLLHLARARGLNVHALSFNYGQRHVRELEAAKAVCEAGRIPHKVIDIRAMSEVMSGSSLTSDIDVPEGHYEEDSMKATVVPNRNMILLSLATGYAVTVGAQAVWYGAHGGDHAIYPDCRPEFVEKMDAVCRVANYEPVGVEAPFMHLDKGEILGEGLKLNLDYSQTWTCYNGRAKACGRCGSCVERLEAFAAHGIQDPLAYEVPA

SEQ ID NO: 39511 - protein, 222 aa, Marinobacter psychrophilus
  REGION 1..222: note = tr|A0A0H4I0F9|A0A0H4I0F9_9ALTE 7-cyano-7-deazaguanine synthase OS=Marinobacter psychrophilus OX=330734 GN=queC PE=3 SV=1
MTDTVVVIYSGGMDSFTLLHKARADGLNVHALSFNYGQRHVRELDCAQEVCQQLGIPHKVIDIRAMSDVMAGSALTSETIDVPEGDYQEGAMKSTVVPNRNMILLALATGYAVTVEASAVWFGAHGGDHAIYPDCRPEFVEKMDAVCKVANYQTVAVEAPFMHFTKGDILALGLQLNLDYSHTWTCYNGRSKACGRCGSCVERLQAFAEHQQQDPVAYEVQY

SEQ ID NO: 39512 - protein, 221 aa, unidentified
  source 1..221: note = Marinobacter salarius
  REGION 1..221: note = tr|W5YP90|W5YP90_9ALTE 7-cyano-7-deazaguanine synthase OS=Marinobacter salarius OX=1420917 GN=queC PE=3; SV = 1
MTETVVVIYSGGMDSFTLLHLARARGYKVHALSFDYGQRHVRELECARQVCEELSVPHKVIDIRALSEVMAGSALTDAVDVPEGHYEEDNMKATVVPNRNMILLSLATGYAVTAGAVAVWYGAHGGDHAIYPDCRPEFVEKMDAVCQVANYEPVKIEAPFMGSDKGAILAEGLKLGLDYGKTWTCYNGRDRACGVCGSCVERLEAFAANGVSDPLRYEVET

SEQ ID NO: 39513 - protein, 221 aa, unidentified
  source 1..221: note = Marinobacter salinus
  REGION 1..221: note = tr|A0A1D9GNX3|A0A1D9GNX3_9ALTE 7-cyano-7-deazaguanine synthase OS=Marinobacter salinus; OX = 1874317 GN=queC PE=3 SV=1
MTDTVVVIYSGGMDSYTLLHLARARGYKVHALSFNYGQRHVRELECASAVCESLAIPHKVIDIRAMSEVMAGSALTGDVNVPEGHYEEDSMKATVVPNRNMILLSLATGYAVTTGAGAVWYGAHGGDHAIYPDCRPEFVEKMDAVCRVANYEPVGIEAPFMAMTKGEILAEGLKLGLDYLQTWTCYNGREKACGRCGSCVERLEAFAANGMTDPLAYEVER

SEQ ID NO: 39514 - protein, 221 aa, Marinobacter santoriniensis
  REGION 1..221: note = tr|M7D1N0|M7D1N0_9ALTE 7-cyano-7-deazaguanine synthase OS=Marinobacter santoriniensis NKSG1 OX=1288826; GN = queC PE=3 SV=1
MTDTVVVIYSGGMDSFTLLHHARACGYRVHALSFNYGQRHVRELDCARDVCRDLGVPHKVIDIRAMAEVMSGSALTSDIDVPEGHYEEDSMKATVVPNRNMILLSLATGYAVTADASAVWFGAHGGDHAIYPDCRPEFIRKMDAVCRIANYEPVGIEAPFMAMDKGAILARGLELGLDYSQTWTCYNGREKACGRCGSCVERLEAFAANGVTDPLDYEVSA

SEQ ID NO: 39515 - protein, 221 aa, Marinobacter segnicrescens
  REGION 1..221: note = tr|A0A1I0HZU8|A0A1I0HZU8_9ALTE 7-cyano-7-deazaguanine synthase OS=Marinobacter segnicrescens OX=430453 GN=queC PE=3 SV=1
MPERVVVIYSGGMDSFTLLHRALSEGHEVHALSFDYGQRHVRELKSASDVCEQLGLPHKVIDIRSMKAVMAGSALTGGGDVPEGHYEEASMKSTVVPNRNMILLSLATGYAVTVEADAVWFGAHGGDHAIYPDCRPEFVEKMDAVCRIANYEPVRIEAPYIRASKTDILADGLAMGLDYSQTWTCYNGREKACGVCGSCVERLEAFAAHGVTDPLPYEARN

SEQ ID NO: 39516 - protein, 248 aa, Marinobacter segnicrescens
  REGION 1..248: note = tr|A0A1I0H1I2|A0A1I0H1I2_9ALTE Queuosine biosynthesis protein QueC OS=Marinobacter segnicrescens; OX = 430453 GN=SAMN04487962_1237 PE=4 SV=1
MQNQEQKPANVLWTGGWDSTYRVIQLVRQGRPVNPHYIIDNNRDSTDIEIKTIKRISSILNEKYGELISDAKIVNSRQLPSRPEIHKAHRKIIEESYLGSQYIILASYCKEFEVNDLNLCIHKDDKAYDHVSDFIEPAEDDGYRLSASSPDHISELFRYFVFPILNLTKLEMEDHTRTWNFQEIMEMTWFCHTPFMGKPCGTCYPCMYTINEGLSRRFSKIALIRYRMKLELRKYPTLVRYVQRVIKS

SEQ ID NO: 39517 - protein, 221 aa, unidentified
  source 1..221: note = Marinobacter shengliensis
  REGION 1..221: note = tr|A0A2T1KU98|A0A2T1KU98_9ALTE 7-cyano-7-deazaguanine synthase OS=Marinobacter shengliensis OX=1389223 GN=queC PE=3 SV=1
MTDTVVVIYSGGMDSFTLLHLARARGYKVHALSFNYGQRHVRELEAAAAVCQAEAIPHKVIDIRAMSEVMAGSSLTSDIAVPEGHYQEDSMKSTVVPNRNMILLSLATGYAVTAGAQAVWFGAHGGDHAIYPDCRPEFIEKMDAVCRVANYQPVAVEAPFMALDKGEILGEGLKLGLDYSQTWTCYNGRERACGRCGSCVERLEAFAAHGLKDPLAYESHA

SEQ ID NO: 39518 - protein, 206 aa, unidentified
  source 1..206: note = Marinobacter shengliensis
  REGION 1..206: note = tr|A0A2T1KR77|A0A2T1KR77_9ALTE 7-cyano-7-deazaguanine synthase OS=Marinobacter shengliensis OX=1389223 GN=C7H10_10490 PE=3 SV=1
MKNALLLASGGLDSTTVAYQLADAGVEVVPIFFDYGQHCVDIEWDRVNEVLPSDMHRPERFNISDIFQGSQSRLIREADLWTEEVKDDDLYIPYRTMLFFAAAAARAQTVGVLDVYTGFINSNHAKEIDCTAAFMDSLDGLTSSIGPVRFHSPFRYSSKADVARAAVELGVPIGRTYSCQASAKFPCGACPNCVERLNALKEAKLV

SEQ ID NO: 39519 - protein, 220 aa, Marinobacter sp.
  REGION 1..220: note = tr|A0A1E7PWI7|A0A1E7PWI7_9ALTE 7-cyano-7-deazaguanine synthase OS=Marinobacter sp. X15-166B OX=1897620 GN=queC PE=3 SV=1
MDTVVVIYSGGMDSFTLLHLARSKGHPVHALSFDYGQRHVRELDSARQVCRALGIPHQVIDITAMNAVMAGSSLTGEGAIPAGSYEEETMKSTVVPNRNMILLSLATGYAVTIGARSVWYGAHGGDHAIYPDCRPEFIEKMDAVCRVANYEPVAIEAPFMRADKAAILATGLELGLDYGQTWTCYNGREKACGQCGSCVERLQAFAAHGLTDPLAYEEQA

SEQ ID NO: 39520 - protein, 221 aa, Marinobacter sp.; identical to SEQ ID NO: 39512
  REGION 1..221: note = tr|A0A3S1BW53|A0A3S1BW53_9ALTE 7-cyano-7-deazaguanine synthase OS=Marinobacter sp. NP-6; OX = 2488666 GN=queC PE=3 SV=1

SEQ ID NO: 39521 - protein, 221 aa, unidentified
  source 1..221: note = Marinobacter subterrani
  REGION 1..221: note = tr|A0A0J7J4S8|A0A0J7J4S8_9ALTE 7-cyano-7-deazaguanine synthase OS=Marinobacter subterrani; OX = 1658765 GN=queC PE=3 SV=1
MTDTVVVIYSGGMDSYTLLHLARERGYKVHALSFNYGQRHVKELDCARSVCTALGIPHKVIDIRAMSEVMAGSSLTSDLEVPEGHYEEDSMKATVVPNRNMILLSLATGYAVTMAADAVWYGAHGGDHAIYPDCRPEFVAKMDAVCRVANYEPVGIEAPFMAMDKGRILAEGLRLGLDYARTWTCYNGRDRACGRCGSCVERLEAFAANGVTDPLEYEGNR

SEQ ID NO: 39522 - protein, 221 aa, Marinobacter vinifirmus
  REGION 1..221: note = tr|A0A558BI59|A0A558BI59_9ALTE 7-cyano-7-deazaguanine synthase OS=Marinobacter vinifirmus; OX = 355591 GN=queC PE=3 SV=1
MTDTVVVIYSGGMDSFTLLHLARSRGLKVHALSFNYGQRHVRELEAARAVCQAEGIPHKVIDIRAMSEVMAGSSLTSDAEVPEGHYEEDSMKSTVVPNRNMILLSLATGYAVTVGAGAVWYGAHGGDHAIYPDCRPEFVEKMDAVCRIANYEPVGIEAPFMAMDKGEILAEGLKLGLDYSQTWTCYNGRDKACGRCGSCVERLEAFAAHGLEDPLAYEDNA

SEQ ID NO: 39523 - protein, 222 aa, Marinobacter zhejiangensis
  REGION 1..222: note = tr|A0A1I4LYN4|A0A1I4LYN4_9ALTE 7-cyano-7-deazaguanine synthase OS=Marinobacter zhejiangensis OX=488535 GN=queC PE=3 SV=1
MKETVVVIYSGGMDSFTLLHKARAEGYDVHALSFNYGQRHVRELDCARAVCEQLGIPHRVIDIRSLSEVMAGSALTGEVEVPEGHYQEENMKTTVVPNRNMILLSLATGYAVTVEAQAVWFGAHGGDHAIYPDCRPEFMEKMDAVCRVANYHPVAIAAPYIRADKSEILAEGLALGLDYSQTWTCYNGRDKACGRCGSCVERLEAFASNQLPDPLSYEDGVR

SEQ ID NO: 39524 - protein, 230 aa, unidentified
  source 1..230: note = Marinobacterium aestuarii
  REGION 1..230: note = tr|A0A1A9EX60|A0A1A9EX60_9GAMM 7-cyano-7-deazaguanine synthase OS=Marinobacterium aestuarii OX=1821621 GN=queC PE=3 SV=1
MTQSSPKAVVLLSGGLDSATVLAMALDQGYDCHVLSFDYGQRSQTELNAARAVVSALGVSAHKHKVVRLHLEDFGGSALTDHSIDVPEQDAEGEIPVTYVPARNTVFLSLALGWAEVLGARALFIGVNAVDYSGYPDCRPEFIAAFESMANLATKAGVSGQPFRIETPLMSLTKSDIIVEGQRLGLDYGLTVSCYQADDQGRACGVCDSCRLRAKGFADAGVEDPTRYQA

SEQ ID NO: 39525 - protein, 226 aa, Marinobacterium georgiense
  REGION 1..226: note = tr|A0A1H4BBT1|A0A1H4BBT1_9GAMM 7-cyano-7-deazaguanine synthase OS=Marinobacterium georgiense DSM 11526 OX=1122198 GN=queC PE=3 SV=1
MKQSEKRAVVLLSGGLDSATALAMAMEQGYSCHVLSFDYGQRSVTELNAARAIAAQAGVSEHRVLRLHLEDFGGSALTDTSIDVPEDQAEGVPVTYVPARNTVFLSLALGWAEVLDADAIFIGVNAVDYSGYPDCRPEFIEAFERMANLATRRGINGDPVHIETPLMHLTKADIIRRGTALGIDYALTVSCYQADMEGRACGRCDSCRLRAKGFEDAGVVDPTRYV

SEQ ID NO: 39526 - protein, 226 aa, Marinobacterium halophilum
  REGION 1..226: note = tr|A0A2P8EV73|A0A2P8EV73_9GAMM 7-cyano-7-deazaguanine synthase OS=Marinobacterium halophilum OX=267374 GN=queC PE=3 SV=1
MKQHEKRAVVLLSGGLDSATALAMAKEQGYTCHVLSFDYGQRSLTELNAAKAIAEQMGVAEHRILRLHLEDFGGSALTDTSIEMPEGETEGVPVTYVPARNTVFLSLALGWAEVLDADAIFIGVNAVDYSGYPDCRPEFIAAFETMANLATRRGIDGNPIRIETPLMSMTKADIIMRGNALGIDYALTVSCYQADADGRACGRCDSCRLRAKGFADAGVADPTRYF

SEQ ID NO: 39527 - protein, 229 aa, Marinobacterium lutimaris
  REGION 1..229: note = tr|A0A1H5WQ59|A0A1H5WQ59_9GAMM 7-cyano-7-deazaguanine synthase OS=Marinobacterium lutimaris OX=568106 GN=queC PE=3 SV=1
MTQAQKRAVVLLSGGLDSATALAIAKSEGYSCHVLSFDYGQRSLTELNAARQIAASLDVAEHRVLRLHLEDFGGSALTDKSIDVPEDADDDGIPVTYVPARNTVFLSLALGWAEVLHAEAIFIGVNAVDYSGYPDCRPEFIEAFEKMANLATKNGVSGEPIRIATPLIDLTKAEIIQAGMALGVDYSATLSCYQADEEGRACGHCDSCRLRAKGFEDAGVPDPTRYVEA

SEQ ID NO: 39528 - protein, 229 aa, unidentified
  source 1..229: note = Marinobacterium mangrovicola
  REGION 1..229: note = tr|A0A4R1GKA7|A0A4R1GKA7_9GAMM 7-cyano-7-deazaguanine synthase OS=Marinobacterium mangrovicola OX=1476959 GN=queC PE=3 SV=1
MTQAQKRAVVLLSGGLDSATALAIAKSKGYSCHVLSFDYGQRSLTELNAARQIAASLEVAEHRVLRLNLEDFGGSALTDKSIDVPEDAEDDGIPITYVPARNTVFLSLALGWAEVLHAEAIFIGVNAVDYSGYPDCRPEFIAAFEKMANLATKNGVSGEPIRIETPLIDLTKAEIIQAGMALGVDYSATLSCYQADDEGRACGHCDSCRLRAKGFEDAGVADPTRYVEA

SEQ ID NO: 39529 - protein, 227 aa, Marinobacterium sp.
  REGION 1..227: note = tr|A0A081FU47|A0A081FU47_9GAMM 7-cyano-7-deazaguanine synthase OS=Marinobacterium sp. AK27 OX=1232683 GN=queC PE=3 SV=1
MKDSQKRAVVLLSGGLDSATALAIAKSRGYSCHVLSFDYGQRSQTELNAARSIAQDMDVTEHRVLRLNLEDFGGSALTDTSIDVPDGETEGIPVTYVPARNTVFLSLALGWAEVLHAEAIFIGVNAVDYSGYPDCRPEFIEAFEKMANLATRNGVSGEPIHIETPLIDLTKAEIIKAGLALGVDYSKTLSCYQADDQGRACGHCDSCRLRAKGFADARVEDPTPYVV

SEQ ID NO: 39530 - protein, 226 aa, Marinobacterium stanieri
  REGION 1..226: note = tr|A0A1N6RKT5|A0A1N6RKT5_9GAMM 7-cyano-7-deazaguanine synthase OS=Marinobacterium stanieri OX=49186 GN=queC PE=3 SV=1
MKQGEKRAVVLLSGGLDSATALAMAKEQGYACYVLSFDYGQRSLTELNAARAITAQLGVAEHRVLRLSLEDFGGSALTDNSIDVPEDECEGVPVTYVPARNTVFLSLALGWAEVLDADAIFIGVNAVDYSGYPDCRPEFIQAFETMANLATRRGVEGDPISIETPLMHLTKADIIEKGTALGIDYALTVSCYQADDEGRACGRCDSCRLRAKGFADAGVADPTRYM

SEQ ID NO: 39531 - protein, 223 aa, Marinococcus halophilus
  REGION 1..223: note = tr|A0A510Y3X5|A0A510Y3X5_MARHA 7-cyano-7-deazaguanine synthase OS=Marinococcus halophilus; OX = 1371 GN=queC PE=3 SV=1
MGFQNEKAVVVFSGGQDSTTCLFWALEQFEEVIAVTFSYGQRHDEEIEVAKRIAEDINIEHHVLDMGLLSQLAPNALTRDDIEVEAGEDGELPSTFVEGRNLLFFSFATILASQKKAKHIVTGVCETDYSGYPDCRDVFVKSLNVSLNLAIGKEFVLHTPLMWLDKKETWELADRLGRLKYIKDETLTCYHGIPGDGCGECPACNLRRAGYEQYLEQKEREGL

SEQ ID NO: 39532 - protein, 223 aa, Marinococcus luteus
  REGION 1..223: note = tr|A0A1H2VFA8|A0A1H2VFA8_9BACI 7-cyano-7-deazaguanine synthase OS=Marinococcus luteus; OX = 1122204 GN=queC PE=3 SV=1
MGFQNDKAVVVFSGGQDSTTCLFWALEQFEEVIAVTFSYGQRHDEEIEVAKRIAEDINIEHHVLDMGLLSQLAPNALTRDDIEVEAGEDGELPSTFVEGRNLLFFSFATILASQKKAKHIVTGVCETDYSGYPDCRDVFVKSLNVSLNLAIGKEFVLHTPLMWLDKKETWELADRLGRLEYVKDETLTCYHGIPGDGCGECPACKLRRAGYEQYMEQKERKEL

SEQ ID NO: 39533 - protein, 219 aa, Marinomonas alcarazii
  REGION 1..219: note = tr|A0A318V7X9|A0A318V7X9_9GAMM 7-cyano-7-deazaguanine synthase OS=Marinomonas alcarazii; OX = 491949 GN=queC PE=3 SV=1
MSEKAVVVYSGGMDSFTVLNTAIQNGLDVYALSFNYGQKHSKELEVAARVCNELGVTHKVVDITAINSLMANSSLTSDAEIPEGHYEDDNMKSTVVPNRNMVLLSMAIAYAVSLEAGKVYYGAHSGDHHIYPDCRPEFVEAMNAVSKIANYQSVEIVTPFLHSSKGEILKAGLEMNLNYANTWTCYNGREKSCGKCGACYERLEAFAEQGTTDPLDYEV

SEQ ID NO: 39534 - protein, 219 aa, Marinomonas aquimarina
  REGION 1..219: note = tr|A0A1A8TEU8|A0A1A8TEU8_9GAMM 7-cyano-7-deazaguanine synthase OS=Marinomonas aquimarina; OX = 295068 GN=queC PE=3 SV=1
MSNKAVVVYSGGMDSYTVLHTALAEGKEVYALSFNYGQRHSKELDVAAAVCAKHGIPHKIVDISAINDLMAGSSLTSDIEIPEGHYAEDSMKNTVVPNRNMVLLSMAIAYAVSLEAPEVYYGAHSGDHHIYPDCRPEFVHAMNAVSKIANYEPVEIVTPFLNSSKGEILAAGLAMNLDYGNTWTCYNGREHACGKCGACNERLEAFAEQGITDPLTYEA

SEQ ID NO: 39535 - protein, 220 aa, Marinomonas aquiplantarum
  REGION 1..220: note = tr|A0A366CYL5|A0A366CYL5_9GAMM 7-cyano-7-deazaguanine synthase OS=Marinomonas aquiplantarum OX=491951 GN=queC PE=3 SV=1
MSEKAVVVYSGGMDSFTVLNTAIQEGLEVYAISFNYGQKHNKELEVAAQVCQNLNIPHKIVDITAINSLMANSSLTSGEDIPEGHYESDSMKSTVVPNRNMVLLSMAIAYAVSLEAGKVYYGAHSGDHHIYPDCRPEFVDAMNAVAQIANYQAVDIVTPFLHSSKGDILKAGLDMGLNYGNTWTCYNGREKSCGKCGACHERLEAFAEQGKTDPLEYELN

SEQ ID NO: 39536 - protein, 219 aa, Marinomonas balearica
  REGION 1..219: note = tr|A0A4R6ME23|A0A4R6ME23_9GAMM 7-cyano-7-deazaguanine synthase OS=Marinomonas balearica; OX = 491947 GN=queC PE=3 SV=1
MTSKAVVVYSGGMDSFTVLNKAVREGKEVYALSFNYGQKHSKELIVAASVCKDLGVPHKVVDISAINELMAGSSLTDAIDIPEGHYAEDSMKSTVVPNRNMVLLSMAIAYAVSLEAPEVYYGAHSGDHHIYPDCRPEFVNAMNNVSKIANYQSVEIVTPFLSSSKGDILKAGLEMGLNYENTWTCYNGREKACGKCGACTERLEAFSEQQATDPLLYEV

SEQ ID NO: 39537 - protein, 219 aa, Marinomonas communis
  REGION 1..219: note = tr|A0A4R6X7N1|A0A4R6X7N1_9GAMM 7-cyano-7-deazaguanine synthase OS=Marinomonas communis; OX = 28254 GN=queC PE=3 SV=1
MSNKAVVVYSGGMDSYTVLHTALAEGKEVYALSFNYGQRHSKELDVAAAVCAKHGIPHKVVDISAINSLMAGSSLTSEIDIPEGHYAEESMKNTVVPNRNMVLLSMAIAYAVSLEAPEVYYGAHSGDHHIYPDCRPEFVHAMNAVSKIANYEPVEIVTPFLNNSKGEILAAGLAINLDYSDTWTCYNGREKACGKCGACNERLEAFTEQGVTDPLNYEA

SEQ ID NO: 39538 - protein, 220 aa, Marinomonas foliarum
  REGION 1..220: note = tr|A0A368ZQI1|A0A368ZQI1_9GAMM 7-cyano-7-deazaguanine synthase OS=Marinomonas foliarum; OX = 491950 GN=queC PE=3 SV=1
MMSEKAVVVYSGGMDSFTVLNTAIENGLDVYALSFNYGQKHSKELDVATKVCQALNIPHKVVDITAINSLMANSSLTSDADIPEGHYEDDNMKSTVVPNRNMVLLSMAIAYAVSLEAGKVYYGAHSGDHHIYPDCRPEFVEAMNAVSKIANYQSVEIVTPFLHASKGEILKVGLDMKLDYANTWTCYNGREKSCGKCGACCERLEAFAEQGKKDPLDYEA

SEQ ID NO: 39539 - protein, 219 aa, unidentified
  source 1..219: note = Marinomonas fungiae
  REGION 1..219: note = tr|A0A0K6IK82|A0A0K6IK82_9GAMM 7-cyano-7-deazaguanine synthase OS=Marinomonas fungiae; OX = 1137284 GN=queC PE=3 SV=1
MSNKAVVVYSGGMDSYTVLHTALAEGKEVYALSFNYGQRHSKELDVAAAVCAKHGISHKIVDISAINSLMAGSSLTSDIEIPEGHYAEDSMKNTVVPNRNMVLLSMAIAYAVSLEAPEVYYGAHSGDHHIYPDCRPEFVHAMNAVSKIANYEPVEIVTPFLNSSKGEILAAGLGMNLDYADTWTCYNGREKACGKCGACNERLEAFAEQGVTDPLIYEV

SEQ ID NO: 39540 - protein, 219 aa, unidentified
  source 1..219: note = Marinomonas gallaica
  REGION 1..219: note = tr|A0A1C3JUH1|A0A1C3JUH1_9GAMM 7-cyano-7-deazaguanine synthase OS=Marinomonas gallaica; OX = 1806667 GN=queC PE=3 SV=1
MSNKAVVVYSGGMDSYTVLHTALAAGKDVYALSFNYGQRHSKELDVAAKVCQKFNIPHKVVDISAINSLMAGSSLTDDIEIPEGHYAEDSMKNTVVPNRNMVLLSMAIAYAVSLEAPEVYYGAHAGDHHIYPDCRSEFVHAMNAVSQIANYEPVEIVTPFLNSSKGEILAAGLAMDLNYGDTWTCYNGREKACGKCGACNERMEAFNEQGVTDPLSYEV

SEQ ID NO: 39541 - protein, 219 aa, unidentified
  source 1..219: note = Marinomonas hwangdonensis
  REGION 1..219: note = tr|A0A3M8Q3B2|A0A3M8Q3B2_9GAMM 7-cyano-7-deazaguanine synthase OS=Marinomonas hwangdonensis OX=1053647 GN=queC PE=3 SV=1
MSEKAVVVYSGGMDSFTVLNTAIQNGLEVYALSFNYGQKHSKELEVAAQVCRELGVSHKVVDITAINSLMANSSLTGDAEIPEGHYESDSMKSTVVPNRNMVLLSMAIAYAVSLEAGKVYYGAHSGDHHIYPDCRPEFVEAMNAVSKIANYQSVEIVTPFLHASKGEILKAGLSMNLNYANTWTCYNGREKSCGKCGACNERLEAFAEQGKTDPLEYEA

SEQ ID NO: 39542 - protein, 219 aa, Marinomonas mediterranea
  REGION 1..219: note = tr|F2JTI9|F2JTI9_MARM1 7-cyano-7-deazaguanine synthase OS=Marinomonas mediterranea (strain ATCC 700492 / JCM 21426 / NBRC 103028 / MMB-1) OX=717774 GN=queC PE=3; SV = 1
MTNKAVVVYSGGMDSFTVLNKAIKDGKDVYALSFNYGQRHSKELIVAAKVCQDLNIPHKVVNISAINELMAGSSLTDEIEIPEGHYAEESMKSTVVPNRNMVLLSMAIAYAVSLEAPEVYYGAHSGDHHIYPDCRPAFVNAMNDVSKIANYQSVEIVTPYLSNSKGDILEDGLTMGLNYANTWTCYNGREKACGKCGACTERLEAFSEQNTTDPLAYEV

SEQ ID NO: 39543 - protein, 219 aa, Marinomonas polaris
  REGION 1..219: note = tr|A0A1M5A0C6|A0A1M5A0C6_9GAMM 7-cyano-7-deazaguanine synthase OS=Marinomonas polaris DSM 16579 OX=1122206 GN=queC PE=3 SV=1
MSEKAVVVYSGGMDSFTVLNAAIQNGLDVYALSFNYGQKHSKELEVAARVCRELGVSHKIVDITAINSLMANSSLTGDAEIPEGHYEDDNMKSTVVPNRNMVLLSMAIAYAVSLEAGKVYYGAHSGDHHIYPDCRPEFVEAMNAVSKIANYQSVEIVTPFLHSSKGEILKTGLKMDLDYANTWTCYNGREKSCGKCGACYERLEAFAEQGKTDPLDYEV

SEQ ID NO: 39544 - protein, 219 aa, Marinomonas pollencensis
  REGION 1..219: note = tr|A0A3E0DTL8|A0A3E0DTL8_9GAMM 7-cyano-7-deazaguanine synthase OS=Marinomonas pollencensis OX=491954 GN=queC PE=3 SV=1
MSEKAVVVYSGGMDSFTVLNTAIQEGLEVYALSFNYGQKHSKELIVAAEVCKNLNIPHKVVDITAINSLMAGSSLTSDSDIPEGHYENESMKSTVVPNRNMVLLSMAIAYAVSLESGKVYYGAHSGDHHIYPDCRPEFVDAMNAVSKIANYQSVEIVTPFLHASKGEILQAGLAMNLDYANSWTCYNGREKSCGKCGACNERLEAFAELGKTDPLAYEA

SEQ ID NO: 39545 - protein, 220 aa, Marinomonas posidonica
  REGION 1..220: note = tr|F6CRR6|F6CRR6_MARPP 7-cyano-7-deazaguanine synthase OS=Marinomonas posidonica (strain CECT 7376 / NCIMB 14433 / IVIA-Po-181) OX=491952 GN=queC PE=3 SV=1
MSEKAVVVYSGGMDSFTVLNTAIQQGLEVYAISFNYGQKHSKELQVAAQVCQSLNIPHKIVDITAINSLMANSSLTSDEDIPEGHYESDSMKSTVVPNRNMVLLSMAIAYAVSLEAGKVYYGAHSGDHHIYPDCRPEFVDAMNAVAQIANYQAVDIVTPFLHSSKGEILKAGLDMKLNYGNTWTCYNGREKSCGKCGACNERLEAFAEQGQTDPLEYELS

SEQ ID NO: 39546 - protein, 219 aa, Marinomonas primoryensis
  REGION 1..219: note = tr|A0A2Z4PTM9|A0A2Z4PTM9_9GAMM 7-cyano-7-deazaguanine synthase OS=Marinomonas primoryensis OX=178399 GN=queC PE=3 SV=1
MPEKVVVVYSGGMDSFTVLNTAIQNGLDVYALSFDYGQKHSKELEVAAQVCRTLGVSHKVVDITAINSLMANSSLTGDTKIPEGHYEDDSMKSTVVPNRNMVLLSMAIAYAVSLEAGKVYYGAHSGDHHIYPDCRPEFVDAMNAVSKIANYQSVEIVTPFLYSSKGDILKAGLSMNLDYANTWTCYNGREKSCGKCGACCERLDAFREQGKTDPLDYEI

SEQ ID NO: 39547 - protein, 219 aa, unidentified
  source 1..219: note = Marinomonas profundimaris
  REGION 1..219: note = tr|W1RNB4|W1RNB4_9GAMM 7-cyano-7-deazaguanine synthase OS=Marinomonas profundimaris OX=1208321 GN=queC; PE = 3 SV=1
MSEKAVVVYSGGMDSFTVLNTAIQSGLDVYALSFDYGQKHNKELNVAAQVCKDLGISHKIVDITAINSLMANSSLTGDAEIPEGHYEDDNMKSTVVPNRNMVLLSMAIAYAVSLEAGKVYYGAHSGDHHIYPDCRPEFVEAMNAVSKIANYQSVEIVTPFLHSSKGDILKAGLAMNLNYANTWTCYNGREKSCGKCGACVERLEAFSEQGKMDPLVYEA

SEQ ID NO: 39548 - protein, 219 aa, Marinomonas rhizomae
  REGION 1..219: note = tr|A0A366JC70|A0A366JC70_9GAMM 7-cyano-7-deazaguanine synthase OS=Marinomonas rhizomae; OX = 491948 GN=queC PE=3 SV=1
MSEKAVVVYSGGMDSFTVLNTAIQNGLDVYALSFNYGQKHSKELEVAARVCRELGVSHKVVDITAINSLMANSSLTGDTEIPEGHYEDDNMKSTVVPNRNMVLLSMAIAYAVSLEAGKVYYGAHSGDHHIYPDCRPEFVDAMNAVSKIANYQSVEIVTPFLYSSKGEILKTGLEMNLNYANTWTCYNGREKSCGKCGACCERLEAFEEQGKIDPLDYEI

SEQ ID NO: 39549 - protein, 219 aa, Marinomonas sp.
  REGION 1..219: note = tr|A0A2M8KAD8|A0A2M8KAD8_9GAMM 7-cyano-7-deazaguanine synthase OS=Marinomonas sp. BSi20584 OX=1594462 GN=queC PE=3 SV=1
MSEKAVVVYSGGMDSFTVLNTAIQNGLDVYALSFNYGQKHSKELEVAAQVCRELGVSHKIIDITAINSLMANSSLTGDTEIPEGHYEDDNMKSTVVPNRNMVLLSMAIAYAVSLEAGKVYYGAHSGDHHIYPDCRPEFVEAMNAVSKIANYQSVEIVTPFLHSSKGEILKTGLKMDLDYANTWTCYNGREKSCGKCGACYERLEAFAEQGKTDPLDYEV

SEQ ID NO: 39550 - protein, 219 aa, Marinomonas sp.
  REGION 1..219: note = sp|A6VX48|QUEC_MARMS 7-cyano-7-deazaguanine synthase; OS = Marinomonas sp. (strain MWYL1) OX=400668 GN=queC PE=3; SV = 1
MSEKAVVVYSGGMDSFTVLNTAIQNGLDVYALSFNYGQKHSKELEVAAHVCRKLGISHKVVDITAINSLMANSSLTGDAEIPEGHYEDDNMKSTVVPNRNMVLLSMAIAYAVSLEAGKVYYGAHSGDHHIYPDCRPEFVEAMNAVSKIANYQSVEIVTPFLHSSKGEILKAGLDMNLNYANTWTCYNGREKSCGKCGACYERLEAFAEQGKTDPLEYEA

SEQ ID NO: 39551 - protein, 219 aa, unidentified
  source 1..219: note = Marinomonas spartinae
  REGION 1..219: note = tr|A0A1A8TKH4|A0A1A8TKH4_9GAMM 7-cyano-7-deazaguanine synthase OS=Marinomonas spartinae; OX = 1792290 GN=queC PE=3 SV=1
MSEKAVVVYSGGMDSFTVLNTALKSGLEVYALSFNYGQKHSKELQVAAQVCRELQVPHKIVDITAINSLMANSSLTGDEDIPEGHYESDNMKSTVVPNRNMVLLSMAIAYAVSLEAGKVYYGAHSGDHHIYPDCRPEFVTAMNAVSNIANYQPVEIVTPFLHSSKGDILKAGLAMNLDYAKTWTCYNGREKPCGKCGACNERLEAFAEQGITDPLEYEA

SEQ ID NO: 39552 - protein, 219 aa, Marinomonas ushuaiensis
  REGION 1..219: note = tr|X7E944|X7E944_9GAMM 7-cyano-7-deazaguanine synthase OS=Marinomonas ushuaiensis DSM 15871 OX=1122207; GN = queC PE=3 SV=1
MSEKAVVVYSGGMDSFTVLNTAIQNGLDVYALSFNYGQKHSKELEVAALVCKELNIPHKVVDITAINSLMANSSLTGGADIPEGHYEDDNMKSTVVPNRNMVLLSMAIAYAVSLEIGKVYYGAHSGDHHIYPDCRPEFVEAMNAVSKIANYQSVEIVTPFLHSSKGAILKAGLDMQLDYGKTWTCYNGREKSCGKCGACHERLEAFTEQGKTDPLDYEA

SEQ ID NO: 39553 - protein, 221 aa, Marinoscillum sp.; identical to SEQ ID NO: 38291
  REGION 1..221: note = tr|A0A2D7TG66|A0A2D7TG66_9BACT 7-cyano-7-deazaguanine synthase OS=Marinoscillum sp.; OX = 2024838 GN=queC PE=3 SV=1

SEQ ID NO: 39554 - protein, 233 aa, Marinovum algicola
  REGION 1..233: note = tr|A0A0H4L206|A0A0H4L206_9RHOB 7-cyano-7-deazaguanine synthase OS=Marinovum algicola DG 898 OX=988812 GN=queC PE=3 SV=1
MKTLVICSGGLDSVSLAHITADEHQLTRLVSFDYGQRHRKELDFAAAAAQRLGVPHHLMDMRGIGAALSGSALTDDIDVPDGHYAEDTMRITVVPNRNAIMLAIGFGVAAANGDEAVATAVHGGDHFIYPDCRPGFARAFDAMQQAALDGYAEVRLHTPFVERSKADIVREGARHGTPFAETWSCYKGGALHCGRCGTCVERREAFHIAGVPDPTAYADPEYWATAIAEREAT

SEQ ID NO: 39555 - protein, 236 aa, Marinovum sp.
  REGION 1..236: note = tr|A0A2E7WGA8|A0A2E7WGA8_9RHOB 7-cyano-7-deazaguanine synthase OS=Marinovum sp.; OX = 2024839 GN=queC PE=3 SV=1
MKTIVICSGGLDSVTLAHRVAAQQDLTALVSFNYGQRHKKELDFAAACSTRLGVPHHIIDIRAIGAALSGSALTDAIDVPDGHYAEDSMKVTVVPNRNAIMLTIAFGIAAAEKADAVAAAVHGGDHFIYPDCRPGFIDAFQVMQNQALEGYADVKLFTPYVHLSKADIVRDGVTHKAPFDATWSCYKGGAYHCGRCGTCVERREAFEIANVPDPTRYDDPDFWRQAITANPLGKET

SEQ ID NO: 39556 - protein, 226 aa, Marinovum sp.
  REGION 1..226: note = tr|A0A2D7ZBJ3|A0A2D7ZBJ3_9RHOB 7-cyano-7-deazaguanine synthase OS=Marinovum sp.; OX = 2024839 GN=queC PE=3 SV=1
  VARIANT 55: note = Xaa can be any naturally occurring amino acid
  VARIANT 213: note = Xaa can be any naturally occurring amino acid
MSTLVLCSGGLDSVTLAYKVHAESHLSYLLSFDYGQRHKKELNFAEKASSALGVXHEIIDISNLTKILGSSALTDSTPVPDGHYAEQSMMTTVVPNRNPIMLTIAFALAARENLQTVAAAVHAGDHFIYPDCRPEFVDAFREMQLLALDGVSKIDLYAPFVGSSKADIVSVGSELDVPFQETWSCYKGLERHCGRCGTCVERLEAFHLAGIDXPTSYDDTEFWKTA

SEQ ID NO: 39557 - protein, 228 aa, unidentified
  source 1..228: note = Mariprofundus aestuarium
  REGION 1..228: note = tr|A0A2K8L4A8|A0A2K8L4A8_9PROT 7-cyano-7-deazaguanine synthase OS=Mariprofundus aestuarium OX=1921086 GN=queC PE=3 SV=1
MSKAKAVVLLSGGLDSSTALAWAVKEMGWQCHTVAFDYGQRHRIELAASEHVARFFGVTDHRTISVDMRTIGHSALTSDMPVPKDEAGGAEVPTTYVPARNLIFLSLAAGLAETVGATKLVIGANVVDYSGYPDCRPEFLEAFARCARIGTQIGAEGGTLDIEAPLINLGKSEIISMGLKLGLDYGLTRSCYDPLSDGMPCGHCDSCHYRKIGFAELGISDPLPYPDH

SEQ ID NO: 39558 - protein, 228 aa, unidentified
  source 1..228: note = Mariprofundus ferrinatatus
  REGION 1..228: note = tr|A0A2K8L457|A0A2K8L457_9PROT 7-cyano-7-deazaguanine synthase OS=Mariprofundus ferrinatatus OX=1921087 GN=queC PE=3 SV=1
MSNVKAVVLLSGGLDSSTALAWAVKEMGWQCHTVAFDYGQRHRIELEASEAVARFFGVVDHRVIKVDLRAIGGSSLTSETPVPKDEAGRAGIPSTYVPARNLIFLSLAAGLAEAVGATRLVIGANVVDYSGYPDCRPEFLDAFIKAARLGTKAGSEGGDIEISAPLIELGKSEIIALGLRLGLDYGLTRSCYDPLPNGMPCGHCDSCHYRKQGFAELGGSDPLTYPQE

SEQ ID NO: 39559 - protein, 230 aa, Mariprofundus ferrooxydans
  REGION 1..230: note = tr|Q0F2M0|Q0F2M0_9PROT 7-cyano-7-deazaguanine synthase OS=Mariprofundus ferrooxydans PV-1 OX=314345; GN = queC PE=3 SV=1
MSTGVTHAVVLLSGGLDSSTALAWAVRKMGWQCHTVAFDYGQRHRIELDASAAIAHSFGVTDHRVISVDLRAIGHSALTSATPVPKDEAGHAGIPSTYVPARNLIFLSLAAGLAEAVCATRLVIGANVVDYSGYPDCRQEFLDAFVRTALLGTKAGSEGGDLQIAAPLIQLGKAEIIELGLDLGLDYGLTRSCYDPLPGGSPCGHCDSCYYRRQGFEQLGRQDPLAYPDN

SEQ ID NO: 39560 - protein, 229 aa, unidentified
  source 1..229: note = Mariprofundus micogutta
  REGION 1..229: note = tr|A0A1L8CPT0|A0A1L8CPT0_9PROT 7-cyano-7-deazaguanine synthase OS=Mariprofundus micogutta; OX = 1921010 GN=queC PE=3 SV=1
MGKQNRAVVLLSGGLDSSTALAWAIKTQGWDCHTVAFDYGQRHKVELKSSARVAASLGVTDHRIINVDMRTIGHSALTSDLAVPKDDEDHVGVPVTYVPARNLIFLSLAAGLAETVAASYLVIGANVVDYSGYPDCRPEFLEAFVQAARIGTKAGSEGKKLEISAPLIELGKDEIIKLGTELGLDYGLTSSCYDPRPDGAPCGHCDSCFYRRKGFERLGLEDPLVYPDF

SEQ ID NO: 39561 - protein, 230 aa, Mariprofundus sp.
  REGION 1..230: note = tr|A0A498DHW1|A0A498DHW1_9PROT 7-cyano-7-deazaguanine synthase OS=Mariprofundus sp. EBB-1; OX = 2650971 GN=queC PE=3 SV=1
MNTTSKKAVVLLSGGLDSSTALAWAVREQGWECHTVAFDYGQRHRIELEASEQVARAFGVTDHRVIKVDLRSIGHSALTSDMPVPKDHADTAEIPSTYVPARNLIFLSLAAGLAEAVQATRLVIGANIVDYSGYPDCRPEFMHSFVRTALLGTKAGSEGGDLEIAAPLITLKKSEIIALGLKLGLDYGLTRSCYDPLPDGAPCGHCDSCFFRQQGFSDLGQQDPLPYPEQ

SEQ ID NO: 39562 - protein, 219 aa, unidentified
  source 1..219: note = Marisediminitalea aggregata
  REGION 1..219: note = tr|A0A1M5REI5|A0A1M5REI5_9ALTE 7-cyano-7-deazaguanine synthase OS=Marisediminitalea aggregata OX=634436 GN=queC PE=3 SV=1
MSEKVIVIYSGGMDSYTVLNKAIEDGKTPYALSFDYGQRHKKELDYAANVCKELGISHKIVDISAINSLVGGSALTDDIEVPEGHYEEPSMKQTVVPNRNMILLSLAVGYAVSMEANKVYYGAHSGDHAIYPDCRPEFVEKMNDVCAIANYEAIEIVTPYLKVSKTAILTDGLRMGLDYGKSWTCYNGREHACGKCGACQERLEAFRDNNATDPLEYES

SEQ ID NO: 39563 - protein, 233 aa, Maritalea myrionectae
  REGION 1..233: note = tr|A0A2R4MHN6|A0A2R4MHN6_9RHIZ 7-cyano-7-deazaguanine synthase OS=Maritalea myrionectae; OX = 454601 GN=queC PE=3 SV=1
MKTLVICSGGLDSVSLAHIIADQHELTRLVSFDYGQRHRKELDFAAAAAKRLNVPHHLMDMRGIGAALSGSALTDDIDVPDGHYAEDTMRVTVVPNRNAIMLTIGFGIAAANGDEAVATAVHGGDHFIYPDCRPEFTRAFDKMQKAALDGYANVQLYTPFVERSKADIVKEGAAHSTPFAETWSCYKGGEAHCGRCGTCVERREAFHLAGVEDPTLYADPDYWLEAVAEGEKR

SEQ ID NO: 39564 - protein, 616 aa, Maritimibacter alkaliphilus
  REGION 1..616: note = tr|A3VGT3|A3VGT3_9RHOB Uncharacterized protein; OS = Maritimibacter alkaliphilus HTCC2654 OX=314271; GN = RB2654_14420 PE=4 SV=1
MVGGAIPSERRVRCLPPLTKSGGDAQLRLEIDGNPAGVKVCISHLNAQLVADLPDRALDLLEVAAVVYGADAAVSRGGTADQQMGKMWHRHFQVDMPVRDRAFWQSEDVVLALEEMLMFLSGDRFVFRFVAKEDGEAERSLFFKFDEGSAWQATRVLMFSGGLDSFAGALEEIAERGERVALVSHFSASKIAPVQRQLHKTLTEKFGENSCRHIPVQVQMVGRGLKEGTHRARSFLFAALGAVTARAFGLNRVSFFENGVVSLNLSPVGNVLGTRATRTTHPQTLSRFSDFLGRVFASETRIDNPFFWRTKKEVVETVARLGMSEQIAQTRSCADVHNQTKQHIHCGRCSQCIDRRFAVLAAGLERFDPEEAYRVALMDDTRSDVRDREVALSYLRSARAYEHITPSELERALPAVISAVAHLAQPTETAIEMIARLLKRHGIGVSDVMRATLKAKSAEDFPDGSLPRLYGEAQKANALPNIPVSSRPIVEPAKPMVMEVNPQRRRVVIDDRIFIERNATADLLIVLADKWLEGAGQGLMPLDYPLANTNFLTKALKVDGDEAVRQRVNRAKVVMRKKMASCGREPEEADAIIENQPWLGYRLTPDRVTVRKAKAE

SEQ ID NO: 39565 - protein, 232 aa, Maritimibacter sp.
  REGION 1..232: note = tr|A0A2U2CLC9|A0A2U2CLC9_9RHOB 7-cyano-7-deazaguanine synthase OS=Maritimibacter sp. 55A14 OX=2174844 GN=queC PE=3 SV=1
MKTLVICSGGLDSVSLAHKVAAEQELAGLISFDYGQRHRKELDFAARAADRLGTGFELIDMRAIGAHLSGSALTDDLDVPDGHYAEETMKVTVVPNRNAIMLAVAFGIAAARGADAVAAAVHGGDHFIYPDCRPGFIDAFETMQRAALEGYADIRLYTPFVHLPKSAIVTEGARHGTPFAETWSCYKGGARHCGRCGTCVERREAFHLAGVPDPTDYADPDFWRAATAAEGA

SEQ ID NO: 39566 - protein, 233 aa, unidentified
  source 1..233: note = Marivivens niveibacter
  REGION 1..233: note = tr|A0A251WY79|A0A251WY79_9RHOB 7-cyano-7-deazaguanine synthase OS=Marivivens niveibacter; OX = 1930667 GN=queC PE=3 SV=1
MKTIVICSGGLDSVSLAYKVAAENTLTRLVSFDYGQRHAKEIDYAARAAQALNVPHTVIDMRNIGATLTGSALTDDIDVPDGHYAEETMRITVVPNRNAIMLTIAFGIAAANQDDAVATAVHGGDHFIYPDCRPAFTESFNAMQKAALDGYADVTLYTPFVHGSKADIVTAGAAVNTPFADTWSCYKGGENHCGRCGTCVERREAFDLAGVTDPTVYDDPDYWKQAIAERGNA

SEQ ID NO: 39567 - protein, 236 aa, Massilia albidiflava
  REGION 1..236: note = tr|A0A411X474|A0A411X474_9BURK 7-cyano-7-deazaguanine synthase OS=Massilia albidiflava; OX = 321983 GN=queC PE=3 SV=1
MMTRDAALVLFSGGQDSTTCLAWALDRYERVETIGFDYGQRHAIELAMRPQLLAKLRVLRPDWDARLGEDHMIDLGLISQLSHTAMTEEIEITMQANGLPNTFVPGRNLMFMMVAATLAYRRGMNVLVGGMCETDFSGYPDCRDDTMKALQVALNLGMDTRSKVETPLMWLDKAQTWELAENLGGQPLVDLIRADTHTCYKGERGALHDWGYGCGECPACALRARGYQNYVAGKAA

SEQ ID NO: 39568 - protein, 234 aa, unidentified
  source 1..234: note = Massilia armeniaca
  REGION 1..234: note = tr|A0A2R4CG45|A0A2R4CG45_9BURK 7-cyano-7-deazaguanine synthase OS=Massilia armeniaca; OX = 2072590 GN=queC PE=3 SV=1
MKTDAALVLFSGGQDSTTCLAWALDRYARVETIGFDYGQRHAIELTMRPELLGKLRAQRPDWAAKLGEDHMVDLGLIKQLSHTAMTEDIEITMQANGLPNTFVPGRNLMFMMVAATLAYRRGLNVLVGGMCETDFSGYPDCRDDTMKALQVALNLGMDTRVKLETPLMWLDKAETWELAERLGGQALVDLIRADTHTCYKGERGALHDWGYGCGECPACALRARGYQEYAARHG

SEQ ID NO: 39569 - protein, 238 aa, Massilia aurea
  REGION 1..238: note = tr|A0A422QP31|A0A422QP31_9BURK 7-cyano-7-deazaguanine synthase OS=Massilia aurea; OX = 373040 GN=queC PE=3 SV=1
MTIQSPDTALVLFSGGQDSTTCLAWALQRYARVETIGFDYGQRHAIELEVRPTLLSKLRALNPGWDARLGDDHMIDLSLISKISDTALTSNVEIAMQENGLPNTFVPGRNLMFMTVAATVAYRRGLNVLVGGMCETDFSGYPDCRDDTMKALQVALNLGMATRLKVETPLMWIDKAQTWELAQQEGGDTLVDLIRFDTHTCYLGERGDAHPWGHGCGTCPACALRARGYEQYVARKQA

SEQ ID NO: 39570 - protein, 238 aa, unidentified
  source 1..238: note = Massilia eurypsychrophila
  REGION 1..238: note = tr|A0A2G8TDP6|A0A2G8TDP6_9BURK 7-cyano-7-deazaguanine synthase OS=Massilia eurypsychrophila OX=1485217 GN=queC PE=3 SV=1
MLQPDTALVLFSGGQDSTTCLAWALERYARVETIGFDYGQRHAIELTVRPAVLAGVRAIKPEWDARLGEDHMVDLSVIGRISDTALTSNVEIAMQENGLPNTFVPGRNLLFMTVAATLAYRRGLNVLVGGMCETDFSGYPDCRDDTMKALQVALNLGMATRVKLETPLMWIDKKQTWQLAQAAGGMALVDLIREQTHTCYLGERGTLRAWGYGCGTCPACELRARGYAQFAAEGASAS

SEQ ID NO: 39571 - protein, 236 aa, Massilia flava
  REGION 1..236: note = tr|A0A562PLX5|A0A562PLX5_9BURK 7-cyano-7-deazaguanine synthase OS=Massilia flava; OX = 871742 GN=queC PE=3 SV=1
MMKRDCALVLFSGGQDSTTCLAWALDRYERVETIGFDYGQRHAIELTMRPELLRKLRALRPDWDAKLGEDHMIDLGLISQLSQTAMTEDIEITMQANGLPNTFVPGRNLMFMTVAATVAYRRGLTVLVGGMCETDFSGYPDCRDDTMKALQVALNLGMDTRNKLETPLMWLDKAETWELAERLGGQPLVDLIRADTHTCYKGERGELHDWGYGCGECPACALRARGYQNYVAKKAA

SEQ ID NO: 39572 - protein, 235 aa, unidentified
  source 1..235: note = Massilia glaciei
  REGION 1..235: note = tr|A0A2U2HIT6|A0A2U2HIT6_9BURK 7-cyano-7-deazaguanine synthase OS=Massilia glaciei; OX = 1524097 GN=queC PE=3 SV=1
MQQADTALVLFSGGQDSTTCVAWALERFARVETVGFDYGQRHAVELAVRPRLLAGLRALSPEWDARLGADHLLDLSLIGSISDTALTSEVAISMQENGLPNTFVPGRNLMFLTVAATLAYRRGLGVLVGGMCETDFSGYPDCRDDTIKALQVALNLGMASRFRLETPLMWLTKKQTWQLAHAAGGAPLVELIRADTHTCYLGERGTLHAWGHGCGTCPACELRARGHAEYLAEGA

SEQ ID NO: 39573 - protein, 259 aa, unidentified
  source 1..259: note = Massilia lurida
  REGION 1..259: note = tr|A0A562QWH1|A0A562QWH1_9BURK 7-cyano-7-deazaguanine synthase OS=Massilia lurida; OX = 1036180 GN=queC PE=3 SV=1
MMKSDAALVLFSGGQDSTTCLAWALDRYERVETIGFDYGQRHAIELTMRPQLLARLRAQRPDWAAKLGEDHMIDLGLISQLSHTAMTEDIEITMQANGLPNTFVPGRNLMFMTVAATLAYRRGLNVLVGGMCETDFSGYPDCRDDTMKALQVALNLGMDTRNKLETPLMWLDKAETWELAETLGGQALVDLIRADTHTCYKGERGALHDWGYGCGECPACALRARGYRNYVAKKAATAVAADGAAGATAGGAPGAAAGA

SEQ ID NO: 39574 - protein, 236 aa, Massilia lutea
  REGION 1..236: note = tr|A0A4P6KWU9|A0A4P6KWU9_9BURK 7-cyano-7-deazaguanine synthase OS=Massilia lutea; OX = 321985 GN=queC PE=3 SV=1
MMTSDAALVLFSGGQDSTTCLAWALDRYERVETIGFDYGQRHAIELTMRPQLLAKLRTLRPDWDAKLGEDHMIDLGLISQLSHTAMTEEIEITMQANGLPNTFVPGRNLMFMMVAATLAYRRGMNVLVGGMCETDFSGYPDCRDDTMKALQVALNLGMDTRNKLETPLMWLDKAQTWELAEDLGGQPLVDLIRADTHTCYKGERGALHDWGYGCGECPACALRARGYHNYVAGKAA

SEQ ID NO: 39575 - protein, 242 aa, unidentified
  source 1..242: note = Massilia namucuonensis
  REGION 1..242: note = tr|A0A1I7IG79|A0A1I7IG79_9BURK 7-cyano-7-deazaguanine synthase OS=Massilia namucuonensis; OX = 1035707 GN=queC PE=3 SV=1
MIATDAALVLFSGGQDSTTCLAWALERYNRVETIGFDYGQRHAIELQVRPRVLERLRAYKPEWAARLGEDHMIDLSLISQLSRTAMTEDIEIVMQENGLPNTFVPGRNLMFMTVAATLAYRRGLNVLVGGMCETDFSGYPDCRDDTMKALQVALNLGMDTRVKLETPLMWLDKAQTWTLAESLGGQGLVDLIREGTHTCYLGERGALHDWGYGCGKCPACELRARGYLQYAAAKTAPPADPV

SEQ ID NO: 39576 - protein, 238 aa, Massilia oculi
  REGION 1..238: note = tr|A0A2S2DHQ6|A0A2S2DHQ6_9BURK 7-cyano-7-deazaguanine synthase OS=Massilia oculi; OX = 945844 GN=queC PE=3 SV=1
MTTPSSDTALVLFSGGQDSTTCLAWALQRYARVETIGFDYGQRHAIELEVRPSLLSKLRALNPDWDARLGEDHMIDLSLIAKISDTALTSNVAIAMQENGLPNTFVPGRNLMFMTVAATVAYRRGLNVLVGGMCETDFSGYPDCRDDTMKALQVALNLGMATRLKVETPLMWIDKAQTWELAQQEGGDALVDLIRFDTHTCYLGERGDAHPWGHGCGACPACALRARGYEQYVARKQA

SEQ ID NO: 39577 - protein, 237 aa, unidentified
  source 1..237: note = Massilia phosphatilytica
  REGION 1..237: note = tr|A0A2S8H2T6|A0A2S8H2T6_9BURK 7-cyano-7-deazaguanine synthase OS=Massilia phosphatilytica OX=2026176 GN=queC PE=3 SV=1
MHLPDTALVLFSGGQDSTTCLAWALERYERVETIGFDYGQRHAIELDVRAPVLAKMRALSATWDQRLGEDHLIDLSLIARISDTALTSNAEIQMQANGLPNTFVPGRNLLFMTVAATVAYRRSLNVLVGGMCETDFSGYPDCRDDTMKALQVALNLGMATRLKVETPLMWIDKKQTWQLAEQCGGEALVDLIRFETHTCYLGERGAPHAWGHGCGKCPACELRARGYEQYAKERASA

SEQ ID NO: 39578 - protein, 236 aa, Massilia plicata
  REGION 1..236: note = tr|A0A4V1AU65|A0A4V1AU65_9BURK 7-cyano-7-deazaguanine synthase OS=Massilia plicata; OX = 321984 GN=queC PE=3 SV=1
MKSDAALVLFSGGQDSTTCLAWALDRYQRVETIGFDYGQRHAIELTMRPQLLAKLRAQRPDWAAKLGEDHMIDLSLIKQLSHTAMTEDIEITMQANGLPNTFVPGRNLMFMTVAATLAYRRGLNVLVGGMCETDFSGYPDCRDDTMKALQVALNLGMDTRVKLETPLMWLDKSQTWELAEGLGGTALVDLIRADTHTCYKGERGALHDWGYGCGECPACALRARGYKEYAARAGQA

SEQ ID NO: 39579 - protein, 244 aa, unidentified
  source 1..244: note = Massilia psychrophila
  REGION 1..244: note = tr|A0A2G8T107|A0A2G8T107_9BURK 7-cyano-7-deazaguanine synthase OS=Massilia psychrophila; OX = 1603353 GN=queC PE=3 SV=1
MLHTDTALVLFSGGQDSTTCLAWALGRYARVETIGFDYGQRHAIELTVRPAVLAGVRALSHEWDARLGEDHVVDLSVIGRISESALTSNVDIAMQENGLPNTFVPGRNLLFMTVAAALAYRRGLNVLVGGMCETDFSGYPDCRDDSMKALQVALNLGMATRLKIETPLMWIDKKQTWELAKSAGGSALVDLIREQTHTCYLGERGALHAWGYGCGTCPACELRARGYAQFAAGMAGVIAAAPVS

SEQ ID NO: 39580 - protein, 235 aa, Massilia sp.
  REGION 1..235: note = tr|A0A0Q5H186|A0A0Q5H186_9BURK 7-cyano-7-deazaguanine synthase OS=Massilia sp. Leaf139; OX = 1736272 GN=queC PE=3 SV=1
MHAPDTALVLFSGGQDSTTCLAWALQRYERVETIGFDYGQRHAIELSVRPTVLEKMRALSPEWDARLGEDHMIDLSLISRISDTALTSNVAIEMQANGLPNTFVPGRNLLFMTVAATVAYRRGLTVLVGGMCETDFSGYPDCRDDTMKALQVALNLGMATRLKVETPLMWIDKKQTWQLAEQAGGTALVDLVRFETHTCYLGERGARHDWGYGCGTCPACELRARGYAQFAAEKG

SEQ ID NO: 39581 - protein, 234 aa, Massilia sp.
  REGION 1..234: note = tr|A0A344JLA8|A0A344JLA8_9BURK 7-cyano-7-deazaguanine synthase OS=Massilia sp. YMA4; OX = 1593482 GN=queC PE=3 SV=1
MKSDAALVLFSGGQDSTTCLAWALDRYARVETIGFDYGQRHAIELTMRPELLGKLRAQRPDWAARLGEDHMIDLGLIKQLSHTAMTEDIEITMQANGLPNTFVPGRNLMFMMVAATLAYRRGLNVLVGGMCETDFSGYPDCRDDTMKALQVALNLGMDTRVKLETPLMWLDKAETWELAGRLGGQALVDLIRADTHTCYKGERGALHDWGYGCGECPACALRARGYREYAARRP

SEQ ID NO: 39582 - protein, 238 aa, Massilia timonae
  REGION 1..238: note = tr|K9DJJ9|K9DJJ9_9BURK 7-cyano-7-deazaguanine synthase OS=Massilia timonae CCUG 45783 OX=883126 GN=queC; PE = 3 SV=1
MTTPSSDTALVLFSGGQDSTTCLAWALQRYARVETIGFDYGQRHAIELEVRPTLLSKLRALNPGWDARLGDDHMIDLSLIAQISDTALTSNVEIAMQENGLPNTFVPGRNLMFMTVAATVAYRRGLNVLVGGMCETDFSGYPDCRDDTMKALQVALNLGMATRLKVETPLMWIDKAQTWELAQQEGGDALVDLIRFDTHTCYLGERGDAHPWGHGCGACPACALRARGYEQYVARKQS

SEQ ID NO: 39583 - protein, 238 aa, Massilia timonae
  REGION 1..238: note = tr|A0A1S2NC22|A0A1S2NC22_9BURK 7-cyano-7-deazaguanine synthase OS=Massilia timonae; OX = 47229 GN=queC PE=3 SV=1
MTTPSSDTALVLFSGGQDSTTCLAWALQRYARVETIGFDYGQRHAIELEVRPTLLSKLRALNPGWDARLGDDHMIDLSLIAQISDTALTSNVEIAMQENGLPNTFVPGRNLMFMTVAATVAYRRGLNVLVGGMCETDFSGYPDCRDDTMKALQVALNLGMATRLKVETPLMWIDKAQTWELAQQEGGDALVDLIRFDTHTCYLGERGDAHPWGHGCGTCPACALRARGYEQYVARKQA

SEQ ID NO: 39584 - protein, 236 aa, unidentified
  source 1..236: note = Massilia umbonata
  REGION 1..236: note = tr|A0A4P8HW41|A0A4P8HW41_9BURK 7-cyano-7-deazaguanine synthase OS=Massilia umbonata; OX = 864828 GN=queC PE=3 SV=1
MMTRDAALVLFSGGQDSTTCLAWALDRYERVETIGFDYGQRHAIELTMRPQLLAKLRTLRPDWAAKLGDDHMIDLGLISQLSHTAMTEDIEITMQANGLPNTFVPGRNLMFMMVAATLAYRRGMNVLVGGMCETDFSGYPDCRDDTMKALQVALNLGMDTRSRLETPLMWLDKAQTWELAEDLGGQPLVDLIRADTHTCYKGERGALHDWGYGCGECPACALRARGYQNYVANQAA

SEQ ID NO: 39585 - protein, 407 aa, unidentified
  source 1..407: note = Massilia violaceinigra
  REGION 1..407: note = tr|A0A2D2DFH5|A0A2D2DFH5_9BURK Uncharacterized protein OS=Massilia violaceinigra OX=2045208; GN = CR152_03835 PE=4 SV=1
MTSNHRSEQFCSQCGMPHEYDRFTVGAPQALAQHAQLCSYCADPATAATGTYRDSADNTWVLDMLLNIYKTGSDGKRALARMVNLAKVAIPSKVQVLATLVGSLPRRRTESDYDALVLYSGGKDSSYMLIKLAERGLRVCAWMLDQGYQSATAIANAQRLCDKLGVTLVIERPQRTSMDTLFRTGFKVGKSSANVELTRAVMTYGSACMPCFAAIAAASTRFCETHHIPLCFIGTQEGQNRLDLNGKPALAGQGLPRLDALVRKFVTPFRNHAQETHPEAAGILANGACDTVLIPFYEFVKKPEFDDQIRMLEEAGWEMPKNTGACSTNCMMNELGRKVMRTRFGFDLYQVIEAHERRMGNSAPPAVATLEPALDDDAVYLGATLIGLSESEMSEFDIKKVKNHGEH

SEQ ID NO: 39586 - protein, 234 aa, unidentified
  source 1..234: note = Massilia violaceinigra
  REGION 1..234: note = tr|A0A2D2DGE4|A0A2D2DGE4_9BURK 7-cyano-7-deazaguanine synthase OS=Massilia violaceinigra; OX = 2045208 GN=queC PE=3 SV=1
MQQADGALVLFSGGQDSATCLAWALERYGRVETIGFDYGQRHAIELTVRPTVLGKMRALKPDWDARLGEDHMVDLSLISKISDTAMTSNVAIEMQANGLPNTFVPGRNLLFMTVAATVAYRRGLNVLVGGMCETDFSGYPDCRDDTMKALQVALNLGMATRLKLETPLMWIDKKQTWQLAHEAGGDALVDLIREDTHTCYLGERGALHAWGYGCGTCPACALRARGYLQYAGAA

SEQ ID NO: 39587 - protein, 236 aa, unidentified
  source 1..236: note = Massilia yuzhufengensis
  REGION 1..236: note = tr|A0A1I1NYL3|A0A1I1NYL3_9BURK 7-cyano-7-deazaguanine synthase OS=Massilia yuzhufengensis; OX = 1164594 GN=queC PE=3 SV=1
MQSLDTALVLFSGGQDSTTCLAWALQRYARVETIGFDYGQRHAIELEVRPTVLSKMRALNPEWDARLGEDHMIDLSLIAKISDTALTSNVEIAMQANGLPNTFVPGRNLLFMTVAATVAYRRGLTVLVGGMCETDFSGYPDCRDDTMKALQVALNLGMATRLKVETPLMWIDKAQTWELAQQAGGDALVDLIRFDTHTCYLGERGAAHPWGHGCGSCPACALRARGYEQYVARKAA

SEQ ID NO: 39588 - protein, 227 aa, Mastigocladus laminosus
  REGION 1..227: note = tr|A0A4D9CE16|A0A4D9CE16_MASLA 7-cyano-7-deazaguanine synthase OS=Mastigocladus laminosus UU774 OX=1594576 GN=queC PE=3 SV=1
MKAVILLSGGLDSSTVLYQALADGYECYTISFDYQQRHRRELDSALAIAQKAGVVQNQIVTFDLRQWGGSALTDDTIDLPKKRSLEEMSQNIPVTYVPARNTIFLSFALAYAETIAAERVYIGVNALDYSGYPDCRPDYIQAMQEVFRLGTKQGREGKPITIVAPLLELKKTDIIELGNKLGVPWELTWSCYAGGEVACGVCDSCRLRLAAFAKLGLTDPLNYASLC

SEQ ID NO: 39589 - protein, 196 aa, Mastigocladus laminosus
  REGION 1..196: note = tr|A0A370CKW3|A0A370CKW3_MASLA 7-cyano-7-deazaguanine synthase (Fragment); OS = Mastigocladus laminosus WC112 OX=1521402 GN=CBF18_16960; PE = 3 SV=1
MKAVILLSGGLDSSTVLYQALADGCECYTISFDYQQRHKRELRSALAIAKTAGVVQNQIVTFDLRQWGGSALTDDTIDLPQMRSLEEMSQNIPVTYVPARNTIFLSFALAYAETITAERVYIGINALDYSGYPDCRPDYIQAMQEVFRLGTKQGREGKTINIVAPLLHLKKTEIIQLGNKLGVPWELTWSCYAGDD

SEQ ID NO: 39590 - protein, 228 aa, Mastigocoleus testarum
  REGION 1..228: note = tr|A0A0V8A0I7|A0A0V8A0I7_9CYAN 7-cyano-7-deazaguanine synthase OS=Mastigocoleus testarum BC008 OX=371196 GN=queC PE=3 SV=1
MKAVILLSGGLDSSTVLYQAHSDGYECYAISFDYQQRHRRELKSARLVAQSAGVVQHQVVNFDLRQWGGSALTDNSLELPRDRDIIQMSQNIPITYVPARNTIFLSFALAYAETIDAKRVYIGVNALDYSGYPDCRPDYIQGMQEVFRLGTKQGREGQPIKIVTPLIDLKKTEIIQLGNKLGVPWELTWSCYAGEEISCGVCDSCLLRLKAFTELGLRDPIPYRGNGR

SEQ ID NO: 39591 - protein, 222 aa, unidentified
  source 1..222: note = Mediterranea sp.
  REGION 1..222: note = tr|A0A1Y4HI51|A0A1Y4HI51_9BACT 7-cyano-7-deazaguanine synthase OS=Mediterranea sp. An20; OX = 1965586 GN=queC PE=3 SV=1
MYNETALVVFSGGQDSTTCLFWAKREFKDVRALSFLYGQKHAKEVELAQNIARQAGVTFETMELPLIGTLGHNALTDTSMPMDEQIPDGQTCPNTFVPGRNLFFLSVAAVYARERGIRHLVTGVSQTDYSGYPDCRDSFVKSLNVTLNLAMDAQFVLHTPLMWLDKAGTWALADELGVMDLVRRDTLTCYNGIPGDGCGHCPACKLRREGLEQYLASIHHSY

SEQ ID NO: 39592 - protein, 241 aa, Megamonas funiformis
  REGION 1..241: note = tr|H3K6H9|H3K6H9_9FIRM 7-cyano-7-deazaguanine synthase OS=Megamonas funiformis YIT 11815 OX=742816; GN = queC PE=3 SV=1
MNAVILLSGGLDSTTCMAVAKQQGYDLYPISFDYHQRNKIELEGAKEIAKFFGAKRHLIIDTNMNAIGGSALTDENIEVPKGNVDRKDNDVPVTYVPSRNLIFLSYALGYAEVVKADAIFIGVNAVDFSGYPDCRPEFIQKFQDMADYACKTTAVDGKKIKIVTPLQSLSKKEIIQLGTKLGAPYHLTRSCYNGREKACGVCDSCKLRLRGFAEAGIKDPIAYEKNYNDVTKNHIAYENGE

SEQ ID NO: 39593 - protein, 240 aa, Megamonas hypermegale
  REGION 1..240: note = tr|A0A239TM64|A0A239TM64_9FIRM 7-cyano-7-deazaguanine synthase OS=Megamonas hypermegale; OX = 158847 GN=queC PE=3 SV=1
MNAVVLLSGGLDSTTCMAVAKSQGYDLYPISFNYHQRNKIELESAKKIAKFFGAKKHLIIDTNMNAIGGSALTDEHIDVPVGDVNRTEVPATYVPSRNLIFLSYALGYAEVVKASAIFIGVNAVDYSGYPDCRPEFIQKFQELANYACKATVVDGKSIKIVTPLQKLSKKEIIQLGTKLGAPYHLTRSCYNGREKACGMCDSCKLRLKGFAEAGIKDPIEYEKRPIITTTKNHITYENGE

SEQ ID NO: 39594 - protein, 241 aa, Megamonas hypermegale; identical to SEQ ID NO: 39592
  REGION 1..241: note = tr|A0A378NT97|A0A378NT97_9FIRM 7-cyano-7-deazaguanine synthase OS=Megamonas hypermegale; OX = 158847 GN=queC PE=3 SV=1

SEQ ID NO: 39595 - protein, 241 aa, Megamonas rupellensis; identical to SEQ ID NO: 39592
  REGION 1..241: note = tr|A0A412CGR6|A0A412CGR6_9FIRM 7-cyano-7-deazaguanine synthase OS=Megamonas rupellensis; OX = 491921 GN=queC PE=3 SV=1

SEQ ID NO: 39596 - protein, 241 aa, Megamonas rupellensis
  REGION 1..241: note = tr|A0A411ZTJ5|A0A411ZTJ5_9FIRM 7-cyano-7-deazaguanine synthase OS=Megamonas rupellensis; OX = 491921 GN=queC PE=3 SV=1
MNAVILLSGGLDSTTCMAVAKQQGYDLYPISFNYHQRNKIELEGAKEIAKFFGAKRHLIIDTNMNAIGGSALTDENIKVPEGNVERKDNDVPVTYVPSRNLIFLSYALGYAEVVKADAIFIGVNAVDFSGYPDCRPEFIQKFQDMADYACKTTAVDGKKIKIVTPLQTLSKKEIIQLGTKLGAPYHLTRSCYNGREKACGVCDSCKLRLRGFAEAGIKDPIAYEKNYNDVTKNHIAYENGE

SEQ ID NO: 39597 - protein, 241 aa, Megamonas sp.
  REGION 1..241: note = tr|A0A1H8D7R1|A0A1H8D7R1_9FIRM 7-cyano-7-deazaguanine synthase OS=Megamonas sp. Calf98-2; OX = 1855330 GN=queC PE=3 SV=1
MNAVILLSGGLDSTTCMAVAKQQGYDLYPISFNYHQRNKIELEGAKEIAKFFGAKRHLIIDTNMNAIGGSALTDENIKVPEGNVERKDNDVPVTYVPSRNLIFLSYALGYAEVVKADAIFIGVNAVDFSGYPDCRPEFIQKFQDMADYACKTTAVDGKKIKIVTPLQSLSKKEIIQLGTKLGAPYHLTRSCYNGREKACGVCDSCKLRLRGFAEAGIKDPIAYEKNYNDVTKNHIAYENGE

SEQ ID NO: 39598 - protein, 226 aa, Megasphaera cerevisiae
  REGION 1..226: note = tr|A0A0J6WVF7|A0A0J6WVF7_9FIRM 7-cyano-7-deazaguanine synthase OS=Megasphaera cerevisiae DSM 20462 OX=1122219 GN=queC PE=3 SV=1
MKCVVLLSGGVDSTTCLAIGLTKYKKEEVLALTAYYGQKHVKELEAARQVAAYYGVQHQEVNLSQAFSLSDCPLLQGSSQEITHESYARQLEKIGGEGTLSTYVPFRNGLFLSYAAAVAISVQAEVIYYGAHADDAAGRAYPDCTPEFEEAMNRAVYEGSGRLCHLEAPLLHWNKAGVVKEGLRLHAPYELTWSCYEGNEKPCGTCGTCIDRARAFAANGVKDPAL

SEQ ID NO: 39599 - protein, 227 aa, Megasphaera elsdenii
  REGION 1..227: note = tr|G0VN21|G0VN21_MEGEL 7-cyano-7-deazaguanine synthase OS=Megasphaera elsdenii DSM 20460 OX=1064535; GN = queC PE=3 SV=1
MKCVVLLSGGVDSTTCLAMALTKYKKDDVLALTAYYGQKHAKELEAARKVAAHYGVQQQEVDLSQAFSLSDCSLLQGSHKPIAHESYADQLAKKGGEGTVDTYVPFRNGLFLSFAAAVAVSVGAEVIYYGAHADDAAGRAYPDCTPEFETAMNTAIYEGSGRTCHLEAPLLSWNKAGVVKEGLRLGAPYELTWSCYEGGDTPCGVCGTCRDRAAAFAANGVKDPALP

SEQ ID NO: 39600 - protein, 227 aa, Megasphaera elsdenii
  REGION 1..227: note = tr|R7MZ71|R7MZ71_9FIRM 7-cyano-7-deazaguanine synthase OS=Megasphaera elsdenii CAG:570 OX=1263087; GN = queC PE=3 SV=1
MKCVVLLSGGVDSTTCLAMALTKYKKDDVLALTAYYGQKHAKELEAARKVAAHYGVEQREVNLSQAFALSDCSLLQGSQKAIAHESYADQLAKKGGEGTVDTYVPFRNGLFLSFAAAVAVSVGAEVIYYGAHADDAAGRAYPDCTPEFETAMNTAIYEGSGRTCHLEAPLLSWNKAGVVKEGLRLGAPYELTWSCYEGGDTPCGVCGTCRDRAAAFAANGVKDPALP

SEQ ID NO: 39601 - protein, 226 aa, unidentified
  source 1..226: note = Megasphaera genomosp.
  REGION 1..226: note = tr|A0A2J8BB89|A0A2J8BB89_9FIRM 7-cyano-7-deazaguanine synthase OS=Megasphaera genomosp. type_2 OX=699193 GN=queC PE=3 SV=1
MKCLVLLSGGIDSTTCLALAIQTYGVKEVLAVTAYYGQKHAKELTAARDIASYYQVLHREIDVSQAFSLSNCVLLAGRQGKIAHTSYATQLAEKGGTGTLDTYVPFRNGLFLSFAAALAVSTQANYIYYGAHADDAAGRAYPDCTPEFETAMANAIYEGSGRTCQLKAPLLHWNKARVVQEGLSLHAPYHLTWSCYEGKDHPCGVCGTCRDRAAAFAANNKKDPAL

SEQ ID NO: 39602 - protein, 226 aa, unidentified
  source 1..226: note = Megasphaera genomosp.
  REGION 1..226: note = tr|D3LSU4|D3LSU4_9FIRM 7-cyano-7-deazaguanine synthase OS=Megasphaera genomosp. type_1 str. 28L; OX = 699218 GN=queC PE=3 SV=1
MKCLVLLSGGIDSTTCLALGVKKYGASELLAVTAYYGQKHAKELQAARNVAAYYGVAHREIDVSQAFTLSDCPLLAGRKGAIAHTSYSDQLAAKGGAGTLDTYVPFRNGLFLSFAAALAVSVHASCIYYGAHADDAAGRAYPDCTPEFEQAMATAIYEGSGKTCRLEAPLLQWNKAQVVRQGLQLHAPYHLTWSCYEGREKPCGLCGTCRDRAAAFAANGVPDPAL

SEQ ID NO: 39603 - protein, 229 aa, unidentified
  source 1..229: note = Megasphaera hexanoica
  REGION 1..229: note = tr|A0A344MMN1|A0A344MMN1_9FIRM 7-cyano-7-deazaguanine synthase OS=Megasphaera hexanoica; OX = 1675036 GN=queC PE=3 SV=1
MKCVVLLSGGVDSTTCLAMAVEKYKKENVLALTAYYGQRHEKELQAARKVAAYYGVQQEEINLAQAFVHSDCPLLERNNDKEIAHMSYAEQLAQAGGEGTVETYVPFRNGLFLSFAAAVAVSVHAEVIYYGAHADDAAGRAYPDCTPEFEQAMNTAIYEGSGHTCHLEAPLLAWNKAGVVKEGLRLGAPYELTWSCYEGGDMPCGVCGTCRDRAAAFAANGVPDPALKK

SEQ ID NO: 39604 - protein, 229 aa, Megasphaera micronuciformis
  REGION 1..229: note = tr|E2ZCX7|E2ZCX7_9FIRM 7-cyano-7-deazaguanine synthase OS=Megasphaera micronuciformis F0359 OX=706434; GN = queC PE=3 SV=1
MKTAVLLSGGIDSTTALAQAVDTYGAENVIALSVLYGQKHKKELNCAEKIANYYGVRRISFDVSPLFSYSHNSLMENSDKAVPQTSYAEQIEETKGQSPVSTYVPFRNGIFLSAAAGVALSLDCERVVYGAHADDAAGAAYPDCSPAFFDAMKTAVYEGTGGGITLEAPFIHMNKADIVAEGLRLHVPYELTWSCYEGGDKPCGLCGTCRDREAAFSANGTIDPLLKGK

SEQ ID NO: 39605 - protein, 227 aa, Megasphaera paucivorans
  REGION 1..227: note = tr|A0A1G9R0W1|A0A1G9R0W1_9FIRM 7-cyano-7-deazaguanine synthase OS=Megasphaera paucivorans; OX = 349095 GN=queC PE=3 SV=1
MKAVVLLSGGIDSTTCLALAVEKYTKNEVLALTMHYNQKHVKEIEASHKVAYYYDVQLQESDLSQAFSLSDCPLLQQSHKKIKHESYAEQLEELGGTGTVDTYVPFRNGLFLSYAAAAAISVGANVIYYGAHADDAAGRAYPDCTPAFETAMNTAIYEGSGHTCCLEAPLLNFTKTEVVRMGLRLHAPYELTWSCYEGGTRPCGVCGTCIDRAKAFAENGIPDPALK

SEQ ID NO: 39606 - protein, 227 aa, Megasphaera sp.
  REGION 1..227: note = tr|S7HF84|S7HF84_9FIRM 7-cyano-7-deazaguanine synthase OS=Megasphaera sp. NM10 OX=1273103 GN=queC PE=3; SV = 1
MKCVVLLSGGVDSTTCLAMALTKYKKEDVLALTAYYGQKHAKELEAARKVAAYYGVQQQEVNLSQAFSLSDCSLLQGSHKAIAHESYADQLAKKSGEGTVDTYVPFRNGLFLSFAAAVAVSVGAEVIYYGAHADDAAGRAYPDCTPEFETAMNTAIYEGSGRTCHLEAPLLSWNKAGVVKEGLRLGAPYELTWSCYEGGDKPCGVCGTCRDRAAAFAANGVKDPALS

SEQ ID NO: 39607 - protein, 230 aa, Megasphaera sp.
  REGION 1..230: note = tr|A0A3C1CNX0|A0A3C1CNX0_9FIRM 7-cyano-7-deazaguanine synthase OS=Megasphaera sp.; OX = 2023260 GN=queC PE=3 SV=1
MKKEAIVLLSGGIDSTTCLALAVEKYGAEKVFALSVYYGQKHVKEMQAAEKVARYYGVLRQEINLAGVYHWSDCPLLAHSDKPIKHETYAEQLKELGGTGTVTTYVPFRNGLLLSYSEAIAISVGASAIYYGAHADDAAGRAYPDCTPEFVKAMDTAIYEGSGLICHLYAPLLDLNKAGVVKEGLQLGAPYALTWSCYEGGDIPCGVCGTCRDRAAAFAANGVPDPAREA

SEQ ID NO: 39608 - protein, 229 aa, unidentified
  source 1..229: note = Megasphaera stantonii
  REGION 1..229: note = tr|A0A346AYG4|A0A346AYG4_9FIRM 7-cyano-7-deazaguanine synthase OS=Megasphaera stantonii; OX = 2144175 GN=queC PE=3 SV=1
MKCIVLLSGGVDSTTCLAMAVERYGAGEVMALTAYYGQKHAKEIQAARQVAAHYGVAHKETNLSQAFALSDSSLLQGRGREIRHESYAEQLKELGGEGTVDTYVPFRNGLFLSYAAAIAVSVGAEVIYYGAHADDAAGRAYPDCTPEFEQAMATAIYEGSGRTCRLEAPLLSWNKAGVVKEGLRLGAPYELTWSCYEGGDRPCGVCATCIDRAKAFAANGAADPALTAR

SEQ ID NO: 39609 - protein, 210 aa, unidentified
  source 1..210: note = Mehylophilales bacterium
  REGION 1..210: note = tr|A0A258LFJ1|A0A258LFJ1_9PROT 7-cyano-7-deazaguanine synthase (Fragment); OS = Mehylophilales bacterium 35-46-6 OX=1970535; GN = B7Y72_05530 PE=3 SV=1
MNHQSKKPAKAVVLLSGGLDSATVLAYARSQGFECYCLSLDYHQRHIAELNAAKKVAEVMGAKAHKTAQLDLSLFGGSALTDNAIAVPEQASTGIPVTYVPARNTIMLSLALAWAEVLEAQDIFIGVNALDYSGYPDCRGEYVKAFQNMANLATKSAVEGKTITVHAPLIDMTKAQIVQMGAKLGVDYAMTVSCYQANSEGEACGVCDSC

SEQ ID NO: 39610 - protein, 441 aa, unidentified
  source 1..441: note = Meiothermus terrae
  REGION 1..441: note = tr|A0A399EI73|A0A399EI73_9DEIN 7-cyano-7-deazaguanine synthase OS=Meiothermus terrae; OX = 1408545 GN=queC PE=4 SV=1
MTHHFAARLGPKDGFEPRVPADAGRLYVAELDSLLRSGHGRTAGRVEAVLRSHGRNASVRSRDLLRLAVAVYCADLMTPRRQSYDRWTRHIRLYLALEEPDPWQAEGEALTRLLRFLTGDHWELDIRPGDPEPWPASPEDDDSRGFDTVCLFSGGLDSFVGALDLLSREQRAVLVGHYARGSGATSVSQAAVGEIVQDRYGSAHAPLLRYFVSPPRQPGRDRENTTRGRSLMFLALGVATAEAFGARRLVVAENGLISLNVPLTSTRLGSLSTRTTHPHFIDMFRGLLRAVGLEVELELPYRFKTKGEMLRECSEPDLLMEGLPSTISCAHPEAMRFAGAPNTHCGYCLACMIRRAAVEAAGLKDPTRYVYPDPSSLSGKSAVDLKVLRLALARYAKKPPRMADLLRAGPLPGTDDERMQLLGVYRRGIDELRAFLASQGL

SEQ ID NO: 39611 - protein, 230 aa, unidentified
  source 1..230: note = Melaminivora sp.
  REGION 1..230: note = tr|A0A2P1NKF6|A0A2P1NKF6_9BURK 7-cyano-7-deazaguanine synthase OS=Melaminivora sp. SC2-7; OX = 2116657 GN=queC PE=3 SV=1
MSRRALVLFSGGQDSATCLAWALARYAHVETLGFDYGQRHRVELDCRVRLRQGLLAMPWSGQLGDDHLLSVDVLGQLGASAMTADVAIATQQDGLPNTFVPGRNLLFFTLAAALAYRRGLDVLVGGMSETDYSGYPDCRDNTLKALQVALSLGIDRPLTLQTPLMWRDKAATWALAHALGGNALVELVRRESHTCYLGERARLHSWGYGCGSCPACELRARGWAQWAAAG

SEQ ID NO: 39612 - protein, 227 aa, unidentified
  source 1..227: note = Melghirimyces algeriensis
  REGION 1..227: note = tr|A0A521DKY7|A0A521DKY7_9BACL 7-cyano-7-deazaguanine synthase OS=Melghirimyces algeriensis OX=910412 GN=queC PE=3 SV=1
MKQRAVIVLSGGLDSTTCMGIAQEAGYELYPLTFHYGQRHSREVEQARRVADYYKVSEHRIVDVAFLQQIGGSALTDQTKDVPTTPEAEGSIPVTYVPARNLIFLSLAVAYAEVIEAEAVYIGVSAVDYSGYPDCRPEFIRSMEETMNRATKAGVSGKPLRLEAPLIYLSKAETIREGLRLKVPYHLTTSCYQGGKTACGICDSCRLRLKGFAEAGAKDPIPYREIF

SEQ ID NO: 39613 - protein, 228 aa, unidentified
  source 1..228: note = Melghirimyces profundicolus
  REGION 1..228: note = tr|A0A2T6BW88|A0A2T6BW88_9BACL 7-cyano-7-deazaguanine synthase OS=Melghirimyces profundicolus OX=1242148 GN=queC PE=3 SV=1
MGEKAVVILSGGLDSTTCMGLAREAGYELYPLTFHYGQRHDREVEQARKVAEYFGVKEHRVVDIGFLRQIGGSALTDEAMDVPGPDDPDEEIPSTYVPARNLIFLSLAAAYAEVIGAVTIYIGVSAVDYSGYPDCRPEFIRSMEETVRRATKTGISGNPIRLEAPLIRLSKAETIREGLRLKVPYHLTTSCYRGGEVACGVCDSCRLRLKGFREAGAKDPIPYSKNVG

SEQ ID NO: 39614 - protein, 228 aa, unidentified
  source 1..228: note = Melghirimyces thermohalophilus
  REGION 1..228: note = tr|A0A1G6K2B7|A0A1G6K2B7_9BACL 7-cyano-7-deazaguanine synthase OS=Melghirimyces thermohalophilus OX=1236220 GN=queC PE=3 SV=1
MEKKAVVVLSGGLDSTTCMGIAREQGYQLYPITFHYGQQHDREVEQARQVAEYFQVKEHRVVNVGFFRQIGGSALTDDGMEVPDADEAVEGIPSTYVPARNLIFLSLAAAYAEVIGAKAIYTGVSAVDYSGYPDCRPSFIQSMEETIRQATKAGVTGYPIQLETPLLDLSKADTIREGLRLEVPYHLTTSCYRGEDLACGVCDSCRLRLKGFHEAGAEDPIPYVEASV

SEQ ID NO: 39615 - protein, 387 aa, unidentified
  source 1..387: note = Melioribacter roseus
  REGION 1..387: note = tr|I6YZC6|I6YZC6_MELRP N-acetyl sugar amidotransferase OS=Melioribacter roseus (strain JCM 17771 / P3M-2) OX=1191523 GN=MROS_2672 PE=4 SV=1
MKIVPFKYEISKVCTRCVMDDSVPGIKFDENGICTYCKIHDELERKYPLNEESHKKLLQIVDKIKKDGKGKKYDCIVGVSGGRDSTYTLYNAAKLGLRPLAIHFDNGWDTEIAVQNIENACRKLGVDLHTHVADWEEFKDLQRSFLFASVPDAEVPTDWIIFSVLYNEAAKNKVKYIVHGHSFRTEGTAPLFWTYMDGRYVKGIQKRFGTKNLRSFPNLNLTKYLHYSFIKRIKQIRILYYIPYNEKEVFKILENELGWKNYGDKHHESKYTAFFQSYILTRKFNIDKRKLHYSAKIRNGQISRDEALEIIKQDPFTGGEELLEYCLKKLDLSYEDFERIMSTPPKTFLDFNTYYPLVKALQKPIKWGNSIGVVPDTVYNKYFNVNL

SEQ ID NO: 39616 - protein, 227 aa, unidentified
  source 1..227: note = Melioribacter roseus
  REGION 1..227: note = tr|I6YW17|I6YW17_MELRP 7-cyano-7-deazaguanine synthase OS=Melioribacter roseus (strain JCM 17771 / P3M-2) OX=1191523 GN=queC PE=3 SV=1
MKKLAVVALSGGMDSCVTAAIASREYELALIHINYGQRTENRELKAFNDIAEYYGVKHKLIIDYTHFSKIGGSSLTDRNIEVTRANIGSRDIPSSYVPFRNANILAACVSWAEVLNAEAVFIGAVYEDASGYPDCRPEFFEAFEKMADLGTKPETKIKIHTPIIHLSKAEIIKKGIELNAPLHLTWSCYQNEDEACGICDSCAFRLRGFQTAGIEDPIPYKVRPVYK

SEQ ID NO: 39617 - protein, 228 aa, unidentified
  source 1..228: note = Melioribacter sp.
  REGION 1..228: note = tr|A0A1G1B9T9|A0A1G1B9T9_9BACT 7-cyano-7-deazaguanine synthase OS=Melioribacter sp. GWF2_38_21 OX=1801612 GN=queC PE=3 SV=1
MHKNKLAVVAVSGGMDSCVTAAIANQEYRLALIHINYGQRTQTHELSSFNEIANFYNVEKRLVIDLRHFAQIGGSSLTDNSIEVTKADLGSHEIPSSYVPFRNANILSACTSWAEVIGASAIFVGAVYEDASGYPDCRPEFFSAYEKMIDLGTKPETKIKIETPIIHFSKADIVKKGIELGAPLHLTWSCYQSEDAACGVCDSCAFRLRGFEQAGVEDPIPYKIRPKY

SEQ ID NO: 39618 - protein, 579 aa, unidentified; identical to SEQ ID NO: 38871
  source 1..579: note = Melioribacter sp.
  REGION 1..579: note = tr|A0A1G1BJI3|A0A1G1BJI3_9BACT Uncharacterized protein OS=Melioribacter sp. GWF2_38_21 OX=1801612; GN = A2X65_12850 PE=4 SV=1

SEQ ID NO: 39619 - protein, 233 aa, Melittangium boletus
  REGION 1..233: note = tr|A0A250IBS2|A0A250IBS2_9DELT 7-cyano-7-deazaguanine synthase OS=Melittangium boletus DSM 14713 OX=1294270 GN=queC PE=3 SV=1
MSVSNKKAVVLLSGGLDSTTCLSMAKADGFEPVCLAVAYGQRHAVELERARWVARSLGVTDFRVVTVDLPQVGGSALTADIDVPKDRPESEMSHGIPITYVPARNALFLSLALGLAEVVGSSDIYIGVNAVDYSGYPDCRPEFIRAFEQMATLATKAGVEGTQFKVHAPLSGMTKAEIIRAGVKLGVDYSMTHSCYDPDKEGRACGRCDSCTLRRRGFEQAGVMDPTLYTAGV

SEQ ID NO: 39620 - protein, 231 aa, Merismopedia glauca
  REGION 1..231: note = tr|A0A2T1C947|A0A2T1C947_9CYAN 7-cyano-7-deazaguanine synthase OS=Merismopedia glauca CCAP 1448/3 OX=1296344 GN=queC PE=3 SV=1
MKAVILLSGGLDSSTVLYQAKADGCQCYAISFDYGQRHLRELDAARAIANAVGVVQHQVVQFDLRLWGGSALTDDGIDIPGDRSLEQMSAAIPVTYVPARNTIFLSFALGYAEAIAAQRVYIGVNALDYSGYPDCRPDYLQAMQEVFRLGTKQGREGQPIQIIAPLIKLKKTEIIELGNTLGVPWSRTWSCYAGEELACGVCDSCRLRLAAFDELRLVDPLSSKLNAKAAY

SEQ ID NO: 39621 - protein, 238 aa, unidentified
  source 1..238: note = Mesocricetibacter intestinalis
  REGION 1..238: note = tr|A0A4R6VBD6|A0A4R6VBD6_9PAST 7-cyano-7-deazaguanine synthase OS=Mesocricetibacter intestinalis OX=1521930 GN=queC PE=3 SV=1
MNIANPNGDRRAIVIFSGGQDSATCLIKAIADYGVANVEAVTFSYGQRHAIELEKARWIAQDLGVKQIVIDTSVIQAITTNALMDSHQPINAPSQGVPNTFVDGRNAMFLLYAAIYAKGQGIRDIITGVCETDFSGYPDCRDVFIKSMNVSLNLAMDYQFNIYTPLMYLTKAQTWQLADELGALDYVRRHTHTCYEGIEGGCGKCPSCVLREKGLREYLARKAGAQSEKKSGDYVSSF

SEQ ID NO: 39622 - protein, 186 aa, Mesonia sp.
  REGION 1..186: note = tr|A0A2D8URP8|A0A2D8URP8_9FLAO 7-cyano-7-deazaguanine synthase OS=Mesonia sp. OX=1960830; GN = CMH14_18750 PE=3 SV=1
MDSIALAYWKKPAHSITIDYGQKAANAEIKAAAQISKYLNIEHHILKVDCSALGSGDMNGSKSLGISPITEWWPYRNQLLVTLACMKGVSIGIKELIIGSVSTDNAHKDGTRTFYDYLSKLIEYQEGQIKITCPGIEMSTVDLIKKAKLPISLLYWAHSCHTANEPCMNCNGCKKYLYTLQMLGLD

SEQ ID NO: 39623 - protein, 236 aa, Mesorhizobium albiziae
  REGION 1..236: note = tr|A0A1I4DQR0|A0A1I4DQR0_9RHIZ 7-cyano-7-deazaguanine synthase OS=Mesorhizobium albiziae; OX = 335020 GN=queC PE=3 SV=1
MNDSKAIVLFSGGQDSTTCLAWALDRFAHVETIGFDYRQRHLVELDVRPVVLNAFRERFSNWAVKLGEDHLIDVAVLGQLSDTSLTRDVEIAMQANGLPNTFVPGRNLLFLTFAATIAYRRGAKHIVTGVCETDYSGYPDCRDDTMKAMQLALNLGMDARFAVHAPLMWIDKAETWRLARVLGGDELVDLIRDETHTCYQGDRVHHHDWGWGCGQCPACELRAQGYWQFAARPAVP

SEQ ID NO: 39624 - protein, 233 aa, Mesorhizobium albiziae
  REGION 1..233: note = tr|A0A1I4F2J8|A0A1I4F2J8_9RHIZ 7-cyano-7-deazaguanine synthase OS=Mesorhizobium albiziae; OX = 335020 GN=queC PE=3 SV=1
MKTLVICSGGLDSVSLAHKVAAEHELAGLLSFDYGQRHRKELSFAALCAERLNVPHRIIDIREIGRGLSGSALTDNVDVPDGHYAEDTMKVTVVPNRNAIMLAIAFGLAAAHKADAVATAVHGGDHFIYPDCRPAFIDAFQMMQDRALEGYAKIRLYAPYVNLTKADIVADGTTYGVPFAETWSCYRGGERHCGRCGTCVERREAFHLTGHPDPTDYEDSDFWLDALRRRRRA

SEQ ID NO: 39625 - protein, 232 aa, Mesorhizobium amorphae
  REGION 1..232: note = tr|A0A212DNY9|A0A212DNY9_9RHIZ 7-cyano-7-deazaguanine synthase OS=Mesorhizobium amorphae CCBAU 01583 OX=1449348 GN=queC PE=3 SV=1
MNALVICSGGLDSVSLAHKVATEQKLIGLLWFDYGQRHKKELGFASICAKRLGVPHQIVDIRDVGRNLSGSALTDDVDVPDGHYAEDSMRITVVPNRNAIMLAIAFGVAAAQKADAVATAVHGGDHFIYPDCRPAFIDAFQTMQNHALAGYADIRLYAPYVNMSKAAIVSEGAKYGTPFEATWSCYKGGARHCGRCGTCVERREAFDLAGITDPTDYEDADFWLHAIQTRSA

SEQ ID NO: 39626 - protein, 232 aa, Mesorhizobium amorphae
  REGION 1..232: note = tr|G6YIF9|G6YIF9_9RHIZ 7-cyano-7-deazaguanine synthase OS=Mesorhizobium amorphae CCNWGS0123 OX=1082933; GN = queC PE=3 SV=1
MKTLVICSGGLDSVSLAHKVAAEHELAGLLSFDYGQRHRKELRFAALCAERLSVPHRIIDIREIGRGLSGSALTDNVAVPDGHYAEDTMKTTVVPNRNAIMLAIAFGLAAARRADAVATAVHGGDHFIYPDCRPAFIDAFQVMQDRALDGYANIRLYAPYVNLTKADIVGDGATYGTPFVETWSCYKGAERHCGRCGTCVERREAFHLSGCPDPTDYEDTDFWLEALRRRSV

SEQ ID NO: 39627 - protein, 457 aa, Mesorhizobium australicum
  REGION 1..457: note = tr|A0A1X7MVG6|A0A1X7MVG6_9RHIZ Queuosine biosynthesis protein QueC OS=Mesorhizobium australicum; OX = 536018 GN=SAMN02982922_0695 PE=4 SV=1
MSSGVGQVRIPEKSIEVVESGGIASGGWVPFDLGRDFEFSTEALETYAFASWEPVIYDAMVVAAAIEYGDRILKRPPRGWARRIALRIPVHDPERWNDGELSEALLDAAGFLTGDYWSIEFVRRANPAPSPHSDYLNLPVPTEAVLAYSDGMDSRAVAGLVGAGLGTKLVRVRVGSNEIGRPDKKSYREPFTLVPYDVPCNMPNREASARSRGFKFALITGIAAYLSGAKEIVIPESGQGAIGPAIASVVHAYPDYRNHPRFTQRMERLLRALFGREIRYVFPRLWSTKGETLRSFAALPEGTTWHATRSCWRSNRWSSVNGKRRQCGVCAACMLRRVSVHAAGLTEAEDTYVCTDPTAASLEEAVDRDFTRMTPAYRQYAIAGVLHMDHLADLASKDGLPVVRRHAAMLAPALGVGKDQTEESLTRMLSEHASEWKEFVRSMGSNSFVRQWVRAGL

SEQ ID NO: 39628 - protein, 232 aa, Mesorhizobium australicum
  REGION 1..232: note = tr|L0KTA1|L0KTA1_MESAW 7-cyano-7-deazaguanine synthase OS=Mesorhizobium australicum (strain HAMBI 3006 / LMG 24608 / WSM2073) OX=754035 GN=queC PE=3 SV=1
MKTLVICSGGLDSVSLAHKVAAEHELAGLLSFDYGQRHSKELKFATLCAQRLDIAHQIIDIRQIGRGLCGSALTDGVDVPDGHYAEDTMKITVVPNRNAIMLAIAFGLAAAQQLEAVGMAAHGGDHFIYPDCRPAFIEAFQTMQDRALDGDAQIRLYTPYVNLTKADIVGDGARHGTPFAQTWSCYKGGERHCGRCGTCVERREAFQLAQHADPTDYEDTDFWLEALRRRSA

SEQ ID NO: 39629 - protein, 232 aa, Mesorhizobium ciceri; identical to SEQ ID NO: 36466
  REGION 1..232: note = tr|A0A143NP65|A0A143NP65_9RHIZ 7-cyano-7-deazaguanine synthase OS=Mesorhizobium ciceri; OX = 39645 GN=queC PE=3 SV=1

SEQ ID NO: 39630 - protein, 232 aa, Mesorhizobium ciceri; identical to SEQ ID NO: 36473
  REGION 1..232: note = tr|A0A3G8FWE9|A0A3G8FWE9_9RHIZ 7-cyano-7-deazaguanine synthase OS=Mesorhizobium ciceri; OX = 39645 GN=queC PE=3 SV=1

SEQ ID NO: 39631 - protein, 232 aa, unidentified
  source 1..232: note = Mesorhizobium delmotii
  REGION 1..232: note = tr|A0A2P9ASV3|A0A2P9ASV3_9RHIZ 7-cyano-7-deazaguanine synthase OS=Mesorhizobium delmotii; OX = 1631247 GN=queC PE=3 SV=1
MKTLVICSGGLDSVSLAHKVATEHDLAGLLSFDYGQRHRKELDFAALCAKRLNVPHKIIDIREIGRSLSGSALTDDLDVPDGHYAEDTMKITVVPNRNAIMLAIAFGVAAAQKADAVATAVHGGDHFIYPDCRPAFIDAFQAMQDLALDGYAEIRLYAPYVNLSKAEIVADGARLNTPFAQTWSCYKGGERHCGRCGTCVERREAFHVAGYPDPTDYEDPAFWLDALQARRA

SEQ ID NO: 39632 - protein, 232 aa, unidentified
  source 1..232: note = Mesorhizobium delmotii
  REGION 1..232: note = tr|A0A2P9ALJ2|A0A2P9ALJ2_9RHIZ 7-cyano-7-deazaguanine synthase OS=Mesorhizobium delmotii; OX = 1631247 GN=queC PE=3 SV=1
MKTLVICSGGLDSVSLAHSVAAEHELAGLLSFDYGQRHRKELGFAALCAERLNTMHQIINIPEIGRGLSGSALTDNLDVPDGHYAEDTMKITVVPNRNAIMLAIAFGLATAHKAEAVAMAVHGGDHFIYPDCRPAFIEAFQMMQDRALEGYAEIRLYTPYVNLTKGDIVRDGARHGTPFAETWSCYKGGERHCGRCGTCVERREAFHLAGHADPTDYEDPVFWLEALRRRSA

SEQ ID NO: 39633 - protein, 232 aa, unidentified
  source 1..232: note = Mesorhizobium hawassense
  REGION 1..232: note = tr|A0A330H9L5|A0A330H9L5_9RHIZ 7-cyano-7-deazaguanine synthase OS=Mesorhizobium hawassense OX=1209954 GN=queC PE=3 SV=1
MKTLVVCSGGLDSISLAHKVAAEQELDGLLSFDYGQRHSKELDFAGLCAERLNVPHRIIDIREIGRGLFGSALTDNMEVPDGHYAEDMMKVTVVPNRNAILLAIAFGFAAARKSEAVAMAVHGGDHFIYPDCRPAFIDAFQMMQDRALDGYANIRLYTPYVNLTKADIVEDGARHGTPFAETWSCYKGGRRHCGRCGTCVERREAFHLCGHPDPTDYEDADFWLDALRRRNV

SEQ ID NO: 39634 - protein, 245 aa, unidentified
  source 1..245: note = Mesorhizobium helmanticense
  REGION 1..245: note = tr|A0A2T4ILB6|A0A2T4ILB6_9RHIZ 7-cyano-7-deazaguanine synthase OS=Mesorhizobium helmanticense OX=1776423 GN=queC PE=3 SV=1
MQRDPGTALVLFSGGQDSTTCLAWALENFERVETIGFDYGQRHRIELDVRPYLLGRIRTDFTAWRGRLGEDHMIDMAVLGQITDTALTRDVEVALNANGLTNTFVPGRNLLFLGFAAAIAYRMGAKHLVIGVAETDRFSYPDCRDDAVKAMQLALNLGMKTHFVIHTPLMQRDKAQTWALADWLGGEALVKLICEGSHTCYSGDREHRHSWGFGCGTCIECNLRAAGWEQFRSCKEAPVAAHETT

SEQ ID NO: 39635 - protein, 232 aa, unidentified
  source 1..232: note = Mesorhizobium helmanticense
  REGION 1..232: note = tr|A0A2T4IN60|A0A2T4IN60_9RHIZ 7-cyano-7-deazaguanine synthase OS=Mesorhizobium helmanticense OX=1776423 GN=queC PE=3 SV=1
MNALVICSGGLDSVSLAHKVATEQKLIGLLSFDYGQRHKKELGFAAICAKRLGVPHQIVDIRDVGRNLSGSALTDNVDVPDGHYAEDSMRITVVPNRNAIMLAIAFGVAAAQKADAVATAVHGGDHFIYPDCRPAFIDAFQTMQNHALAGYADIRLYAPYVNMSKADIVSEGAKYATPFEATWSCYKGGARHCGRCGTCVERREAFDLAGITDPTDYEDADFWLHAIQTRSA

SEQ ID NO: 39636 - protein, 232 aa, Mesorhizobium huakuii
  REGION 1..232: note = tr|A0A068DJ66|A0A068DJ66_9RHIZ 7-cyano-7-deazaguanine synthase OS=Mesorhizobium huakuii 7653R OX=763057 GN=queC PE=3 SV=1
MKTLVVCSGGLDSVTLAHKVAAQHELAGLLSFDYGQRHRKELSFAALCAERLNVPHRIIDIREIGRGLSGSALIDGVDVPDGHYAEDTMKATVVPNRNAIMLATAFGLAAAHKVEAVATAVHGGDHFIYPDCRPAFIDSFQMMQDRALDGYAKIRVYAPYVNLTKADIVRDGATYGTPFAQTWSCYKGAERHCGRCGTCVERREAFHLSGHPDPTDYEDSDFWLDALRRRTA

SEQ ID NO: 39637 - protein, 232 aa, unidentified
  source 1..232: note = Mesorhizobium japonicum
  REGION 1..232: note = sp|Q98AZ0|QUEC1_RHILO 7-cyano-7-deazaguanine synthase 1 OS=Mesorhizobium japonicum (strain LMG 29417 / CECT 9101 / MAFF 303099) OX=266835 GN=queC1 PE=3 SV=1
MNALVICSGGLDSVSLAHKVATEQKLIGLLSFDYGQRHKKELGFAAICAKRLAVPHQIVDIRDVGRNLSGSALTDNVDVPDGHYAEDSMRITVVPNRNAIMLAIAFGVAAAKKADAVATAVHGGDHFIYPDCRPAFIDAFQTMQNHALAGYADIRLYAPYVNMSKADIVSEGAKYATPFEATWSCYKGGARHCGRCGTCVERREAFDLAGITDPTDYEDADFWLHAIQTRSA

SEQ ID NO: 39638 - protein, 198 aa, unidentified
  source 1..198: note = Mesorhizobium japonicum
  REGION 1..198: note = tr|Q989H2|Q989H2_RHILO 7-cyano-7-deazaguanine synthase OS=Mesorhizobium japonicum (strain LMG 29417 / CECT 9101 / MAFF 303099) OX=266835 GN=mll6423 PE=3 SV=1
MTTALLLSGGMDSVSIAWWLRPDVALTIDYGQKPAEAEIDAAGHVAQLLGISHEVIRVDCSSLGSGDMAGTAPDAAAPVSEWWPFRNQLLVTLAGMAAVRHGVSRLLIGALATDGAHADGRPEFVERASQLMAMQEGGIVVEAPAIELDAVELVRRSGIDQGTLAWAHSCHTGNYACGRCRGCTKHFNTWQALGWTPH

SEQ ID NO: 39639 - protein, 232 aa, unidentified
  source 1..232: note = Mesorhizobium kowhaii
  REGION 1..232: note = tr|A0A2W7BVD4|A0A2W7BVD4_9RHIZ 7-cyano-7-deazaguanine synthase OS=Mesorhizobium kowhaii; OX = 1300272 GN=queC PE=3 SV=1
MKTLVVCSGGLDSVTLAHKVAAQHELAGLLSFDYGQRHRKELGFAALCAERLNVPHRIIDIREIGRGLSGSALTDSVDVPDGHYAEDTMKATVVPNRNAIMLATAFGLAAAHKVEAVATAVHGGDHFIYPDCRPAFIDSFQMMQDRALDGYAKIRVYAPYVNLTKADIVRDGATYGTPFAQTWSCYKGAERHCGRCGTCVERREAFHLSGHPDPTDYEDSDFWLDALRRRTA

SEQ ID NO: 39640 - protein, 232 aa, Mesorhizobium mediterraneum
  REGION 1..232: note = tr|A0A271KRD3|A0A271KRD3_9RHIZ 7-cyano-7-deazaguanine synthase OS=Mesorhizobium mediterraneum OX=43617 GN=queC PE=3 SV=1
MKTLAVCSGGLDSVSLAHMVAAEHELTGLLSFDYGQRHRKELGFAALCAQRLKVPHQIIDIGEIGRGLSGSALTSSIDVPDGHYAEDTMKITVVPNRNAIMLAIAFGLAAAHSAEAVAAAVHGGDHFIYPDCRPAFIEAFQTMQDRALDGYAQIRLYAPYVNLGKADIVADGARYGTPFAETWSCYKGGVRHCGRCGTCVERREAFHLAGHSDPTDYEDADFWLEALRRRRA

SEQ ID NO: 39641 - protein, 500 aa, Mesorhizobium mediterraneum
  REGION 1..500: note = tr|A0A271KVF5|A0A271KVF5_9RHIZ 7-cyano-7-deazaguanine synthase OS=Mesorhizobium mediterraneum OX=43617 GN=CIT25_23290 PE=3 SV=1
MHRTRREPRKRKLNFSSSSGSSWIRSSERGCPAALGSTRPQSNASCGKRSPRSGGSGRRTMNRLEFHTDEDDIPDDDADGSIHVYLYGSRPKRAGTASIGRTLDLAVRRLGVGVDPEAFDFLSIALGVIAADTFVDRSSHSGNGWSREVELQIPLARPARWQAVTGELEQALSFLSGDQWKLHFTAGGKEPPSKETILRHHRSHIGIGSADCVCLFSGGLDSLIGAHQLVDQGRTPLLVSHSYRGDQSYQRHLVPRLGKKLPRFAANANPVFSGPNINDTSMRTRSLGFLAYGVVAASALRAKKRSASPIALFVPENGFIALNAPLTRRRIGSHSTRTTHPRFLGQMQSLFDTMNLPVHIENPYRHKTKGEMLVDLAPGEELKGTTVATVSCGKWKRKSQQCGHCVPCLIRRAAFAKAGIADTTPYQYTDLGHVWDRPDIRDDIMAMLVAVGRDHRGARQRAIAGGALPFDAVERKGWFGVHERGLEEVGAYLRSQGLGT

SEQ ID NO: 39642 - protein, 232 aa, Mesorhizobium metallidurans
  REGION 1..232: note = tr|M5EN67|M5EN67_9RHIZ 7-cyano-7-deazaguanine synthase OS=Mesorhizobium metallidurans STM 2683; OX = 1297569 GN=queC PE=3 SV=1
MKTLVICSGGLDSVSLAHSVAAEHELAGLLSFDYGQRHRKELGFAALCAERLNTMHQIINIPEIGRGLSGSALTDNFDVPDGHYAEDTMKITVVPNRNAIMLAIAFGLATAHKAEAVAMAVHGGDHFIYPDCRPAFIEAFQMMQDRALEGYAEIRLYTPYVNLTKGDIVRDGARHGTPFAETWSCYKGGERHCGRCGTCVERREAFHLAGHADPTDYEDPVFWLEALRRRSA

SEQ ID NO: 39643 - protein, 233 aa, unidentified
  source 1..233: note = Mesorhizobium muleiense
  REGION 1..233: note = tr|A0A1G9GN56|A0A1G9GN56_9RHIZ 7-cyano-7-deazaguanine synthase OS=Mesorhizobium muleiense; OX = 1004279 GN=queC PE=3 SV=1
MMKTLAVCSGGLDSVSLAHMVAAEHELTGLLSFDYGQRHRKELGFAALCAQRLKVPHQIIDIGEIGRGLSGSALTDSVDVPDGHYAEDTMKITVVPNRNAIMLAIAFGLAAAHNAEAVAAAMHGGDHFIYPDCRPAFIEAFQTMQDRALDGYAQIRLYAPYVNLGKADIVADGARYGTPFAETWSCYKGGVRHCGRCGTCVERREAFHLAGHADPTDYEDADFWLEALRRRRA

SEQ ID NO: 39644 - protein, 232 aa, Mesorhizobium opportunistum; identical to SEQ ID NO: 39628
  REGION 1..232: note = tr|F7Y1I7|F7Y1I7_MESOW 7-cyano-7-deazaguanine synthase OS=Mesorhizobium opportunistum (strain LMG 24607 / HAMBI 3007 / WSM2075) OX=536019 GN=queC PE=3 SV=1

SEQ ID NO: 39645 - protein, 232 aa, Mesorhizobium plurifarium
  REGION 1..232: note = tr|A0A090ENS6|A0A090ENS6_MESPL 7-cyano-7-deazaguanine synthase OS=Mesorhizobium plurifarium OX=69974 GN=queC PE=3 SV=1
MKTLVVCSGGLDSVSLAHKVAAEQELAGLLSFDYGQRHSKELDFAGLCAQRLNVPHRIIDIREIGGGLFGSALTDNVEVPDGHYAEDMMKVTAVPNRNAIMLAIAFGFAAARKTEAVATAVHGGDHFIYPDCRPAFIDAFQMMQDRALEGYANIRLYTPYVNLTKADIVEDGARYGTPFAETWSCYKGGKRHCGRCGTCVERREAFYLCGHPDPTDYEDADFWLDAVRRRSV

SEQ ID NO: 39646 - protein, 232 aa, Mesorhizobium plurifarium
  REGION 1..232: note = tr|A0A090G5I7|A0A090G5I7_MESPL 7-cyano-7-deazaguanine synthase OS=Mesorhizobium plurifarium OX=69974 GN=queC PE=3 SV=1
MKTLVVCSGGLDSISLAHKVAAEHELAGLLSFDYGQRHSKELDFASLCAERLNVPHSIIDIREIGRGLSGSALTDNVEVPDGHYAEDMMKVTVVPNRNAIMLAIAFGVAAARKSEAVATAVHGGDHFIYPDCRPAFIDAFQMMQDRALEGYANIRLYTPYVNLTKADIIEDGARHGTPFAETWSCYKGGKRHCGRCGTCVERREAFHLCGHPDPTDYEDADFWLDALRRRGV

SEQ ID NO: 39647 - protein, 213 aa, unidentified
  source 1..213: note = Mesorhizobium prunaredense
  REGION 1..213: note = tr|A0A1R3VGK1|A0A1R3VGK1_9RHIZ 7-cyano-7-deazaguanine synthase OS=Mesorhizobium prunaredense OX=1631249 GN=BQ8794_610003 PE=3 SV=1
MKSAVLLASGGLDSTTVAYRLAADGVDVFPFFLDYGQHCVEMEWDRVNEVLPRGMRRPERCDISDIFNGSSSRLIREADLWKDNVADHELYVPYRTMLFFAAAAARAQTLGIVDVYTGFINSNHAKEIDCTAEFMNGIDGLIDNIGSVRFTSPFRFSSKTDVVQEALRRGVPIGRTFSCQAASNFPCGACPNCVERLYALQDAALVTPQGKVG

SEQ ID NO: 39648 - protein, 232 aa, unidentified
  source 1..232: note = Mesorhizobium prunaredense
  REGION 1..232: note = tr|A0A1R3V902|A0A1R3V902_9RHIZ 7-cyano-7-deazaguanine synthase OS=Mesorhizobium prunaredense OX=1631249 GN=queC PE=3 SV=1
MKTLVICSGGLDSVSLAHSVAAEHELAGLLSFDYGQRHRKELGFAALCAERLNTMHQIINIPEIGRGLSGSALTDNFDVPDGHYAEDTMKITVVPNRNAIMLAIAFGLATAHKAEAVAMAVHGGDHFIYPDCRPAFIEAFQMMQDRALEGYAEIRLYAPYVNLTKGDIVRDGARHGTPFAETWSCYKGGERHCGRCGTCVERREAFHLAGHADPTDYEDPVFWLEALRRRSA

SEQ ID NO: 39649 - protein, 232 aa, unidentified; identical to SEQ ID NO: 39636
  source 1..232: note = Mesorhizobium qingshengii
  REGION 1..232: note = tr|A0A1G5ZZ21|A0A1G5ZZ21_9RHIZ 7-cyano-7-deazaguanine synthase OS=Mesorhizobium qingshengii OX=1165689 GN=queC PE=3 SV=1

SEQ ID NO: 39650 - protein, 245 aa, unidentified
  source 1..245: note = Mesorhizobium sanjuanii
  REGION 1..245: note = tr|A0A2A6FLB7|A0A2A6FLB7_9RHIZ 7-cyano-7-deazaguanine synthase OS=Mesorhizobium sanjuanii; OX = 2037900 GN=queC PE=3 SV=1
MQRDPGTALVLFSGGQDSTTCLAWALENFERVETIGFDYGQRHRIELDVRPYLLARIRKDFPVWRGRLGEDHMIDMAVLGQISDTALTRDVEVALNANGLTNTFVPGRNLLFLGFAAAIAYRMGAKHLVIGVSETDCFSYPDCRDNAVKAMQLALNLGMEKRFIIHTPLMQRDKAQTWALADCLGGEALVKLICEGSHTCYSGDREHRHSWGFGCGTCIECHLRAAGWEQFQSCKDAPVAAHEMT

SEQ ID NO: 39651 - protein, 232 aa, unidentified
  source 1..232: note = Mesorhizobium sanjuanii
  REGION 1..232: note = tr|A0A2A6FA22|A0A2A6FA22_9RHIZ 7-cyano-7-deazaguanine synthase OS=Mesorhizobium sanjuanii; OX = 2037900 GN=queC PE=3 SV=1
MNALVICSGGLDSVSLAHKVATEQKLIGLLSFDYGQRHKKELGFAAICAKRLGVPHQIVDIRYVGRNLSGSALTDNVDVPDGHYAEDSMRITVVPNRNAIMLAIAFGVAAAQKADAVATAVHGGDHFIYPDCRPAFIDAFQTMQNHALAGYADIRLYAPYVNMSKADIVTEGAKYATPFEATWSCYKGGARHCGRCGTCVERREAFDLAGITDPTDYEDADFWLHAIQTRSA

SEQ ID NO: 39652 - protein, 232 aa, Mesorhizobium sp.; identical to SEQ ID NO: 36473
  REGION 1..232: note = tr|A0A436I9G4|A0A436I9G4_9RHIZ 7-cyano-7-deazaguanine synthase OS=Mesorhizobium sp. M7A.F.Ca.CA.001.06.1.1 OX=2496682 GN=queC PE=3 SV=1

SEQ ID NO: 39653 - protein, 232 aa, Mesorhizobium sp.; identical to SEQ ID NO: 36473
  REGION 1..232: note = tr|A0A3S1WL10|A0A3S1WL10_9RHIZ 7-cyano-7-deazaguanine synthase OS=Mesorhizobium sp. M7A.F.Ca.CA.001.05.1.1 OX=2496721 GN=queC PE=3 SV=1

SEQ ID NO: 39654 - protein, 198 aa, unidentified
  source 1..198: note = Mesorhizobium tamadayense
  REGION 1..198: note = tr|A0A3P3FF10|A0A3P3FF10_9RHIZ 7-cyano-7-deazaguanine synthase OS=Mesorhizobium tamadayense OX=425306 GN=EH240_21695 PE=3 SV=1
MKTALLLSGGMDSVSIAWWMKPDLAITIDYGQKPADAEIAAARKVAELLTIKHEIIRVDCSSLGSGDMAGTAPLSAAPVSEWWPFRNQLILTLAGMAAVRMGCGRLLIGTLATDGQHADGRPEFVERISALMSFQEGSMLVSAPAIGLDAVELVRQSGIDQATLAWAHSCHVGNFACGRCRGCIKHFNTWHALGWTPH

SEQ ID NO: 39655 - protein, 232 aa, unidentified
  source 1..232: note = Mesorhizobium tamadayense
  REGION 1..232: note = tr|A0A3P3FSX1|A0A3P3FSX1_9RHIZ 7-cyano-7-deazaguanine synthase OS=Mesorhizobium tamadayense OX=425306 GN=queC PE=3 SV=1
MKTLVICSGGLDSVSLAHKVAAEHELAGLLSFDYGQRHSKELGFAALCAERLNVPHSIIDIREIGRGLSGSALTDSVEVPDGHYAEDTMKITVVPNRNAIMLATAFGFAAAHKVEAVATAVHGGDHFIYPDCRPAFIDAFQMMQDRALDGYAKIGLYAPYVNLTKADIVVDGATYGTPFAQTWSCYKGGERHCGRCGTCVERREAFLLSGHADPTDYEDAGFWLEALRRRSA

SEQ ID NO: 39656 - protein, 232 aa, Mesorhizobium temperatum
  REGION 1..232: note = tr|A0A271LBN9|A0A271LBN9_9RHIZ 7-cyano-7-deazaguanine synthase OS=Mesorhizobium temperatum OX=241416 GN=queC PE=3 SV=1
MKTLVVCSGGLDSVTLAHKVAAEYELAGLLSFDYGQRHRKELGFAALCAERLNVPHRIIDIREIGRGLSGSALTDSVDVPDGHYAEDTMKVTVVPNRNAIMLATAFGFAAAHQAEAVATAVHGGDHFIYPDCRPAFIDAFQMMQDRALDGYAKIRLYAPYVNLTKADIVRDGATYGTPFAETWSCYKGGECHCGRCGTCVERREAFHLSGHPDPTDYEDSDFWLHALRRRSA

SEQ ID NO: 39657 - protein, 232 aa, Mesorhizobium temperatum
  REGION 1..232: note = tr|A0A271LQE2|A0A271LQE2_9RHIZ 7-cyano-7-deazaguanine synthase OS=Mesorhizobium temperatum OX=241416 GN=queC PE=3 SV=1
MNALVICSGGLDSVSLAHKVATEQKLIGLLSFDYGQRHKKELGFACICAKRLGVPHQIVDIRDVGRNLSGSALTDDVDVPDGHYAEDSMRITVVPNRNAIMLAIAFGVAAAQKADAVATAVHGGDHFIYPDCRPAFIDAFQTMQNHALAGYADIRPYAPYVNMSKADIVSEGAKYATPFEATWSCYKGGARHCGRCGTCVERREAFDLAGIADPTDYEDTDFWLHAIQTRSA

SEQ ID NO: 39658 - protein, 232 aa, Mesorhizobium tianshanense
  REGION 1..232: note = tr|A0A562N4B2|A0A562N4B2_9RHIZ 7-cyano-7-deazaguanine synthase OS=Mesorhizobium tianshanense OX=39844 GN=queC PE=3 SV=1
MKTLVVCSGGLDSVTLAHKVAAEYELAGLLSLDYDQRHRKELGFAALCAERLNVPHRIIDIREIGHGLSGSALTDSVDVPDGHYAEDTMKVTVVPNRNAIILATAFGFAAAHQAEAVATAVHGGDHFIYPDCRPAFIDAFQMMQDRALDGYAKIRLYAPYVNLTKADIVRDGATYGTPFAETWSCYKGGECHCGRCGTCVERREAFHLSGHPDPTDYEDSDFWLHALRRRSA

SEQ ID NO: 39659 - protein, 200 aa, Mesorhizobium tianshanense
  REGION 1..200: note = tr|A0A562MAF2|A0A562MAF2_9RHIZ 7-cyano-7-deazaguanine synthase OS=Mesorhizobium tianshanense OX=39844 GN=IQ26_07631 PE=3 SV=1
MRALLFSGGLDSSALAWWLRPQVCVTIDYGQRAAKGEIAASSALCSQIGLEHRTIQADLSFLGSGSMAAKAVVDGASAEEFWPYRNQMLVTLAAMKLMPEGVSEIILGSVSTDRHADGKAPFLKSLDRTLSLQEGHVRVTAPARRMSTRTLLRTSGFPYELIGLTFSCHVHEYACGQCNGCLKHRECVEMTYPRPKRGAA

SEQ ID NO: 39660 - protein, 232 aa, unidentified
  source 1..232: note = Mesorhizobium waimense
  REGION 1..232: note = tr|A0A3A5K9E1|A0A3A5K9E1_9RHIZ 7-cyano-7-deazaguanine synthase OS=Mesorhizobium waimense; OX = 1300307 GN=queC PE=3 SV=1
MKTLVICSGGLDSVSLAHKVAAEHQLASLLSFDYGQRHRKELGFAALCADRLNVLHRIIDIREIGRGLSGSALTDSVDVPDGHYAEDRMKVTVVPNRNAIMLATAFGFAAAQGAEAVATAVHGGDHFIYPDCRPAFIDAFQMMQDRALDGYANIRLHAPYVNLTKADIVEDGARYGTQFAETWSCYKGGERHCGRCGTCVERREAFHLARHPDPTNYEDGDFWLEALHRRNV

SEQ ID NO: 39661 - protein, 652 aa, unidentified
  source 1..652: note = Mesorhizobium wenxiniae
  REGION 1..652: note = tr|A0A271KKC2|A0A271KKC2_9RHIZ Uncharacterized protein OS=Mesorhizobium wenxiniae OX=2014805; GN = CIT31_15685 PE=4 SV=1
MLETLVVCGGEAAPQRRSGVVIELDVSPIAHPKSRIRFNPGEINAQLVDDLPDALADAVEVAAYVFSADRLVRRGSSSSRRIGAEWQRQLRFRIPVRRHDLWTRPEVKEKLRSALAFLSGDQIEFEFTKARDPRSIEPHLGFRDSGAQVIRPDKVILFSGGLDSLAGIAEHVVGDRGSAVLVAHQSATQIANYQNALADKIALRTGPKQTFYAPIWVRRGESNPTEHSQRLRSFLFASLGMAYAWMFGLSSVFFYENGVTSFNLPVAEQVVGTRASRTTHPSVLRRFGDLFSLLLDEPVTFENPFLWKTKGDVVATIGRHGCSDLIGATTSCAKIRDFSMTGQHCGSCSQCVERRFGVLNAGLGDHEPATTYVTDLFVGSHDDGRDLAMVEAHVLRAQRLATMSEHAFASNYGQIFRTLSDIDGTLEAAAHRVYHLHRRYGASIMQVVDQQLAKYSSLDDILRLPPTSLLGMLRTPVARQIPFQDPIEDEPRPSVEAKSNASKTADRRIAFAVTAQGHVKFPECPALPRNISALLAHLAQQFISDLEQGRDGADHSYVRTKQLTDLFDISGDDLRQRVRRARRFLEKHFERATGYTLDEHDIIQSMKWTGYRLNPYLILMDARALEARVSRQSSKGVTTREQMPGIQGFGTG

SEQ ID NO: 39662 - protein, 232 aa, unidentified
  source 1..232: note = Mesorhizobium wenxiniae
  REGION 1..232: note = tr|A0A271KPF3|A0A271KPF3_9RHIZ 7-cyano-7-deazaguanine synthase OS=Mesorhizobium wenxiniae; OX = 2014805 GN=queC PE=3 SV=1
MKTLAVCSGGLDSVSLAHMVAAEHELTGLLSFDYGQRHRKELGFAALCAERLKVPHQIIDLREIGRGLSGSALTDSVDVPDGHYAEDTMKITVVPNRNAIMFAIAFGLAATHKAEAVAAAVHGGDHFIYPDCRPAFIEAFQTMQDRALDGYAQIRLYAPYVNLGKADIVADGARYGTPFAETWSCYKGGVRHCGRCGTCVERREAFHLAGHADPTDYEDADFWLEALRRRRA

SEQ ID NO: 39663 - protein, 88 aa, unidentified
  source 1..88: note = Mesosutterella multiformis
  REGION 1..88: note = tr|A0A388SDV1|A0A388SDV1_9BURK 7-cyano-7-deazaguanine synthase OS=Mesosutterella multiformis OX=2259133 GN=MESMUL_16890 PE=3 SV=1
MSRTAVVLFSGGQDSTTCLAAALKQYDAVYTVGVDYGQRHRVELECRERIRARIESILGTHSLKDDLLLDLKAFGQLSDCALTKPRSD

SEQ ID NO: 39664 - protein, 91 aa, unidentified
  source 1..91: note = Mesosutterella multiformis
  REGION 1..91: note = tr|A0A388SI10|A0A388SI10_9BURK 7-cyano-7-deazaguanine synthase OS=Mesosutterella multiformis OX=2259133 GN=MESMUL_16880 PE=3 SV=1
MKALELAIDLGMETSLRIERPLMNLSKAETWKLAETIGGDALVSFIRDETHTCYEGDHTHFHDWGYGCGKCPACVLREKGWEEYVANLKGR

SEQ ID NO: 39665 - protein, 231 aa, unidentified; identical to SEQ ID NO: 38971
  source 1..231: note = Metakosakonia sp.
  REGION 1..231: note = tr|A0A348DIM4|A0A348DIM4_9ENTR 7-cyano-7-deazaguanine synthase OS=Metakosakonia sp. MRY16-398 OX=2487150 GN=queC PE=3 SV=1

SEQ ID NO: 39666 - protein, 226 aa, unidentified
  source 1..226: note = Metallibacterium scheffleri
  REGION 1..226: note = tr|A0A4S3KRK5|A0A4S3KRK5_9GAMM 7-cyano-7-deazaguanine synthase OS=Metallibacterium scheffleri OX=993689 GN=queC PE=3 SV=1
MMHASPRAVVLVSGGMDSAVTLALARERGFDCYALSVAYGQRHSAELSAAAHNAHALGAIAHKTVAVDLRSIGGSALTAEIDVPEAGGVGIPITYVPARNTIMLSIALGWAEVLGAADLFCGVNAVDYSGYPDCRPAFIAAFERLARVATKAAVEGHELRVHAPLMAMGKADIVREGLRLGVDFAATVSCYQADAEGRACAHCDACRLRADGFRVAGVADPTRYVV

SEQ ID NO: 39667 - protein, 228 aa, unidentified
  source 1..228: note = Unknown
  REGION 1..228: note = tr|A0A1X7MFM1|A0A1X7MFM1_9GAMM 7-cyano-7-deazaguanine synthase OS=methanotrophic bacterial endosymbiont of Bathymodiolus sp. OX=280772; GN = queC PE=3 SV=1
MTKKAIILLSGGLDSVTVLALAKQQGYMIYALSFDYGQKHNAELISARQIARAYQVAEHKVIQLGLGEIGGSALTDEAIQVPVTHQDGIPVTYVPARNTVFLSFALGWAEVLDAHDIFIGVNAVDYSGYPDCRPQFIDAFQALANVATKAGVEGHKINIHAPLIDMSKGEIILQGTRLQVDYAQTVSCYVASPEGLACGECDACRLRQEGFAEAGVLDPTAYKVGVSL

SEQ ID NO: 39668 - protein, 233 aa, Methylarcula marina
  REGION 1..233: note = tr|A0A3R7LKC4|A0A3R7LKC4_9RHOB 7-cyano-7-deazaguanine synthase OS=Methylarcula marina; OX = 72022 GN=queC PE=3 SV=1
MKTIVICSGGLDSVSLAHIIAARGELSRLVSFDYGQRHRKELDYAAACAKRLDVPHHVIDMRPVGAALTGSALTEDIDVPDGHYAEETMKITVVPNRNAIMLTIAYGIATANGDQAVATAVHGGDHFIYPDCRPEFTTAFDRMQRAALDGYADVTLLTPFVHRSKADIVTEGARAGTPFAETWSCYKGGANHCGRCGTCVERREAFHLAGIDDPTVYEDPDFWREAIASKAEA

SEQ ID NO: 39669 - protein, 235 aa, Methylibium petroleiphilum
  REGION 1..235: note = sp|A2SCE3|QUEC_METPP 7-cyano-7-deazaguanine synthase; OS = Methylibium petroleiphilum (strain ATCC BAA-1232 / LMG 22953 / PM1) OX=420662 GN=queC PE=3 SV=1
MSLDPRGALVLFSGGQDSTACLAWALEHHAHVETIGFDYGQRHVVELECRVQVREAIARSFPLWAGRLANDHVLDLGLLGQISDTALTSARAIEMQANGLPSTFVPGRNLLFLGFAATVAYRRNLSVLVGGMCETDYSGYPDCRDNTLKALQVALSLGMATPMTIETPLMWLDKARTWALTDRLGGRALNELILEHTHSCYLGDRSVRHAWGYGCNACPACELRRKGYEAWCAGA

SEQ ID NO: 39670 - protein, 235 aa, Methylibium sp.
  REGION 1..235: note = tr|A0A0Q7DBI6|A0A0Q7DBI6_9BURK 7-cyano-7-deazaguanine synthase OS=Methylibium sp. Root1272 OX=1736441 GN=queC PE=3 SV=1
MSLDPRGALVLFSGGQDSTACLAWALEHHAHVETIGFDYGQRHVVELECRMPVREAIARSFPLWAGRLANDHVLDLGLLGQISDTALTSAREIEMQANGLPSTFVPGRNLLFLGFAATVAYRRNLSVLVGGMCETDYSGYPDCRDNTLKALQVALSLGMATPMTIETPLMWLDKAQTWALTDRLGGSALNELILEHTHSCYLGDRSVRHAWGYGCNACPACELRRKGYEAWCASA

SEQ ID NO: 39671 - protein, 235 aa, Methylibium sp.
  REGION 1..235: note = tr|A0A4P6GVY9|A0A4P6GVY9_9BURK 7-cyano-7-deazaguanine synthase OS=Methylibium sp. Pch-M; OX = 2082386 GN=queC PE=3 SV=1
MSLDPRGALVLFSGGQDSTACLAWALEHHAHVETIGFDYGQRHVVELECRVQVREAIARSFPLWAGRLANDHVLDLGLLGQISDTALTSARAIEMQANGLPSTFVPGRNLLFLGFAATVAYRRNLSVLVGGMCETDYSGYPDCRDNTLKALQVALSLGMATPMTIETPLMWLDKARTWALTDRLGGRALNELILEHTHSCYLGDRSVRHAWGYGCNACPACELRRKGHEAWCAGA

SEQ ID NO: 39672 - protein, 229 aa, Methylobacillus flagellatus
  REGION 1..229: note = sp|Q1GYT5|QUEC_METFK 7-cyano-7-deazaguanine synthase; OS = Methylobacillus flagellatus (strain KT / ATCC 51484 / DSM 6875) OX=265072 GN=queC PE=3 SV=1
MSKKAVVLLSGGLDSATVLAIARHQGYDVYCLSLDYQQRHRAELQAADRVTKALGAVMHRTVKLDLSVFGGSALTDASIAVPEVPSEGIPVTYVPARNTIMLSLALAWAEVLEARDIFIGVNALDYSGYPDCRGEYVHAFQAMANLATKSAVEGRTIAIHAPLIDMTKADIVTQGTSLGVDYSLTVSCYQADDEGRACGVCDSCRLRRQGFVAAGLADPTRYAPTAGIR

SEQ ID NO: 39673 - protein, 230 aa, unidentified
  source 1..230: note = Methylobacillus rhizosphaerae
  REGION 1..230: note = tr|A0A238XXQ0|A0A238XXQ0_9PROT 7-cyano-7-deazaguanine synthase OS=Methylobacillus rhizosphaerae OX=551994 GN=queC PE=3 SV=1
MSKKAVVLLSGGLDSATVLAIARHQGYEAYCLSLDYHQRHRAELDAAQQIVTALGAAMHRTAQLDLAMFGGSALTDASIAVPEMPSEGIPITYVPARNTIMLSLALAWAEVLEAQDIFIGVNALDYSGYPDCRGEYVRAFQDMANLATKSAIEGRTITIHAPLIDMTKAQIVTQGVALGVDYSLTVSCYQADERGRACGVCDSCRLRRQGFVAAGLADPTRYVETANFAE

SEQ ID NO: 39674 - protein, 236 aa, Methylobacillus sp.
  REGION 1..236: note = tr|A0A1A9NKB7|A0A1A9NKB7_9PROT 7-cyano-7-deazaguanine synthase OS=Methylobacillus sp. MM3; OX = 1848039 GN=queC PE=3 SV=1
MTVAHSFSPSTGSKAVVLLSGGLDSATVLAIARSEGYVCYCLSLDYHQRHIAELGAAKRVAQALGAAEHRVVQFDLSNFGGSALTDDKIAVPESPSEGIPVTYVPARNTIMLSLSLAWAEVLGAQDIFIGVNALDYSGYPDCRKEYVDAFERMANLATKAAVEGHRLKVHAPLIDLNKAEIIQRGHALGVDYGITVSCYQADSQGNACGVCDSCRFRQAGFRAAGLPDPTHYQSAK

SEQ ID NO: 39675 - protein, 225 aa, Methylobacter sp.
  REGION 1..225: note = tr|A0A522WXL7|A0A522WXL7_9GAMM 7-cyano-7-deazaguanine synthase OS=Methylobacter sp.; OX = 2051955 GN=queC PE=3 SV=1
MQKKAIVLLSGGLDSITVLALAKKQGFKCYALSFDYGQRHNAELVAAAQIAADYQVEDHKIIKLGLSSIGGSALTDEHIAVPNTPQDGIPVTYVPARNTIFLSFALGWAEVLNLTDIFIGVNAVDYSGYPDCRPEFIKAFQQLANLATKAGIEGQHFTIHTPLIALSKSEIIKQGIELGVDYRRTVSCYSADEQGRACQVCDACRLRKAGFIEAGIKDPTQYQII

SEQ ID NO: 39676 - protein, 229 aa, Methylobacter sp.
  REGION 1..229: note = tr|A0A2P5LJP3|A0A2P5LJP3_9GAMM 7-cyano-7-deazaguanine synthase OS=Methylobacter sp.; OX = 2051955 GN=queC PE=3 SV=1
MQKKAIVLLSGGLDSTTLLAYAQHQEYLCYALSFNYGQRHNAELVAAAEIAKLYRVEEHKVIKLGLDSIGGSALTDSRIDVPTTPQDGIPVTYVPARNTLFLSLALAWAEVLQAYDIFIGVNAVDYSGYPDCRPAFIQAFQQLANLATKAGVEGQRFTIHTPLITLSKADIIALGTKLGVDYRQTVSCYVADGAGQACGFCDACRLRKAGFANANIPDPTHYQTQDKDK

SEQ ID NO: 39677 - protein, 225 aa, Methylobacter tundripaludum
  REGION 1..225: note = tr|A0A2S6GFH8|A0A2S6GFH8_9GAMM 7-cyano-7-deazaguanine synthase OS=Methylobacter tundripaludum OX=173365 GN=queC PE=3 SV=1
MQKKAIVLLSGGLDSITVLALAKKQGFKCYALSFDYGQRHNAELIAATQIAADYQVEDHKIIKLGLSSIGGSALTDEHIAVPNAPQEGIPVTYVPARNTIFLSFALGWAEVLKLTDIFIGVNAVDYSGYPDCRPEFIKAFQQLANLATKAGVEGEHFTIHTPLIALSKAEIIKQGVELGVDYRRTVSCYSADEQGRACRVCDACRLRAAGFMDAEIKDPTQYQSN

SEQ ID NO: 39678 - protein, 225 aa, Methylobacter tundripaludum
  REGION 1..225: note = tr|A0A2S6HB28|A0A2S6HB28_9GAMM 7-cyano-7-deazaguanine synthase OS=Methylobacter tundripaludum OX=173365 GN=queC PE=3 SV=1
MQKKAIVLLSGGLDSITVLALAKKQGFKCYALSFDYGQRHNAELVAAAQIAADYQVEDHKIIKLGLSSIGGSALTDEHIAVPHSPQDGIPVTYVPARNTIFLSFALGWAEVLKLNDIFIGVNAVDYSGYPDCRPEFIKAFQQLANLATKAGVEGEHFVIHTPLIALSKAEIIKQGIELGVDYQRTVSCYSADEQGRACQVCDACRLRKIGFTEAGIKDPTRYQIS

SEQ ID NO: 39679 - protein, 435 aa, Methylobacterium aquaticum
  REGION 1..435: note = tr|A0A0C6FUZ2|A0A0C6FUZ2_9RHIZ Uncharacterized protein OS=Methylobacterium aquaticum OX=270351; GN = Maq22A_1p35790 PE=4 SV=1
MTRVVCHADPADVPARRADGDVHVVLYGRGRVPDGVARLGAGVMDAVSRIGLALRDDAFDFLTVALAVTAADTFVLREDAEDRWSRRLEVEIPLVDPRPWDPVRVRLEGALRFLSGDDWRLTFGPGGPAGPSRAVIDGRRRRIDLTRSDCACLFSGGLDSYVGALDLIAAGRRPLLVSHAYRGDRRYQDRTAHALPVVCARFSANAHPTWSGPTDVSMRTRSFNFLAYGTAAATALSQTRGGRRVELWVPENGLIALNAPLTPRRIGSHSTRTTHPHFLGSIQAIVDAVGLPVAIANPLRHETKGEMVTRHAGDPTFVSQAVRTVSCGKWKRDGRQCGRCVPCLIRRASFHAAEVPDTTGYRSTALGPVLRDADLRDDLAAVLAATRRARVAAMEPWVLQAGPLPDAGPERNGCVEVFRRGIGELGRFLEANGVP

SEQ ID NO: 39680 - protein, 235 aa, Methylobacterium aquaticum
  REGION 1..235: note = tr|A0A0J6SKE9|A0A0J6SKE9_9RHIZ 7-cyano-7-deazaguanine synthase OS=Methylobacterium aquaticum OX=270351 GN=queC PE=3 SV=1
MTSPDGALVLFSGGQDSATCLAWALDRFAHVETLGFDYGQRHRIELECRASLRTAMTRIVPAFAARLGQDHTLSLSALGEVSETALTRETAIAMEAGGLPNTFVPGRNLVFLTFAAALAYRRGLRHIVGGMCETDFSGYPDCRDDTIKALQVALNLGMERRFVLHTPLMWIDKAETWRLARDLGGEALVDLIVRESHTCYLGERGALHAWGHGCGTCPACALRASGYARFRAEDA

SEQ ID NO: 39681 - protein, 241 aa, Methylobacterium brachiatum
  REGION 1..241: note = tr|A0A1I3G237|A0A1I3G237_9RHIZ 7-cyano-7-deazaguanine synthase OS=Methylobacterium brachiatum OX=269660 GN=queC PE=3 SV=1
MATEAAIIGDRSALVLFSGGQDSATCLAWALDRFDHVETLGFDYGQRHRVELERRAVLRAGMGRIDPAWATRLGADHTVALDALGKISETALTRDAEIGFAESGLPNTFVPGRNLVFLTFAAALAYRRGIRHVVGGMCETDYSGYPDCRDDAIKALQVALNLGMERRFVLHTPLMWLDKAQTWGLAEDLGGQPLVELIVEDSHTCYLGERGARHAWGYGCGTCPACRLRADGFARFTASAA

SEQ ID NO: 39682 - protein, 241 aa, Methylobacterium brachiatum
  REGION 1..241: note = tr|A0A3G2VBD1|A0A3G2VBD1_9RHIZ 7-cyano-7-deazaguanine synthase OS=Methylobacterium brachiatum OX=269660 GN=queC PE=3 SV=1
MATEAAIVGDRSALVLFSGGQDSATCLAWALDRFDHVETLGFDYGQRHRVELDRRAVLRAGMGRIDPAWATRLGADHTVALDALGKISETALTRDAEIGFAESGLPNTFVPGRNLVFLTFAAALAYRRGIRHVVGGMCETDYSGYPDCRDDTIKALQVALNLGMERRFVLHTPLMWLDKAQTWGLAEDLGGQPLVELIVEDSHTCYLGERGARHAWGYGCGTCPACRLRADGFARFTASAA

SEQ ID NO: 39683 - protein, 235 aa, unidentified
  source 1..235: note = Methylobacterium currus
  REGION 1..235: note = tr|A0A2R4WKB2|A0A2R4WKB2_9RHIZ 7-cyano-7-deazaguanine synthase OS=Methylobacterium currus; OX = 2051553 GN=queC PE=3 SV=1
MMLSDGALVLFSGGQDSATCLAWALDRFSHVETLGFDYGQRHRIELECRETLRAELARIVPAFAGRLGDDHTLSLDALGAVSETALTRETAIAMEAGGLPNTFVPGRNLVFLTFAAALAYRRGLRHIVGGMCETDFSGYPDCRDDTIKALQVALNLGMERRFVLHTPLMWIDKAATWRMARDLGGEPLVDLIVRESHTCYLGERGALHAWGHGCGTCPACALRASGYARFRAEDA

SEQ ID NO: 39684 - protein, 237 aa, unidentified
  source 1..237: note = Methylobacterium dankookense
  REGION 1..237: note = tr|A0A564G0J1|A0A564G0J1_9RHIZ 7-cyano-7-deazaguanine synthase OS=Methylobacterium dankookense OX=560405 GN=queC_1 PE=3 SV=1
MSEVGEDCALVLFSGGQDSATCLAWALDRYARVETLGFDYGQRHRIELEARGRLRAGLAKLVPAWGRRLGPDHTLALDALGQVSDTALTREAEIGYAASGLPNTFVPGRNLVFLTFAAALAYRRGLRHIVGGMCETDFSGYPDCRDDTIKAMQVALNLGMDRRFVLHTPLMWLDKAQTWKLAEDLGGPGLVDLVVEESHTCYVGERGTRHDWGYGCGTCPACRLREQGYARYVAAEA

SEQ ID NO: 39685 - protein, 210 aa, unidentified
  source 1..210: note = Methylobacterium dankookense
  REGION 1..210: note = tr|A0A564G398|A0A564G398_9RHIZ 7-cyano-7-deazaguanine synthase OS=Methylobacterium dankookense OX=560405 GN=queC_2 PE=3 SV=1
MRALLLSGGLDSAAIAAWQRPDVCLTVDYGQRPAEGEIAAAASVARELGLRHEVARVDLSALGLGPLAGRAASDLARAPEWWPYRNQMLVTLAGMRFVAEGLTEILLGAIRTDVHADGRAPFLRTVDRLMHLQEGGVRVMAPARHLSALELVRRSGIPRSLLGATFSCHVMEYACGRCRGCEKHQETLARIDGGRARADTPAQASAATGG

SEQ ID NO: 39686 - protein, 235 aa, unidentified
  source 1..235: note = Methylobacterium frigidaeris
  REGION 1..235: note = tr|A0A2G8ME75|A0A2G8ME75_9RHIZ 7-cyano-7-deazaguanine synthase OS=Methylobacterium frigidaeris OX=2038277 GN=queC PE=3 SV=1
MTSPDGALVLFSGGQDSTTCLAWALDRFSHVETLGFDYGQRHRIELDCRETLRAEISRIVPAFAERLGDDHTLSLDALGEVSETALTRETAIAMEAGGLPNTFVPGRNLVFLTFAAALAYRRGLRHIVGGMCETDFSGYPDCRDDTIKALQVALNLGMERRFVVHTPLMWIDKAETWRLARDLGGEALVDLIVRESHTCYLGERGALHPWGHGCGTCPACSLRAAGYARFRAEDA

SEQ ID NO: 39687 - protein, 240 aa, unidentified
  source 1..240: note = Methylobacterium gnaphalii
  REGION 1..240: note = tr|A0A512JLT8|A0A512JLT8_9RHIZ 7-cyano-7-deazaguanine synthase OS=Methylobacterium gnaphalii OX=1010610 GN=queC PE=3 SV=1
MTATEPGDDGALVLFSGGQDSTTCLAWALARFPRVETLGFDYGQRHRIELDCRDRLRSELGRIDEGWERRLGPDHTVDLATLGAVSETALTRDTEIAMAADGLPNTFVPGRNLVFLTFAAALAYRRGLRHIVGGMCETDYSGYPDCRDDTIKALQVALNLGMERRFVLHTPLMWLDKAATWGLADELGGERLVDLIVEDSHTCYLGERGERHDWGYGCGTCPACALRAKGFAAYRDRSRN

SEQ ID NO: 39688 - protein, 235 aa, Methylobacterium gossipiicola
  REGION 1..235: note = tr|A0A1I2R9C5|A0A1I2R9C5_9RHIZ 7-cyano-7-deazaguanine synthase OS=Methylobacterium gossipiicola OX=582675 GN=queC PE=3 SV=1
MSDNRALVLFSGGQDSATCLAWALDRFAKVETLGFDYGQRHRIELNGRAALRAGMTALNPAWGRRLGPDHTLDLAALGAVSDTALTRDTQIAFAADGLPNTFVPGRNLLFLTFAAALAYRRGLRHIVGGMCETDYSGYPDCRDDTIKALQVALNLGMDRRFVLHTPLMWIDKANTWRLAEELGGRPLVDLIVEASHTCYLGERGARHAWGYGCGACPACELRAKGYSAFVADTTG

SEQ ID NO: 39689 - protein, 240 aa, unidentified
  source 1..240: note = Methylobacterium haplocladii
  REGION 1..240: note = tr|A0A512IJF2|A0A512IJF2_9RHIZ 7-cyano-7-deazaguanine synthase OS=Methylobacterium haplocladii OX=1176176 GN=queC PE=3 SV=1
MTATDYGDDGALVLFSGGQDSTTCLAWALDRFPRVETLGFDYGQRHRIELDCRARLRKGLTGLDQTWWRRLGRDHTIDLAALGEVSDTALTRETEIAMEADGLPNTFVPGRNLVFLTFAAALAYRRGLRHIVGGMCETDYSGYPDCRDDTIKALQVALNLGMQRRFVLHTPLMWLDKAATWALAEDLGGKALVDLVVEGSHTCYLGERGERHDWGYGCGTCPACELRAKGFARYANHSGI

SEQ ID NO: 39690 - protein, 241 aa, unidentified
  source 1..241: note = Methylobacterium indicum
  REGION 1..241: note = tr|A0A147FKW5|A0A147FKW5_9RHIZ 7-cyano-7-deazaguanine synthase OS=Methylobacterium indicum OX=1775910 GN=queC PE=3 SV=1
MPSPARTTSPDGALVLFSGGQDSATCLAWALERFGHVETLGFDYGQRHRIELDCRASLRAEMTRIVPAFAGRLGEDHTLSLAALGEVSETALTRETAIAMESGGLPNTFVPGRNLVFLTFAAALAYRRGLRHIVGGMCETDFSGYPDCRDDTIKALQVALNLGMERRFVLHTPLMWIDKAETWRLARDLGGEALVDLIVRESHTCYLGERGALHPWGHGCGTCPACSLRAAGYARFRAEDA

SEQ ID NO: 39691 - protein, 241 aa, unidentified
  source 1..241: note = Methylobacterium indicum
  REGION 1..241: note = tr|A0A0J6QTN9|A0A0J6QTN9_9RHIZ 7-cyano-7-deazaguanine synthase OS=Methylobacterium indicum OX=1775910 GN=queC PE=3 SV=1
MPSPARTTSPDGALVLFSGGQDSATCLAWALERFGHVETLGFDYGQRHRIELDCRASLRAEMTRIVPAFAGRLGEDHTLSLAALGEVSETALTRETAIAMEAGGLPNTFVPGRNLVFLTFAAALAYRRGLRHIVGGMCETDFSGYPDCRDDTIKALQVALNLGMERRFVLHTPLMWIDKAETWRLARDLGGEALVDLIVRESHTCYLGERGALHPWGHGCGTCPACSLRAAGYARFRAEDA

SEQ ID NO: 39692 - protein, 239 aa, Methylobacterium mesophilicum
  REGION 1..239: note = tr|M7XZ27|M7XZ27_9RHIZ 7-cyano-7-deazaguanine synthase OS=Methylobacterium mesophilicum SR1.6/6; OX = 908290 GN=queC PE=3 SV=1
MANETVIAGDRAALVLFSGGQDSATCLAWALERFDHVETLGFDYGQRHRVELDRRAALREGTTGLNPVWAARLGDDHTLALDALGQVSETALTREAAIGYEASGLPNTFVPGRNLVFLTFAAALAYRRGLRHIVGGMCETDYSGYPDCRDDTIKALQVALNLGMERRFVLHTPLMWLDKAQTWGLAENLGGGALVDLIVEESHTCYLGERGQRHPWGYGCGTCPACRLRADGYARFTAA

SEQ ID NO: 39693 - protein, 233 aa, Methylobacterium nodulans
  REGION 1..233: note = tr|B8IG26|B8IG26_METNO 7-cyano-7-deazaguanine synthase OS=Methylobacterium nodulans (strain LMG 21967 / CNCM I-2342 / ORS 2060) OX=460265 GN=queC PE=3 SV=1
METSEGALVLFSGGQDSTTCLAWALERFGRVETLGFDYGQRHRVELDCRDRLRAGLAALDPAWAARLGPDHTLPLGVLGEISETALTRDSAIALAETGLPNTFVPGRNLVFLTFAAALAYRRGLRHIVGGMCETDYSGYPDCRDDTIKALQVALNLGMERRFVLHTPLMWIDKAATWRLAEALGGEALVDLIVEDSHTCYRGERGERHAWGYGCGTCPACELRAAGYARFRAA

SEQ ID NO: 39694 - protein, 251 aa, Methylobacterium nodulans
  REGION 1..251: note = tr|B8IAM4|B8IAM4_METNO 7-cyano-7-deazaguanine synthase OS=Methylobacterium nodulans (strain LMG 21967 / CNCM I-2342 / ORS 2060) OX=460265 GN=queC PE=3 SV=1
MSRALVVLSGGQDSTTCLFWAKQQFDEVHALTFDYGQRHARELEAAVTVAKMAGVASHEVLKLPDLLRSTSPLVDPGAALEQYASYEQMEETIGDRVELTFVPMRNALFLTIAANRAVALDCFNLVTGVCQQDNANYPDCRLDFVLAQQGTINQALGVGRFRIHTPLMHLTKAETVKLAGSLPGCWEALAYSHTAYDGAYPPTGRDHATLLRAEGFRQAGLPDPLVVRAYREGLMPLPETDNYDGVRASAA

SEQ ID NO: 39695 - protein, 239 aa, Methylobacterium organophilum
  REGION 1..239: note = tr|A0A2U1EWN4|A0A2U1EWN4_METOR 7-cyano-7-deazaguanine synthase OS=Methylobacterium organophilum OX=410 GN=queC PE=3 SV=1
MANDPVGPGDRAALVLFSGGQDSATCLAWALDRFDHVETLGFDYGQRHRVELDRRAALRAGTTALDPAWAARLGDDHTLALDALGQVSETALTREAAIGYEASGLPNTFVPGRNLVFLTFAAALAYRRGLRHVVGGMCETDYSGYPDCRDDTIKALQVALNLGMERRFVLHTPLMWLDKAQTWELAESLGGRALVDLIVEESHTCYLGERGQRHPWGYGCGTCPACRLRADGYARFTAA

SEQ ID NO: 39696 - protein, 225 aa, Methylobacterium oryzae
  REGION 1..225: note = tr|A0A089NWB6|A0A089NWB6_9RHIZ 7-cyano-7-deazaguanine synthase OS=Methylobacterium oryzae CBMB20 OX=693986 GN=queC PE=3 SV=1
MLFSGGQDSATCLAWALDRFDHVETLGFDYGQRHRVELDRRAALRAGTTDLNPDWAPRLGADHTLALDALGQVSETALTREAAIGYEASGLPNTFVPGRNLVFLTFAAALAYRRGLRHVVGGMCETDYSGYPDCRDDTIKALQVALNLGMERRFVLHTPLMWLDKAQTWELAETLGGRALVDLIVEESHTCYLGERGQRHPWGYGCGTCPACRLRADGYARFTAA

SEQ ID NO: 39697 - protein, 237 aa, unidentified
  source 1..237: note = Methylobacterium oxalidis
  REGION 1..237: note = tr|A0A512IX00|A0A512IX00_9RHIZ 7-cyano-7-deazaguanine synthase OS=Methylobacterium oxalidis OX=944322 GN=queC PE=3 SV=1
MDAGGDGALVLFSGGQDSTTCLAWALDRFPRVETLGFDYGQRHRVELACRDRLRGGLARIEPAWGARLGPDHTLSLDALGAVSETALTREAEIGYEAGGLPNTFVPGRNLVFLTFAAALAYRRGLRRIVGGMCETDYSGYPDCRDDTVKALQVALNLGMERRFLLETPLMWIDKAETWRLAERLGGRALVDLVVEDTHTCYLGERGARHAWGYGCGTCPACDLRAKGYARFRAEAAD

SEQ ID NO: 39698 - protein, 241 aa, unidentified
  source 1..241: note = Methylobacterium phyllostachyos
  REGION 1..241: note = tr|A0A1G9Y1A8|A0A1G9Y1A8_9RHIZ 7-cyano-7-deazaguanine synthase OS=Methylobacterium phyllostachyos OX=582672 GN=queC PE=3 SV=1
MATDMATDMAGDRSALVLFSGGQDSATCLAWALDRFAHVETLGFDYGQRHRVELDRRAALRAGLVGLVPAWAGRLGEDHTVTLDALGEISETALTREAAIGYEESGLPNTFVPGRNLVFLTFAAALAYRRGLRHVVGGMCETDYSGYPDCRDDTIKALQVALNLGMERRFVLHTPLMWLDKAQTWSLAETLGGRALVDLIVEESHTCYLGERGQRHAWGYGCGTCPACRLRADGFARFSAA

SEQ ID NO: 39699 - protein, 235 aa, Methylobacterium platani
  REGION 1..235: note = tr|A0A179S1G8|A0A179S1G8_9RHIZ 7-cyano-7-deazaguanine synthase OS=Methylobacterium platani OX=427683 GN=queC PE=3 SV=1
MTSPDGALVLFSGGQDSATCLAWALDRFAHVETLGFDYGQRHRIELACRDTLRAELTRIVPAFAGRLGEDHTLSLDALGAVSETALTRETAIAMEEGGLPNTFVPGRNLVFLTFAAALAYRRGLRHIVGGMCETDFSGYPDCRDDTIKALQVALNLGMERRFVLHTPLMWIDKAETWRLARDLGGEALVDLIVRESHTCYLGERGAMHEWGHGCGTCPACSLRAAGYARFRAEDA

SEQ ID NO: 39700 - protein, 241 aa, unidentified
  source 1..241: note = Methylobacterium pseudosasicola
  REGION 1..241: note = tr|A0A1I4HXX8|A0A1I4HXX8_9RHIZ 7-cyano-7-deazaguanine synthase OS=Methylobacterium pseudosasicola OX=582667 GN=queC PE=3 SV=1
MATDAAIIGDRSALVLFSGGQDSATCLAWALDRFQHVETLGFDYGQRHRVELERRAVLRDGMGLVQPAWATRLGEDHTIALDALGQISETALTRDAEIGFEESGLPNTFVPGRNLVFLTFAAALAYRRGIRHVVGGMCETDYSGYPDCRDDTIKALQVALNLGMERRFVLHTPLMWLDKAQTWGLAEDLGGRPLVELIVEDSHTCYLGERGARHAWGYGCGTCPACRLRADGFARFTASAA

SEQ ID NO: 39701 - protein, 239 aa, Methylobacterium radiotolerans; identical to SEQ ID NO: 39695
  REGION 1..239: note = tr|A0A438LFP4|A0A438LFP4_9RHIZ 7-cyano-7-deazaguanine synthase OS=Methylobacterium radiotolerans OX=31998 GN=queC PE=3 SV=1

SEQ ID NO: 39702 - protein, 239 aa, Methylobacterium radiotolerans; identical to SEQ ID NO: 39695
  REGION 1..239: note = tr|B1LTL6|B1LTL6_METRJ 7-cyano-7-deazaguanine synthase OS=Methylobacterium radiotolerans (strain ATCC 27329 / DSM 1819 / JCM 2831 / NBRC 15690 / NCIMB 10815 / 0-1) O X=426355 GN=queC PE=3 SV=1

SEQ ID NO: 39703 - protein, 235 aa, Methylobacterium sp.
  REGION 1..235: note = tr|A0A3S2VSV2|A0A3S2VSV2_9RHIZ 7-cyano-7-deazaguanine synthase OS=Methylobacterium sp. TER-1 OX=2499852 GN=queC PE=3 SV=1
MHGNDGALVLFSGGQDSTTCLAWALDRFARVETLGFDYGQRHRVELDCRDRLRTGLAGLNPAWAERLGDDHTLSLDALGQVSDTALTRDTEISFESGGLPNTFVPGRNLVFLTFAASLAYRRGLRHIVGGMCETDFSGYPDCRDDTIKALQVALNLGMERRFVLHTPLMWIDKAETWRLARSLGGEALVDLIVEDSHTCYLGERGAPHPWGHGCGACPACALRAAGYARFRATAA

SEQ ID NO: 39704 - protein, 236 aa, Methylobacterium sp.
  REGION 1..236: note = tr|A0A5C8UJZ9|A0A5C8UJZ9_9RHIZ 7-cyano-7-deazaguanine synthase OS=Methylobacterium sp. WL19 OX=2603896 GN=queC PE=3 SV=1
MSDDGALVLFSGGQDSTTCLAWALERFPRVETLGFDYNQRHRVELDGRAPLRETMAAMNPAWFRRLGRDHTIALDALGKVSETALTRSTEIAFEAGGLPNTFVPGRNIIFLTFAAALAYRRSLGHIVGGMCETDYSGYPDCRDDTIKALQVALNLGMDRRFVLHTPLMWIDKAETWKMAKDLGGQPLVDLIVEDTHTCYLGTRGERHAWGYGCGTCPACDLRAKGHAKFVAEAVTE

SEQ ID NO: 39705 - protein, 235 aa, unidentified
  source 1..235: note = Methylobacterium tarhaniae
  REGION 1..235: note = tr|A0A0J6VHI6|A0A0J6VHI6_9RHIZ 7-cyano-7-deazaguanine synthase OS=Methylobacterium tarhaniae OX=1187852 GN=queC PE=3 SV=1
MTSPDGALVLFSGGQDSATCLAWALDRFAHVETLGFDYGQRHRIELDCRASLRAEMTRIVPAFAGRLGEDHTLSLSALGEVSETALTRETAIAMEAGGLPNTFVPGRNLVFLTFAAALAYRRGLRHIVGGMCETDFSGYPDCRDDTIKALQVALNLGMDRRFVLHTPLMWIDKAETWRLARDLGGEALVDLIVRESHTCYLGERGALHAWGHGCGACPACSLRAAGYARFRAEDA

SEQ ID NO: 39706 - protein, 227 aa, unidentified
  source 1..227: note = Methylocaldum marinum
  REGION 1..227: note = tr|A0A250L073|A0A250L073_9GAMM 7-cyano-7-deazaguanine synthase OS=Methylocaldum marinum; OX = 1432792 GN=queC PE=3 SV=1
MKKAVVLLSGGLDSATTVAIAKSQGYACYALSFDYGQRHSAELDAARRVAQSVGVIEHKIIRIGLGEFGGSALTDTRIAVPETPQDGIPVTYVPARNTVFLAFALGWAEVLGSTDIFIGVNAVDYSGYPDCRPEYIEAFEHLANLATKAGVEGNRFKVHAPLIALKKVEIIRIGTDLGIDYALTVSCYSADDEGRACGLCDSCRFRKAGFAEAGAADPTIYRCEQSR

SEQ ID NO: 39707 - protein, 226 aa, Methylocaldum sp.
  REGION 1..226: note = tr|A0A4R7AFJ9|A0A4R7AFJ9_9GAMM 7-cyano-7-deazaguanine synthase OS=Methylocaldum sp. 0917; OX = 2485163 GN=queC PE=3 SV=1
MTTMKKAVVLLSGGLDSATTLAIAKSQGYECYALSFDYGQRHGAELHAARRVAQSCGAIEHKIIRIGLGEFGGSALTDTRIAVPETPQEGIPVTYVPARNTVFLAFALGWAEVLGSADIFIGVNAVDYSGYPDCRPQYIEAFERLANLATKAGVEGKHFKVHAPLITLKKAEIIRIGTDLGIDYALTVSCYSADDEGRACGSCDSCRFRKIGFAEAGISDPTRYKS

SEQ ID NO: 39708 - protein, 239 aa, unidentified
  source 1..239: note = Methylocapsa palsarum
  REGION 1..239: note = tr|A0A1I3W2G7|A0A1I3W2G7_9RHIZ 7-cyano-7-deazaguanine synthase OS=Methylocapsa palsarum; OX = 1612308 GN=queC PE=3 SV=1
MTTTGATKKVLVLFSGGQDSTTCLALALDRYDEVETIGFDYKQRHAVELGQREILRQALTRDFPAWRGRLGFDHLVRIEALAEMSQSAMTHDIEITLNEQGLPNTFVPGRNLLFLTFAAALAYRRGLTYIVAGMCETDYSGYPDCRDDAIKAMQIALNLGMEARFVMETPLMRLDKAATWRLAETLGGQKLVELIVEATHTCYLGDRRVRHDWGYGCGACPACELRAKGWREFKASPSA

SEQ ID NO: 39709 - protein, 242 aa, unidentified
  source 1..242: note = Methyloceanibacter caenitepidi
  REGION 1..242: note = tr|A0A0A8K4U4|A0A0A8K4U4_9RHIZ 7-cyano-7-deazaguanine synthase OS=Methyloceanibacter caenitepidi OX=1384459 GN=queC PE=3 SV=1
MASPPADEPAGALVLFSGGQDSTTCLGQALDRYARVETVGFNYGQRHGVELECRSRVRAAIAEGFPDWGARLGPDHMIDISSFGAIGDTALTSGAEIVMTESGLPSTFVPGRNLVFFIYAAALGYRRGLNVLVGGMCETDYSGYPDCRDETLKALQTAIRLGTEIPFSIETPLMWLSKAETWALADTLGGSAFVDLIREETHTCYKGDRATKHDWGFGCGTCPACDLRAKGYREWREMAQAG

SEQ ID NO: 39710 - protein, 234 aa, unidentified
  source 1..234: note = Methyloceanibacter marginalis
  REGION 1..234: note = tr|A0A1E3WAP7|A0A1E3WAP7_9RHIZ 7-cyano-7-deazaguanine synthase OS=Methyloceanibacter marginalis OX=1774971 GN=queC PE=3 SV=1
MTADGALVLFSGGQDSTVCLAYALDRYRRVETVGFDYGQRHGIELDCRKRVREEIVHRFPQWEDRLGPDHMLDLRSFGAIGETALTTNAEIVILESGLPSSFVPGRNLAFFVYAAALGYRRGFTVLVGGMCETDYSGYPDCRDATLRALQEAIRLGTNIDFAIETPLMSRSKAETWALAHDLGGDALVTLIVERTHTCYKGARGTRYDWGYGCGTCPACELRAKGYWEWRERVG

SEQ ID NO: 39711 - protein, 243 aa, unidentified
  source 1..243: note = Methyloceanibacter methanicus
  REGION 1..243: note = tr|A0A1E3W532|A0A1E3W532_9RHIZ 7-cyano-7-deazaguanine synthase OS=Methyloceanibacter methanicus OX=1774968 GN=queC PE=3 SV=1
MAAPSSDVPAGALVLFSGGQDSTTCLAHALEHYARVETAGFDYGQRHRIELECRARIRAALQERFPAWAGRLGPDHMLDISSFGAIGETSLTTQSEIVMLDSGLPSTFVPGRNLVFFVYAAALAYRRGLDVLVGGMCETDYSGYPDCRDATLKALQEAIRLGTEVPFTIETPLMWLSKAQTWALAHELGGDALVELVRNDTHTCYEGDHTTLHDWGYGCGTCPACDLRAKGYRAWRALGAQNG

SEQ ID NO: 39712 - protein, 243 aa, unidentified
  source 1..243: note = Methyloceanibacter sp.
  REGION 1..243: note = tr|A0A353IR00|A0A353IR00_9RHIZ 7-cyano-7-deazaguanine synthase OS=Methyloceanibacter sp.; OX = 1965321 GN=queC PE=3 SV=1
MAAPSSSEPAGALVLFSGGQDSTICLGHALERYARVETVGFNYGQRHLVELECRTRVLAALRERFPAWGARVGADHMIDLSSFGAIGETALTSEAEIVMTESGLPSTFVPGRNLAFFVHAAALGHRRGLTVLVGGMCEADYSGYPDCRDETLRTLQEALRLATEVPFSIETPLMWLSKAQSWGLAEDLGGAAFIDLIREKTHTCYVGDHETKHDWGYGCGTCPACELRAKGYEDWRGAAAKPS

SEQ ID NO: 39713 - protein, 236 aa, Methylocella silvestris
  REGION 1..236: note = tr|B8EP13|B8EP13_METSB 7-cyano-7-deazaguanine synthase OS=Methylocella silvestris (strain DSM 15510 / CIP 108128 / LMG 27833 / NCIMB 13906 / BL2) OX=395965; GN = queC P E=3 SV=1
MPDRPARRGALTLFSGGQDSTTCLAYALDRYDHVETIGFDYDQRHRIELDQRGKIRDALLRDFPAWKDKLGEDHLVRIGALAEIATTAMTHDVEIAFDANGLPNTFVPGRNLLFLTFAGALAYRRGLTQIIGGMCETDFSGYPDCRDDTVKAMQIALNLGMDTRFNVETPLMWLDKAATWRLAERLGGKALIAIILEETHTCYLGERGKRHNWGYGCGECPACQLRAKGWREYRNS

SEQ ID NO: 39714 - protein, 241 aa, Methylocella silvestris
  REGION 1..241: note = tr|A0A2J7TJJ0|A0A2J7TJJ0_METSI 7-cyano-7-deazaguanine synthase OS=Methylocella silvestris; OX = 199596 GN=queC PE=3 SV=1
MPDRPARRGALTLFSGGQDSTTCLAYALDRYDYVETIGFDYNQRHRIELDQRGKIRDALLRDFPAWRDKLGEDHLVRIGALAEIATTAMTHDVEIAFNANGLPNTFVPGRNLVFLTFAGAVAHRRGLTQIIGGMCETDFSGYPDCRDDSVKAMQLALNLGMDSRFNIETPLMWLDKAETWRLAERLGGNALIAIILEETHTCYLGERGQRHDWGYGCGQCPACQLRAKGWGEYRSIAISRR

SEQ ID NO: 39715 - protein, 236 aa, Methylocella tundrae
  REGION 1..236: note = tr|A0A4U8YX92|A0A4U8YX92_METTU 7-cyano-7-deazaguanine synthase OS=Methylocella tundrae; OX = 227605 GN=queC PE=3 SV=1
MSEKPLSRKALTLFSGGQDSTTCLAYALERYDHVETIGFDYNQRHRIELSQRAVIRDALTREFPAWREKLGEDHLVSIAALAEISTTAMTHDVAIVMDERGLPNTFVPGRNLMFLTFAGALAYRRGLTRIVAGMCETDFSGYPDCRDDSVKAMQLALNLGMDARFNVETPLMWLDKADTWRLAERLGGKPLIAIILEDTHTCYLGERGVRHDWGYGCGHCPACELRAKGWREYASG

SEQ ID NO: 39716 - protein, 44 aa, unidentified
  source 1..44: note = Methylococcaceae bacterium
  REGION 1..44: note = tr|A0A257MZR8|A0A257MZR8_9GAMM 7-cyano-7-deazaguanine synthase (Fragment); OS = Methylococcaceae bacterium NSM2-1 OX=1917482; GN = CG441_1446 PE=3 SV=1
MQKKAIVLLSGGLDSITVLALAKQQGYTCYALSFDYGQRHNAEL

SEQ ID NO: 39717 - protein, 242 aa, unidentified
  source 1..242: note = Methylococcaceae bacterium
  REGION 1..242: note = tr|A0A1Z9UC05|A0A1Z9UC05_9GAMM 7-cyano-7-deazaguanine synthase OS=Methylococcaceae bacterium TMED282 OX=1986758 GN=queC PE=3 SV=1
  VARIANT 10: note = Xaa can be any naturally occurring amino acid
  VARIANT 192: note = Xaa can be any naturally occurring amino acid
  VARIANT 206: note = Xaa can be any naturally occurring amino acid
  VARIANT 221: note = Xaa can be any naturally occurring amino acid
  VARIANT 233: note = Xaa can be any naturally occurring amino acid
  VARIANT 238: note = Xaa can be any naturally occurring amino acid
MGGHLKPTGXRSALVLFSGGQDSTICLAWALANFDLVSTISFSYGQRHQVELDCCARIIEKFKKIVPQWSKKLSGQHLINLDFIPAISNSALTSEMEIEMTNSGLPNTFVPGRNIFFLSAAASLAYRSGILNLVGGMCETDYSGYPDCREEFIDSLETSIGLGMDMKFKIHTPLMFLNKAQSWLVAENLGGXELIDVIVEETHSCXRGVRESRYEWGYGCXKCPACELRKVGXGQYKXGVAI

SEQ ID NO: 39718 - protein, 224 aa, unidentified
  source 1..224: note = Methylococcales bacterium
  REGION 1..224: note = tr|A0A418RT21|A0A418RT21_9GAMM 7-cyano-7-deazaguanine synthase OS=Methylococcales bacterium OX=2304002 GN=queC PE=3 SV=1
MRKKAIILLSGGLDSITVLALAKQQGYDCYALSFDYGQRHNAELVAAAQIAADYQVKDYKVIKLGLGSIGGSALTDSHIDVPNTPQTGIPVTYVPARNTIFLSFALGWAEVLHIQDIFIGVNAVDYSGYPDCRPEFIKAFQQLANLATRSSVEGEAFTIHTPLIALSKAEIIKQGIALGVNYQRTVSCYSADVNGHACGVCDACRIRKAGFAEANVADPTIYAH

SEQ ID NO: 39719 - protein, 225 aa, unidentified
  source 1..225: note = Methylococcales bacterium
  REGION 1..225: note = tr|A0A418RGL3|A0A418RGL3_9GAMM 7-cyano-7-deazaguanine synthase OS=Methylococcales bacterium OX=2304002 GN=queC PE=3 SV=1
MQKKAIILLSGGLDSITVLALAKQQGYQCYALSFDYGQRHNAELVAAAQIAKDYQVIDHKIIKLGLGSIGGSALTDENIAVPNKLEAGIPVTYVPARNTIFLSFALGWAEVLKLSDIFIGVNAVDYSGYPDCRPEFISAFQKLANLATKAGVDGDSFHIHTPLISLSKAEIIKQGIALGVDYRKTVSCYSADEQGEACGVCDACRIRISGFLEADEEDPTRYQKK

SEQ ID NO: 39720 - protein, 223 aa, Methylococcus capsulatus
  REGION 1..223: note = sp|Q609K0|QUEC_METCA 7-cyano-7-deazaguanine synthase; OS = Methylococcus capsulatus (strain ATCC 33009 / NCIMB 11132 / Bath) OX=243233 GN=queC PE=3 SV=1
MKPAVVLLSGGLDSATTLAIARREGFACHAMSFDYGQRHGAELKAARRLAQSLGAIEHKTVHIGLDAIGGSALTDLRIAVPDHPQNGIPVTYVPARNTVFLSFALGWAEVLGALDIFIGVNAVDYSGYPDCRPEFIRAFEQLANLATKVGVEGGRFRIHTPLIDLSKADIIRTGTALGIDYAMTVSCYAADAEGLACGVCDSCRLRRQGFEQAGIADPTRYRS

SEQ ID NO: 39721 - protein, 227 aa, Methylococcus sp.
  REGION 1..227: note = tr|A0A432RN23|A0A432RN23_9GAMM 7-cyano-7-deazaguanine synthase OS=Methylococcus sp.; OX = 39769 GN=queC PE=3 SV=1
MKLGEKPKAVILLSGGLDSITALVLARKQGFECHALSFDYGQRHNAELVAARRIAAHYSLIEHRVMQLGLGSIGGSALTDESIDVPQEAAEGIPVTYVPARNTVFLALALGWAEVLEAHDIFVGVNAVDYSGYPDCRPEYIEAFQAMANLATRAGVEGAAIRINAPLIQMSKADIVRMGTEFGVDYSMTVSCYAADSEGRGCRSCDACRLRSEGFQSAGIHDPTRYR

SEQ ID NO: 39722 - protein, 244 aa, unidentified
  source 1..244: note = Methylocystaceae bacterium
  REGION 1..244: note = tr|A0A395CVZ5|A0A395CVZ5_9RHIZ 7-cyano-7-deazaguanine synthase OS=Methylocystaceae bacterium OX=2052174 GN=queC PE=3 SV=1
MTDAIASLQTAAGALVLFSGGQDSTTCLAWALARFSHVETIGFDYGQRHRVELGQRAALRDGLAHISPLWQERLGADHTIGVEALGAISETALTRDAEIAFDAQGLPNTFVPGRNILFLTFAAALAYRRGLEHIVAGMCETDYSGYPDCRDETIRAVGTALDLGMGRHFSIHTPLMWIDKAATWSLAEELGGEPLVRLVVEESHTCYLGERGARFDWGYGCGECPACRLRAAGWEKYAAGRPKK

SEQ ID NO: 39723 - protein, 247 aa, unidentified
  source 1..247: note = Methylocystaceae bacterium
  REGION 1..247: note = tr|A0A5C9D6D8|A0A5C9D6D8_9RHIZ 7-cyano-7-deazaguanine synthase OS=Methylocystaceae bacterium OX=2052174 GN=queC PE=3 SV=1
MTNDLPTHSSAALVLFSGGQDSTTCLAWALSRFERVETVGFDYGQRHRVELSRRAGLREGLVRLSPLWAERLGEDRTISIEALGAISETALTRNAEIAFAADGLPNTFVPGRNLLFLTFAAALAYRRGVNDLVGGMCETDYSGYPDCRDQTIRAMAQALSLGMDRSMNIHTPLMWIDKAATWRLAESLGGEALVRLIVEETHTCYLGERGRRFDWGYGCGECPACKLRAHGWENYRAGQTRAAAETV

SEQ ID NO: 39724 - protein, 240 aa, unidentified
  source 1..240: note = Methylocystis bryophila
  REGION 1..240: note = tr|A0A1W6MUW8|A0A1W6MUW8_9RHIZ 7-cyano-7-deazaguanine synthase OS=Methylocystis bryophila; OX = 655015 GN=queC PE=3 SV=1
MSEPSTPAPSSGALVLFSGGQDSTVCLALALSRFERVETIGFDYGQRHAVELTQRSRIRAGLSDLFPEWRARLGEDHSLAIPTLNEISDTALTRDAEIVFSADGLPNTFVPGRNILFLTFAAALGYRRHIGTLVGGMCETDYSGYPDCREATIKATEQALSLGLDRPMEILTPLMHIDKAATWRLAEELGGEALVALVVEESHSCYLGDRSRRFDWGYGCGECPACTLRAAGWERYRAGR

SEQ ID NO: 39725 - protein, 250 aa, Methylocystis heyeri
  REGION 1..250: note = tr|A0A4S4MH71|A0A4S4MH71_9RHIZ 7-cyano-7-deazaguanine synthase OS=Methylocystis heyeri; OX = 391905 GN=queC PE=3 SV=1
MNSETTPTNAKGDAALVLFSGGQDSTTCLAYALKRFGRVETIGFDYGQRHAVELDRREVLRSGLAAMSPLWRERLGADHVVSLPALGEISQTALTRETEIAFNETGLPNTFVPGRNIVFLTFAAALAYRRGVSHLVGGMCETDYSGYPDCRDATIRATENALSLGMDREFAIHTPLMWIDKADTWRLAEKLGGEALVRLIIEETHTCYLGERGRRFDWGYGCGECPACRLRAAGWEKYAREKAASPGLRP

SEQ ID NO: 39726 - protein, 247 aa, Methylocystis hirsuta
  REGION 1..247: note = tr|A0A3M9XLR3|A0A3M9XLR3_9RHIZ 7-cyano-7-deazaguanine synthase OS=Methylocystis hirsuta; OX = 369798 GN=queC PE=3 SV=1
MTNNLSTHSAAALVLFSGGQDSTTCLAWALSRFDRVETVGFDYGQRHRVELSRRAGLRDGLIRLSPLWAERLGEDRTILIEALGAISETALTRDAEIAFAADGLPNTFVPGRNLLFLTFAAALAYRRGIADLVGGMCETDYSGYPDCRDQTIRAMAQALSLGMDRSMNIHTPLMWIDKAATWRLAESLGGEPLVRLIVEETHTCYLGERGRRFDWGYGCGECPACKLRAHGWETYRAGETSAAAETF

SEQ ID NO: 39727 - protein, 247 aa, Methylocystis rosea
  REGION 1..247: note = tr|A0A3G8M198|A0A3G8M198_9RHIZ 7-cyano-7-deazaguanine synthase OS=Methylocystis rosea; OX = 173366 GN=queC PE=3 SV=1
MTNDLPTQPAAALVLFSGGQDSTTCLAWALSRFERVETVGFDYGQRHRVELSRRAGLRDGLIRLSPLWAERLGEDRTISIEALGAISETALTRHAEIAFAADGLPNTFVPGRNLLFLTFAAALAYRRGVADLVGGMCETDYSGYPDCRDQTIRAMAQALSLGMDRSIAIHTPLMWIDKAATWRLAESLGGEALVRLIVEETHTCYLGERGRRFDWGYGCGECPACKLRAHGWENYRAGQTSAAAETF

SEQ ID NO: 39728 - protein, 68 aa, Methylocystis sp.
  REGION 1..68: note = tr|A0A2P5MCB1|A0A2P5MCB1_9RHIZ 7-cyano-7-deazaguanine synthase (Fragment); OS = Methylocystis sp. OX=1911079 GN=CTY30_03315 PE=4 SV=1
ATWRLAESLGGEALVRLIVEETHTCYLGERGRRFDWGYGCGECPACKLRAHGWEKYRAGQTSAPAEPF

SEQ ID NO: 39729 - protein, 244 aa, Methylocystis sp.
  REGION 1..244: note = tr|J7QII4|J7QII4_METSZ 7-cyano-7-deazaguanine synthase OS=Methylocystis sp. (strain SC2) OX=187303; GN = queC PE=3 SV=1
MTNDLPTHASAALVLFSGGQDSTTCLAWALSRFERVETVGFDYGQRHRVELSRRAGLREGLARLSPLWAERLGEDSTISIEALGAISETALTRNAEIAFAADGLPNTFVPGRNLLFLTFAAALAYRRGIADLVGGMCETDYSGYPDCRDETIRAMAQALSLGMDRSMNIHTPLMWIDKAATWRLAESLGGEPLVGLIVEETHTCYLGERGRHFDWGYGCGECPACKLRAHGWEKFRAESVRATA

SEQ ID NO: 39730 - protein, 224 aa, unidentified
  source 1..224: note = Methyloglobulus morosus
  REGION 1..224: note = tr|V5BH91|V5BH91_9GAMM 7-cyano-7-deazaguanine synthase OS=Methyloglobulus morosus KoM1 OX=1116472; GN = queC PE=3 SV=1
MSKNAIILLSGGLDSITVLALAKQQGFGCYALSFDYGQRHNAELNAASEIAKLYQVIDHKIINLGLGSIGGSALTDQNIQVPDKLEEGIPVTYVPARNTLFLAFALGWAEVLKITDIFIGVNAIDYSGYPDCRPEFINAFQHLANLATKAGAEGEHFTIHTPLISLSKAAIIKLGVELGVDYAPTVSCYSANSQGQACRVCDACRLRMIGFAEAGIPDPTRYQQ

SEQ ID NO: 39731 - protein, 240 aa, unidentified
  source 1..240: note = Methyloligella halotolerans
  REGION 1..240: note = tr|A0A1E2S1T3|A0A1E2S1T3_9RHIZ 7-cyano-7-deazaguanine synthase OS=Methyloligella halotolerans OX=1177755 GN=queC PE=3 SV=1
MAYNSHRALVLFSGGQDSTVCLAHALSRYTHVETVGFDYGQRHAVELECRQTVLDRLREAFPDWARKLGADHMLDLSGFGAISDTALTGQSEIVMLESGLPSTFVPGRNLVFFTYASALAYRRDLRVLVGGMCETDYSGYPDCRHETLEALERALRLGTEFDFAIETPLMWLSKAETWALADRLGGQPLVDLIIEHSHTCYRGDHQTRHDWGYGCGDCPACELRARGYREWHAARDTAGD

SEQ ID NO: 39732 - protein, 225 aa, unidentified
  source 1..225: note = Methylomagnum ishizawai
  REGION 1..225: note = tr|A0A1Y6D8S3|A0A1Y6D8S3_9GAMM 7-cyano-7-deazaguanine synthase OS=Methylomagnum ishizawai; OX = 1760988 GN=queC PE=3 SV=1
MMKPAVILLSGGLDSATVLAIAQAQGYECHALSFDYGQRHGAELAAAVRVADHFGVADRKLIRIGLDAIGGSALTDANIAVPDHPQAGIPVTYVPARNTVFLSFALGWAEVLGNADIFIGVNAVDYSGYPDCRPEYIEAFRNLAKLATKAGVEGADIHIHTPLIQLSKAEIIQQGVALGVDYALTVSCYAADPEGRACGVCDACRLRAAGFREAGVVDPTRYVAR

SEQ ID NO: 39733 - protein, 226 aa, Methylomicrobium album
  REGION 1..226: note = tr|H8GL33|H8GL33_METAL 7-cyano-7-deazaguanine synthase OS=Methylomicrobium album BG8 OX=686340 GN=queC; PE = 3 SV=1
MQKKAIILLSGGLDSITVLALAQSQGYHCHALSFDYGQRHNAELEAARRIAEHYRVAEHKIIPLGLGAIGGSALTDDHIPVPTTPQTGIPATYVPARNTIFLAFALGWAEVLNARDIFIGVNAVDYSGYPDCRPEFIAAFRKLADLATKAGVEGDHFTIHTPLISLSKADIIKTGLALGVDYSQTVSCYAADANGRACGLCDACRLRKNGFDAAGIEDPTRYRPPL

SEQ ID NO: 39734 - protein, 254 aa, Methylomicrobium alcaliphilum
  REGION 1..254: note = tr|G4ST29|G4ST29_META2 7-cyano-7-deazaguanine synthase OS=Methylomicrobium alcaliphilum (strain DSM 19304 / NCIMB 14124 / VKM B-2133 / 20Z) OX=1091494 GN=queC; PE = 3 S V=1
MQKKAVVLLSGGLDSITVLALAKKQGYVCYALSFDYGQRHNAELQAAKRIAAEYGVIDHKIIHIGLNDIGGSALTDEHIAVPSSLQPGIPVTYVPARNTIFLSFALGWAEVLNSRDIFIGVNAIDYSGYPDCRPEFIKAFQSLAELATKVGVEGGHFLIHSPLIEMSKADIIRVGSELGVDYSQTVSCYSADKFGNACGVCDACRLRKAGFELAGIEDPTRYQKNKKRVAQIRNIIIIVNLCWVVSSAGRAPHF

SEQ ID NO: 39735 - protein, 225 aa, Methylomicrobium buryatense
  REGION 1..225: note = tr|A0A4P9UVD9|A0A4P9UVD9_9GAMM 7-cyano-7-deazaguanine synthase OS=Methylomicrobium buryatense OX=95641 GN=queC PE=3 SV=1
MQKKAVVLLSGGLDSITVLALAKRQGYACYALSFDYGQRHNAELQAAKHIAAEYGVVDHKIIHIGLNDIGGSALTDEHIAVPNSLQPGIPVTYVPARNTIFLSFALGWAEVLNSRDIFIGVNAIDYSGYPDCRPEFIKAFQSLAELATKAGVEGGHFSIHVPLIEMSKADIIRTGSELGVDYSQTVSCYSADKFGNACGVCDACRLRKAGFELAGIEDPTRYQKK

SEQ ID NO: 39736 - protein, 225 aa, Methylomicrobium kenyense
  REGION 1..225: note = tr|A0A543VDQ3|A0A543VDQ3_9GAMM 7-cyano-7-deazaguanine synthase OS=Methylomicrobium kenyense OX=269709 GN=queC PE=3 SV=1
MQKKAVILLSGGLDSITVLAFAKQQGYACYALSFDYGQKHNAELEAAKRIAARYGVSDHKIIQLGLSSIGGSALTDQHIAVPDTPQQGIPVTYVPARNTIFLSFALGWAEVLDCRDIFIGVNAIDYSGYPDCRPEFIKAFQSLADLATKAGVEGGHFLIHAPLIEMSKADIIRTGSELGIDYSQTVSCYSADKFGNACGVCDACRLRKAGFEEAGIQDPTRYQNR

SEQ ID NO: 39737 - protein, 201 aa, unidentified
  source 1..201: note = Methylomonas denitrificans
  REGION 1..201: note = tr|A0A126T332|A0A126T332_9GAMM 7-cyano-7-deazaguanine synthase OS=Methylomonas denitrificans OX=1538553 GN=JT25_008345 PE=3 SV=1
MRTALLLSGGMDSLAVAWWKRPDHCITIDYGQLAAEAEITASKVICEKLGIEHHVISVDCRSMGSGDMAGTPPDGYAPASDWWPYRNQMLLTFAAMKALPLGVKAIWIGSVKSDKSHQDGTIQFLESMNALLSLQEGGMTVSAPAIDMTTPQLIRHAGVPKNILGWAHSCHKANVACANCRGCNKYFEVLYELDGGMDRPG

SEQ ID NO: 39738 - protein, 230 aa, unidentified
  source 1..230: note = Methylomonas denitrificans
  REGION 1..230: note = tr|A0A126T6C9|A0A126T6C9_9GAMM 7-cyano-7-deazaguanine synthase OS=Methylomonas denitrificans OX=1538553 GN=queC PE=3 SV=1
MENNSSSRPAIILLSGGLDSITVLALAKQQGFTCYALSFDYGQRHNAELEASRRIAKHYQVADHKIINLGLSAIGGSALTDARIDVPTSPQAGIPVTYVPARNTIFLAFALGWAEVVKAHDVFIGVNAVDYSGYPDCRPEFIKAFQDMANLGTKAGVEGHKIQIHTPLIALSKAEIIQQGLALGVDYADTVSCYSADIKGRACGVCDACRLRAAGFQSLGVADPTHYRPK

SEQ ID NO: 39739 - protein, 232 aa, unidentified
  source 1..232: note = Methylomonas koyamae
  REGION 1..232: note = tr|A0A291IFH8|A0A291IFH8_9GAMM 7-cyano-7-deazaguanine synthase OS=Methylomonas koyamae; OX = 702114 GN=queC PE=3 SV=1
MREENNAGAKPAVILLSGGLDSITVLALAQQQGFVCHALSFDYGQRHNAELEAARNIASHYQVAAHKVINLGLSSIGGSALTDAKIDVPTSPQTGIPVTYVPARNTIFLAFALGWAEVLQAHDVFIGVNAVDYSGYPDCRPEFIKAFQDMANLGTKAGVEGHKIQIHTPLISFSKAQIIQQGMALGVDYAATVSCYSADAEGRACGVCDACRLRAAGFAAAGVADPTRYRPH

SEQ ID NO: 39740 - protein, 232 aa, unidentified
  source 1..232: note = Methylomonas koyamae
  REGION 1..232: note = tr|A0A177NLT9|A0A177NLT9_9GAMM 7-cyano-7-deazaguanine synthase OS=Methylomonas koyamae; OX = 702114 GN=queC PE=3 SV=1
MREENNAGAKPAVILLSGGLDSITVLALAQQQGFVCHALSFDYGQRHNAELEAARNIASHYQVAAHKVINLGLSSIGGSALTDANIDVPTSPQTGIPVTYVPARNTIFLAFALGWAEVLQAHDVFIGVNAVDYSGYPDCRPEFIKAFQDMANLGTKAGVEGHKIQIHTPLISFSKAQIIQQGMALGVDYAATVSCYSADAEGRACGVCDACRLRAAGFAAAGVADPTRYRPH

SEQ ID NO: 39741 - protein, 236 aa, unidentified
  source 1..236: note = Methylomonas lenta
  REGION 1..236: note = tr|A0A177NJJ6|A0A177NJJ6_9GAMM 7-cyano-7-deazaguanine synthase OS=Methylomonas lenta; OX = 980561 GN=queC PE=3 SV=1
MLEENKFKLVNRGAKKGAIILLSGGLDSITVLAHAQQQGYACYALSFDYGQRHNAELEAAKKIAQHYQVLDHKILHVGLDSFGGSALTDNHIAVPKSPQQGIPVTYVPARNTIFLSFALGWAEVLNVHDVFIGVNAVDYSGYPDCRPAFIEAFQAMANLATKAGVEGHEIHIHTPLIHLTKAQIIEQGLNLGVDYANTVSCYAADKQGRACGDCDACRLRKAGFEAFGVSDPTRYQ

SEQ ID NO: 39742 - protein, 230 aa, Methylomonas methanica
  REGION 1..230: note = tr|A0A177LXP6|A0A177LXP6_METMH 7-cyano-7-deazaguanine synthase OS=Methylomonas methanica; OX = 421 GN=queC PE=3 SV=1
MENNSSSRPAIILLSGGLDSITVLALAKQQGFACYALSFDYGQRHNAELEASRRIAKHYQVADHKIISLGLSAIGGSALTDARIDVPTSPQAGIPVTYVPARNTIFLAFALGWAEVVKAHDVFIGVNAVDYSGYPDCRPEFIKAFQDMANLGTKAGVEGHKIQIHTPLIALSKAEIIQKGLALGVNYADTVSCYSADIKGRACGVCDACRLRAAGFENLGVDDPTHYRPK

SEQ ID NO: 39743 - protein, 236 aa, Methylomonas methanica
  REGION 1..236: note = tr|F9ZZV2|F9ZZV2_METMM 7-cyano-7-deazaguanine synthase OS=Methylomonas methanica (strain MC09) OX=857087; GN = queC PE=3 SV=1
MHEENSLKAMNSGEQKKAIILLSGGLDSITVLALAKQQGYGCYALSFDYGQRHNAELVAAKKIAEKYQVLDHKIIRLGLDSIGGSALTDDHIDVPQSPQEGIPVTYVPARNTIFLSFALGWAEVLNVHDVFIGVNAVDYSGYPDCRPAFIKAFQDMANLATKAGVEGHEIQIHTPLIAMSKAEIIARGIGLGVDYSSTVSCYAADREGRACGSCDACRLRKAGFAALAVSDPTCYQ

SEQ ID NO: 39744 - protein, 232 aa, Methylomonas sp.
  REGION 1..232: note = tr|A0A172U4T6|A0A172U4T6_9GAMM 7-cyano-7-deazaguanine synthase OS=Methylomonas sp. DH-1; OX = 1727196 GN=queC PE=3 SV=1
MREENNAGAKPAVILLSGGLDSITVLALAQQQGFICHALSFDYGQRHNAELEAARNIASHYQVAAHKVINLGLSSIGGSALTDANIDVPTSPQAGIPVTYVPARNTIFLAFALGWAEVLQAHDVFIGVNAVDYSGYPDCRPEFIKAFQDMANLGTKAGVEGHKIQIHTPLISFSKAQIIQQGMALGVDYAATVSCYSADAEGRACGVCDACRLRAAGFAAAGIADPTRYCPR

SEQ ID NO: 39745 - protein, 230 aa, Methylomonas sp.
  REGION 1..230: note = tr|A0A2N0V2C6|A0A2N0V2C6_9GAMM 7-cyano-7-deazaguanine synthase OS=Methylomonas sp. Kb3; OX = 1611544 GN=queC PE=3 SV=1
MENSSSSRPAIILLSGGLDSITVLALAKQQGFTCYALSFDYGQRHNAELEASRRIAKHYQVADHKIINLGLSAIGGSALTDARIDVPTSPQAGIPVTYVPARNTIFLAFALGWAEVVNAHDVFIGVNAVDYSGYPDCRPEFIKAFQDMANLGTKAGVEGHKIQIHTPLIALSKAEIIRQGLALGVDYADTVSCYSADIKGRACGVCDACRLRAAGFQNLGVTDPTHYRPK

SEQ ID NO: 39746 - protein, 228 aa, unidentified
  source 1..228: note = Methylomusa anaerophila
  REGION 1..228: note = tr|A0A348AQF4|A0A348AQF4_9FIRM 7-cyano-7-deazaguanine synthase OS=Methylomusa anaerophila; OX = 1930071 GN=queC PE=3 SV=1
MKEKAVILLSGGLDSTVCMAVAKNLGFELLPLSFNYHQRHKRELEAAAKVAAYFDVSKHLVIETNMESIGGSALTDDDMSVPAGNIERDDIPITYVPARNLIFLSYALGYAEVSGSNRIFIGVNALDYSGYPDCRPEFIRMFQQLADYSTKATTQDGRRIVIETPLINFTKKDIVLLGHQLKAPLQLTTSCYQGGEAACGQCDSCLLRLKGFAEAGLTDPILYDDRSE

SEQ ID NO: 39747 - protein, 223 aa, Methylophaga aminisulfidivorans
  REGION 1..223: note = tr|F5SXU2|F5SXU2_9GAMM 7-cyano-7-deazaguanine synthase OS=Methylophaga aminisulfidivorans MP OX=1026882; GN = queC PE=3 SV=1
MKKAVILLSGGLDSATVLAIAQQQGYKCFTMSFDYGQRHRAELHASAKLAEAMGVTEHKVINIDLTAIGGSALTDSSIAVPQQHEEGIPITYVPARNTVFLSIALGWAEVLEADAIFVGVNAVDYSGYPDCRPEYIAAFEKMANLATKTGVEGHKLTIETPLIDLSKQAIIEKGISLGVDYSLTVSCYQADNEGRACGECDSCRFRKEGFRQAGITDPTPYQD

SEQ ID NO: 39748 - protein, 223 aa, unidentified
  source 1..223: note = Methylophaga frappieri
  REGION 1..223: note = tr|I1YIX2|I1YIX2_METFJ 7-cyano-7-deazaguanine synthase OS=Methylophaga frappieri (strain ATCC BAA-2434 / DSM 25690 / JAM7) OX=754477 GN=queC PE=3 SV=1
MTEQRAVILLSGGLDSATVLAMARAQGYRCYALSFDYGQRHRTELQAAQKIADRIGVDQYKTVRIDLRNIGGSALTSDIAVPEQESTGIPITYVPARNTVFMSIALGWAEVLEADAIFVGVNAVDYSGYPDCRPDYIHAFEAMANLATKRGVEGHKLKIHTPLMQLTKAQIIKEGTALGVDYALTISCYQANDFGQACGRCDSCRLRRQGFIEAGLSDPTLYQ

SEQ ID NO: 39749 - protein, 225 aa, unidentified
  source 1..225: note = Methylophaga lonarensis
  REGION 1..225: note = tr|M7NZD5|M7NZD5_9GAMM 7-cyano-7-deazaguanine synthase OS=Methylophaga lonarensis MPL OX=1286106 GN=queC; PE = 3 SV=1
MTDKRAVVMLSGGLDSATALAIAKSQGYDCHTISFDYGQRHRAELEAAAKLSKALSASSHKVITIDLQTIGGSALTDTDIDVPEQHQEGIPVTYVPARNTVFLSIALGWAEVLQADAIFLGVNAVDYSGYPDCRPEYIKAFETMANLATKRGVEGDRLYIYAPLMHMTKAEIIQAGIQLGIDYSQTISCYQADASGRACGQCDSCRFRKEGFEQAGVSDPTHYQI

SEQ ID NO: 39750 - protein, 222 aa, Methylophaga muralis
  REGION 1..222: note = tr|A0A1E3GVF0|A0A1E3GVF0_9GAMM 7-cyano-7-deazaguanine synthase OS=Methylophaga muralis; OX = 291169 GN=queC PE=3 SV=1
MTKRAVVLLSGGLDSVTALAIAKSEGYACHTISFDYGQRHRTELDAAENLARKAGVVTHKVIQIDLRAIGGSALTDDIAVPETEQQGIPVTYVPARNTIFLSIALGWAEVLNAEAIFVGVNAVDYSGYPDCRPEFIDAFERLANLATKSAVEGSAIYIRAPLMMFTKSQIIKCGTELGIDYSETVSCYQADAQGRACGQCDSCRLRRQGFHDAGVADPTHYQ

SEQ ID NO: 39751 - protein, 222 aa, unidentified
  source 1..222: note = Methylophaga nitratireducenticrescens
  REGION 1..222: note = tr|I1XEP4|I1XEP4_METNJ 7-cyano-7-deazaguanine synthase OS=Methylophaga nitratireducenticrescens; OX = 754476 GN=queC PE=3 SV=1
MTKRAVILLSGGLDSVTALAIAKAEGYECFSISFDYGQRHKTELLAAENLAKKAGVASHKVIQIDLRAIGGSALTDDIDVPETEQQGIPITYVPARNTVFLSIALGWAEVLNAEAIFVGVNAVDYSGYPDCRPEFIDAFEKLANLATKSAVEGSAIYIKAPLMYLSKSEIVKRGTELGIDYSETVSCYQADAQGRACGQCDSCRFRRQGFIDAGLADPTRYQ

SEQ ID NO: 39752 - protein, 223 aa, Methylophaga sp.
  REGION 1..223: note = tr|A0A2E2D4Y9|A0A2E2D4Y9_9GAMM 7-cyano-7-deazaguanine synthase OS=Methylophaga sp.; OX = 2024840 GN=queC PE=3 SV=1
MKKAVVLLSGGLDSATVLAIAKQQGYQCYTMSFDYGQRHRAELNASAILAEAMSAVEHKVINIDLTAIGGSALTDTTIAVPKQHQDGIPITYVPARNTVFLSIALGWAEVLEADAIYVGVNAVDYSGYPDCRPEYIAAFETMANLATKTGIEGNKLTIETPLIDLSKQAIIEKGISLGVDYSLTVSCYQADSEGRACGECDSCRFRHEGFMQAGIADPTRYQA

SEQ ID NO: 39753 - protein, 222 aa, Methylophaga sp.
  REGION 1..222: note = tr|A0A2G2ED14|A0A2G2ED14_9GAMM 7-cyano-7-deazaguanine synthase OS=Methylophaga sp.; OX = 2024840 GN=queC PE=3 SV=1
MTKRAVILLSGGLDSVTALAIAKAEGYECFSISFDYGQRHKTELLAAENLAKKAGVASHKVIQIDLRAIGGSALTDDIDVPETEQQGIPVTYVPARNTVFLSIALGWAEVLNAEAIFVGVNAVDYSGYPDCRPEFIDAFEKLANLATKSAVEGCAIYIKAPLMHLSKSEIVKRGTELGIDYSETVSCYQADAQGRACGQCDSCRFRRQGFIDAGIADPTRYQ

SEQ ID NO: 39754 - protein, 223 aa, Methylophaga sulfidovorans
  REGION 1..223: note = tr|A0A1I3Y8Q5|A0A1I3Y8Q5_9GAMM 7-cyano-7-deazaguanine synthase OS=Methylophaga sulfidovorans OX=45496 GN=queC PE=3 SV=1
MKKAVILLSGGLDSATVLAIAKQQGYECFTMSFDYGQRHRAELHASAKLAEAMGVAEHKVINIDLTGIGGSALTDSSIAVPHQHEEGIPITYVPARNTVFLSIALGWAEVLKADAIFVGVNAVDYSGYPDCRPEYIAAFEKMANLATKTGVEGHTLTIETPLIDLSKQAIIEKGMSLGVDYSLTVSCYQADNEGRACGECDSCRFRKEGFRQAGITDPTPYQV

SEQ ID NO: 39755 - protein, 223 aa, Methylophaga thiooxydans
  REGION 1..223: note = tr|C0N2U2|C0N2U2_9GAMM 7-cyano-7-deazaguanine synthase OS=Methylophaga thiooxydans DMS010 OX=637616; GN = queC PE=3 SV=1
MKRAVILLSGGLDSATVLAIAKSQGYDCYTISFDYGQRHRAELEASARLSKSLGATEHKVINIDLTAIGGSALTDSSIDVPSQHEEGIPITYVPARNTVFMSIALGWAEVLNAQAIFVGVNAVDYSGYPDCRPDYIAAFEKMANLATKTGVEGLKLTIETPLIDLTKQAIIEKGIALGVDYGQTVSCYQADNQGRACGQCDSCRFRKQGFEKAGIEDPTPYQP

SEQ ID NO: 39756 - protein, 223 aa, Methylophaga thiooxydans
  REGION 1..223: note = tr|A0A0A0BIS3|A0A0A0BIS3_9GAMM 7-cyano-7-deazaguanine synthase OS=Methylophaga thiooxydans OX=392484 GN=queC PE=3 SV=1
MKRAVILLSGGLDSATVLAIAKSQGYDCYTISFDYGQRHRAELEASARLSKSLGATEHKVINIDLTAIGGSALTDSSIDVPSQHEEGIPITYVPARNTVFMSIALGWAEVLNAQAIFVGVNAVDYSGYPDCRPDYIAAFEKMANLATKTGVEGLKLTIETPLIDLTKQAIIEKGVALGVDYGQTVSCYQADNQGRACGQCDSCRFRKQGFEKAGIEDPTPYQP

SEQ ID NO: 39757 - protein, 229 aa, unidentified
  source 1..229: note = Methylophilaceae bacterium
  REGION 1..229: note = tr|Y0KK56|Y0KK56_9PROT 7-cyano-7-deazaguanine synthase OS=Methylophilaceae bacterium 11 OX=1101195; GN = queC PE=3 SV=1
MMQNSTKKAVVLLSGGLDSATCLAIAKSQGFECYCLSLDYHQRHIAELNAANRVAQALGACSHKTAQLDLSLFGGSALTDNSIDVPQTPTEGIPVTYVPARNTIMLSLALAWAEVLQSQDIFIGVNALDYSGYPDCRGEYVHAFQAMANLATKSAVEGHRITIHAPLIDLTKSQIIALGTSLGVDYGITVSCYQADALGRACGQCDSCRLRSAGFEGAGLADPTIYLNP

SEQ ID NO: 39758 - protein, 222 aa, unidentified
  source 1..222: note = Methylophilaceae bacterium
  REGION 1..222: note = tr|A0A4P5TTE7|A0A4P5TTE7_9PROT 7-cyano-7-deazaguanine synthase OS=Methylophilaceae bacterium OX=2030816 GN=queC PE=3 SV=1
MSKAVVLLSGGLDSATTLAIAKNEGYECYALSVNYHQRHIAELEAAKKIAVLFQVQDHKTVEMDLSWMLTSALTNPDLKVPTELTSHIPITYVPARNTLMLTLALGWAEVIGAHDIFIGVNAVDYSGYPDCRPEYIEQFQKMANLATKSAIEGQNIQLHTPLIHLSKEAIILQGMKLGVDYGLTVSCYQADKNGRACGVCDSCRLRQNGFKAAGVNDPTSYQ

SEQ ID NO: 39759 - protein, 227 aa, unidentified
  source 1..227: note = Methylophilales bacterium
  REGION 1..227: note = tr|A0A0H4IY75|A0A0H4IY75_9PROT 7-cyano-7-deazaguanine synthase OS=Methylophilales bacterium MBRS-H7 OX=1623450 GN=queC PE=3 SV=1
MSKKAIVLLSGGLDSLTTLAIAQNDGFDCYGLHIIYGQRHSSETMAARNIAKIYNLAEYREINVDMSWLKSSALTNHDITIPEERSEGIPVTYVPARNTIMMSFAAAWAESLAISHLFLGVNAVDYSGYPDCRPEFIDAFKKMVNLGTKAAIEGTPFNIHTPLIGLTKDEIIAKGSNLGVDYSMSISCYQADQNGNACGKCDSCYLRRQGFEKAGIKDPTPYQNVIN

SEQ ID NO: 39760 - protein, 228 aa, unidentified
  source 1..228: note = Methylophilales bacterium
  REGION 1..228: note = tr|A0P5E3|A0P5E3_9PROT 7-cyano-7-deazaguanine synthase OS=Methylophilales bacterium HTCC2181 OX=383631; GN = queC PE=3 SV=1
MKKKVSKSAVILLSGGLDSATVLAIAKAEGYQCYAMNINYQQRHSAELKYAKRLAHHYDVEEYKVVDIDLSWLTGSSLTNKSMIIPQSASEGIPSTYVPARNTIMMTLALAWAETIKSQAIFIGVNAIDYSGYPDCREEYIKSFEVMANLATKTGVEGSRITIHAPLIHLDKAEIISLGIQKGLDYSKTVSCYQATEEGHACGKCDSCRLRREGFEKLGVADPTLYVR

SEQ ID NO: 39761 - protein, 233 aa, unidentified
  source 1..233: note = Methylophilus medardicus
  REGION 1..233: note = tr|A0A5B8CUN6|A0A5B8CUN6_9PROT 7-cyano-7-deazaguanine synthase OS=Methylophilus medardicus OX=2588534 GN=queC PE=3 SV=1
MVASNKPKAVILLSGGLDSTTVLAIAKSQGYDSYCLSLDYHQRHNVELLAAKRVAAALGAVEHKTVQLDLSLFGGSALTDNAIAVPEHETQGIPVTYVPARNTIMLSLALAWAEVLQARDIFIGVNALDYSGYPDCRTEYVKAFQQMANLATKAAVEGQTITVHAPLIDMTKADIIRAGDALGVDYGLTVSCYQANQQGVACGVCDSCRFRKAGFTQAGVVDPTPYLTTISAK

SEQ ID NO: 39762 - protein, 233 aa, Methylophilus rhizosphaerae
  REGION 1..233: note = tr|A0A1G9CL00|A0A1G9CL00_9PROT 7-cyano-7-deazaguanine synthase OS=Methylophilus rhizosphaerae OX=492660 GN=queC PE=3 SV=1
MAVPHQPKAVILLSGGLDSSTVLAIAQSKGYECYCLSLDYHQRHNVELLAAQRVAKALGAAGHKTVQLDLSLFGGSALTDSNIAVPEQETQGIPVTYVPARNTIMLSLSLAWAEVLQARDIFIGVNALDYSGYPDCRGEYVDAFQRMANLATKAAVEGQTITVHAPLIDMTKADIIRTGHALGLDYGLTVSCYQADDNGVACGVCDSCRFRKAGFEQAGVTDPTPYKNTHSGP

SEQ ID NO: 39763 - protein, 233 aa, Methylophilus sp.
  REGION 1..233: note = tr|A0A2S5NB46|A0A2S5NB46_9PROT 7-cyano-7-deazaguanine synthase OS=Methylophilus sp.; OX = 29541 GN=queC PE=3 SV=1
MAASQQPKAVILLSGGLDSSTVLAIAKSQGYDCYCLSLDYHQRHNVELLAAQRVAKALGATEHKTVQLDLSLFGGSALTDNNIAVPEQETQGIPVTYVPARNTIMLSLSLAWAEVLQARDIFIGVNALDYSGYPDCRGEYVKAFQQMANLATKAAVEGQTITVHAPLIDMTKADIIRTGHALGVDYGLTVSCYQADDQGAACGVCDSCRFRKAGFAQAGVADPTPYRNTHSGK

SEQ ID NO: 39764 - protein, 234 aa, Methylophilus sp.
  REGION 1..234: note = tr|A0A0Q6BB06|A0A0Q6BB06_9PROT 7-cyano-7-deazaguanine synthase OS=Methylophilus sp. Leaf416 OX=1736373 GN=queC PE=3 SV=1
MNQHNNSTGQKPKAVILLSGGLDSTTVLAIAQSQGYECYCLSLDYHQRHNVELLAAQRVAKALGAAEHKTVQLDLSLFGGSALTDNAIAVPEHETQGIPVTYVPARNTIMLSLSLAWAEVLEAHDIFIGVNALDYSGYPDCRGEYVKAFQQMANLATKAAVEGQPITVHAPLIDMTKADIIRTGHALGVDYGLTVSCYQADDAGAACGVCDSCRFRKTGFVQAGVKDPTLYRNT

SEQ ID NO: 39765 - protein, 242 aa, Methylopila sp.
  REGION 1..242: note = tr|A0A2H6BFW9|A0A2H6BFW9_9RHIZ 7-cyano-7-deazaguanine synthase OS=Methylopila sp. Yamaguchi OX=1437817 GN=queC PE=3 SV=1
MTAAAGSDGALVLFSGGQDSTTCLAWALDHFARVETLGFDYGQRHRVELDQRAALREGLARLKPEWAARLGEDHTLALPVLGELSDTALTRDVAIEAEAGGLPNTFVPGRNLVFLTFAAALAWRRGLRRIVGGMCETDFSGYPDCRDDTIKALQVALNLGMERRFVLDTPLMWLDKADTWALADGLGGAGLVELIVEDSHTCYLGERGARHAWGYGCGGCPACDLRAKGFARWRERAAAAGA

SEQ ID NO: 39766 - protein, 229 aa, unidentified
  source 1..229: note = Methyloprofundus sedimenti
  REGION 1..229: note = tr|A0A1V8M0P6|A0A1V8M0P6_9GAMM 7-cyano-7-deazaguanine synthase OS=Methyloprofundus sedimenti OX=1420851 GN=queC PE=3 SV=1
MTKKAIILLSGGLDSVTVLAMAKRQGYTVYALSFDYGQKHNAELISARKIAPDYQVAVHKVIKLGLGEIGGSALTDDALNVPVTPQTGIPVTYVPARNTVFLSFALGWAEVLDAHDIFIGVNAVDYSGYPDCRPQFIEAFQALANVATKAGVEGHKIKIHAPLIHMSKGEIIQSGIELQVNYAQTVSCYAASPEGFACGECDACRLRKTGFAEAGVPDPTRYQAGCAGE

SEQ ID NO: 39767 - protein, 243 aa, unidentified
  source 1..243: note = Methylorubrum extorquens
  REGION 1..243: note = tr|H1KQE0|H1KQE0_METEX 7-cyano-7-deazaguanine synthase OS=Methylorubrum extorquens DSM 13060 OX=882800; GN = queC PE=3 SV=1
MPEDAAVAGGEAGALVLFSGGQDSATCLAWALDRFPHVETLGFDYGQRHRVELDRRAALRQGLTALDPAWGRRLGPDHTLALAALGEISDTALTRDSAIAFARDGLPNTFVPGRNLAFLTFAAALAYRRGLRHIVGGMCETDYSGYPDCRDDTIKALQVALNLGMERRFVLHTPLMWIDKAQTWALAETLGGRALVYLVVEESHTCYLGERGARHEWGYGCGTCPACDLRAKGFSRYLAARAE

SEQ ID NO: 39768 - protein, 243 aa, unidentified
  source 1..243: note = Methylorubrum extorquens
  REGION 1..243: note = sp|A9W222|QUEC_METEP 7-cyano-7-deazaguanine synthase; OS = Methylorubrum extorquens (strain PA1) OX=419610 GN=queC; PE = 3 SV=1
MPEDAAVAGGETGALVLFSGGQDSATCLAWALDRFPHVETLGFDYGQRHRVELDRRAALRQGLTALDPAWGRRLGPDHTLALAALGEISDTALTRDSAIAFARDGLPNTFVPGRNLAFLTFAAALAYRRGLRHIVGGMCETDYSGYPDCRDDTIKALQVALNLGMERRFVLHTPLMWIDKAQTWALAETLGGRALVDLVVEESHTCYLGERGARHEWGYGCGTCPACDLRAKGFSRYLAARAE

SEQ ID NO: 39769 - protein, 239 aa, unidentified
  source 1..239: note = Methylorubrum populi
  REGION 1..239: note = tr|B1ZBZ2|B1ZBZ2_METPB 7-cyano-7-deazaguanine synthase OS=Methylorubrum populi (strain ATCC BAA-705 / NCIMB 13946 / BJ001) OX=441620 GN=queC PE=3 SV=1
MAGEAAEAGALVLFSGGQDSATCLAWALDRFPHVETLGFDYGQRHRVELDRREALRRGVTALDPGWRRRLGEDHTLSLAALGAISDTALTRDSAIAFARDGLPNTFVPGRNLAFLTFAAALAYRRGLRHIVGGMCETDFSGYPDCRDDTIKALQVALNLGMERRFVLHTPLMWIDKAQTWALAEALGGRPLVDLIVEESHTCYLGERGERHDWGYGCGTCPACDLRAKGFARYLAARAD

SEQ ID NO: 39770 - protein, 210 aa, unidentified
  source 1..210: note = Methylorubrum populi
  REGION 1..210: note = tr|A0A160PHK2|A0A160PHK2_9RHIZ 7-cyano-7-deazaguanine synthase OS=Methylorubrum populi; OX = 223967 GN=MPPM_2746 PE=3 SV=1
MRALLLSGGLDSAAIAAWQRPDVCLTVDYGQRPAKGEIAAAASVARELGLRHEVARVDLSALGLGPLAGRAASDLARAPEWWPYRNQMLVTLAGMRFVAEGLTEILLGAIRTDVHADGRAPFLRTVDRLMHLQEGGVRVMAPARHLSALELVRRSGIPRSLLGATFSCHVMEYACGRCRGCEKHQETLARIDGGRARAGTAARASAATGG

SEQ ID NO: 39771 - protein, 238 aa, unidentified
  source 1..238: note = Methylorubrum salsuginis
  REGION 1..238: note = tr|A0A1I3ZTG9|A0A1I3ZTG9_9RHIZ 7-cyano-7-deazaguanine synthase OS=Methylorubrum salsuginis OX=414703 GN=queC PE=3 SV=1
MTEDGDSGALVLFSGGQDSATCLAWALDRFPRVETLGFDYGQRHRIELERRSALRKGMTAHDRAWWRRLGRDHTLDLSSLGEISETALTRESEIRLDRDGLPNTFVPGRNLAFLTFAAALAYRRGLRHIVGGMCETDYSGYPDCRDDTIKALQVALNLGMERRFVLHTPLMWLDKAQTWALAEELGGRALVDLIVEESHTCYLGERGERHPWGYGCGTCPACDLRAKGFSRYLAGRAD

SEQ ID NO: 39772 - protein, 243 aa, unidentified
  source 1..243: note = Methylorubrum sp.
  REGION 1..243: note = tr|A0A4Z0E7K1|A0A4Z0E7K1_9RHIZ 7-cyano-7-deazaguanine synthase OS=Methylorubrum sp. Q1; OX = 2562453 GN=queC PE=3 SV=1
MPEDAAVANGEAGALVLFSGGQDSATCLAWALDRFAHVETLGFDYGQRHRVELDRRAALRQGLTALDPAWGRRLGPDHTLALAALGEISDTALTRDSAIAFARDGLPNTFVPGRNLAFLTFAAALAYRRGLRHIVGGMCETDYSGYPDCRDDTIKALQVALNLGMERRFVLHTPLMWIDKAQTWALAESLGGRALVDLVVEESHTCYLGERGARHAWGYGCGTCPACDLRAKGFSRYLAARAE

SEQ ID NO: 39773 - protein, 243 aa, unidentified
  source 1..243: note = Methylorubrum zatmanii
  REGION 1..243: note = tr|A0A1W6RJL2|A0A1W6RJL2_9RHIZ 7-cyano-7-deazaguanine synthase OS=Methylorubrum zatmanii; OX = 29429 GN=queC PE=3 SV=1
MPEDAAVAGGEAGALVLFSGGQDSATCLAWALDRFPHVETLGFDYGQRHRVELDRRAALRQGLTALDPAWGRRLGPDHTLALAALGEISDTALTRDSAIAFARDGLPNTFVPGRNLAFLTFAAALAYRRGLRHIVGGMCETDYSGYPDCRDDTIKALQVALNLGMERRFVLHTPLMWIDKAQTWALAETLGGRALVDLVVEESHTCYLGERGARHEWGYGCGTCPACDLRAKGFSRYLAARAE

SEQ ID NO: 39774 - protein, 243 aa, Methylosinus sp.
  REGION 1..243: note = tr|A0A177PN79|A0A177PN79_9RHIZ 7-cyano-7-deazaguanine synthase OS=Methylosinus sp. R-45379 OX=980563 GN=queC PE=3 SV=1
MISPSASDSALVLFSGGQDSATCLAFALSRFARVETVGFDYGQRHRVELEQRGVLREGMKRISPLWAERLGEDHTISIEALGAISDTALTREAEIAFDASGLPNTFVPGRNILFLTFAAALAYRRGIGSLVGGMCETDFSGYPDCRDATIRAVETALTLGMDRKLAILTPLMSIDKAATWKLAEELGGEPLVRLIVEESHTCYLGERGKRFDWGYGCGECPACRLRAAGWEKYRAAQPSGAPS

SEQ ID NO: 39775 - protein, 238 aa, Methylosinus sp.
  REGION 1..238: note = tr|A0A1A6FQB2|A0A1A6FQB2_9RHIZ 7-cyano-7-deazaguanine synthase OS=Methylosinus sp. 3S-1; OX = 1849840 GN=queC PE=3 SV=1
MTIADPPADASALVLFSGGQDSATCLAFALSRFARVETIGFDYGQRHRVELDQRAVLRAGMASLSPLWAERLGEDHTVSIEALGALSETALTREAAIAFDSTGLPNTFVPGRNILFLTFAAALAYRRGIGDLVGGMCETDYSGYPDCRDATIRAVETALRLGMDRPLTIHTPLMWIDKAATWRLARELGGEALVSLIVEESHTCYLGERGKRFDWGHGCGECPACRLRAAGWENFRAG

SEQ ID NO: 39776 - protein, 241 aa, Methylosinus sporium
  REGION 1..241: note = tr|A0A2U1SWC3|A0A2U1SWC3_METSR 7-cyano-7-deazaguanine synthase OS=Methylosinus sporium; OX = 428 GN=queC PE=3 SV=1
MTTPSPSTSDSALVLFSGGQDSATCLAFALSRFARVETIGFDYGQRHRVELEQRGKIREGLARISLLWAERLGEDHTITIEALGAISDTALTREAEIAFDASSLPNTFVPGRNILFLTFAAALAYRRGIGQLVGGMCETDYSGYPDCRDATIRATQTALSLGMDRPLEILTPLMWIDKAATWKLAEELGGEPLVRLIVEESHTCYLGERGTRFDWGHGCGECPACRLRAAGWEKYRAAREQ

SEQ ID NO: 39777 - protein, 241 aa, Methylosinus sporium
  REGION 1..241: note = tr|A0A549SPQ6|A0A549SPQ6_METSR 7-cyano-7-deazaguanine synthase OS=Methylosinus sporium; OX = 428 GN=queC PE=3 SV=1
MSVTDASSSDSALVLFSGGQDSATCLAFALSRFARVETIGFDYGQRHRVELEQRGVLREGMKRISPLWAERLGEDHTITIEALGAISDTALTREAEIAFDASGLPNTFVPGRNILFLTFAAALAYRRGIGQLVGGMCETDYSGYPDCRDATIHATQTALSLGMDRPLEILTPLMWIDKAATWKLAEELGGEPLVRLIVEESHTCYLGERGARFDWGHGCGECPACRLRAAGWEKYRADREQ

SEQ ID NO: 39778 - protein, 238 aa, Methylosinus trichosporium; identical to SEQ ID NO: 39775
  REGION 1..238: note = tr|A0A2D2CZP4|A0A2D2CZP4_METTR 7-cyano-7-deazaguanine synthase OS=Methylosinus trichosporium OB3b OX=595536 GN=queC PE=3 SV=1

SEQ ID NO: 39779 - protein, 226 aa, Methylotenera mobilis
  REGION 1..226: note = tr|C6WZ29|C6WZ29_METML 7-cyano-7-deazaguanine synthase OS=Methylotenera mobilis (strain JLW8 / ATCC BAA-1282 / DSM 17540) OX=583345 GN=queC PE=3 SV=1
MTKNAVVLLSGGLDSATVLAYARSQGFECYCLSLDYHQRHIAELQAAKNVAKVMGAAAHKTAQLDLSLFGGSALTDDAIAVPVSATEGIPITYVPARNTIMLSLALAWAEVLQAQDIFIGVNALDYSGYPDCRGEYVKAFQDMANLATKSAVEGKTITIHAPLIDMTKAQIVTLGTELGVDYAMTVSCYQADSEGEACGLCDSCRLRRDGFFAAGLADPTRYKMHA

SEQ ID NO: 39780 - protein, 225 aa, Methylotenera sp.
  REGION 1..225: note = tr|A0A1G1B3H1|A0A1G1B3H1_9PROT 7-cyano-7-deazaguanine synthase OS=Methylotenera sp. RIFCSPLOWO2_02_FULL_45_14 OX=1801615 GN=queC PE=3 SV=1
MKKRAVVLLSGGLDSATVLAFARSQGFECYCLSLDYHQRHIAELEAAKNVAKVMGATAHKTAQLDLSLFGGSALTDDAIAVPESATEGIPITYVPARNTIMLSLALAWAEVLGSQDIFIGVNALDYSGYPDCRGEYVKAFQTMANLATKSAVEGKTITVHAPLIDMTKAQIVQLGTTLGVDYAMTVSCYQADSHGEACGLCDSCRLRREGFAAAGLADPTRYKAH

SEQ ID NO: 39781 - protein, 226 aa, Methylotenera sp.
  REGION 1..226: note = tr|A0A2S5L9M4|A0A2S5L9M4_9PROT 7-cyano-7-deazaguanine synthase OS=Methylotenera sp.; OX = 2051956 GN=queC PE=3 SV=1
MTKNAVVLLSGGLDSATVLAYARSQGFDCYCLSLDYHQRHIAELQAAKNVAKVMGAAAHKTAQLDLSLFGGSALTDDAIAVPESATEGIPITYVPARNTIMLSLALAWAEVLQAQDIFIGVNALDYSGYPDCRGEYVKAFQAMANLATKSAVEGKTITIHAPLIDMTKAQIVTLGTTLGVDYAMTVSCYQADSEGEACGLCDSCRLRRDGFLAAGLVDPTRYKVHL

SEQ ID NO: 39782 - protein, 230 aa, Methylotenera versatilis
  REGION 1..230: note = tr|D7DMT7|D7DMT7_METV0 7-cyano-7-deazaguanine synthase OS=Methylotenera versatilis (strain 301); OX = 666681 GN=queC PE=3 SV=1
MENKTKKNAVVLLSGGLDSATCLAIAKSQGFDCYCLSLDYHQRHIAELHAAKNVANVMGAAAHKTANLDLSLFGGSALTDDAIAVPESETAGIPITYVPARNTIMLSLALAWAEVLKSQDIFIGVNALDYSGYPDCRGEYVKAFQAMANLATKSAVEGHAITIHAPLIDMTKAQIVTLGTELGVDYAMTVSCYQADSHGEACGLCDSCRLRREGFAAAGLADPTRYKKHV

SEQ ID NO: 39783 - protein, 222 aa, unidentified
  source 1..222: note = Methylothermaceae bacteria
  REGION 1..222: note = tr|A0A148N777|A0A148N777_9GAMM 7-cyano-7-deazaguanine synthase OS=Methylothermaceae bacteria B42 OX=1798802 GN=queC PE=3 SV=1
MKKAVILLSGGLDSMTTLLMAKNEGFACHCLSFDYGQRQRAELLAAKNIAKRLEAAEHKVIHIGLGEIGGSALTDNAIAVPETATEGIPVTYVPARNTVFLSFALGYAEVLGSLDIFIGVNAVDYSGYPDCRPEYIKAFQNLANLATKAGVEGGRFQIHTPLIHLSKAEIIQAGVQLGADYALTVSCYAADEEGRACGKCDACRLRRQGFDAAGIPDPTRYR

SEQ ID NO: 39784 - protein, 229 aa, Methyloversatilis sp.
  REGION 1..229: note = tr|A0A1B3LHR9|A0A1B3LHR9_9PROT 7-cyano-7-deazaguanine synthase OS=Methyloversatilis sp. RAC08 OX=1842540 GN=queC PE=3 SV=1
MGSTVSSRPAVVLLSGGLDSATVLAMARAQGHDCHCLSVDYGQRHRAELVAAARVAKALGAASHRTLTLDLRAFGGSALTDSAIEVPVDGVAPGIPVTYVPARNTIMLSLALAWAEVLGAQDIHCGVNAVDYSGYPDCRPEYIKAFEAMANLATKAAVEGARLTVHAPLIALTKAGIIRAGADLGVDYGLTVSCYQADDNGRACGVCDACRLRREGFAAAGIADPTPYF

SEQ ID NO: 39785 - protein, 229 aa, Methyloversatilis sp.
  REGION 1..229: note = tr|A0A257XK48|A0A257XK48_9PROT 7-cyano-7-deazaguanine synthase OS=Methyloversatilis sp. 12-65-5 OX=1970398 GN=queC PE=3 SV=1
MGSTVSSRPAVVLLSGGLDSATVLAMARAQGHDCHCLSVDYGQRHRAELVAAARVAKALGAASHRTLTLDLRAFGGSALTDSTINVPVDGVAPGIPVTYVPARNTIMLSLALAWAEVLGAQDIHCGVNAVDYSGYPDCRPEYIKAFEAMANLATKAAVEGARLTVHAPLIALTKAGIIRAGADLGVDYGLTVSCYQADDNGRACGVCDACRLRREGFATADIADPTPYI

SEQ ID NO: 39786 - protein, 230 aa, Methyloversatilis universalis
  REGION 1..230: note = tr|F5RG06|F5RG06_METUF 7-cyano-7-deazaguanine synthase OS=Methyloversatilis universalis (strain ATCC BAA-1314 / JCM 13912 / FAM5) OX=1000565 GN=queC PE=3 SV=1
MSASPASRRPAVVLLSGGLDSATVLAMARAQGFDAYCLSLDYGQRHRAELVAAGRVAQALGAAGHRTISLDLRAFGGSALTDSAIDVPTGGVAEGIPVTYVPARNTIMLSLSLAWAEVLGANDIFCGVNAVDYSGYPDCRPEYIRAFEAMANLATKAAVEGAKLTVHAPLIDLSKAGIIRAGTQLGVDYALTVSCYQADDDGRACGVCDSCRLRREGFATAGVPDPTRYR

SEQ ID NO: 39787 - protein, 236 aa, Methylovirgula ligni
  REGION 1..236: note = tr|A0A3D9Z2C0|A0A3D9Z2C0_9RHIZ 7-cyano-7-deazaguanine synthase OS=Methylovirgula ligni; OX = 569860 GN=queC PE=3 SV=1
MTKALVLFSGGQDSTTCLAFALARFDHVETIGFDYGQRHRVELDQRAKIRERIVLRDPLWARRLGEDHLIDLTVLGQISATAMTRDVAIVTEANGLPNTFVPGRNLIFLAFAAAVAYRRGLKHIVGGMCETDFSGYPDCRDATIKAMQTALNLGMEKDFVLDTPLMWLDKATTWKLAEELGGQALVDLIVEDTHTCYLGERGTRHAWGYGCGACPACQLRAQGWAKYRAEAAASAG

SEQ ID NO: 39788 - protein, 242 aa, Methylovirgula sp.
  REGION 1..242: note = tr|A0A371WS78|A0A371WS78_9RHIZ 7-cyano-7-deazaguanine synthase OS=Methylovirgula sp. 4M-Z18 OX=2293567 GN=queC PE=3 SV=1
MRSGDVTMGDTALVLFSGGQDSATCLAWALARFSHVETVGFDYGQRHRVELDQRAVLRERMLRDMPQWAGRLGPDHTLSLAALGEISDTALTSTAEIAFNAQGLPNTFVPGRNLIFLTFAAALAYRRGIKHIVGGMCETDFSGYPDCRDDTVKAMQVALNLGMDQRFVLHTPLMWIDKAATWRLAEELGGESLVRLIVEDTHTCYLGTRGALHEWGHGCGECPACKLRAEGWRKYRQMKTAA

SEQ ID NO: 39789 - protein, 225 aa, unidentified
  source 1..225: note = Methylovorus glucosetrophus
  REGION 1..225: note = tr|C6XA91|C6XA91_METGS 7-cyano-7-deazaguanine synthase OS=Methylovorus glucosetrophus (strain SIP3-4); OX = 582744 GN=queC PE=3 SV=1
MSKKAVVLLSGGLDSATVLAIARSQGYECYCLSLDYHQRHSAELLAAQRVAECLGAAEHKTVQLDLSLFGGSALTDNRIDVPQSPTEGIPVTYVPARNTIMLSLALAWAEVLKSRDIFIGVNALDYSGYPDCRAEYVRAFQSMANLATKAAVEGDTITVHAPLIDLSKADIVKRGSALGFDYGMTVSCYQADEEGRACGKCDSCRFRREGFLAAGLADPTRYQPG

SEQ ID NO: 39790 - protein, 230 aa, Methylovorus sp.
  REGION 1..230: note = tr|A0A1A9T2N2|A0A1A9T2N2_9PROT 7-cyano-7-deazaguanine synthase OS=Methylovorus sp. MM2; OX = 1848038 GN=queC PE=3 SV=1
MKKAVVLLSGGLDSATVLAIARSQGYECYCLSLDYHQRHSAELHAAERVAKTLGAQAHKTVTLDLSLFGGSALTDMKIDVPEAPSQGIPITYVPARNTIMLSLSLAWAEVLGAQDIFIGVNALDYSGYPDCRGEYVKAFQQMANLATKSAVEGHEITIHAPLIDMTKADIIRHGHALGFDYGMTVSCYQANAQAEACGLCDSCRFRREGFAAAGVIDPTIYQSRYHPIDQ

SEQ ID NO: 39791 - protein, 223 aa, unidentified
  source 1..223: note = Methylovulum psychrotolerans
  REGION 1..223: note = tr|A0A2S5CR23|A0A2S5CR23_9GAMM 7-cyano-7-deazaguanine synthase OS=Methylovulum psychrotolerans OX=1704499 GN=queC PE=3 SV=1
MQKHAIVLLSGGLDSITTLALAQQQGFACYALSFDYGQRHNAELLAASQIAKDYQVLDHKIISLGLGAIGGSALTDDHIAVPDSLQPGIPVTYVPARNTIFLSFALGWAEVLKLQDIFIGVNAVDYSGYPDCRPEFINAFQNLANLATKAGVEGERFTIHTPLISLSKGEIIRQGTRLGVDYSRTVSCYSADPQGHACGICDACRLRKTGFQEAGLNDPTRYQ

SEQ ID NO: 39792 - protein, 223 aa, unidentified
  source 1..223: note = Methylovulum psychrotolerans
  REGION 1..223: note = tr|A0A1Z4BVB4|A0A1Z4BVB4_9GAMM 7-cyano-7-deazaguanine synthase OS=Methylovulum psychrotolerans OX=1704499 GN=queC PE=3 SV=1
MQKHAIVLLSGGLDSITTLALAQQQGFACYALSFDYGQRHNAELLAASQIAKDYQVLDHKIISLGLGAIGGSALTDDHIAVPDSLQPGIPVTYVPARNTIFLSFALGWAEVLKLQDIFIGVNAVDYSGYPDCRPEFIHAFQNLANLATKAGVEGERFTIHTPLISLSKGEIIRQGTRLGVDYSRTVSCYSAAPQGHACGICDACRLRKTGFQEAGLNDPTRYQ

SEQ ID NO: 39793 - protein, 223 aa, Methylovulum sp.
  REGION 1..223: note = tr|A0A522DJE9|A0A522DJE9_9GAMM 7-cyano-7-deazaguanine synthase OS=Methylovulum sp.; OX = 1916980 GN=queC PE=3 SV=1
MQKKAIVLLSGGLDSITVLALAKQQGFTCYALSFDYGQRHNAELIAATQIAKDYQVEDHKIIKLGLGSIGGSALTDDHIAVPDQLQEGIPVTYVPARNTIFLSFALGWAEVLKLQDIFIGVNAIDYSGYPDCRPEFIKTFQQLANLATKAGVEGKHFTIHTPLISLSKAEIIKKGIALGVNYKHTVSCYSADEQGRACRVCDACRLRKAGFIEAGIIDPTQYQ

SEQ ID NO: 39794 - protein, 229 aa, Micavibrio sp.
  REGION 1..229: note = tr|A0A1Z8KQX9|A0A1Z8KQX9_9PROT 7-cyano-7-deazaguanine synthase OS=Micavibrio sp. TMED2; OX = 1986633 GN=queC PE=3 SV=1
MKTLVVCSGGLDSITLAHMVARDHDLIGLISFDYGQRHKKELGFAKEHADDLGVEHILIDISAIGRQLSGSALTDDVTVPDGHYAEESMRITVVPNRNAIMLSIAFGVASARGAEAVATAVHGGDHFIYPDCRPDFIEAFQTMQDHALEGMGRIRLYTPFVHRTKGDIAAEGLKLGVDFTRTWSCYKGGDIHCGRCGTCVERREAFHLAGGIDPTVYADPEFWKEACNV

SEQ ID NO: 39795 - protein, 231 aa, Micavibrio sp.
  REGION 1..231: note = tr|A0A1Z8PXG6|A0A1Z8PXG6_9PROT 7-cyano-7-deazaguanine synthase OS=Micavibrio sp. TMED27; OX = 1986607 GN=queC PE=3 SV=1
MKILVVCSGGMDSITLAYKAAKEYELAGLISFDYGQRHKKELEFAALAAKRLNTIHKCIDLSSLGSVLSGSALTDDIDVPDGHYAEETMKITVVPNRNAIMLSIAYGAAAAMGADTVATAVHGGDHFIYPDCRPDFINSFSTMQNHALEGVAEISLYTPYLDKTKAQIAEEGGALGVPYEETWSCYKGGAQHCGRCGTCVERREAFALAGLDDPTIYQDPDFWIKAVQDAQ

SEQ ID NO: 39796 - protein, 429 aa, Microbacterium hominis
  REGION 1..429: note = tr|A0A2K9D5I2|A0A2K9D5I2_9MICO Uncharacterized protein OS=Microbacterium hominis OX=162426 GN=CXR34_00740; PE = 4 SV=1
MTSIALCLSREDAAKSGADEVFLWDGTPGDSFNTGLRPDLRQLGTVPSINADFVRVALTVYVADHSVRRERGGSNWNQRDLVLTVPVIHAEKWQAVAAELERTLAFLTGDRWTLQFARLAASETSGVLVPDTAARTVLVSGGADSASGALVSAASLRSGEGQRLVSHSSSGAGASAPQQRVAAALEALFSGTTIHHYQVHLQRRTHRLNGTRFRREPSSRSRSLLFLALGLAVASQSGRGLWIAENGFASINPPLGPERVGALSTRTTQPWFLWRVGSLLTDLGGYGEIENPFQALTKGDEYRRVVELVGADRAAAFLSATNSCSHSDQQYLGQVASGSHCGKCFGCVLRRAAFAAADLSDATPYLADRGGRFAKYAEQRSIENAVRDFVDAGVDESFLMTTPLPPALTVADARTLYARGLAELENYLG

SEQ ID NO: 39797 - protein, 431 aa, Microbacterium ketosireducens
  REGION 1..431: note = tr|A0A0M2H1Z7|A0A0M2H1Z7_9MICO 7-cyano-7-deazaguanine synthase OS=Microbacterium ketosireducens OX=92835 GN=queC PE=4 SV=1
MVFSYELTVTPVPSTPTSDADRTFYWHDAHSHRYFRANYGPLLGGLGAVNDRNIDLVRIAIAVLAADRSSLRSGRLSNWNQRDISVAVEVLAASPWRTVQPELEKLLGFLTGDIWRFTFREDAGGPEQIATVGLGATRVVLLSGGADSATGALLSAVDLASRGEQQVLVSHWASSNLTPVQSRVAAAIEEIAPGTTADHVKVLLARGRHSPTGKAYGKENSTRSRSFLFIALGLAVASVHKVPLWLPENGYASINPPLSRSRRGSLSTKTTHPKFLGDLISLLASVGAHHDLVNPHAAETKGEMFQRVRELLGNERASKFLSDTWSCSHTGQKSYGIPASVACGVCFGCVLRRASFHASGLDDSTPYLVPADDQQTAWVKEKSVVPAMSDFLRDSFGESDLAKLQLPSSIALADALELCRRGREELQGLDL

SEQ ID NO: 39798 - protein, 738 aa, Microbacterium lacticum
  REGION 1..738: note = tr|A0A4Y3UP80|A0A4Y3UP80_9MICO Queuosine biosynthesis protein QueC OS=Microbacterium lacticum; OX = 33885 GN=FHX68_3044 PE=4 SV=1
MSNLAIPGSAAQPLDLSSLPDVAALTAQQAHLIERDAETWLLEHPAVEDAAVVVTGFTRDERVTKCARCGIASVFPGLDFDDQLVCSLCRDYEENRDQILRYFGRPDAFGELIRKRAAEADGEFDCLLLYSGGKDSTYVLFQLLELGLKVMTYTFDNGFISKTALRNVEEITQELGVPHVTLTRADQPKIFLESLHEHKSVCNGCFRSLLEIGHQVAAEHGIPSIVTGLSRGQIIDERLSWFYRNGIYDPERIDADLDSGRQVYHLLHRGGENYIGDRVKVVDFFRYSEVTKEDIRRFLAEHPSWSQPADTGFCSSNCLINDVGVFVHKLERGYHNYEAPTRWEVRLGHLTKSVADEELVDPTVNRRVTTLLDRIGYEQPVTREILAARMIAYVVTNGTSIDEVRAWAEQNALGSVPRILPSRWVPLSAVPRIGGALEFRSLPRMSDSRFDAVPMEPEATPTPVGFLEPTRALALAGADRPRARAVALDIPWGIAAGRIAVAVAAAASEVPAARLQWTASEPPEFERVPAGRAWVKRLDLARSSSEEWPQQVRTLTARLLARHDPHAGCLQAFMLDGPKGTRVLVLTADESGLGPDGLAPVVGAIGRILGIWETPQSTGAAQAREEAVRWLRARDGGARIRVSGGGAPEGDASEHGVVDVAAEDWTTELVVYDGAGVPGAAAPYRELDARFRRFADPVRPDGAPADSIVVEPAADGWRLVPESGEAVEMPVTAAVGGR

SEQ ID NO: 39799 - protein, 426 aa, Microbacterium oxydans
  REGION 1..426: note = tr|A0A3S9X148|A0A3S9X148_9MICO 7-cyano-7-deazaguanine synthase OS=Microbacterium oxydans; OX = 82380 GN=queC PE=4 SV=1
MRHFKLLLDTAEASDGEESFYWTRDADSTFLGSLGSSLGSVGAVPSLNIDLVRIAVGVYAADRSVPRKYGGSDWNQREISLTLPLLNVDHWTSRERELASMLDFLSGDSWTLKFVESTPPDEDVALTTVDAARVVLFSGGADSAIGALKSKTELSEKGHHVLVSHYSANHIAPIQKALEAHLAAVSPRRSQSHEVFHLARRAVRLDGSEFESEPSSRSRSFLFLALGLATAAVHGVDLWIPENGFASINPPLGPGRRGSLSTRTTHPAFLKAFNSLLSGSGINSRIRNPFASWTKGEMVAWAIQVLGKERASVYLSTSNSCSSTGQRSFGVPLRVHCGVCFGCVLRRSSFAAADLADKTEYADSRSNAGLANWLERISVVPAVREFVSTGVRPRDLMALSLPHDYKLADALDLTSRGIAELKEYVR

SEQ ID NO: 39800 - protein, 429 aa, Microbacterium oxydans; identical to SEQ ID NO: 39796
  REGION 1..429: note = tr|A0A3Q9J8E0|A0A3Q9J8E0_9MICO 7-cyano-7-deazaguanine synthase OS=Microbacterium oxydans; OX = 82380 GN=queC PE=4 SV=1

SEQ ID NO: 39801 - protein, 210 aa, Microbacterium sp.
  REGION 1..210: note = tr|A0A1N7GE65|A0A1N7GE65_9MICO 7-cyano-7-deazaguanine synthase OS=Microbacterium sp. RURRCA19A OX=1907391 GN=SAMN05880568_2823 PE=3 SV=1
MSSIRREVLLLSGGLDSVALAYEIRPAYTLFINYGQRASVAEERSARAVANALGLEFHSLVVDLSATSGGLMSTESLSIDNAPSVEWWPFRNQMLISLAAAWACRNTGALSGAESVSLLIGCVQGDGDRHIDGSEQFVDQISRLLQLQEGAMTVVAPAIHRSSEQLVVDSTIPDALLAYSHSCHRASLPCMECPGCYKRERVLVSLGRLQ

SEQ ID NO: 39802 - protein, 220 aa, Microbacterium sp.
  REGION 1..220: note = tr|A0A542GTY5|A0A542GTY5_9BACI 7-cyano-7-deazaguanine synthase OS=Microbacterium sp. SLBN-1 OX=1489561 GN=queC PE=3 SV=1
MKNDKAVVVFSGGQDSTTCLFWAKKNFKEVEAVTFNYGQRHVAELDCAREIAEELDIPHHVLDMSLLNQLAPSALTRDEDIVQKDGELPSTFVPGRNLMFLSFAGVLAKQIGAKHIVTGVCETDFSGYPDCRDVFVKSLNVTLNLSMDDEFVIHTPLMWIDKAETWELADQLGAFEYVQEKTLTCYNGIKGAGCGECPACELRQRGLDQYLERRAGGDTE

SEQ ID NO: 39803 - protein, 234 aa, Microbispora rosea
  REGION 1..234: note = tr|A0A1N7HHT8|A0A1N7HHT8_9ACTN 7-cyano-7-deazaguanine synthase OS=Microbispora rosea; OX = 58117 GN=queC PE=3 SV=1
MTTTKRKAVVLLSGGLDSTTVLAIAREQGYETYALSFRYGQRHTEELEAAKRVAAELGVAEHVIADINLAVFGGSALTDDALDVPHHESVDDLGSEIPITYVPARNTVFLSFALAWAETLSSSDVFIGVNALDYSGYPDCRPEYIEAYERMANLATKAGVEGTQKLKIHTPLIELTKAQTIERGLELGVDYSWTHSCYDPIDGRACGTCDSCLLRGRGFAELGLVDPSLVSAKS

SEQ ID NO: 39804 - protein, 234 aa, unidentified
  source 1..234: note = Microbispora triticiradicis
  REGION 1..234: note = tr|A0A372PCA7|A0A372PCA7_9ACTN 7-cyano-7-deazaguanine synthase OS=Microbispora triticiradicis OX=2200763 GN=queC PE=3 SV=1
MATSKPKAVVLLSGGLDSTTVLAIARHEDYETYALSFRYGQRHTEELEAAKKIAVELGAAQHVITDINLSIFGGSALTDDKLEVPHHDSVEELGTEIPITYVPARNTIFLSFALAWAETLGSSDVFIGVNALDYSGYPDCRPEYIEAYERMANLATKAGVEGIQKLRIHTPLIELTKAQTIQRGLELGVNYAWTHSCYDPVDGKACQTCDSCLLRSRGFAELGLTDPSFTSLRA

SEQ ID NO: 39805 - protein, 224 aa, Microbulbifer agarilyticus
  REGION 1..224: note = tr|A0A1Q2M7B3|A0A1Q2M7B3_9GAMM 7-cyano-7-deazaguanine synthase OS=Microbulbifer agarilyticus OX=260552 GN=queC PE=3 SV=1
MSSKKAVVLLSGGLDSATVLAMARAEGYECYALGFDYGQRHSAELMAAQRVAADLGASEHKVVKLDLRVIGGSALTDDSIDVPEEETSGIPVTYVPARNTVFLSIALGWAEVLGAQDIFVGVNAVDYSGYPDCRPEYIEAYEKMANLATRAGVEGNKLTIHAPLMKMSKADIVERGTGLGVDYSLTVSCYQALPSGAACGRCDSCRLRAAGFAEAGLADPTVYA

SEQ ID NO: 39806 - protein, 226 aa, unidentified
  source 1..226: note = Microbulbifer aggregans
  REGION 1..226: note = tr|A0A1C9W3D4|A0A1C9W3D4_9GAMM 7-cyano-7-deazaguanine synthase OS=Microbulbifer aggregans; OX = 1769779 GN=queC PE=3 SV=1
MTAKKAVVLLSGGLDSATVLAMAQEQGYECYALGFDYGQRHRSELAAAQRVATAGGAVEHKVVQLDLRSIGGSALTDENIAVPEDEPGGIPVTYVPARNTVFLSIALGWAEVLGAQDIFVGVNAVDYSGYPDCRPEYIEAFERMANLATRAGVEGQRLHIRAPLMEMSKADIVRRGTELGVDYSLTVSCYQADEGGAACGRCDSCRLRAAGFAEAGLADPTVYRGT

SEQ ID NO: 39807 - protein, 225 aa, Microbulbifer donghaiensis
  REGION 1..225: note = tr|A0A1M5CVL6|A0A1M5CVL6_9GAMM 7-cyano-7-deazaguanine synthase OS=Microbulbifer donghaiensis OX=494016 GN=queC PE=3 SV=1
MTAKKAVVLLSGGLDSATVLAMARADGYECFALGFDYGQRHSAELMAAQRVAADLDAREHKVVKLDLRAIGGSALTDDSIEVPEEETSGIPVTYVPARNTVFLSIALGWAEVLGAQDIFVGVNAVDYSGYPDCRPEYIAAFEKMANLATRAGVEGHKLSVRTPLMHMSKAEIVRRGTELGVDYSLTVSCYQALPNGAACGRCDSCRLRAAGFIEAGLPDPTVYVG

SEQ ID NO: 39808 - protein, 225 aa, Microbulbifer marinus
  REGION 1..225: note = tr|A0A1H4AJK0|A0A1H4AJK0_9GAMM 7-cyano-7-deazaguanine synthase OS=Microbulbifer marinus; OX = 658218 GN=queC PE=3 SV=1
MTAKKAVVLLSGGLDSATVLAMARADGYECYALGFDYGQRHSAELMAAQRVAADLEAREHKVVKLDLRAIGGSALTDDDIEVPEEETSGIPVTYVPARNTVFLSIALGWAEVLGAQDIFVGVNAVDYSGYPDCRPEYISAFEKMANLATRAGVEGHKLSIRTPLMHMSKAEIVRRGTELGVDYSLTVSCYQAQPNGAACGRCDSCRLRAAGFIEAGLADPTVYVG

SEQ ID NO: 39809 - protein, 225 aa, Microbulbifer sp.
  REGION 1..225: note = tr|A0A2S1JNJ2|A0A2S1JNJ2_9GAMM 7-cyano-7-deazaguanine synthase OS=Microbulbifer sp. A4B17; OX = 359370 GN=queC PE=3 SV=1
MTAKKAVILLSGGLDSATVLAMARSEGYECYALGFDYGQRHEAELLAAQKVAKDLGAVEHKVVKLDLRSIGGSALTDDSIEVPEEETTGIPVTYVPARNTVFLSIALGWAEVLGAQDIFVGVNAVDYSGYPDCRPEYIEAYEKMANLATRAGVEGKKLSIRAPLMDMSKADIVTEGARLGVDYSLTVSCYQALPDGAACRRCDSCRLRAAGFAKAGLEDPTVYAS

SEQ ID NO: 39810 - protein, 225 aa, Microbulbifer sp.
  REGION 1..225: note = tr|A0A510IPD5|A0A510IPD5_9GAMM 7-cyano-7-deazaguanine synthase OS=Microbulbifer sp. GL-2; OX = 2591606 GN=queC PE=3 SV=1
MTAKKAVILLSGGLDSATVLAMARADGYECYALGFDYGQRHEAELLAAERVAEAQGAREHKVVKLDLRAIGGSALTDDSIEVPEEETSGIPVTYVPARNTIFLSIALGWAEVLGAQDIFVGVNAVDYSGYPDCRPEYIEAYEKMANLATRAGVEGYKLSIRAPLMQMSKADIVCEGTRLGVDYSLTVSCYQARPDGAACGRCDSCRLRAAGFNDAGLQDPTVYAQ

SEQ ID NO: 39811 - protein, 225 aa, Microbulbifer thermotolerans
  REGION 1..225: note = tr|A0A143HJ69|A0A143HJ69_9GAMM 7-cyano-7-deazaguanine synthase OS=Microbulbifer thermotolerans OX=252514 GN=queC PE=3 SV=1
MTAKKAVVLLSGGLDSATVLAMARAEGYECYALGFDYGQRHSAELVAAQRVAADLGAREHKVVKLDLRAIGGSALTDDNIAVPEEETSGIPVTYVPARNTVFLSIALGWAEVLEARDIFVGVNAVDYSGYPDCRPEYIDSFEKMANLATRAGVEGHKLRIRAPLMHMSKADIVRRGTELGVDYSLTVSCYQARPDGGACGRCDSCRLRAAGFAEAGLADPTVYAG

SEQ ID NO: 39812 - protein, 226 aa, Microbulbifer yueqingensis
  REGION 1..226: note = tr|A0A1G8VT11|A0A1G8VT11_9GAMM 7-cyano-7-deazaguanine synthase OS=Microbulbifer yueqingensis OX=658219 GN=queC PE=3 SV=1
MTAKKAVVLLSGGLDSATVLAMARAEGYECYALGFDYGQRHRAELLAARRVAADLGATEHKVVELDLRAIGGSALTDDSIAVPEEETGGIPVTYVPARNTVFLSIALGWAEVLGAQDIFVGVNAVDYSGYPDCRPEYIAAFEKMANLATRAGVEGRRLHIRTPLMHMSKAEIVRVGSGLGVDYSLTVSCYQAQADGAACGRCDSCRLRAAGFIEAGLADPTVYAGG

SEQ ID NO: 39813 - protein, 203 aa, unidentified
  source 1..203: note = Micrococcales bacterium
  REGION 1..203: note = tr|A0A1Q4A0E3|A0A1Q4A0E3_9MICO 7-cyano-7-deazaguanine synthase OS=Micrococcales bacterium 72-143 OX=1895790 GN=BGO94_08330 PE=3 SV=1
MSAGGTVLLLSGGLDSAALAMMIRPALTVFVDYGQTPREAESRAARAVAAHLALPFTAIQLPLGELGGGLMHNDTPLPNAPSPEWWPFRNQFLATAGAAVALRHGLTAVALASVRGDGDRHVDGSLPFYVQLDAVMKMQEGGVGVIAPAIHLSTVELLREVGADRSLIGWTVSCHRANEPCGDCPGCWKRELVLTEYLPSLDQ

SEQ ID NO: 39814 - protein, 297 aa, unidentified
  source 1..297: note = Micrococcales bacterium
  REGION 1..297: note = tr|A0A2E0WAB0|A0A2E0WAB0_9MICO TIGR00268 family protein OS=Micrococcales bacterium OX=2026762; GN = CMH41_02760 PE=4 SV=1
MTSPPEMSLRQRLTDLTEQLGGYRGILVAFSGGADSAFLLAAAARSEAEVLAATSTSASLASGEWAAASKFARNLGVEHIRIDSRELDREGYRANGPDRCYHCKSELLDILVDVAQQRDLATVATGTNADDVAQEHRPGLLAAQERKIVTPLADAGFSKTEVREASRLWGLSTWDKPQAACLASRIAYGVSVDEERLRRIDRAEVAVRAALGRAGITSTNLRVRDRGDSALIEVDYSVVAEAIAEPTVVTAVLEAGFSTAEIDPRGFRSGSMNSDLLPEQQIRLGSGVSSWNLPFVD

SEQ ID NO: 39815 - protein, 398 aa, unidentified
  source 1..398: note = Micrococcus aloeverae
  REGION 1..398: note = tr|A0A5F0UJY3|A0A5F0UJY3_9MICC Queuosine biosynthesis protein queC OS=Micrococcus aloeverae; OX = 1391911 GN=E4T87_10885 PE=4 SV=1
MAGGTDTVRSAVGWWLPSLGPVPTQAIDLVRIAGGAYLVDRLSGRPSAFTRRLHLTVEVADPEPWEGEAIDQLAQLLFWLTGDTWELQLVQDPTTPNDPIAGPSGGADSVALLSGGLDSYLGALHLLATLDEEPLFVGHYDTATAVRRAQNTVHSWLEEAHTPPPSYTQIEFTQVADKKESSSRSRSLLFLALGTAVATSRGASKLFVPENGFTSLNLPLHPNRAGALSTRSTHPETFYRVNLLLQSLNLSLAVTNPFATFTKGEEMRLVADSHPPGGWDRIAGLTVSCSKLDGARIKGGNSTLNCGLCYACVTRRGAFIAAGVNDSTSYLSDGLTGNARLELLDRRYSDRAAISYATTRGIDDDVIDAGTWPPDADLDEISDLARRGLAELGKVTLI

SEQ ID NO: 39816 - protein, 398 aa, Micrococcus luteus; identical to SEQ ID NO: 39815
  REGION 1..398: note = tr|A0A5E8QAE0|A0A5E8QAE0_MICLU Queuosine biosynthesis protein queC OS=Micrococcus luteus OX=1270; GN = CYJ94_11140 PE=4 SV=1

SEQ ID NO: 39817 - protein, 222 aa, Micrococcus lylae; identical to SEQ ID NO: 39415
  REGION 1..222: note = tr|A0A378P0N2|A0A378P0N2_9MICC 7-cyano-7-deazaguanine synthase OS=Micrococcus lylae; OX = 1273 GN=queC PE=3 SV=1

SEQ ID NO: 39818 - protein, 220 aa, Micrococcus sp.
  REGION 1..220: note = tr|A0A2J9IQB2|A0A2J9IQB2_9MICC 7-cyano-7-deazaguanine synthase OS=Micrococcus sp. FDAARGOS_333 OX=1930558 GN=queC PE=3 SV=1
MKTVAVLLSGGLDSTAAIAVADREADLRLAISVDYGQRHRREIDSARRVAEMYRIPLTVLDLRDWGRSLKGSALTDPSVPVPADSYDVDSMAVTVVPNRNATMLMAAAGVAHAWGIEEVWTAVHSGDHVIYPDCRPEFIASAAQTAELGTGGHVTIRAPFVHMDKAQIVATGARLGAPFELTWSCYEGSETHCGVCGTCRERADAFDRAGVIDPTFYRKA

SEQ ID NO: 39819 - protein, 224 aa, unidentified
  source 1..224: note = Microcoleaceae bacterium
  REGION 1..224: note = tr|A0A355CIL2|A0A355CIL2_9CYAN 7-cyano-7-deazaguanine synthase OS=Microcoleaceae bacterium UBA10368 OX=2055793 GN=queC PE=3 SV=1
MKAVILLSGGLDSSTVLYQAKADGCECYAISFDYKQRHRRELESARAIALSASVKAHQIVNFDLTLWGGSALTDNEIDLPIDRSLTEMSQNIPITYVPARNTIFLSFALAYAETLGAQRIYIGVNALDYSGYPDCRLDYIQAMQEVFRLGTKQGREGEPINIVTPLIELKKTEIIQLGNKLGVPWEQTWSCYAGGENACGVCDSCRLRLAAFEELGLQDPVPYA

SEQ ID NO: 39820 - protein, 224 aa, unidentified; identical to SEQ ID NO: 39819
  source 1..224: note = Microcoleaceae bacterium
  REGION 1..224: note = tr|A0A3D5GAZ1|A0A3D5GAZ1_9CYAN 7-cyano-7-deazaguanine synthase OS=Microcoleaceae bacterium UBA9251 OX=2055794 GN=queC PE=3 SV=1

SEQ ID NO: 39821 - protein, 231 aa, Microcoleus sp.
  REGION 1..231: note = tr|K9W8J4|K9W8J4_9CYAN 7-cyano-7-deazaguanine synthase OS=Microcoleus sp. PCC 7113 OX=1173027 GN=queC; PE = 3 SV=1
MKAVILLSGGLDSSTTLYQAKADGYECYAISFDYQQRHRRELEYAKAIAGCARVKEHQIVSFDLRQWGGSALTDNDLDLPEERTLDEMSQNIPITYVPARNTIFLSFGLSYAEAIDAQRVYVGVNALDYSGYPDCRPDYIQAMQKVFDLGTKQGREGTAIEIATPLIDLKKTEIIQLGNQLGVPWEHTWSCYAGGDLACGVCDSCRLRLAAFAELGLQDPLPYSVRSKELN

SEQ ID NO: 39822 - protein, 224 aa, Microcoleus vaginatus
  REGION 1..224: note = tr|F5UN93|F5UN93_9CYAN 7-cyano-7-deazaguanine synthase OS=Microcoleus vaginatus FGP-2 OX=756067 GN=queC; PE = 3 SV=1
MKAVILLSGGLDSSTVLYQAKADGCECYAISFDYKQRHRRELESARAIALAAGVKAHQIVNFDLTLWGGSALTDNEMELPIDRNLAEMSQNIPITYVPARNTIFLSFALAYAETLEADRIYIGVNALDYSGYPDCRLDYIQAMQEVFRLGTKQGREGNAINIITPLIELKKTEIIQLGNQLGVPWEQTWSCYAGGENACGVCDSCRLRLAAFEELGLKDPVPYA

SEQ ID NO: 39823 - protein, 230 aa, Microcystis aeruginosa
  REGION 1..230: note = sp|B0JIA6|QUEC_MICAN 7-cyano-7-deazaguanine synthase; OS = Microcystis aeruginosa (strain NIES-843) OX=449447; GN = queC PE=3 SV=1
MTKKAIILLSGGLDSATTAAIALAAGYQLIALSFRYGQRHERELAAAKKIANFLNIKEHHLIEVNLSLWGGSALTDQSIAIPQEGINPDIIPITYVPGRNTVFISIALSLAEAREAEAIYLGINAVDYSGYPDCRPEYLDAFQTLANLSSKAGLEGKAPQLIAPLVMDSKVDIVRRAVSLGVPIADTWSCYQGEVEPCGLCDSCRIRDQALIEAGYPELATPLLKNSRGK

SEQ ID NO: 39824 - protein, 232 aa, Microcystis aeruginosa
  REGION 1..232: note = tr|A0A5J5LUK8|A0A5J5LUK8_MICAE 7-cyano-7-deazaguanine synthase QueC OS=Microcystis aeruginosa EAWAG127a OX=2529855 GN=queC PE=4 SV=1
MTKKAIILLSGGLDSATTAAIASAAGYQLIALSFRYGQRHERELAAAKKIANFLEIKEHHLLEVNLSLWGGSALTDQSIAIPQEGINPNIIPITYVPGRNTVFISIALSLAEAREAEAIYLGINAVDYSGYPDCRPEYLDAFQTLANLSSKAGLEGKAPQLIAPLVMDSKVDIVRRAVSLGVPIADTWSCYQGEVEPCGLCDSCRIRDQALIEAGYPELATPLFKQRGDSQQ

SEQ ID NO: 39825 - protein, 232 aa, Microcystis flosaquae
  REGION 1..232: note = tr|A0A552KL64|A0A552KL64_9CHRO 7-cyano-7-deazaguanine synthase OS=Microcystis flos-aquae Mf_QC_C_20070823_S10D OX=2486236 GN=queC PE=3 SV=1
MTKKAIILLSGGLDSATTAAIALAAGYQLIALSFRYGQRHERELAAAKKIANFLEIKEHHLIEVNLSLWGGSALTDQSIAIPQEGINPNIIPITYVPGRNTVFISIALSLAEAREAEAIYLGINAVDYSGYPDCRPEYLEAFQTLANLSSKAGLEGKAPQLIAPLVMDSKVDIVRRAVSLGVPIADTWSCYQGEVEPCGLCDSCRIRDQALIEAGYPELATSFLKQSGKGGA

SEQ ID NO: 39826 - protein, 232 aa, Microcystis flosaquae
  REGION 1..232: note = tr|A0A552LDH7|A0A552LDH7_9CHRO 7-cyano-7-deazaguanine synthase OS=Microcystis flos-aquae Mf_WU_F_19750830_S460 OX=2486237 GN=queC PE=3 SV=1
MTKKAIILLSGGLDSATTAAIALAAGYQLIALSFRYGQRHERELAAAKKIANFLDIKEHHLIEVNLSLWGGSALTDQSIAIPQEGINPNIIPITYVPGRNTVFISIALSLAEAREAEAIYLGINAVDYSGYPDCRPEYLEAFQTLANLSSKAGLEGKAPQLIAPLVMDSKVDIVRRAVSLGVPIADTWSCYQGEVEPCGLCDSCRIRDQALIEAGYPELATSFLKQSGKGGA

SEQ ID NO: 39827 - protein, 242 aa, unidentified
  source 1..242: note = Microcystis novacekii
  REGION 1..242: note = tr|A0A552J5C8|A0A552J5C8_9CHRO 7-cyano-7-deazaguanine synthase OS=Microcystis novacekii Mn_MB_F_20050700_S1D OX=2486266 GN=queC PE=3 SV=1
MTKKAIILLSGGLDSATTAAIALAAGYQLIALSFRYGQRHERELAAAKKIANFLNIKEHHLIEVNLSLWGGSALTDQSIAIPQEGINPNIIPITYVPGRNTVFISIALSLAEARAAEAIYLGINAVDYSGYPDCRPQYLDAFQTLANLSSKAGLEGKAPQLIAPLVMDNKVDIVRRAVSLGVPIADTWSCYQGEVEPCGLCDSCRIRDRALIEAGYPELATPLLKQSGKIGRIVKNGDNLGN

SEQ ID NO: 39828 - protein, 242 aa, unidentified
  source 1..242: note = Microcystis panniformis
  REGION 1..242: note = tr|A0A0K1S541|A0A0K1S541_9CHRO 7-cyano-7-deazaguanine synthase OS=Microcystis panniformis FACHB-1757 OX=1638788 GN=queC PE=3 SV=1
MTKKAIILLSGGLDSATTAAIALAAGYQLIALSFRYGQRHERELAAAKKIANFLDIKEHHLIEVNLSLWGGSALTDQSIAIPQEGINPNIIPITYVPGRNTVFISIALSLAEAREAEAIYLGINAVDYSGYPDCRPQYLEAFQTLANLSSKAGLEGKAPQLIAPLVMDSKVDIVRRAVSLGVPIADTWSCYQGEVEPCGLCDSCRIRDQALIEAGYPELATPLLKQSGKIGRIVKNGDNLGN

SEQ ID NO: 39829 - protein, 225 aa, unidentified
  source 1..225: note = Microcystis panniformis
  REGION 1..225: note = tr|A0A552PZJ4|A0A552PZJ4_9CHRO 7-cyano-7-deazaguanine synthase OS=Microcystis panniformis Mp_MB_F_20051200_S9 OX=2486223 GN=queC PE=3 SV=1
MTKKAIILLSGGLDSATTAAIALAAGYQLIALSFRYGQRHERELAAAKKIANFLNIKEHHLIEVNLSLWGGSALTDQSIAIPQEGINPNIIPITYVPGRNTVFISIALSLAEARAAEAIYLGINAVDYSGYPDCRPQYLEAFQTLANLSSKAGLEGKAPQLIAPLVMDSKVDIVRRAVSLGVPIADTWSCYQGEVKPCGLCDSCRIRDQALIEAGYPELATRLWK

SEQ ID NO: 39830 - protein, 242 aa, Microcystis sp.; identical to SEQ ID NO: 39828
  REGION 1..242: note = tr|A0A552AMT9|A0A552AMT9_9CHRO 7-cyano-7-deazaguanine synthase OS=Microcystis sp. M_OC_Ca_00000000_C217Col OX=2486213 GN=queC PE=3 SV=1

SEQ ID NO: 39831 - protein, 225 aa, Microcystis sp.
  REGION 1..225: note = tr|A0A552C3D3|A0A552C3D3_9CHRO 7-cyano-7-deazaguanine synthase OS=Microcystis sp. Msp_OC_L_20101000_S702 OX=2486218 GN=queC PE=3 SV=1
MTKKAIILLSGGLDSATTAAIAIAAGYQLIALSFRYGQRHERELAAAKKIANFLNIKEHHLIEVNLSLWGGSALTDQSIAIPQEGINPNIIPITYVPGRNTVFISIALSLAEARAAEAIYLGINAVDYSGYPDCRPQYLEAFQTLANLSSKAGLEGKAPQLIAPLMMDSKVDIVRRAVSLGVPIADTWSCYQGEVKPCGLCDSCRIRDQALIEAGYPELATRLWK

SEQ ID NO: 39832 - protein, 230 aa, unidentified
  source 1..230: note = Microcystis viridis
  REGION 1..230: note = tr|A0A3G9JAV0|A0A3G9JAV0_MICVR 7-cyano-7-deazaguanine synthase OS=Microcystis viridis NIES-102 OX=213615 GN=queC PE=3 SV=1
MTKKAIILLSGGLDSATTAAIALAAGYQLIALSFRYGQRHERELAAAKKIANFLDIKEHHLIEVNLSLWGGSALTDQSIAIPQEGINPNIIPITYVPGRNTVFISIALSLAEAREAEAIYLGINAVDYSGYPDCRPQYLEAFQTLANLSSKAGLEGKAPQLIAPLVMDSKVDIVRRAVSLGVPIADTWSCYQGEVEPCGLCDSCRIRDHALIEAGYPELATPLLKNSRGK

SEQ ID NO: 39833 - protein, 242 aa, unidentified
  source 1..242: note = Microcystis viridis
  REGION 1..242: note = tr|A0A552HL16|A0A552HL16_MICVR 7-cyano-7-deazaguanine synthase OS=Microcystis viridis Mv_BB_P_19951000_S68D OX=2486270 GN=queC PE=3 SV=1
MTKKAIILLSGGLDSATTAAIALAAGYQLIALSFRYGQRHERELAAAKRIANFLNIKEHHLIEVNLSLWGGSALTDQSIAIPQEGINPNIIPITYVPGRNTVFISIALSLAEARAAEAIYLGINAVDYSGYPDCRPEYLDAFQTLANLSSKAGLEGKAPQLIAPLVMNSKVDIVRRAVSLGVPIADTWSCYQGEVEPCGLCDSCRIRDQALIEAGYPELATPLLKQPGKIGRIVKNGDNLGN

SEQ ID NO: 39834 - protein, 242 aa, unidentified
  source 1..242: note = Microcystis wesenbergii
  REGION 1..242: note = tr|A0A552JS23|A0A552JS23_9CHRO 7-cyano-7-deazaguanine synthase OS=Microcystis wesenbergii Mw_QC_S_20081001_S30D OX=2486245 GN=queC PE=3 SV=1
MIKKAIILLSGGLDSATTAAIALAAGYQLIALSFRYGQRHERELAAAKKIANFLDIKEHHLIEVNLSLWGGSALTDQSIAIPQEGINPNIIPITYVPGRNTVFISIALSLAEARAAEAIYLGINAVDYSGYPDCRPQYLEAFQTLANLSSKAGLEGKAPQLIAPLVMDSKVDIVRRAVSLGVPIADTWSCYQGEVEPCGLCDSCRIRDQALIEAGYPELATPLLKQSGKIGRIVKNGDNLGN

SEQ ID NO: 39835 - protein, 230 aa, unidentified
  source 1..230: note = Microcystis wesenbergii
  REGION 1..230: note = tr|A0A552MC07|A0A552MC07_9CHRO 7-cyano-7-deazaguanine synthase OS=Microcystis wesenbergii Mw_MB_S_20031200_S109D OX=2486241 GN=queC PE=3 SV=1
MTKKAIILLSGGLDSATTAAIALAAGYQLIALSFRYGQRHERELAAAKKIANFLNIKEHHLIEVNLSLWGGSALTDQSIAIPQEGINPNIIPITYVPGRNTVFISIALSLAEARAAEAIYLGINAVDYSGYPDCRPEYLDAFQTLANLSSKAGLEGKAPQLIAPLVMDSKVDIVRRAVSLGVPIADTWSCYQGEVEPCGLCDSCRIRDRALIEAGYPELATSLLKNSQGK

SEQ ID NO: 39836 - protein, 268 aa, unidentified
  source 1..268: note = Microgenomates group
  REGION 1..268: note = tr|A0A0G1IBD8|A0A0G1IBD8_9BACT 7-cyano-7-deazaguanine synthase OS=Microgenomates group bacterium GW2011_GWC1_44_23 OX=1618523 GN=UW48_C0001G0165; PE = 3 SV=1
MKKSTFPIRVFSNRDEDSKILEMMNNIFLYRRGYISKVPKNEDVVFIFSGGLDSSITLDMIINEWGVNVFPLFVRRSARATKFEEESVRFFVDFYQKKYPGRMQNLEVVEIEVPPLPFKKYPEVDRLKKLGHPMRNAVLQSLGVQYAQKLRATVSPKLNTVLTATVGDDSFPHSSLQALRSVNLGVCIDTGDWGWQVTSPLVDVVYEGRPLFKKDLIGYAIKHNLPLDKTRTCIEGGEKPDGTCPECLCRLRAFEAAGVIDPLDYQNQ

SEQ ID NO: 39837 - protein, 258 aa, unidentified; identical to SEQ ID NO: 37086
  source 1..258: note = Microgenomates group
  REGION 1..258: note = tr|A0A0G1IA56|A0A0G1IA56_9BACT 7-cyano-7-deazaguanine synthase OS=Microgenomates group bacterium GW2011_GWC1_44_23 OX=1618523 GN=UW48_C0001G0162; PE = 3 SV=1

SEQ ID NO: 39838 - protein, 200 aa, Microlunatus phosphovorus
  REGION 1..200: note = tr|F5XIP1|F5XIP1_MICPN 7-cyano-7-deazaguanine synthase OS=Microlunatus phosphovorus (strain ATCC 700054 / DSM 10555 / JCM 9379 / NBRC 101784 / NCIMB 13414 / VKM Ac-1 990 / NM-1) OX=1032480 GN=MLP_52650 PE=3 SV=1
MNRVLLLSGGLDSTAVAAMVRPEHCVHVDYGQIPAEAELRAAAQVAVDLGLPFTSLAVPAGQVGAGLMSAEAADGLPVDVSPEWWPFRNQLLITLAAAWAVQRGFEVVIIGTVASDGARHADGTRDFLTRIDDLLAVQEGHLRVEAPAAGMSSAELITTSGVTDAVLGWTHSCHRANFPCGACPGCVKRQEVLQQLDRLR

SEQ ID NO: 39839 - protein, 231 aa, Micromonospora aurantiaca
  REGION 1..231: note = tr|A0A3M9KB59|A0A3M9KB59_9ACTN 7-cyano-7-deazaguanine synthase OS=Micromonospora aurantiaca OX=47850 GN=EEZ25_27345 PE=3 SV=1
MSEILLFSAGLDSFPAWHYLGKPRTLYFDSGHYGRQQEIDTVRALAAAHGMDLEISNELDLSGRATPQGDLIPFRNVLFAMLAAFRAEVIWCVGVKGDHTADKSPEAFARMSEMLTTFAGRPIRVDSPFWDMTKSDIVAWYLKAGLPVDDLLQTFSCATPGTAFTHCGRCPSCLRRWIALTNNDITGHFASPPWTWDRIRTYYLPAMASGGYPPHRVEEFRRAMATVGALP

SEQ ID NO: 39840 - protein, 234 aa, Micromonospora chokoriensis
  REGION 1..234: note = tr|A0A1C4UPY5|A0A1C4UPY5_9ACTN 7-cyano-7-deazaguanine synthase OS=Micromonospora chokoriensis OX=356851 GN=queC PE=3 SV=1
MSAAKRRAVVLLSGGLDSATVLAMAVHEGYEAYALSFRYGQRHTVELEAASRVAANLGAVKHVVADIDLRVFGGSALTDDALAVPHHDSADDLGSDIPITYVPARNTIFLSFALAWAETLDASDVFIGVSALDYSGYPDCRPEYIAAYEQMANLATKAGVEGRQRLRIHTPLIQLTKAETIRRGLELGVDYAWTHSCYDPVDGRACGTCDSCLLRGRGFAELGRTDPALAPTAG

SEQ ID NO: 39841 - protein, 233 aa, Micromonospora echinospora
  REGION 1..233: note = tr|A0A0K0K531|A0A0K0K531_MICEC 7-cyano-7-deazaguanine synthase OS=Micromonospora echinospora OX=1877 GN=genA PE=3 SV=1
MPTEKRRAVVLLSGGLDSATVLAMAVHEGYDAYALSFRYGQRHTVELEAAARVAKALGATRHVVADIDLRVFGGSALTDDALAVPHHDSADELGDEIPVTYVPARNTIFLSFALAWAETLDASDIFIGVSALDYSGYPDCRPEYVAAYETMANLATKAGVEGRQRLRIHTPLIQLTKAETIRRGLELGVDYAWTHSCYDPVDGRACGTCDSCLLRGRGFAELGLTDPALSATG

SEQ ID NO: 39842 - protein, 233 aa, Micromonospora echinospora
  REGION 1..233: note = tr|A0A1C4WLJ1|A0A1C4WLJ1_MICEC 7-cyano-7-deazaguanine synthase OS=Micromonospora echinospora OX=1877 GN=queC PE=3 SV=1
MPTEKRRAVVLLSGGLDSATVLAMAVHEGYEAHALSFRYGQRHTVELEAAARVAKALGATRHVVADIDLRVFGGSALTDDTLAVPHHDSADELGDEIPVTYVPARNTIFLSFALAWAETLDASDIFIGVSALDYSGYPDCRPEYVAAYETMANLATKAGVEGRQRLRIHTPLIQLTKAETIRRGLELGVDYAWTHSCYDPVDGRACGSCDSCLLRGRGFAELGLTDPALSATG

SEQ ID NO: 39843 - protein, 428 aa, unidentified
  source 1..428: note = Micromonospora globbae
  REGION 1..428: note = tr|A0A420EJV8|A0A420EJV8_9ACTN Uncharacterized protein OS=Micromonospora globbae OX=1894969; GN = D7I43_31695 PE=4 SV=1
MPAYTMRFRLPEKISPGIAASRFYWSPNDLGSFISPFGPGLGLLGPVPEPNIELVRLAVMVYAADRSTPRRAGSSNWSCRDLDIEVPVQRPERWEPVRERLEALLGFLSGDAWTLQFRQATTPTEQVSAYRYGGAKRVVLASGGADSTIGALMSRHGLRDATHILVSHVGATNIAPVQRNIVQQIGALIAGPEQFHRQIRFSRRQMQPGGFPFHNEYSTRTRSLLFLALGLAVASIERLPLWIPENGFASLNPPMTSDQRGTLSTRTTHPLFLQQLSDLATEAGAHAEIENPFALMTKGEMFGMAADLVGLDAASSLLSATHSCAHTGHRSHRLPVSSHCGVCFGCLLRRASFLASGVPDRTNYLVNHEARPEAYLRNKSVEASIRHFVTRGLRPSDVSVLSLPPWYSTQDAYGLCKRGITELELLFA

SEQ ID NO: 39844 - protein, 234 aa, unidentified
  source 1..234: note = Micromonospora haikouensis
  REGION 1..234: note = tr|A0A1C4YJI6|A0A1C4YJI6_9ACTN 7-cyano-7-deazaguanine synthase OS=Micromonospora haikouensis OX=686309 GN=queC PE=3 SV=1
MSAAKRRAVVLLSGGLDSATVLAMAVHEGYEAYALSFRYGQRHTVELEAASRVAANLGAVKHVVADIDLRVFGGSALTDDALAVPHHASADDLGSDIPITYVPARNTIFLSFALAWAETLDASDVFIGVSALDYSGYPDCRPEYIAAYEQMANLATKAGVEGRQRLRIHTPLIQLTKAETIRRGLELGVDYAWTHSCYDPVDGRACGTCDSCLLRSRGFAELDRTDPALAPPAG

SEQ ID NO: 39845 - protein, 431 aa, Micromonospora inyonensis
  REGION 1..431: note = tr|A0A1C6RST5|A0A1C6RST5_9ACTN Queuosine biosynthesis protein QueC OS=Micromonospora inyonensis; OX = 47866 GN=GA0074694_2928 PE=4 SV=1
MTTGRHAYHFTTGRYRRFPGHYRALDERHFRAGPSAITNNLAPAPDVPPVWAQDLLQVAKAVYLVDKLSRRATAPDRWTRDLTLSVQVIEPERWSDRVEPLLTALLELLTADRWTVGFHGGAAALRTVPTRLFEGDPAEEVTLFSGGLDSTGWVAQRIGVDAGPLLLVSYYEGTLKTRQNQVFAALRRLGARAVERRQVLQQVKGFGPPLELSSRSRGLLYLATAVHVAAAHRVREVAVPENGQLAVNPPLTASRLAASSTRSVHPRTLHLLNRLIAAVGGDVTVVNPLVDDTKGDVCRRALTAGLPLPTLAETVSCGQPPENRGASRFAQCGCCYPCLIRRSGLLAGTGRDDTAYRTDVWALPDDADLARHRRALAAWMSRGFGIRDLTTDVPLPPGADPAALLRTVRRGRDEIRQLFERFAPGTLPAGT

SEQ ID NO: 39846 - protein, 236 aa, Micromonospora inyonensis
  REGION 1..236: note = tr|C9W390|C9W390_9ACTN 7-cyano-7-deazaguanine synthase OS=Micromonospora inyonensis OX=47866 GN=sis24; PE = 3 SV=1
MWRVPTGKRKAVVLLSGGLDSATVLAMAVHEGYEAHALSFRYGQRHTVELEAAARVAKALGATRHVVADIDLRVFGGSALTDDTLVVPHHASADEMGDEIPVTYVPARNTIFLSFALAWAETLDASDIFIGVSALDYSGYPDCRPEYVAAYETMANLATKAGVEGRQRLRIHTPLIQLTKAETIRRGLEMGVDYAWTHSCYDPVDGRACGTCDSCLLRGRGFAELGLTDPALSTTG

SEQ ID NO: 39847 - protein, 243 aa, Micromonospora lupini
  REGION 1..243: note = tr|I0L1T4|I0L1T4_9ACTN 7-cyano-7-deazaguanine synthase OS=Micromonospora lupini str. Lupac 08 OX=1150864; GN = queC PE=3 SV=1
MAAVTAAVLPLVTPVPAHVVVIVSGGMDSTVLAYALQQGGSTVTLLSCDYGQRHRRELDYAARTAEALHAPHVVVDLTGIVGVLTGSALTDAQVDVPDGHYTDGSMRATVVPNRNAIMLDVAVARAVSGGADAVAFGAHAGDHPIYPDCRPAFLAAYESTVRLANEGFLPAGFRVVAPFIECSKADIARLGDTIGVRFADTWSCYKGGERHCGTCGTCVERREAFAMAGVTDPTEYATASGVI

SEQ ID NO: 39848 - protein, 443 aa, Micromonospora mirobrigensis
  REGION 1..443: note = tr|A0A1C5AH50|A0A1C5AH50_9ACTN 7-cyano-7-deazaguanine synthase (Queuosine biosynthesis); OS = Micromonospora mirobrigensis OX=262898; GN = GA0070564_110106 PE=4 SV=1
MTAAGHAYHYTTYGRPSFERHRRSIDRKLLAQADVQLQRLAEVPQDRPIWAQDLLQVARAVFLADKLSLRSGSADRWTRRIDLSVQVAEFDRWTDRALRLLTELTEALTSDKWHIRVHPGATAWPHQNRIHSPQAAEEVALFSGGLDSSAYAAERARASGGELLLVSYYEPQWASQQEAVLAAIHELSSRAVRQSRSPQQIKARQELEPSARSRGLLYTATAVYLAAAHGVAQVAVPENGQLALNPALTPARVAACSTRSVHPYTLSLLNALIHEVGGSVTVVNPYLHLTKGEVCERALAAGLTPTTLTHATMSCGRPPRNQPELQCGHCYPCLVRRSGLLAALGSDGTPYAKNVWAVADRSDAAADRRALHRWLTHPFGVRDLFTDMPLPEGTNLGPLVGVVQRGREEMARMFADAGVTTAPAAAVAFWPGMGAGCRGMPEP

SEQ ID NO: 39849 - protein, 470 aa, unidentified
  source 1..470: note = Micromonospora musae
  REGION 1..470: note = tr|A0A3A9XSJ8|A0A3A9XSJ8_9ACTN Uncharacterized protein OS=Micromonospora musae OX=1894970 GN=D7044_27280; PE = 4 SV=1
MNPLPETSLSIDHRHAPSDFETRPSGDRQRGARPRRHGLGDGCVSPARFAYQYQTDGPTAVDRNRVPIDRGLLAGADEPLQALAEVARERPVWAQDLVHLTRAVYLADKMSLRATAEDGWSRQIDLSVQVQAPGIWAGPALGLLSRVAETLTADQWTISLRPGASAWPHQQRAVADTPVAEVALFSGGLDSFAYTAERSQVPAGDVLLVSYYEPQWKGQQDRALGAIRAVSRRTLRQLQASQQISVRRQKLEPSARTRGLLYVATAVYLAAAHDVPRVAIPENGQLALNAALTPARAAACSTRSVHPYTLSLLNQMIRSVGGSVAVVNPYLHLTKGEVCQRAIEAGLPQMTLTSTTLSCGRPPRSQPELHCGCCYPCLVRRSGLLASVRADDTSYAKDVWTLPGDVRAAADRRALHRWLDNPFNLRDLVTDMPLPNELDLAPLIDVVQRGRTELAQMFAQHGKPVRSSTR

SEQ ID NO: 39850 - protein, 235 aa, Micromonospora narathiwatensis
  REGION 1..235: note = tr|A0A1A8ZA81|A0A1A8ZA81_9ACTN 7-cyano-7-deazaguanine synthase OS=Micromonospora narathiwatensis OX=299146 GN=GA0070621_1058 PE=3 SV=1
MREVLLFSAGLDSFPAWHYLGKPPALYFDIRHYGRQQEIDTVQALASAHGMDLTISNELDLSAWATPQGDLIPFRNVLFAMLAGFRADVVWCVGVKGDHTADKSPEAFIRMSEMLTAFAGRPIRVDSPFWNMTKSEIVAWYLEAGLPVNDLLQTFSCATPEDAFAHCGRCPSCLRRWIALTNNDIAGHFASPPWTWDRIRAYYLPAMASGGYPPHRVEEFRRAMATVGVFPEPPR

SEQ ID NO: 39851 - protein, 231 aa, Micromonospora nigra
  REGION 1..231: note = tr|A0A1C6R867|A0A1C6R867_9ACTN 7-cyano-7-deazaguanine synthase OS=Micromonospora nigra; OX = 145857 GN=GA0070616_0131 PE=3 SV=1
MSEILLFSAGLDSFPAWHYLGKPRTLYFDSGHYGRQQEIDTVQALAAAHGMDLEISNELDLSRWATPQGDLIPFRNVLFAMLAAFRAEVIWCVGVKGDHTADKSPEAFARMSEMLSTFVDRPIRVDSPFWNMTKSDIVAWYLKSGLPVNHLLQTFSCATPGSAFTHCGRCPSCLRRWIALTNNDITGHFAAPPWTWDRIRTYYVPAMASGGYPPHRVEEFHRAMATVGALP

SEQ ID NO: 39852 - protein, 432 aa, Micromonospora nigra
  REGION 1..432: note = tr|A0A1C6SJP6|A0A1C6SJP6_9ACTN 7-cyano-7-deazaguanine synthase (Queuosine biosynthesis); OS = Micromonospora nigra OX=145857 GN=GA0070616_3938 PE=4; SV = 1
MKTGRYAYHYTTDGRVRFSSSHQPLDDRLFRARGSAIERNLSPAPPPPDWAQDLLRIAKAVYLADKLSGRELAPDRWTRTIELSVQVIDPDRWHHAAPTLTALLEILTADRWSIRFHSGAARHPGVQGRLLDDARVEEVSLFSGGLDSTAYAAERVQQAGGPLLLVSYYDPTLKRRQEQILDHLRRLRSRPVEHRAVLLQSRANGVRLDRSSRSRGLLFLATAVFAAAAHRARQVAVPENGQLAVNPPLTAARVAACSTRSVHPRTLDLVNDLINSAEGDVRVENPLLPATKGEVCRRARDLGLPLAALMVTVSCGQSPCKFGGASRPHHCGHCYPCLIRQSGLLAGVGHDDTPYETDVWALPTTDRKAQHLRALRAWLAASFGVRDLTTDLPLPPQTDTASLLRTLVRGREELRNLFARHGGQSPGSSPSL

SEQ ID NO: 39853 - protein, 195 aa, Micromonospora olivasterospora
  REGION 1..195: note = tr|A0A562I4H2|A0A562I4H2_MICOL Queuosine biosynthesis protein QueC OS=Micromonospora olivasterospora OX=1880 GN=JD77_00858 PE=4 SV=1
MPRVAVPENGQLALNPALTPARVAACSTRSVHPHTLSLLNELIRSVGGEVSLVNPYLHLTKGEVCQHALTAGLPPAVLTGATVSCGHPPRDRSEFHCGHCYPCLVRRSGLLAAIGADDTPYAKDVWSLPDDLDAAADRRALHRWLSRRFGVRDLFTDMPLPDGLDLCPLLQVVERGRAELATLFARHGQPVPSSR

SEQ ID NO: 39854 - protein, 233 aa, Micromonospora olivasterospora
  REGION 1..233: note = tr|Q2MFY8|Q2MFY8_MICOL 7-cyano-7-deazaguanine synthase OS=Micromonospora olivasterospora OX=1880 GN=fosE; PE = 3 SV=1
MPTEKRKAVVLLSGGLDSATVLAMAVHEGYEAHALSFRYGQRHTVELKAAARVAKALGATRHVVADIDLRVFGGSALTDDSLAVPHHASADELGGDIPVTYVPARNTIFLSFALAWAETLDASDIFIGVSALDYSGYPDCRPEYIAAYEAMANLATKAGVEGRQRLRIHTPLIQLTKAETIRRGLELGVDYAWTHSCYDPVDGRACGTCDSCLLRGRGFAELGLTDPALSAGG

SEQ ID NO: 39855 - protein, 437 aa, unidentified
  source 1..437: note = Micromonospora orduensis
  REGION 1..437: note = tr|A0A5C4QW70|A0A5C4QW70_9ACTN Uncharacterized protein OS=Micromonospora orduensis OX=1420891; GN = FHG89_08725 PE=4 SV=1
MSRASFAYHYAARGGVSTDRKREMIGWPLLEHADQRLQKLAEVPQDRPDWAQDLLQIARAVYLADKLSLREYAVDGWTRRIDLSVEVVDPSVWSPPTLRLLSHLAETLSADQWTINVRVGGQRWPQQGRTTYADVGEVALFSGGLDSTAWVAERAKVAAGPLLLVSYFEPQWGSQQDQTLSAIESSARRDIEQLKASQQVRLTRKLEKSARTRGLLYLATAIYLAAAHGVPQVVVPENGQLAVNPPLTPARVAACSTKSVHPGTLHLLNSLIDALGGAVTVVNPYLHLTKGEVCRQALDAGLAPATLTHATISCGRPPRDRPGAEHYHCGTCYPCLVRHSGLLTALGSDSTPYKTDVWMLGDRERAAIDRRALHRWLCRPISIRDLTIDTPLPDTVASGPLLDVVERGRRELVQMFARHGQPITPTETPPRRLAWAG

SEQ ID NO: 39856 - protein, 236 aa, Micromonospora pallida
  REGION 1..236: note = tr|A0A1C6TDG1|A0A1C6TDG1_9ACTN 7-cyano-7-deazaguanine synthase OS=Micromonospora pallida; OX = 145854 GN=queC PE=3 SV=1
MRRVPTGKRKAVVLLSGGLDSATVLAMAVHEGYEAHALSFRYGQRHTVELSAAARVAKELGATRHVIADIDLRVFGGSALTDDALAVPHHASADELGDEIPVTYVPARNTIFLSFALAWAETLDASDIFIGVSALDYSGYPDCRPEYVAAYEAMANLATKAGVEGRQRLRIHTPLIQLTKAETIRRGLELGVDYAWTHSCYDPVDGRACGTCDSCLLRGRGFAELGLTDPALATAE

SEQ ID NO: 39857 - protein, 426 aa, unidentified
  source 1..426: note = Micromonospora palomenae
  REGION 1..426: note = tr|A0A561VPP7|A0A561VPP7_9ACTN 7-cyano-7-deazaguanine synthase in queuosine biosynthesis; OS = Micromonospora palomenae OX=1461247 GN=FHX75_13650 PE=4; SV = 1
MSPARYAYHYTTNGRPVPAVERGREPIDRSLLAQADPRLQRMAEVNRDRPIWAQDLLQVARAIYLADKLSLRFDADDSWTRQIDLSVQVTEVDAWTGRAGELVSQLTETLTADRWAIQMHSGAVAWPHQGRVLTAPPVEEVALFSGGLDSSAYAAERSRVSGDDLLAVSYYEPQWGMQQESVLTTIRNSSLRNIRQFKTSQQVRAQQRELEPSARTRGLLYVATAVYLAAAHDVPQVAVPENGQLALNPALTPARVAACSTRSVHPYTLSLLNELIRALGGSVAVVNPYLHLTKGEVCRRALEAGMPASALTGLTLSCGHPPRDQPELHCGHCYPCLVRRSGLLTALNSDDTPYAKDVWTVSDDLDAAVDRRALQRWLHRPFGVRDLITDMPLPHGLELAPLVEVVRRGRVELANLFARHGEAVRQ

SEQ ID NO: 39858 - protein, 426 aa, Micromonospora peucetia
  REGION 1..426: note = tr|A0A1C6VLU3|A0A1C6VLU3_9ACTN 7-cyano-7-deazaguanine synthase (Queuosine biosynthesis); OS = Micromonospora peucetia OX=47871 GN=GA0070608_3457 PE=4; SV = 1
MTSNFAYQYMTSGRPVVEHGRELIDRTLLARADEALQGQAEVTGDRPVWAQDLLHMARAVHLADKLSLRAAADDRWSRQIDLSVQVRAVDRWAGRPLELLSRLAEALTADRWMISARPGAAAWPHQQRTHPGPPVEEVALFSGGLDSFAYAAERSRASDGNILFVSYYEPQWKAQQDRAIAMIRDAAGSNAMPVRASQQVFAGRRKLEPSARTRGLLYAATAVYLAAAHDVSHVAVPENGQLALNPALTPARVAACSTRSVHPYTLSLLNELIHTLGGSMTVVNPYLHLTKGEVCERALRAGLAPATLSSTTLSCGRPPRNRPELHCGCCYPCLIRRSGLLAASGVDSTPYAKDVWALPDHQKAATDRRALHRWLNREFTLRDLVTDMPLPDGLDLAPLLDVVQRGRVELTDMFVRHARSAGQLNP

SEQ ID NO: 39859 - protein, 340 aa, unidentified
  source 1..340: note = Micromonospora radicis
  REGION 1..340: note = tr|A0A418MUU4|A0A418MUU4_9ACTN Uncharacterized protein OS=Micromonospora radicis OX=1894971; GN = D2L64_13850 PE=4 SV=1
MTSAGTWSGRAIELLASLVETLTADRWEISVRSGAQPLPHQSRSHYDIPIGEVALFSGGLDSTAYVAERSLVPAGDLLLVSYFEPKWKAPQDDVFGAIDRSRRRGLPRFTATQQVRAGRPGLEKSARTRGLLYAATAVFFAAVHRVARVAVPENGQLALNPALTPARVAACSTRSVHPFTLGLLNEVIREVGGAVEVVNPYLYLTKGEVCRRALGAGLTPTTLTQQTVSCGHASSSRPKLHCGHCYPCLMRHSGLLAALGDDDTPYSQRVWDLPDHDRKTEDRRALHRWLERRFQVRDLVTDMPVPAGIDLAPLVAVVNRGRAELSAMFDSHRETGRERG

SEQ ID NO: 39860 - protein, 234 aa, Micromonospora rifamycinica
  REGION 1..234: note = tr|A0A109IPR2|A0A109IPR2_9ACTN 7-cyano-7-deazaguanine synthase OS=Micromonospora rifamycinica OX=291594 GN=queC PE=3 SV=1
MSAAKRKAVVLLSGGLDSATVLAMAVHEGYEAYALSFRYGQRHTVELDAARRVAERLGAARHVIADIDLRVFGGSALTDDALAVPHHDSADDLGTDIPVTYVPARNTIFLSFALAWAETLDASDVFIGVSALDYSGYPDCRPEYIAAYEQMANLATKAGVEGRQRLRVHTPLIQLTKAETIRRGLELGVDYAWTHSCYDPVEGRACGTCDSCLLRARGFAELGLVDPALTPAGG

SEQ ID NO: 39861 - protein, 237 aa, Micromonospora sagamiensis
  REGION 1..237: note = tr|A0A562W8F7|A0A562W8F7_9ACTN 7-cyano-7-deazaguanine synthase OS=Micromonospora sagamiensis OX=47875 GN=queC PE=3 SV=1
MVWRVPTGKRKAVVLLSGGLDSATVLAMAVHEGYDAHALSFRYGQRHTIELEAAARVAKALGATRHVVADIDLRVFGGSALTDDTLAVPHHASADELGDEIPVTYVPARNTIFLSFALAWAETLDASDIFIGVSALDYSGYPDCRPEYVAAYETMANLATKAGVEGRQRLRIHTPLIQLTKAETIRRGLELGVDYAWTHSCYDPVDGRACGTCDSCLLRGRGFAELGLTDPALSTTG

SEQ ID NO: 39862 - protein, 233 aa, Micromonospora sp.
  REGION 1..233: note = tr|A0A2G6XP14|A0A2G6XP14_9ACTN 7-cyano-7-deazaguanine synthase OS=Micromonospora sp. CNZ299 OX=2035244 GN=queC PE=3 SV=1
MAQRKAVVLLSGGLDSATVLAIARNEGYETFALSFRYGQRHTVELQAAERVAAALGATKHVVADIDLRVFGGSALTDASIAVPHHDSVDDLSANDIPVTYVPARNTIFLSFALAWAETLDASDVFIGVSALDYSGYPDCRPEYIKAYEEMANLATRAGVEGRQRLKVHTPLIQLTKADTIRRGLELNVDYALTHSCYDPVDDRACGTCDSCLLRNRGFAELGMTDPALTTSQS

SEQ ID NO: 39863 - protein, 224 aa, Micromonospora sp.
  REGION 1..224: note = tr|A0A4R4Q130|A0A4R4Q130_9ACTN 7-cyano-7-deazaguanine synthase OS=Micromonospora sp. 15K316 OX=2530376 GN=queC PE=3 SV=1
MTHTIALLSGGLDSTVLVAHLLDQGHTVDAISVDYGQRHARELDAATAIADHYRIRHQLVDLTAVGRLLTGSALTDPTVAVPHGHYADESMRATVVPNRNAILLMVAVGVAATRNATAVATAVHAGDHPIYPDCRPEFITAADRCARAATAGYGDVTVTAPFVAMSKTGIAALGGRLGAPLHLSWSCYEGGAQHCGQCGTCVERRESFTDAGLTDPTTYRTVTA

SEQ ID NO: 39864 - protein, 437 aa, unidentified
  source 1..437: note = Micromonospora violae
  REGION 1..437: note = tr|A0A4Q7UGF0|A0A4Q7UGF0_9ACTN 7-cyano-7-deazaguanine synthase in queuosine biosynthesis; OS = Micromonospora violae OX=1278207 GN=EV382_3656 PE=4 SV=1
MSRASFAYHYAARGGVSTDRKREAIGWPLLEHADERLQKLAEVPQDRPDWAQDLLQIARAVYLADKLSLREYAVDGWTRRIDLSVEVVDPSVWSPPTLRLLSHLAETLSADQWTINVRVGGQRWPQQGRTIYADVGEVALFSGGLDSTAWAAERAKVTAGPLLLVSYFEPQWGSQQDQTLNAIESSARRDIEQLKASQQVRLTRKLEKSARTRGLLYLTTAIYLAAAHGVPQVVVPENGQLAVNPPLTPARVAACSTKSVHPGTLHPLNSLIDALGGGVTVINPYLHLTKGEVCQQALDAGLAPATLTHATISCGRPPRDRPGAEHYHCGTCYPCLVRHSGLLTALGSDSTPYKTDVWMLGDREKAAVDRRALHQWLCRPISVRDLTTDTPLPDTVGPGPLLDVVERGRTELGQMFAWHGRPITPTETSPRRLAWAG

SEQ ID NO: 39865 - protein, 240 aa, unidentified
  source 1..240: note = Micromonospora wenchangensis
  REGION 1..240: note = tr|A0A246RK54|A0A246RK54_9ACTN 7-cyano-7-deazaguanine synthase OS=Micromonospora wenchangensis OX=1185415 GN=queC PE=3 SV=1
MTHDENRSGSSSALIVLSGGMDSTTLLAYYSALRFSLIAVTVDYGQRHRREIDSARAIADHYGAVHQVVDLSGLGGLLPGSALTDDTVTVPDGHYAEASMRATVVPNRNAILANVAVAVGVAHRVGVVALGMHSGDHFVYPDCRPAFVTALRELVTVANEGFPTPRVEVPFMTWTKAEIAAHGTRLGAPLSLSWSCYKGGDQHCGTCGTCYERREAFREAGVPDPTHYLDDVTQFAHPGR

SEQ ID NO: 39866 - protein, 148 aa, Microvirga aerophila
  REGION 1..148: note = tr|A0A512BL08|A0A512BL08_9RHIZ 7-cyano-7-deazaguanine synthase OS=Microvirga aerophila; OX = 670291 GN=MAE02_03090 PE=3 SV=1
MGNDGLPNTFVPGRNLIFLTFAAALAYRRGLKHIVGGMCETDFSGYPDCRDDTVKAMQLALNLGMDRRFVLHTPLMWINKAETWELAQELGGDALVEIVRTETHTCYRGDRGDLHDWGYGCGECPACELRAAGYEQWGVASVQEGVSQ

SEQ ID NO: 39867 - protein, 424 aa, Microvirga guangxiensis
  REGION 1..424: note = tr|A0A1G5KE29|A0A1G5KE29_9RHIZ 7-cyano-7-deazaguanine synthase (Queuosine biosynthesis); OS = Microvirga guangxiensis OX=549386 GN=SAMN02927923_03257; PE = 4 SV=1
MRLVCGPETFEVPAGEESLRVILYGQPGAEDRGSAGDAARSEILRRKLMVAPRAWDLLSLALSVVAADLAGQRDRSPDGWTREFELEVAVTDPSFWNCQATAITEALAFLTTDRWQLRFHDGGMLPAPPRDPAFPEDDCVVLLSGGLDSLVGAVDLVAAGRRPLAVSQIVRGDAEKQVDFASSIGGGLTHLQLNHNAHIPGNEESSQRARSLIFLTFGVLAATALRRYHDGDVVPLYVCENGFIAINPPLTGARLGSLSTRTAHPEFLAKLQGVLDAADLRVDVKNPYQLKTKGEMLAGCADQAFLRAQAASSTSCGRFQRFNYRQCGRCVPCQVRRAAFVAWGVPDTTSYVYEPIGQDDAEHAGFDDVRSVAIAIAQVEADGFDGWIGASLSSRVVGNPGPLKTLVKRGLDELKALHRIYGVT

SEQ ID NO: 39868 - protein, 246 aa, unidentified
  source 1..246: note = Microvirga lotononidis
  REGION 1..246: note = tr|I4YR48|I4YR48_9RHIZ 7-cyano-7-deazaguanine synthase OS=Microvirga lotononidis OX=864069 GN=queC PE=3; SV = 1
MTTADSSALVVFSGGQDSATCLAWALSRYERVETIGFSYGQRHAVEMECREPIRQALARLSPLWAGRLGPDRVIPLNVLGEVSVSALTADLPVAGSRLDGLPATFVPGRNLVFLTFAAIVAFQRGLKRVVTGVCETDFSGYPDCRDDTVKALQTALNLGMNARLVLETPLMWIDKAETWTLAETLGGNALVDIIVQETHTCYKGDRSTRHDWGFGCGECDACRLRAAGWQRYSRLRSEEVEDLPSR

SEQ ID NO: 39869 - protein, 255 aa, unidentified
  source 1..255: note = Microvirga lotononidis
  REGION 1..255: note = tr|I4YK77|I4YK77_9RHIZ 7-cyano-7-deazaguanine synthase OS=Microvirga lotononidis OX=864069; GN = MicloDRAFT_00070220 PE=3 SV=1
MNILVVLSGGQDSTTCLFWARGLLTDKGDALHAVTFDYGQRHRIEIEAARKIAGMANVDSHEVIEVPNYLQSASPLTSENELERYESYAQMDRVIGSRVELTFVPMRNTLFLTIAANRAVALGCNHIVTGISEQDNANYPDCRQLFLSQMEEAINQSLGRHMEERIKILAPLLNLSKAQSIALAMELAGCIEALAYSHTSYDGKYPPTDMNHSNVLRAQGFLEAGVPDPLVVRAWREGRMELPTTANYASLRGDA

SEQ ID NO: 39870 - protein, 238 aa, unidentified
  source 1..238: note = Microvirga ossetica
  REGION 1..238: note = tr|A0A1B2EZ49|A0A1B2EZ49_9RHIZ 7-cyano-7-deazaguanine synthase OS=Microvirga ossetica; OX = 1882682 GN=queC PE=3 SV=1
MKTLVICSGGLDSVTLAHKVAAEHTLTRLVSFDYGQRHKKELDAARACAVRLAVPHDTVDITAVGRLLTGSALTSGEPVPEGHYAEETMRITVVPNRNAIMLAIAFGGAAAGQVEAVAAAVHGGDHFIYPDCRPDFIESFETMQRHALEGIARIALYTPFVRLNKADIVREGARLGVPFADTWSSYQGGERHCGRCGTCVERREAFHLAGIEDPTPYEDPDYWIEACREHQAGQLPQA

SEQ ID NO: 39871 - protein, 236 aa, Microvirga sp.
  REGION 1..236: note = tr|A0A2T7TQV6|A0A2T7TQV6_9RHIZ 7-cyano-7-deazaguanine synthase OS=Microvirga sp. KLBC 81; OX = 1862707 GN=queC PE=3 SV=1
MKTLVICSGGLDSVTLAHKVAAERTLTRLVSFDYGQRHKKELDSARACATRLGVPHDIVDISAVGRLLTGSALTSGEPIPEGHYAEDTMRITVVPNRNAIMLAIAFGIAAAEQAEAVAAAVHGGDHFIYPDCRPDFVEAFETMQRHALEGLANIALYTPFVRLSKADIVREGARLGVPFAETWSCYQGGNIHCGRCGTCVERREAFHLAGVEDPTPYEDPDYWIEACREHQARQPA

SEQ ID NO: 39872 - protein, 235 aa, Microvirga sp.
  REGION 1..235: note = tr|A0A086MQ81|A0A086MQ81_9RHIZ 7-cyano-7-deazaguanine synthase OS=Microvirga sp. BSC39; OX = 1549810 GN=queC PE=3 SV=1
MKTLVICSGGLDSVTLAHKVAAEQILTRLVSFDYGQRHRKELDSARACAVSLGVPHDIVDISAVGRLLTGSALTSGEPVPDGHYAEDTMRITVVPNRNAIMVAIAFGVAAAEQAEAVAAAVHGGDHFIYPDCRPDFIESFETMQRHALEGLASITLYAPFVRQGKADIVREGARLRVPFAETWSCYQGGKHHCGRCGTCVEREAFHLAGVGDPTSYEDPDYWIAACHEHQAKQLS

SEQ ID NO: 39873 - protein, 237 aa, unidentified
  source 1..237: note = Microvirga vignae
  REGION 1..237: note = tr|A0A0H1RB92|A0A0H1RB92_9RHIZ 7-cyano-7-deazaguanine synthase OS=Microvirga vignae; OX = 1225564 GN=queC PE=3 SV=1
MNAADFSALVVFSGGQDSTTCLAWALSRYERVETIGFSYGQRHAVEMDCREPIRRALASLSPFWASRLGPDRVIPLDVLGEVSVSALTADLPVASSRADGLPATFVPGRNLVFLTFAAIVAFQRGLKRVVTGVCETDFSGYPDCRDDTVKALQTALNLGMNARLVLETPLMWIDKAETWALAETVGGDALVELIVRETHTCYNGDRGTRHDWGFGCGECDACRLRSAGWQRYTQVRS

SEQ ID NO: 39874 - protein, 236 aa, unidentified
  source 1..236: note = Microvirga vignae
  REGION 1..236: note = tr|A0A0H1RDB7|A0A0H1RDB7_9RHIZ 7-cyano-7-deazaguanine synthase OS=Microvirga vignae; OX = 1225564 GN=queC PE=3 SV=1
MKTLVICSGGLDSVTLAHKVAAERTLTRLVSFDYGQRHKKELDSARACAARFGVPHDIIDISAVGRLLSGSALTSGEPVPEGHYAEDTMRVTVVPNRNAIMLAIAFGIAAAEQAEAVAAAVHGGDHFIYPDCRPDFIEAFEAMQRHALEGLATIALYTPFVRLSKADIVREGARLGVPFAETWSCYQGGERHCGRCGTCVERREAFHLAGVEDPTPYEDPHFWIEACREHQAGQPA

SEQ ID NO: 39875 - protein, 225 aa, Microvirgula aerodenitrificans
  REGION 1..225: note = tr|A0A2S0PD49|A0A2S0PD49_9NEIS 7-cyano-7-deazaguanine synthase OS=Microvirgula aerodenitrificans OX=57480 GN=queC PE=3 SV=1
MTASVDAGRALVVLSGGQDSTTCLYWALARFSHVEAVTFDYGQRHRVELASARTIATLAGVRQTVLPIDTFSALGGNALTDDIAPEAAAGDALPNTFVPGRNLIFLTFAAAYAYQHQLGHIVTGVAQTDYSGYPDCRENTLKALELAINLGMDARLQLHAPLMFLSKADTVRLAQSVGAFDALAHSHTCYEGQVPPCGQCAACQLRARGFAEAGVADPLLVRTGG

SEQ ID NO: 39876 - protein, 225 aa, Microvirgula sp.; identical to SEQ ID NO: 39875
  REGION 1..225: note = tr|A0A329B2H8|A0A329B2H8_9NEIS 7-cyano-7-deazaguanine synthase OS=Microvirgula sp. AG722; OX = 2183901 GN=queC PE=3 SV=1

SEQ ID NO: 39877 - protein, 226 aa, unidentified
  source 1..226: note = Midichloria mitochondrii
  REGION 1..226: note = tr|F7XV14|F7XV14_MIDMI 7-cyano-7-deazaguanine synthase OS=Midichloria mitochondrii (strain IricVA); OX = 696127 GN=queC PE=3 SV=1
MPRKAIVLLSGGLDSSTVLAVAKSEGYECCCLSFRYGQKHLFEIESAKNLAKIYDAAVHKIIDIDLTVFGGSSLTSALEVPKHTDLNHLKSGQIPPTYVHGRNTIFLSYAFAYAEALNIPNLFIGCNAIDYSNYPDCRPEYISAYERMINLAKARIQREIKIYAPLLHLSKSEIIILGRSLGVDYSLTTSCYNPYESGRPCGQCDACLLRIEGFTKAGLSDPLHYI

SEQ ID NO: 39878 - protein, 239 aa, unidentified
  source 1..239: note = Minwuia thermotolerans
  REGION 1..239: note = tr|A0A2M9G6I7|A0A2M9G6I7_9PROT 7-cyano-7-deazaguanine synthase OS=Minwuia thermotolerans; OX = 2056226 GN=queC PE=3 SV=1
MKTDNDEGALVLFSGGQDSAVCLAWALARFGRVETVGFDYGQRHRAELDVRRDVRNGVAVAMPEGERRLGEDHMVDLGVLGEISETALTRESGIALRDDGLPTTFVPGRNLIFFSFAAAVAYRRDLRRIVGGMCETDYSGYPDCRDDTIKAMQLALNLGMDRRFVLETPLMWLTKAGTWRLAEDLGGRMLVEVVRERTLSCYLGDAETRHDWGMGCGGCPACDLRRRGYREYRGAADRA

SEQ ID NO: 39879 - protein, 254 aa, Mitsuaria sp.
  REGION 1..254: note = tr|A0A1A9HQ06|A0A1A9HQ06_9BURK 7-cyano-7-deazaguanine synthase OS=Mitsuaria sp. 7; OX = 1658665 GN=queC PE=3 SV=1
MSDAATAPIPAVHASCRKALVLFSGGQDSTACLAWALERFAEVETLGFDYGQRHRVELDCRQTVRAQIAGQFPQWAAKLGEDHLLDLSLLGQISDTALTQERAIELQANGLPNTFVPGRNLLFLTFAATLAYRRGASVLVGGMCETDFSGYPDCRDNTLKALQVALSLGLDTPMTLETPLMFLTKAQTWALTESLGGEAFNALIIEHTHTCYLGERKTRHPWGWGCGHCPACELRAKGWNEFQQAKTAGKAVAP

SEQ ID NO: 39880 - protein, 254 aa, Mitsuaria sp.
  REGION 1..254: note = tr|A0A1I6KVF0|A0A1I6KVF0_9BURK 7-cyano-7-deazaguanine synthase OS=Mitsuaria sp. PDC51; OX = 1881035 GN=queC PE=3 SV=1
MSDAAPAPIPAVHASRRKALVLFSGGQDSTACLAWALDRFAEVETLGFDYGQRHRIELDCRRTVRAEIAAQFPHWAPKLGEDHLLDLGLLGQISDTALTQEREIELQANGLPNTFVPGRNLLFLTFAATLAYRRGASVLVGGMCETDFSGYPDCRDNTLKALQVALSLGLDTPMTLDTPLMFLTKAQTWAMTEALGGTALNDLIVEHTHTCYLGERTTRHAWGWGCGHCPACELRARGWDEFQRARSGGAAVSP

SEQ ID NO: 39881 - protein, 227 aa, Mitsuokella jalaludinii
  REGION 1..227: note = tr|A0A173XZV0|A0A173XZV0_9FIRM 7-cyano-7-deazaguanine synthase OS=Mitsuokella jalaludinii; OX = 187979 GN=queC PE=3 SV=1
MEKAVVLLSGGLDSCTCMAVAKSKGYDVYPISFNYHQRHSIELEGAKKIAAYYGVKKHLIIETNMEAIGGSALTDEKIEVPEGDVNRHSVPPTYVPARNLIFLSYAMGYAEVLGATHVYIGVNSVDYSGYPDCRPEFIQKFQALANYATTATAVEGRKITIETPLQDLSKKDIVLLGTKLGAPFQFTHSCYKGGEKACGICDSCKLRLRGFAEAGVEDPIDYETREI

SEQ ID NO: 39882 - protein, 227 aa, Mitsuokella multacida
  REGION 1..227: note = tr|A0A414NUN5|A0A414NUN5_9FIRM 7-cyano-7-deazaguanine synthase OS=Mitsuokella multacida; OX = 52226 GN=queC PE=3 SV=1
MEKAVVLLSGGLDSCTCMAVAKSKGYEVYPISFNYHQRHSIELEGAKKIASYYGVKKHLIIETNMEAIGGSALTDEKIEVPEGDVNRHSVPPTYVPARNLIFLSYAMGYAEVLGATHVYIGVNSVDYSGYPDCRPEFIEKFQALADYATTATAVKGQKITIETPLQDLSKKDIVLLGTKLGAPFQFTHSCYKGGEKACGICDSCKLRLRGFTEAGVEDPIAYETREV

SEQ ID NO: 39883 - protein, 210 aa, Mitsuokella multacida
  REGION 1..210: note = tr|C9KJ40|C9KJ40_9FIRM 7-cyano-7-deazaguanine synthase OS=Mitsuokella multacida DSM 20544 OX=500635; GN = queC PE=3 SV=1
MAVAKSKGYDVYPISFNYHQRHSIELEGAKKIASYYGVKKHLIIETNMEAIGGSALTDEKIEVPEGDVNRHSVPPTYVPARNLIFLSYAMGYAEVLGATHVYIGVNSVDYSGYPDCRPEFIEKFQALADYATTATAVKGQKITIETPLQDLSKKDIVLLGTKLGAPFQFTHSCYKGGEKACGICDSCKLRLRGFAEAGVEDPIAYETREV

SEQ ID NO: 39884 - protein, 227 aa, Mitsuokella sp.
  REGION 1..227: note = tr|A0A412L2Q9|A0A412L2Q9_9FIRM 7-cyano-7-deazaguanine synthase OS=Mitsuokella sp. AF21-1AC OX=2292235 GN=queC PE=3 SV=1
MEKAVVLLSGGLDSCTCMAVAKSKGYEVYPISFNYHQRHSIELEGAKKIAAFYGVKKHLIIETNMEAIGGSALTDEHIEVPEGDVNRTSVPPTYVPARNLIFLSYAMGYAEVLGATHVYIGVNSVDYSGYPDCRPEFIQKFQALADYATTATAVKGQHITIETPLQDLSKKDIVLLGTKLGAPFQFTHSCYKGGEKACGVCDSCKLRLRGFAEAGVEDPVPYETRDI

SEQ ID NO: 39885 - protein, 227 aa, Mitsuokella sp.
  REGION 1..227: note = tr|U2UJB6|U2UJB6_9FIRM 7-cyano-7-deazaguanine synthase OS=Mitsuokella sp. oral taxon 131 str. W9106; OX = 1321781 GN=queC PE=3 SV=1
MEKAVVLLSGGLDSCTCMAVAKSKGYALYPISFNYHQRHGIELEGAKKIADFYGVEKHLIIETNMEAIGGSALTDSRIKVPDGDVGRGDVPPTYVPARNLIFLSYAVGYAEVLGASHVYIGVNSVDYSGYPDCRPAFIEKFQALSDYATTATAVKGRKITVETPLQNRSKKDIVLLATKLGAPLQFTHSCYRGGEKACGVCDSCKLRLRGFGEAGVKDPIAYETREA

SEQ ID NO: 39886 - protein, 231 aa, unidentified
  source 1..231: note = Mixta gaviniae
  REGION 1..231: note = tr|A0A1X1E2L7|A0A1X1E2L7_9GAMM 7-cyano-7-deazaguanine synthase OS=Mixta gaviniae; OX = 665914 GN=queC PE=3 SV=1
MKRAVVVFSGGQDSTTCLIQALAQYDEVHCVTFDYGQRHRQEIEVARTLSARLGARAHKVLDVTLLNELAISSLTRDNIPVPEYDANATGLPSTFVPGRNILFLTLASIYAYQVEAEAVITGVCETDFSGYPDCRDEFVKALNHAVELGMAKAVRFETPLMWLNKAETWALADYWQQLPLVRQQTLTCYNGIQGDGCGECAACHLRAKGLKNYQDDMAGVMQSMKQKTGLR

SEQ ID NO: 39887 - protein, 231 aa, unidentified
  source 1..231: note = Mixta sp.
  REGION 1..231: note = tr|A0A506V6K9|A0A506V6K9_9GAMM 7-cyano-7-deazaguanine synthase OS=Mixta sp. BIT-26; OX = 2562439 GN=queC PE=3 SV=1
MKRAVVVFSGGQDSTTCLIQALAQYDEVHCVTFDYGQRHRQEIEVARKLAVQLGARAHKVLDVTLLNELAISSLTRDNIPVPSFDAEAGGLPSTFVPGRNILFLTLAAVYAYQVAAEAVITGVCETDFSGYPDCRDEFVKALNHAVELGMARPVRFETPLMWLNKAETWALADYWQQLPLVRQQTLTCYNGIQGDGCGECAACHLRANGLKNYQDDAAAVMQSMKRKTGLR

SEQ ID NO: 39888 - protein, 231 aa, unidentified
  source 1..231: note = Mixta theicola
  REGION 1..231: note = tr|A0A2K1QC40|A0A2K1QC40_9GAMM 7-cyano-7-deazaguanine synthase OS=Mixta theicola; OX = 1458355 GN=queC PE=3 SV=1
MKRAVVVFSGGQDSTTCLIQALAQYDEVHCVTFDYGQRHRQEIDVARELAIRLGARAHKVLDVTLLNELAISSLTRDNIPVPQYDANASGLPSTFVPGRNILFLTLASIYAYQVEAEAVITGVCETDFSGYPDCRDEFVKALNHAVELGMARPVRFETPLMWLNKAETWALADYWQQLPLVRQDTLTCYNGIKGDGCGECAACHLRANGLKNYQEDSAAVMHSMQQKTGLR

SEQ ID NO: 39889 - protein, 237 aa, unidentified
  source 1..237: note = Mizugakiibacter sediminis
  REGION 1..237: note = tr|A0A0K8QSU4|A0A0K8QSU4_9GAMM 7-cyano-7-deazaguanine synthase OS=Mizugakiibacter sediminis OX=1475481 GN=queC PE=3 SV=1
MTFDVLLQPEHFRMTTPRNAVVLVSGGMDSAVTLAIARERGFACHALSVAYGQRHTSELDAAARIAQALGALAHKTVQVDLRSIGGSALTDDIAVPEQGGAGIPVTYVPARNTIMLAIALGWAEVLGAADIFCGVNAVDYSGYPDCRPAFIEAFERLANLATKAGVEGAQIRVHAPLLAMSKAAIVREGVRLGVDFAATVSCYQADADGRACSRCDACRLRAQGFREAGVADPTRYR

SEQ ID NO: 39890 - protein, 705 aa, unidentified
  source 1..705: note = Mizugakiibacter sediminis
  REGION 1..705: note = tr|A0A0K8QRA3|A0A0K8QRA3_9GAMM Uncharacterized protein OS=Mizugakiibacter sediminis OX=1475481; GN = MBSD_0469 PE=4 SV=1
MQDKRYVLCGNASAKGISEDPSRDLRLRLSGKAGHGNITLRIEDVHTKMFRGVPPLFHDLLEIATYVYSADQVVRRGADDVDSFGDGWRRDLHFVVPVRNPDFWNSAEVQETLCSTLGFLSDDQYEFDFVKLDQDHQFQEYLEFNDTQQMYGMPEQVVMFSGGLDSLAGAIDEVVNQKRRVLLVTHKSTSKLNKRHRVLEEMLAAKAGDNVPHRITVRVHKTKELNHEYTQRSRSFLYVSIGATIARMLNLKSVRFYENGVISLNLPVCAQVVGGRATRTTHPRVMKGFQDLLSLVAGEPFTVENPYIWKTKADVVKIITDAGCHDLIKHSMTCTHTWEMTNQHTHCGGCSQCIDRRFAILAAKADQHDPVEHYKVDVFTQSRDKGEDKIMAAAYLERANQVKNLTDVTQFVSSYPDVGRVLKYLNYSSTGQAAQRVFDLYKRHADEVTGALDELGRRYFTQIRERSLPGDCLLRTVYESASVNSVPAVISMEKQPENFFRKRGAVWETRFQGRNTICLLNVDKGAEYINLLLAFPDREMSVYEIAVGNAVNTIEQPAGSGIAPEDIEDGYQVTQGIPLGDAGDVADRRALNECKQQARELFEEMEEARERGDHARIEEIEKEMAALVKYIEGGKGLGGRQRRVGDKRKNVRDAFRNAVDRAIRQIEKYDKPLAEHLKASIKYGNEVVYRPDMAITWEVRPIVNG

SEQ ID NO: 39891 - protein, 229 aa, unidentified
  source 1..229: note = Mobilisporobacter senegalensis
  REGION 1..229: note = tr|A0A3N1X340|A0A3N1X340_9FIRM 7-cyano-7-deazaguanine synthase OS=Mobilisporobacter senegalensis OX=1329262 GN=queC PE=3 SV=1
MKALVLFSGGIDSSTCLAMAINSFGNNNVICLTISYGQKHKKELEAAQNIVEYYGVDNIIIDLSTIFIMSNCSLLSHSDQEIPNTSYMEQLNSINGQPVSTYVPFRNGTFLSIAASIAISNDCDFIYYGAHMDDAAGNAYPDCSISFYKSIGSAIYEGSGQKLKVIAPFISLNKTQIVAHGITLGVPYNLTWSCYNGSKIPCGKCGTCLDRQKAFENNHLTDPLIEERI

SEQ ID NO: 39892 - protein, 232 aa, Moellerella wisconsensis
  REGION 1..232: note = tr|A0A0H2QT16|A0A0H2QT16_9GAMM 7-cyano-7-deazaguanine synthase OS=Moellerella wisconsensis OX=158849 GN=queC PE=3 SV=1
MKRAVVVFSGGQDSTTCLIQALKNYDDVHCVTFDYGQRHRAEIQVAQRLSKNLGASAHKTLDVTLLNELAISSLTRDNIPVPDFSESEKSAIPSTFVPGRNILFLTLAAIYAYQVQAEAVITGVCETDFSGYPDCRNDFVKALNTAVSAGLARDIRFETPLMWLDKAETWALADYYEHLETIRQDTLTCYNGIQGDGCGECAACHLRANGLERYQDNKSAIMQSMKQKVGLA

SEQ ID NO: 39893 - protein, 232 aa, Moellerella wisconsensis; identical to SEQ ID NO: 39892
  REGION 1..232: note = tr|A0A0N0IBD1|A0A0N0IBD1_9GAMM 7-cyano-7-deazaguanine synthase OS=Moellerella wisconsensis ATCC 35017 OX=1354267 GN=queC PE=3 SV=1

SEQ ID NO: 39894 - protein, 365 aa, Mogibacterium sp.
  REGION 1..365: note = tr|J6HKI5|J6HKI5_9FIRM Queuosine biosynthesis protein QueC-like protein OS=Mogibacterium sp. CM50; OX = 936375 GN=HMPREF1152_1732 PE=4 SV=1
MKEIRYCRRCIMNDKADPYITFDESGICNYCTEALTHINTDVYFPNEEGGIRLNRMIEKIKSENADKKYDCIMGISGGLDSAYLAYLGYKWGLRILAVHIDDGYDTEISKENIKKLCDAANIEMRTITPDAEQFNALTLAYMKAGVPDVAVPQDNILFAFLYDTVEHEGIKYFLSGGNFALECVLQKGNGYSAMDVTNIKDIHKRFGTKSINRLKFITSYKKYMRIKRGSVITLRPLDLVDYNRERAFKELAEFCDFKYYGSKHLENVLTAFIQLYWLPKKFGVDKRSSHLSSMIVSGQMTREEAMAEMQKPAYDKELMDEYISIIKKNLGIDDEEFDEIMSSPTHQHTEYRTEKFAPFIRKLLR

SEQ ID NO: 39895 - protein, 227 aa, unidentified
  source 1..227: note = Monoglobus pectinilyticus
  REGION 1..227: note = tr|A0A2K9P4M7|A0A2K9P4M7_9FIRM 7-cyano-7-deazaguanine synthase OS=Monoglobus pectinilyticus OX=1981510 GN=queC PE=3 SV=1
MDNKKALVLFSGGVDSTTALAMAVKKYGADKTAALSISYGQKHSKEIEAARKIADYYGTELLELDLSKMFEYSSCSLLKQNEDADIPKESYEEQLKDTDGEPVSTYVPFRNGLFLASAASIALSLEAEIIYYGAHSDDAAGSAYPDCSKVFNDAMNTAIYEGSGHKIKILAPFVEWNKKQVVAEGVKLGVPYEMTWSCYEGGDEPCGECGTCRDRREAFLANGLDIK

SEQ ID NO: 39896 - protein, 228 aa, unidentified
  source 1..228: note = Moorea bouillonii
  REGION 1..228: note = tr|A0A1U7N8E6|A0A1U7N8E6_9CYAN 7-cyano-7-deazaguanine synthase OS=Moorea bouillonii PNG; OX = 568701 GN=queC PE=3 SV=1
MSKKVIVLLSGGLDSATVLYQSVGDGYECYALSFDYQQRHRRELKSAYAIASAAGVKEHQVVRFDLRQWGGSALTDDNLDLPKERSLEQMSQEIPITYVPARNTIFLSFGLSYAEAIGAEAVYVGVNALDYSGYPDCRPDYIQAMQTAFDLGTKQGREGNGIKIVSPLIDLKKTEIIQLGNQLGVPWEKTWSCYTGNDLACGVCDACRLRLAAFAELGLDDPLTYQEG

SEQ ID NO: 39897 - protein, 228 aa, unidentified
  source 1..228: note = Moorea producens
  REGION 1..228: note = tr|A0A1D8U3W4|A0A1D8U3W4_9CYAN 7-cyano-7-deazaguanine synthase OS=Moorea producens PAL-8-15-08-1 OX=1458985 GN=queC PE=3 SV=1
MSKKVIVLLSGGLDSATVLYQSVGDGYECYALSFDYQQRHRRELKSAYAIASAAGVKEHQVVRFDLRQWGGSALTDDNLDLPKERSLEQMSQEIPITYVPARNTIFLSFGLSYAEAIGAEGVYVGVNALDYSGYPDCRPDYIQAMQTAFDLGTKQGREGNGIKIVTPLIDLKKTEIIQLGNQLGVPWEKTWSCYTGNDLACGVCDACRLRLAAFAELGLDDPLTYQEG

SEQ ID NO: 39898 - protein, 228 aa, unidentified
  source 1..228: note = Moorea producens
  REGION 1..228: note = tr|A0A1D9G7U3|A0A1D9G7U3_9CYAN 7-cyano-7-deazaguanine synthase OS=Moorea producens JHB; OX = 1454205 GN=queC PE=3 SV=1
MSKKVIVLLSGGLDSATVLYQSVGDGYECYALSFDYQQRHRRELKSAYAIATAAGVKEHQVVRFDLRQWGGSALTDDNLDLPKERSLEQMSQEIPITYVPARNTIFLSFGLSYAEAIGAEGVYVGVNALDYSGYPDCRPDYIKAMQTAFDLGTKQGREGNGIKIFTPLIDLKKTEIIQLGNQLGVPWEKTWSCYTGNDLACGVCDACRLRLAAFAELGLDDPLPYQEG

SEQ ID NO: 39899 - protein, 228 aa, Moorella glycerini
  REGION 1..228: note = tr|A0A0C7NEV4|A0A0C7NEV4_9THEO 7-cyano-7-deazaguanine synthase OS=Moorella glycerini; OX = 55779 GN=queC PE=3 SV=1
MEKVIVVLSGGLDSTTCMAIARAAGKEIYPLTFAYGQKHTVELEAARQVASYYGVSGRHKIINLEGLLSGSALTDADKEIPTGRSISEIGRVIPSTYVPARNIVFLALALAQAEPLDARAIYLGVNALDFSGYPDCRPEFISAFQEVINKGTAAGVEGHGIRIETPLIHLTKAEIIKTGIKLGAPYHLSYSCYQGSVPSCGTCDACLLRLKGFQEAGVTDPIPYRNKG

SEQ ID NO: 39900 - protein, 293 aa, Moorella humiferrea
  REGION 1..293: note = tr|A0A2T0AS89|A0A2T0AS89_9THEO NH(3)-dependent NAD(+) synthetase OS=Moorella humiferrea OX=676965; GN = nadE_1 PE=4 SV=1
MANADHLNKISAGVVKVMLSPLLQEKLDNLLKKIEEMEGVLIAFSGGVDSTLLLKAATMTSTRVMAVTASSPTYPEAEIAAAVQLARDLGVQHQIIKTNEMEDPNFTANPTERCYHCKRELFATLRRLASEHALKTIVDGANADDEDDFRPGRRAAREFGVRSPLQEVGLTKDEIRQLARYLHLPNWDKPSMACLSSRIPYGQAITPEKLRQIAAAEDFLCRLGLKEVRVRHHDTIARIEVNPAAFALLIDAAIRVKIVKYFQDLGFTYIVLDLEGFRSGSMNAVLKQEDLHR

SEQ ID NO: 39901 - protein, 271 aa, Moorella thermoacetica
  REGION 1..271: note = tr|A0A1J5NTK3|A0A1J5NTK3_MOOTH GMP synthase; OS = Moorella thermoacetica OX=1525 GN=guaA_1 PE=4 SV=1
MLPADLTAKLEHLKKNLTELESILVAYSGGVDSSLLLKVASTTPVKVLAVTAASPTYPQAEIEAATRLARELGVQHLIINTNEMDNPEFCANPPERCYHCKKELFATLLELAREHGIKAIVDGANADDRSDFRPGSQAAREFGVKSPLQEAGLTKDDIRQLARHLGLPNWDKPSMACLSSRIPYGQAITTEKLKQVAAAEDYLRQLGIKEIRVRHHGTIARIEVNPAAFALLIDSKVRANLINYFHELGFTYITMDLEGFRSGSMNAVLDK

SEQ ID NO: 39902 - protein, 271 aa, Moorella thermoacetica
  REGION 1..271: note = tr|A0A1J5JQH1|A0A1J5JQH1_MOOTH GMP synthase; OS = Moorella thermoacetica OX=1525 GN=guaA_1 PE=4 SV=1
MLPADLTAKLEQLKKNLTELESILVAYSGGVDSSLLLKVASTTPVKVLAVTAASPTYPQAEIEAATRLARELGVQHMVINTNEMDNPEFFANPPERCYHCKKELFATLQELAREHGLKAIVDGANADDRSDFRPGSQAAREYGVKSPLQEAGLTKDDIRQLARHLGLPNWDKPSMACLSSRIPYGQAITAEKLKQVAAAEDYLRQFGIKEIRVRHHGTIARIEVNPSAFALLIDSKVRANLVNYFHTLGFTYITMDLEGFRSGSMNAVLNK

SEQ ID NO: 39903 - protein, 247 aa, Moraxella atlantae
  REGION 1..247: note = tr|A0A1B8QEV1|A0A1B8QEV1_9GAMM 7-cyano-7-deazaguanine synthase OS=Moraxella atlantae; OX = 34059 GN=queC PE=3 SV=1
MPSQTSSTFTESGVSSNNAVVLLSGGLDSVTCLYWAKARFDNVTAVSFDYGQRHNSELAAAKRIAKHAQVAHRIINIDLAQLGGSALTDPSMQVPTGHAHDFAEQHDDNAIPSTYVPARNTIFLAYALAVAEVTQARTIVIGVNAVDYSGYPDCRPDYIAAFNHMANLATKAGRLGQTLTIATPLLDLSKADIIRLGTSLGVDYSLTVSCYQADDAGRACGVCDSCVLRQQGFLQAEIDDPTRYRVG

SEQ ID NO: 39904 - protein, 247 aa, Moraxella atlantae
  REGION 1..247: note = tr|A0A378Q8B4|A0A378Q8B4_9GAMM 7-cyano-7-deazaguanine synthase OS=Moraxella atlantae; OX = 34059 GN=queC PE=3 SV=1
MPSQTSSTFTESGVSSNNAVVLLSGGLDSVTCLYWAKVRFDNVTAVSFDYGQRHNSELAAAKRIAKHAQVAHRIINIDLAQLGGSALTDPSMQVPTGHAHDFAEQHDDNAIPSTYVPARNTIFLAYALAVAEVTQARTIVIGVNAVDYSGYPDCRPDYIAAFNHMANLATKAGRLGQTLTIATPLLDLSKADIIRLGTSLGVDYSLTVSCYQADDAGRACGVCDSCVLRQQGFLQAEIDDPTRYRVG

SEQ ID NO: 39905 - protein, 249 aa, Moraxella bovis
  REGION 1..249: note = tr|A0A2Z4R831|A0A2Z4R831_MORBO 7-cyano-7-deazaguanine synthase OS=Moraxella bovis OX=476; GN = queC PE=3 SV=1
MTTFCPDNNNLNIPHSDDFARQKAVVLLSGGLDSTTCLYWAKAVFKEITAISFRYGQRHSSELAFSSAIAQTLGVSHRIIDIDIAQLGGSALTDTSIDVPDYQADSDAVPVTYVPARNTIFLSYALAVAEVTEACAIIIGVSSVDFSGYPDCRDDYIRAFETMANLATVAGRAGRRLSIIAPLQHLSKAETLTLGLSLGVDYAQTVSCYRADSDGRACGECDSCVLRHQGFVQAGVPDPTRYQNKPTQG

SEQ ID NO: 39906 - protein, 249 aa, Moraxella bovis
  REGION 1..249: note = tr|A0A378Q105|A0A378Q105_MORBO 7-cyano-7-deazaguanine synthase OS=Moraxella bovis OX=476; GN = queC PE=3 SV=1
MTTFYPDNNNLNIPHSDDFAHQKAAVLLSGGLDSTTCLYWAKAVFKEITAISFRYGQRHSSELAFSSAIAQTLGVSHRIIDIDIAQLGGSALTDTSIDVPDYQADSDAVPVTYVPARNTIFLSYALAVAEVTEACAIIIGVSSVDFSGYPDCRDDYIRAFETMANLATVAGRAGRCLSIIAPLQHLSKAETLTLGLSLGVDYAQTVSCYRADSDGRACGECDSCVLRHQGFVQAGVPDPTRYQNKPTQG

SEQ ID NO: 39907 - protein, 231 aa, Moraxella bovoculi
  REGION 1..231: note = tr|A0A0U2B231|A0A0U2B231_9GAMM 7-cyano-7-deazaguanine synthase OS=Moraxella bovoculi; OX = 386891 GN=queC PE=3 SV=1
MNSDFKNHHAIVLFSGGLDSTTCLYWARANFKDITAISFRYGQRHSSELIAATKITKQLGVSHRIIDIDIAQLGGSALTDQNIDVPNYDAASDAVPVTYVPARNTIFLSYALAAAEVMQANYIVIGVSSVDFSGYPDCRPDFIEAFENLANLATVAGRAGNRLSVVAPLQNLSKAQTLELGLSLGVDYGKTVSCYQADSDGRACGVCDSCALRRQGFIDAGVPDPTCYQNA

SEQ ID NO: 39908 - protein, 231 aa, Moraxella bovoculi
  REGION 1..231: note = tr|A0A066UF17|A0A066UF17_9GAMM 7-cyano-7-deazaguanine synthase OS=Moraxella bovoculi 237; OX = 743974 GN=queC PE=3 SV=1
MNSDFKNHHAIVLFSGGLDSTTCLYWARANFKDITAISFRYGQRHSSELIAATKITKQLGVSHRIIDIDIAQLGGSALTDQNIDVPNYDAASDAVPATYVPARNTIFLSYALAAAEVMQANYIVIGVSSVDFSGYPDCRPDFIEAFENLANLATVAGRAGNRLSVVAPLQNLSKAQTLELGLSLGVDYGETVSCYQADSDGRACGVCDSCALRRQGFIDAGVPDPTRYQNA

SEQ ID NO: 39909 - protein, 232 aa, Moraxella canis
  REGION 1..232: note = tr|A0A1S9ZIB1|A0A1S9ZIB1_9GAMM 7-cyano-7-deazaguanine synthase OS=Moraxella canis; OX = 90239 GN=queC PE=3 SV=1
MNNNQNAVVLFSGGLDSTTCLYWAKSQFNTVTAVSFRYGQRHSSELDAAQNIAKKLGIRHHVIDIDIAKLGGSALTDMTLSVPDHDESIIYNDDDQVAPITYVPARNTIFLSYALAVAEVTQASAIIIGVSSVDYSGYPDCRPDYIAAFETMANLATVAGRQGNHLSIIAPLQHLSKAETLKLGVSLGVDYSLTVSCYQADESGRACGHCDSCHLRKQGFMDAQIADPTRYQ

SEQ ID NO: 39910 - protein, 249 aa, Moraxella caprae
  REGION 1..249: note = tr|A0A378R541|A0A378R541_9GAMM 7-cyano-7-deazaguanine synthase OS=Moraxella caprae; OX = 90240 GN=queC PE=3 SV=1
MTTFCSDNNSLNIPHSDDFAHQKAVVLLSGGLDSTTCLYWAKAVFKEITAISFRYGQRHSSELAFSSAIAQTLGVSHRIIDIDIAQLGGSALTDTSIDVPDYQADSDAVPVTYVPARNTIFLSYALAVAEVTEACAIIIGVSSVDFSGYPDCRDDYIRAFETMANLATVAGRAGRRLSIIAPLQHLSKAETLTLGLSLGVDYAQTVSCYRADSDGRACGECDSCVLRHQGFVQAGVPDPTRYQNKPTQG

SEQ ID NO: 39911 - protein, 232 aa, Moraxella catarrhalis
  REGION 1..232: note = tr|A0A198XTM5|A0A198XTM5_MORCA 7-cyano-7-deazaguanine synthase OS=Moraxella catarrhalis; OX = 480 GN=queC PE=3 SV=1
MNNNQNAVVLFSGGLDSTTCLYWAKSQFKTVTAVSFCYGQRHSSELNAAQNITKKLSVRHHVIDIDIAKLGGSALTDMNLSVPNHDESVTYSDADRVAPITYVPARNTIFLSYALAVAEVTQASTIIIGVSSVDYSGYPDCRPDYIAAFETMANLATVSGRQGNHLSIIAPLQNLSKADTLKLGISLGVDYSLTVSCYQADALGRACGHCDSCHLRKQGFMDAKIADPTRYQ

SEQ ID NO: 39912 - protein, 232 aa, Moraxella catarrhalis
  REGION 1..232: note = tr|A0A198WZM3|A0A198WZM3_MORCA 7-cyano-7-deazaguanine synthase OS=Moraxella catarrhalis; OX = 480 GN=queC PE=3 SV=1
MNNNQNAVVLFSGGLDSTTCLYWAKSQFKTVTAVSFCYGQRHSSELNAAQNITKKLSVRHHVIDIDIAKLGGSALTDMNLSVPNHDESVTYSDADRVAPITYVPARNTIFLSYALAVAEVTQASAIIIGVSSVDYSGYPDCRPDYIAAFETMANLATVSGRQGNHLSIIAPLQNLSKADTLKLGISLGVDYSLTVSCYQADALGRACGHCDSCHLRRQGFMDAKIADPTRYQ

SEQ ID NO: 39913 - protein, 240 aa, Moraxella caviae
  REGION 1..240: note = tr|A0A1T0A7F4|A0A1T0A7F4_9GAMM 7-cyano-7-deazaguanine synthase OS=Moraxella caviae; OX = 34060 GN=queC PE=3 SV=1
MTTSQIHSTNQPTDTKNARAVVLFSGGLDSTTCLYWARANFADVTAISFRYGQRHSSELDAAGRIAKSLGVAHRVIDIDIAQLGGSALTDLSIDVPPADTAQDGVPITYVPARNTIFLSYALAAAEVTGATYIVIGVSSVDFSGYPDCRPDFIAAFETMANLATVAGRAGNRLSITAPLQHLSKAETLQLGLSLGVDYAATVSCYQADSEGRACGVCDSCTLRRQGFLGAGVPDPTRYQN

SEQ ID NO: 39914 - protein, 239 aa, Moraxella cuniculi
  REGION 1..239: note = tr|A0A448GXC2|A0A448GXC2_9GAMM 7-cyano-7-deazaguanine synthase OS=Moraxella cuniculi; OX = 34061 GN=queC PE=3 SV=1
MSNHHQNAVVLFSGGLDSTTCLYWAKSQFAHITAISFRYGQRHSSELIAAEKISKILGIAHHIIDIDIAKLGGSALTDPNLSVPDYDQSVIYDDSQRVAPITYVPARNTIFLSYALAVAEVSKASAIVIGVSSVDYSGYPDCRPDYIAAFEQLANLATVAGRQGHRLSIIAPLQHLSKAQTLKLGLSLGVDYAQTVSCYQADGDGRACGVCDSCHLRKQGFADAGIIDPTHYQHAPKSQ

SEQ ID NO: 39915 - protein, 239 aa, Moraxella cuniculi; identical to SEQ ID NO: 39914
  REGION 1..239: note = tr|A0A1N7FUL2|A0A1N7FUL2_9GAMM 7-cyano-7-deazaguanine synthase OS=Moraxella cuniculi DSM 21768 OX=1122245 GN=queC PE=3 SV=1

SEQ ID NO: 39916 - protein, 438 aa, Moraxella equi
  REGION 1..438: note = tr|A0A378QNL6|A0A378QNL6_9GAMM Queuosine biosynthesis protein QueC OS=Moraxella equi OX=60442; GN = NCTC11012_00525 PE=4 SV=1
MTQLVFHHDIEQLKNLPNGIMPVRLYEMGDKNLQIAQIGNKVLDCVERLGVELNSQVMDFLTIAMAVTAADTFVLRKDTANGWYRSFSITLPLCQPDIWQANKTHLEQILHFLSGDIWQFNFQAGGQLPPQPYKLNRRAKLVDLRNKDSVCLFSGGLDSAIGAIDLLEQGYSPVLVSHSYKGDKSRQQMIVEKFNQSRYANQFSQFNAIAQPHLNNGGTTEITMRTRSLNFLAFAVISAYALQEVVQEAIDIFVPENGVISINAPLTPRRVGTLSTRTTHPYFIQELQKLFTAVNIPFILKNPYQFKTKGQMIAECANLPLLRQIIPDTVSCSHWKRKNQQCGVCVPCLIRRASLYYADITNDADYEFNNIRQILTHQDRRDDLFALMGAIGQKNHRNMNQWVLQSGSLPIQQLNQFSDVFMNGLNEVEQLLIANQVL

SEQ ID NO: 39917 - protein, 249 aa, Moraxella equi
  REGION 1..249: note = tr|A0A378QMZ2|A0A378QMZ2_9GAMM 7-cyano-7-deazaguanine synthase OS=Moraxella equi OX=60442; GN = queC PE=3 SV=1
MTTFCPDNNNLNIPHSDDFAHQKAVVLLSGGLDSTTCLYWAKAVFKEITAISFRYGQRHSSELAFSSAIAQTLGVSHRIIDIDIAQLGGSALTDTSIDVPDYQADSDAVPVTYVPARNTIFLSYALAVAEVTEACAIVIGVSSVDFSGYPDCRDDYIRAFETMANLATVAGRAGRRLSIIAPLQHLSKAETLTLGLSLGVDYAQTVSCYRADSDGRACGECDSCVLRHQGFVQAGVPDPTRYQNKPTQG

SEQ ID NO: 39918 - protein, 249 aa, Moraxella lacunata
  REGION 1..249: note = tr|A0A378T4A2|A0A378T4A2_MORLA 7-cyano-7-deazaguanine synthase OS=Moraxella lacunata; OX = 477 GN=queC PE=3 SV=1
MTTFCPDSNNLNIPHSDDFAHQKAVVLLSGGLDSTTCLYWAKAVFKEITAISFRYGQRHSSELAFSSAIAQTLGVSHRIIDIDIAQLGGSALTDTSIDVPDYQADSDAVPVTYVPARNTIFLSYALAVAEVTEACAIIIGVSSVDFSGYPDCRDDYIRAFETMANLATVAGRAGRRLSIIAPLQYLSKAETLTLGLSLGVDYAQTVSCYRADSDGRACGECDSCVLRHQGFVQAGVPDPTRYQNKPTQG

SEQ ID NO: 39919 - protein, 251 aa, Moraxella lacunata
  REGION 1..251: note = tr|A0A1V4GZI3|A0A1V4GZI3_MORLA 7-cyano-7-deazaguanine synthase OS=Moraxella lacunata; OX = 477 GN=queC PE=3 SV=1
MTFCPYDPKNNDLNIPHSDDFASQKAVVLFSGGLDSTTCLYWAKAVFKEVTAISFCYGQRHLSELAFSSAIAQMLGVSHRIIDIDIAQLGGSALTDSSIEVPDHQADSDAVPVTYVPARNTIFLSYALAVAEVTEACAIIIGVSSVDFSGYPDCRDDYIRAFETMANLATVAGRAGRRLSIIAPLQYLSKAQTLKLGLSLGVDYAQTVSCYRADSDGRACGECDSCVLRHQGFVQAGISDPTRYQDKTGIN

SEQ ID NO: 39920 - protein, 255 aa, Moraxella lincolnii
  REGION 1..255: note = tr|A0A1T0CI42|A0A1T0CI42_9GAMM 7-cyano-7-deazaguanine synthase OS=Moraxella lincolnii; OX = 90241 GN=queC PE=3 SV=1
MNSVTVFKNPASGFPQHGNAVVLLSGGLDSVTCLYWAKANFQRVTAVSFHYGQRHDSELQFAIKNAKKAGVAHRIIDIDIAQLGGSSLTDHALTVPMGDVNKFDHQQINNDAIPNTYVPARNTIFLSYALAVAEVTDATHIVIGVSSVDYSGYPDCRPEYIQAFETMANLATKAGVMGNRLHVDTPLQTLSKADTIALGVSLGVDYADTVSCYQADANGLACGHCDSCVLRRQGFKQAKITDPTRYQKPSTLSTL

SEQ ID NO: 39921 - protein, 247 aa, unidentified
  source 1..247: note = Moraxella macacae
  REGION 1..247: note = tr|L2F777|L2F777_9GAMM 7-cyano-7-deazaguanine synthase OS=Moraxella macacae 0408225 OX=1230338 GN=queC; PE = 3 SV=1
MNKPQNFIPTTAKPNNNQNAVVLLSGGLDSVTCLYWAKANFNHVTAVSFDYGQRHNSELNAAKNIAKIASVDHRVIGIDLAQLGGSALTDQNLHIPNADKTADFSNHQNNANIPITYVPARNTIFLSYALAVAEVTKANTIVIGVNAVDYSGYPDCRPEYIDAFAKMANLATKAGVMGNHLTIATPLLHLSKAEIIKLGVSLGVDYGLTVSCYQANRDGLACGKCDSCYLRQQGFLQAEIDDPTCYQ

SEQ ID NO: 39922 - protein, 237 aa, Moraxella nonliquefaciens
  REGION 1..237: note = tr|A0A1B8QJF6|A0A1B8QJF6_MORNO 7-cyano-7-deazaguanine synthase OS=Moraxella nonliquefaciens OX=478 GN=queC PE=3 SV=1
MPHSDDFASQKAVVLFSGGLDSTTCLYWAKAVFKEVTAISFRYGQRHLSELAFSSAIAQMLGVSHRIIDIDIAQLGGSALTDSSIEVPDHQADSDAVPVTYVPARNTIFLSYALAVAEVTEACAIIIGVSSVDFSGYPDCRDDYIRAFETMANLATVAGRAGRRLSIIAPLQYLSKAQTLKLGLSLGVDYAQTVSCYRADSDGRACGECDSCVLRHQGFVQAGISDPTRYQDKTGIN

SEQ ID NO: 39923 - protein, 237 aa, Moraxella nonliquefaciens
  REGION 1..237: note = tr|A0A1B8PN19|A0A1B8PN19_MORNO 7-cyano-7-deazaguanine synthase OS=Moraxella nonliquefaciens OX=478 GN=queC PE=3 SV=1
MPHSDDFASQKAVVLFSGGLDSTTCLYWAKAVFKEVTAISFCYGQRHLSELAFSSAIAQTLGVSHRIIDIDIAQLGGSALTDSSIEVPDHQADSNAVPVTYVPARNTIFLSYALAVAEVTEACAIIIGVSSVDFSGYPDCRDDYIRAFETMANLATVAGRAGRRLSIIAPLQYLSKAQTLKLGLSLGVDYAQTVSCYRADSDGRACGECDSCVLRHQGFVQAGISDPTRYQDKTGIN

SEQ ID NO: 39924 - protein, 236 aa, Moraxella osloensis
  REGION 1..236: note = tr|A0A2K8K1E2|A0A2K8K1E2_9GAMM 7-cyano-7-deazaguanine synthase OS=Moraxella osloensis; OX = 34062 GN=queC PE=3 SV=1
MSTSTTPQNAVVLLSGGLDSVTCLYWAKANYANVTAVSFNYGQRHDSELNAAKKIAATAQVNHRIIDIDLAQLGGSALTDASLVVPDAKQTDFSDNQHNDSIPITYVPARNTIFLSYALALAEVTQSNAIVIGVNAVDYSGYPDCRPEYIEAFENMANLATKAGVMGNHLYIATPLLHLSKAAIIKLGVSLGVDYALTVSCYRADSEGRACGHCDSCYLRQQGFLQAEIDDPTIYQ

SEQ ID NO: 39925 - protein, 236 aa, Moraxella osloensis
  REGION 1..236: note = tr|A0A270AXF5|A0A270AXF5_9GAMM 7-cyano-7-deazaguanine synthase OS=Moraxella osloensis; OX = 34062 GN=queC PE=3 SV=1
MSTSTTPQNAVVLLSGGLDSVTCLYWAKANYANVTAVSFNYGQRHNSELNAAKKIAATAQVNHRIIDIDLAQLGGSALTDASLVVPDAKQTDFSDNQHNDSIPITYVPARNTIFLSYALALAEVTQSNAIVIGVNAVDYSGYPDCRPEYIEAFEKMANLATKAGVMGNHLHIATPLLHLSKAEIIKLGVSLGVDYALTVSCYRADSEGRACAHCDSCYLRQQGFLQAEIDDPTIYQ

SEQ ID NO: 39926 - protein, 231 aa, Moraxella ovis
  REGION 1..231: note = tr|A0A378PLH9|A0A378PLH9_9GAMM 7-cyano-7-deazaguanine synthase OS=Moraxella ovis OX=29433; GN = queC PE=3 SV=1
MNSDFKNHHAIVLFSGGLDSTTCLYWAQANFKDIIAISFRYGQRHSSELIAATKITKQLGVSHRIIDIDIAQLGGSALTDQNIDVPNYDAASDAVPVTYVPARNTIFLSYALAAAEVMQANYIVIGVSSVDFSGYPDCRPDFIEAFENLANLATVAGRAGNRLSVVAPLQNLSKAQTLELGLSLGVDYGKTVSCYQADSDGRACGVCDSCALRRQGFIDAGVPDPTRYQNA

SEQ ID NO: 39927 - protein, 236 aa, Moraxella pluranimalium
  REGION 1..236: note = tr|A0A1T0CUB9|A0A1T0CUB9_9GAMM 7-cyano-7-deazaguanine synthase OS=Moraxella pluranimalium; OX = 470453 GN=queC PE=3 SV=1
MNTYQDQNAVVLFSGGLDSTTCLYWAKSQFKNIVALSFRYGQRHSSELNAAINIAKSLGVDHRIIDIDIAQLGGSALTDHNIDVPDHDDSIVYDDTTNTAPITYVPARNTIFLSYALAAAEVTNANAIVIGVSSVDYSGYPDCRPDFIAAFESLANLATVAARQGRKLSVIAPLQTLSKAETLQLGLSLGVDYSQTVSCYQANADGQACGVCDSCHLRRQGFIDAGVADPTRYANS

SEQ ID NO: 39928 - protein, 238 aa, Moraxella porci
  REGION 1..238: note = tr|A0A1T0CVZ8|A0A1T0CVZ8_9GAMM 7-cyano-7-deazaguanine synthase OS=Moraxella porci DSM 25326 OX=573983 GN=queC PE=3 SV=1
MNEHQHQNAVVLFSGGLDSTTCLYWAKSEFANITAVSFSYGQRHSSELMAAQNITKALGVKHLIIDIDIAKLGGSALTDPDLHVPDYDASIVYGDDDKVAPITYVPARNTIFLSYALAVAEVTQASAIIIGVSSVDYSGYPDCRPDFIQAFEHMANLATVAGRQGRRLSIIAPLQQLSKAETLQLGLSLGVDYALTVSCYQADAQGRACGHCDSCHLRKQGFMDAGVSDPTRYQQLDQ

SEQ ID NO: 39929 - protein, 235 aa, Moraxella sp.
  REGION 1..235: note = tr|A0A229GW52|A0A229GW52_9GAMM 7-cyano-7-deazaguanine synthase OS=Moraxella sp. VT-16-12; OX = 2014877 GN=queC PE=3 SV=1
MNDITLTPSHPNDRAVVLFSGGLDSTTCLYWAKAHFKDVTAISFRYGQRHCSELIFAQKIAKKLGISHRIIDIDIAQLGGSALTDTTIDVPNHSDHIDSVPITYVPARNTIFLSYALAVAEVTGANHIIIGVSSVDFSGYPDCRADFIQAFELMANLATVAGRAGNRLSIIAPLQHLSKAQTLQLGLSLGVDYAQTVSCYQADTDGRACGVCDSCVLRRQGFIDAGVLDPTRYKA

SEQ ID NO: 39930 - protein, 238 aa, Moraxella sp.
  REGION 1..238: note = tr|A0A2K0XX71|A0A2K0XX71_9GAMM 7-cyano-7-deazaguanine synthase OS=Moraxella sp. RCAD0137; OX = 1775913 GN=queC PE=3 SV=1
MNEHQHQNAVVLFSGGLDSTTCLYWAKSEFANITAVSFSYGQRHSSELMAAQNITKALGVKHLVIDIDIAKLGGSALTDPDLHVPDYDASIVYGDDDKVAPITYVPARNTIFLSYALAVAEVTQASAIIIGVSSVDYSGYPDCRPDFIQAFELMANLATVAGRQGHRLSIIAPLQQLSKAETLQLGLSLGVDYALTVSCYQADAQGRACGHCDSCHLRKQGFMDAGVSDPTRYQQLDQ

SEQ ID NO: 39931 - protein, 226 aa, unidentified
  source 1..226: note = Moraxellaceae bacterium
  REGION 1..226: note = tr|A0A345P6H9|A0A345P6H9_9GAMM 7-cyano-7-deazaguanine synthase OS=Moraxellaceae bacterium HYN0046 OX=2283318 GN=queC PE=3 SV=1
MAFTHSPRAIVLLSGGLDSATCLAWAMQRYQCEALSFAYGQRHSSELDAAKKLAAQAGVPHRIINIDLRSLGGSALTDDSIDVPENEPGGIPVTYVPARNTIFLSYALAVAEVTQSQAIVIGVNAVDYSGYPDCRSEYIDAFARMAALATKAGVEGNPLTIDTPLLHLSKANIIRLGTELGIDYSLTVSCYQADLQGRACGRCDSCRLRRQGFDDAGVADPTHYQS

SEQ ID NO: 39932 - protein, 236 aa, unidentified
  source 1..236: note = Moraxellaceae bacterium
  REGION 1..236: note = tr|A0A2A5CRG5|A0A2A5CRG5_9GAMM 7-cyano-7-deazaguanine synthase OS=Moraxellaceae bacterium; OX = 1889775 GN=queC PE=3 SV=1
MGGRGRTLMSTVNKKKAVILLSGGLDSATCLAIANKQGYACYAVSFDYGQRHKAELLAAKRLADELGVEGFKTIRIDMDGIGGSALTDDSIAVPEGGVAEGIPVTYVPARNTIFLSLALGWAEVLDADDIFIGVNAVDYSGYPDCRPEFVSAFEKLANVATKKGVETHSLSIKTPLIDMSKADIINKGISLGVDYGLTVSCYQANDAGEACGKCDSCRLRTEGFAAAGVPDPTRYR

SEQ ID NO: 39933 - protein, 232 aa, Morganella morganii
  REGION 1..232: note = tr|M7CTL2|M7CTL2_MORMO 7-cyano-7-deazaguanine synthase OS=Morganella morganii SC01 OX=1239989 GN=queC; PE = 3 SV=1
MKRAVVVFSGGQDSTTCLIQALHNYDEVHCVTFDYGQRHSQEIDVARKLSLKLGAAAHKVLDVSLLNELAVSSLTRDNIPVPGFSESEQSDIPNTFVPGRNILFLTLTAIYAYQVNAEAIITGVCETDFSGYPDCRDEFVKALNKAVNAGLARDIRFETPLMWLDKAQTWALADYYGQLDTVRTETLTCYNGIQGDGCGECAACHLRRNGLDSYLADRSAVMAAMKKITGLQ

SEQ ID NO: 39934 - protein, 232 aa, Morganella morganii
  REGION 1..232: note = tr|J7U892|J7U892_MORMO 7-cyano-7-deazaguanine synthase OS=Morganella morganii subsp. morganii KT; OX = 1124991 GN=queC PE=3 SV=1
MKRAVVVFSGGQDSTTCLIQALRNYDEVHCVTFDYGQRHSQEIDVARKLSLKLGAAAHKVLDVSLLNELAVSSLTRDNIPVPGFSESEQSDIPNTFVPGRNILFLTLTAIYAYQVNAEAIITGVCETDFSGYPDCRDEFVKALNKAVNAGLARDIRFETPLMWLDKAQTWALADYYGQLDTVRTETLTCYNGIQGDGCGECAACHLRRNGLDSYLADRSAVMAAMKKITGLH

SEQ ID NO: 39935 - protein, 232 aa, Morganella psychrotolerans
  REGION 1..232: note = tr|A0A1B8H165|A0A1B8H165_9GAMM 7-cyano-7-deazaguanine synthase OS=Morganella psychrotolerans OX=368603 GN=queC PE=3 SV=1
MKRAVVVFSGGQDSTTCLIQALRNYDEVHCVTFDYGQRHSQEIEVARRLSLKLGAAAHKVLDVTLLSELAVSSLTRDNIPVPGFSESEKSDIPNTFVPGRNILFLTLTAIYAYQVSAEAIITGVCETDFSGYPDCRDEFVKALNHAVNLGIAREIRFETPLMWLDKAQTWALAEYYGQLDTVRRETLTCYNGIQGDGCGECAACHLRQNGLAHYLANRDAVMSSMKKLTGLS

SEQ ID NO: 39936 - protein, 232 aa, Morganella psychrotolerans
  REGION 1..232: note = tr|A0A1B8HSX2|A0A1B8HSX2_9GAMM 7-cyano-7-deazaguanine synthase OS=Morganella psychrotolerans OX=368603 GN=queC PE=3 SV=1
MKRAVVVFSGGQDSTTCLIQALRNYDEVHCVTFDYGQRHRQEIEVARQLSLKLGAAAHKVLDVTLLSELAVSSLTRDNIPVPGFSESEKSDIPNTFVPGRNILFLTLTAIYAYQVGAEAIITGVCETDFSGYPDCRDEFVKALNHAVNLGIAREIRFETPLMWLDKAQTWALAEYYGQLDTVRRETLTCYNGIQGDGCGDCAACHLRQNGLEHYLANRDAVMSSMKKLTGLS

SEQ ID NO: 39937 - protein, 232 aa, Morganella sp.
  REGION 1..232: note = tr|A0A3D3HT19|A0A3D3HT19_9GAMM 7-cyano-7-deazaguanine synthase OS=Morganella sp. (in: Bacteria) OX=1912315 GN=queC PE=3 SV=1
MKRAVVVFSGGQDSTTCLIQALRNYDEVHCVTFDYGQRHNQEIEVARRLSLKLGAAAHKVLDVTLLSELAVSSLTRDNIPVPGFSESEKSDIPNTFVPGRNILFLTLTAIYAYQVSAEAIITGVCETDFSGYPDCRDEFVKALNHAVNLGIAREIRFETPLMWLDKAQTWALAEYYGQLDTVRRETLTCYNGIQGDGCGECAACHLRQNGLAHYLENRDTVMSSMKKLTGLS

SEQ ID NO: 39938 - protein, 242 aa, Moritella marina
  REGION 1..242: note = tr|A0A5J6WNB4|A0A5J6WNB4_MORMI 7-cyano-7-deazaguanine synthase QueC OS=Moritella marina ATCC 15381 OX=1202962 GN=queC PE=4 SV=1
MSQQTANKAVLVFSGGQDSTTCLVDALQRYDSVDCITFDYGQRHSQEIEVAKKTAAYFGVKNHKIINVDLLGELAISSLTRDDIAVSHELMDNGLPNSFVPGRNILFMTLASIYAYQVGANTVITGVCETDFSGYPDCRDEFIKSINQACNLGMAKEFKFETPLMWLNKAETWALADLHDELDFVTHQSLTCYNGVIGKGCGDCPACLLRNNGLNDYLSNKTLHITALKGKLPRLANIKATS

SEQ ID NO: 39939 - protein, 236 aa, Moritella sp.
  REGION 1..236: note = tr|A0A2G2IQF3|A0A2G2IQF3_9GAMM 7-cyano-7-deazaguanine synthase OS=Moritella sp. OX=78556; GN = queC PE=3 SV=1
MSQQTANKAVLVFSGGQDSTTCLVDALQRYDSVDCITFDYGQRHSQEIEVAKKTAAYFGVKNHKIINVDLLGELAISSLTRDDIAVSHELMENGLPNSFVPGRNILFMTLASIYAYQIGANTVITGVCETDFSGYPDCRDEFIKSINQACNLGMAKDFKFETPLMWLNKAETWALADLHDELDFVTHQSLTCYNGIVGKGCGDCPACLLRNNGLNDYLTNKTLHITALKDKLPRLK

SEQ ID NO: 39940 - protein, 242 aa, Moritella sp.
  REGION 1..242: note = tr|A6FAU7|A6FAU7_9GAMM 7-cyano-7-deazaguanine synthase OS=Moritella sp. PE36 OX=58051 GN=queC PE=3 SV=1
MSQQTANKAVLVFSGGQDSTTCLVDALQRYDSVDCITFDYGQRHSQEIEVAKKTAAYFGVKNHKIINVDLLGELAISSLTRDDIAVSHELMENGLPNSFVPGRNILFMTLASIYAYQIGANTVITGVCETDFSGYPDCRDEFIKSINQACNLGMAKDFKFETPLMWLNKAETWALADLHDELDFVTHQSLTCYNGIVGKGCGDCPACLLRNNGLNDYLTNKTLHITALKDKLPRLASIQATS

SEQ ID NO: 39941 - protein, 242 aa, Moritella viscosa
  REGION 1..242: note = tr|A0A1L0AMY9|A0A1L0AMY9_9GAMM 7-cyano-7-deazaguanine synthase OS=Moritella viscosa; OX = 80854 GN=queC PE=3 SV=1
MSQQTAKKAVLVFSGGQDSTTCLVDALQRYDSVDCITFDYGQRHSQEIEVAKKTAAHFGIKNHKIINVDLLSELAISSLTRDDIAVSHELMDNGLPNSFVPGRNILFMTLASIYAYQVGANTVITGVCETDFSGYPDCRDEFIKSINQACNLGMAKDFKFETPLMWLNKAETWALADLHDELDFVTHQSLTCYNGVVGKGCGDCPACLLRNNGLNDYLTNKTMHITALKEKLPRLASTQAKS

SEQ ID NO: 39942 - protein, 242 aa, Moritella viscosa
  REGION 1..242: note = tr|A0A090IF23|A0A090IF23_9GAMM 7-cyano-7-deazaguanine synthase OS=Moritella viscosa; OX = 80854 GN=queC PE=3 SV=1
MSQQTANKAVLVFSGGQDSTTCLVDALQRYDSVDCITFDYGQRHSQEIEVAKKTAAHFGIKNHKIINVDLLSELAISSLTRDDIAVSHELMDNGLPNSFVPGRNILFMTLASIYAYQVGANTVITGVCETDFSGYPDCRDEFIKSINQACNLGMAKDFKFETPLMWLNKAETWALADLHDELDFVTHQSLTCYNGVVGKGCGDCPACLLRNNGLNDYLTNKTMHITALKEKLPRLASTQAKS

SEQ ID NO: 39943 - protein, 242 aa, Moritella yayanosii
  REGION 1..242: note = tr|A0A330LQH4|A0A330LQH4_9GAMM 7-cyano-7-deazaguanine synthase OS=Moritella yayanosii; OX = 69539 GN=queC PE=3 SV=1
MSQQTANKAVLVFSGGQDSTTCLVDALQRYDSVDCITFDYGQRHSQEIEVAKKTAAYFGIKNHKIINVDLLSELAISSLTRDDIAVSHELMDNGLPNSFVPGRNILFMTLASIYAYQVGANTVITGVCETDFSGYPDCRDEFIKSINQACNLGMAKDFKFETPLMWLNKAETWALADLHDELDFVIHQSLTCYNGIVGKGCGDCPACLLRNNGLNDYLTNKTQHISALKGKLPRLANIQATL

SEQ ID NO: 39944 - protein, 218 aa, unidentified
  source 1..218: note = Motilimonas sp.
  REGION 1..218: note = tr|A0A418YG87|A0A418YG87_9GAMM 7-cyano-7-deazaguanine synthase OS=Motilimonas sp. PLHSC7-2 OX=2303987 GN=queC PE=3 SV=1
MNKKVVVIYSGGMDSFTVLNQAIQQGYQVFALTFNYGQRHVKEVEVAKAFCQRQNINHKVIDISAINEIIAGSSLTSDIDVPTGDYDNDNMASTVVPNRNMILLSLAIGYAVSIKAEKVFYGAHSGDHLIYPDCRPEFVEQMNQVAAIANFEKVTIETPFLHSSKIEILQAGIEMKLNYGDTWTCYNGREQACGQCGSCIERLAAFAHFGETDPLSYE

SEQ ID NO: 39945 - protein, 227 aa, unidentified
  source 1..227: note = Motiliproteus coralliicola
  REGION 1..227: note = tr|A0A369WXM0|A0A369WXM0_9GAMM 7-cyano-7-deazaguanine synthase OS=Motiliproteus coralliicola OX=2283196 GN=queC PE=3 SV=1
MSEQAKKAVVLLSGGLDSSTVLAIAKQQGYQCYALSFDYGQRSLAELNAASAVAKQLGAVEHKLVRFDMGEIGGSALTDHSISVPEQMEEGVPVTYVPARNTVFLSMALGLAEVVEAEAIFIGVNAVDYSGYPDCRPAFIEAFQAMANLATKAGVEGRQIRIETPLMSLTKAQIIDHGITAGLDYGLTVSCYQADEQGRACRVCDSCRLRAQGFVDAGVEDPTRYQD

SEQ ID NO: 39946 - protein, 231 aa, unidentified
  source 1..231: note = Motiliproteus sp.
  REGION 1..231: note = tr|A0A1R1MG12|A0A1R1MG12_9GAMM 7-cyano-7-deazaguanine synthase OS=Motiliproteus sp. MSK22-1 OX=1897630 GN=queC PE=3 SV=1
MSDKLKKAIVLLSGGLDSSTVLAMANRQGYQCYALSFDYGQRSLAELNAARAVAGQQGVIDHKIVRLSLEDIGGSALTDRSIDVPESIEEGVPVTYVPARNTVFLSLALGWAEVVEAQAIFIGVNAVDYSGYPDCRPAFIEAFQALANVATKIGVDGGCIKIETPLMTLTKAEIIQQGINHGLDYSLTVSCYQADDEGNACGVCDSCRLRSQGFADAGVEDVTRYVSQKQG

SEQ ID NO: 39947 - protein, 197 aa, Mucilaginibacter gracilis
  REGION 1..197: note = tr|A0A495J530|A0A495J530_9SPHI 7-cyano-7-deazaguanine synthase OS=Mucilaginibacter gracilis OX=423350 GN=BDD43_4333 PE=3 SV=1
MDKGILLSGGLDSVSLAYWKRPDIALSLDYGQAAAEKEIEVSAIIAKELGMDHYIVRVDCSSLGSGDLVNGSAINGSPSTEWWPYRNQLLVTLACMKGISLGINELMAGSVLSDGFHKDGTIGFYERINELMSYQEGNIKITAPAIHLSSVELIKISGIPASLLHWAHSCHTGSVACGKCRGCLKYQYTLRTLYGDQ

SEQ ID NO: 39948 - protein, 224 aa, Mucispirillum schaedleri
  REGION 1..224: note = tr|V2QAR6|V2QAR6_9BACT 7-cyano-7-deazaguanine synthase OS=Mucispirillum schaedleri ASF457 OX=1379858; GN = queC PE=3 SV=1
MDKAIVLASGGLDSCVTIACAVNDGYDAALLHINYGQRTQKREDKAFDDIAAYYNIKNKMTVDIDYLKRIGGSSLTDMSMKVEEDTIPASILSSLPSTYVPFRNANMISIAVSWAEVIGAEKIYIGAVEEDSSGYPDCREIFYKKFNDLLSVALAPESNVQIVTPVIHLTKKDIVKKGIELNAPLHLTWSCYQNEYTACGVCESCKLRLKGFELAGIKDPIPYK

SEQ ID NO: 39949 - protein, 219 aa, unidentified
  source 1..219: note = Muribacter muris
  REGION 1..219: note = tr|A0A0J5P594|A0A0J5P594_9PAST 7-cyano-7-deazaguanine synthase OS=Muribacter muris; OX = 67855 GN=queC PE=3 SV=1
MQHSNKAAVIFSGGQDSTTCLLLAIREFGKENVEAITFQYGQRHTIELEKAAWIAQDLGIKQTLIDTSVIKAITHNALMDENATIAQNGSTPNTFVDGRNALFLLYAGIYAKSQGIQTLYTGVCETDFSGYPDCRDVFVKSMNVTMNLAMDYNFNIRTPLMYLTKKETWALADELGAFDYIRQHTHTCYLGIEGGCHDCPSCQLREKGLNEYLAERANV

SEQ ID NO: 39950 - protein, 219 aa, unidentified
  source 1..219: note = Muribacter muris
  REGION 1..219: note = tr|A0A4Y9JXW4|A0A4Y9JXW4_9PAST 7-cyano-7-deazaguanine synthase OS=Muribacter muris; OX = 67855 GN=queC PE=3 SV=1
MQHSNKAAVIFSGGQDSTTCLLLAIHEFGKENVEAITFQYGQRHAIELEKAAWIAQDLGIKQTLIDTSVIKAITHNALMDENATIAQNGSTPNTFVDGRNALFLLYAGIYAKSQGIQTLYTGVCETDFSGYPDCRDVFVKSMNVTMNLAMDYNFNIRTPLMYLTKKETWALADELGAFDYIRQHTHTCYLGIEGGCHDCPSCQLREKGLNDYLAERANV

SEQ ID NO: 39951 - protein, 218 aa, unidentified
  source 1..218: note = Muribaculaceae bacterium
  REGION 1..218: note = tr|A0A4Q0IN35|A0A4Q0IN35_9BACT 7-cyano-7-deazaguanine synthase OS=Muribaculaceae bacterium Isolate-007 (NCI) OX=2489217 GN=queC PE=3 SV=1
MEKECIIVLSGGMDSTTLLYDYKDEIAIALTFDYGSNHNAREIECARIHCERLGIEHIVIPLDFMHQYFHSSLLDGADAIPEGHYADDNMRSTVVPFRNGIMLAVACGMAESRGLKKVLIANHSGDHAVYPDCRAAFIDAMSEAMQAGTYDRISILAPYTGKDKTFIAARGAELGVDFSLTYSCYKGRERHCGRCGTCVERREAFRIAGIPDHTLYEE

SEQ ID NO: 39952 - protein, 212 aa, unidentified
  source 1..212: note = Muribaculaceae bacterium
  REGION 1..212: note = tr|A0A3N2NP33|A0A3N2NP33_9BACT 7-cyano-7-deazaguanine synthase OS=Muribaculaceae bacterium Isolate-114 (HZI) OX=2486475 GN=queC PE=3 SV=1
MEQKDSIIVLSGGMDSVTLLHDRKSRIALAVTFDYGSNHNAREIECARWQCELLGIEHIVIPLSFMGEYFSSSLLSGADAIPEGHYADDNMKSTVVPFRNGIMLSVACGLAESRGLKHVMIANHGGDHAIYPDCRAGFVDAMSLAMKEGTYDGVTIIAPYTDITKGEIAVIGKKLGVDYTHTYSCYKGGEEHCGKCGTCVERAEALAYAGIE

SEQ ID NO: 39953 - protein, 218 aa, unidentified
  source 1..218: note = Muribaculum intestinale
  REGION 1..218: note = tr|A0A1B1SAH1|A0A1B1SAH1_9BACT 7-cyano-7-deazaguanine synthase OS=Muribaculum intestinale; OX = 1796646 GN=queC PE=3 SV=1
MEKECIIVLSGGMDSTTLLYDYKDEIAIALTFDYGSNHNAREIECARIHCERLGIEHIVIPLDFMHKYFHSSLLDGADAIPEGHYADDNMRSTVVPFRNGIMLAVACGMAESRGLKKVLIANHSGDHAVYPDCRAAFIDAMSEAMQAGTYDRISILAPYTGKDKTFIAARGAELGVDFSLTYSCYKGRERHCGRCGTCVERREAFRIAGIPDHTLYEE

SEQ ID NO: 39954 - protein, 218 aa, unidentified; identical to SEQ ID NO: 39951
  source 1..218: note = Muribaculum intestinale
  REGION 1..218: note = tr|A0A4S2FS50|A0A4S2FS50_9BACT 7-cyano-7-deazaguanine synthase OS=Muribaculum intestinale; OX = 1796646 GN=queC PE=3 SV=1

SEQ ID NO: 39955 - protein, 215 aa, unidentified
  source 1..215: note = Muribaculum sp.
  REGION 1..215: note = tr|A0A4P7W3H9|A0A4P7W3H9_9BACT 7-cyano-7-deazaguanine synthase OS=Muribaculum sp. H5; OX = 2530393 GN=queC PE=3 SV=1
MAKDTLLVLSGGMDSVTMLWEYVDSIAAAVTFQYGSNHNMREAACAKWNCGHLNVKWYEIDLSFMGKYFESSLLSGAEAIPEGNYDDDNMRSTVVPFRNGIMLSVAAGLAESLGLKKVMIANHSGDHAIYPDCRPDFIKSMKNAIADGTYEHLELVAPYTDLTKGEIALRGKTLGVDYSHTYSCYKGGEHHCGKCGTCVERREALDFAGIKLEND

SEQ ID NO: 39956 - protein, 221 aa, unidentified
  source 1..221: note = Muribaculum sp.
  REGION 1..221: note = tr|A0A4S2AS57|A0A4S2AS57_9BACT 7-cyano-7-deazaguanine synthase OS=Muribaculum sp. NM65_B17 OX=2516961 GN=queC PE=3 SV=1
MKKDAVMVLSGGMDSVTMLHDYADDIALAVTFGYGSNHNAREAECARLHCELTGIELIEIDLAFMGRYFESSLLSGADAIPEGHYTADNMKSTVVPFRNGIMLAVAAGLAESRGLKAVMIANHAGDHAIYPDCRAGFIDAMGKAIAEGTFDRLELRAPYTLLTKSDIARRGKELGIDYSTTYSCYKGREHHCGKCGTCVERREALADAGIVDTTVYDSDLL

SEQ ID NO: 39957 - protein, 199 aa, Muricauda sp.
  REGION 1..199: note = tr|A0A3D9EZQ9|A0A3D9EZQ9_9FLAO 7-cyano-7-deazaguanine synthase OS=Muricauda sp. ARW7G5W; OX = 2135618 GN=C7971_1109 PE=3 SV=1
MHQNKSGILLSGGMDSIALAYWRKPSYSFTLNYGQRAALAEIQAAAQVSNFLGIEHHIIEVDCSKLGSGDMSGTEPLSVSPISEWWPFRNQLLVTLACMKGVELGINELLVGSVKTDSSHKDGTAEFYSRLSSLMSFQEGNIIVSCPSIEMTTKELIEESGIPESILLWAHSCHTSNSPCMNCNGCSKYLSTLQELGLD

SEQ ID NO: 39958 - protein, 205 aa, unidentified
  source 1..205: note = Muricauda taeanensis
  REGION 1..205: note = tr|A0A3A1NS67|A0A3A1NS67_9FLAO 7-cyano-7-deazaguanine synthase OS=Muricauda taeanensis; OX = 1005926 GN=D2V93_17840 PE=3 SV=1
MREKVILLASGGLDSTTMAFWLLQNKIDFIPVFINYGQHCADTELSTLKNVLPNEYKGKIEIIDVNGVYKYSRSRFIKKANLWEDNITADDLYIPYRNILILTLGASFAQSLNIDRLYSAFINSNHAKEIDCSKDFFLKMEDMLGEYGSVKMEMPFLEMSKFEVAKLGIELNAPIGKTFSCQASPYIPCGACPNCVDRLEALKNL

SEQ ID NO: 39959 - protein, 241 aa, unidentified
  source 1..241: note = Mycoavidus cysteinexigens
  REGION 1..241: note = tr|A0A2Z6EY83|A0A2Z6EY83_9BURK 7-cyano-7-deazaguanine synthase OS=Mycoavidus cysteinexigens OX=1553431 GN=queC PE=3 SV=1
MAAQTNPHSRALVLFSGGQDSATCLAWALQRFHHVETIGFDYGQRHRVELECRSHFRTRLIETEAFAPWRTRLHGDHLVDLSVFGAISDTAMTRDIQIETLANGLPNTFVPGRNLLFLTVAAALAYRRNLQVLVAGMCETDFSGYPDCRDDTVKALQVALNLGMDRRFVIETPLMWLDKAQTWQLAYTLGGPLLVDLVRRETHTCYLGERNTLHDWGYGCGECPSCALRKQGYTAFVTGLS

SEQ ID NO: 39960 - protein, 229 aa, unidentified
  source 1..229: note = Mycobacterium angelicum
  REGION 1..229: note = tr|A0A1W9ZW45|A0A1W9ZW45_9MYCO 7-cyano-7-deazaguanine synthase OS=Mycobacterium angelicum; OX = 470074 GN=queC PE=3 SV=1
MDKPAVILLSGGLDSTTVLAIAKHEGYTPYALSFRYGQRHAVELDAARRVAQAQGVARHVVAEIDLRVFGGSALTADLDVPKHASVEELTADIPSTYVPARNTIFLSFVLAYAETVGAHDVFLGVNALDYSGYPDCRPEYIAAFQDMARLATKAAITGAALTIHTPLIDMTKAEIIRTGLKLAVDYGCTSSCYDPDDAGIPCRHCDSCLLRAKGFADAGAADPLLDRVA

SEQ ID NO: 39961 - protein, 431 aa, Mycobacterium avium
  REGION 1..431: note = tr|A0A2A2ZYB9|A0A2A2ZYB9_MYCAV Uncharacterized protein OS=Mycobacterium avium OX=1764 GN=CKJ75_12020 PE=4; SV = 1
MPDFTLRLSVPEAPKPAELRENFYWTAEGPSSFEAPYGPRLGKLGPVRPENVDFVRLALLVFAADRTTLRSGGGSNWSQREFRLRVPVGKPEPWLAAKAELERLLDFLTGDAWTLEFYRARPPKEPVAKQLPLVAPKRVVLLSGGADSAVGALLSRSQLAGDEGHLLLSHVGAKNLAPIQRDVATTAEKLIPGPAQVHVQIGLRRSSKQIDGSPFANEPSSRSRSLLLLSLGLAAASVDGVPLWIPENGFASLNPPLDPNRRGSLSTRTTHPAFLDGLAQILSGVGAHGEIQNPFTAMTKGEMFTKAAELVGGDKSAVCLSATHSCGLTGQRAFGLPVTKQCGVCFGCVVRRASFKAAGLQDTTDYIDPNTSTRVKDWLIRNSVERSMKGFLRRSVRTRDLATMSLPPNYPISAAAELCRRACIELENYFA

SEQ ID NO: 39962 - protein, 431 aa, Mycobacterium avium; identical to SEQ ID NO: 39961
  REGION 1..431: note = tr|A0A5A4W980|A0A5A4W980_MYCAV Uncharacterized protein OS=Mycobacterium avium subsp. hominissuis; OX = 439334 GN=JPH1_22340 PE=4 SV=1

SEQ ID NO: 39963 - protein, 230 aa, Mycobacterium bohemicum
  REGION 1..230: note = tr|A0A1X1QWU2|A0A1X1QWU2_9MYCO 7-cyano-7-deazaguanine synthase OS=Mycobacterium bohemicum; OX = 56425 GN=queC PE=3 SV=1
METPAVILLSGGLDSTTVLAIAKHRGYVPYALSFRYGQRHAVELASARRVAAAHGVARHVVADIDLRVFGGSSLTTDIDVPKHASVAELSDDDIPSTYVPARNTIFLSFALAYAETVGAQDIFIGVNALDYSGYPDCRPEYIAAFQAMANLATKAGVEGSAMTIHTPLITKTKADIVRLGLDLGVDYSLTSSCYDPDDAGRPCGRCDSCLLRLKGFAEAGHPDPLVYQAA

SEQ ID NO: 39964 - protein, 230 aa, Mycobacterium bohemicum; identical to SEQ ID NO: 39963
  REGION 1..230: note = tr|A0A0U0W708|A0A0U0W708_9MYCO 7-cyano-7-deazaguanine synthase OS=Mycobacterium bohemicum DSM 44277 OX=1236609 GN=queC PE=3 SV=1

SEQ ID NO: 39965 - protein, 431 aa, Mycobacterium europaeum
  REGION 1..431: note = tr|A0A0U1DP57|A0A0U1DP57_9MYCO 7-cyano-7-deazaguanine synthase OS=Mycobacterium europaeum; OX = 761804 GN=queC PE=4 SV=1
MSEPFMLSVEPVPAEPTAGADRTFFWNGTGSHPWFVSTVGPNLGAFGEVNDRNIDFVRIASAVLSADRSVSRSGRLASWNKRDIAVVVDVLSVDPWDSVRGELQELLGFLTGDTWHLGFREQRGTPEQIAIHAAGASRVVLFSGGGDSGVGALLSAHELHGTAKHTLVSHFSDKYLPPLQRCLAERTDTLYPGTLADHIQVHHSRGRKTVNGNYYRKENSTRSRSLLFLAFGLAVASVDQLPLWIPENGYASINPPLSPNRRGSLSTKTTHPTFLLGVRNILTKVGAHGDLSNPFADRTKGEMFSEVRDLIGEQAASEYLSATTSCSHTGAKTYGISRRAQCGVCFGCLLRKASFISSGIPDRSEYICPKDDARVADWLASKSVESAMRDFLRTDLQESDLATMRLPNTVRLADAAALCNRAMDELRGLAL

SEQ ID NO: 39966 - protein, 402 aa, unidentified
  source 1..402: note = Mycobacterium indicus
  REGION 1..402: note = tr|J9WC85|J9WC85_MYCIP Queuosine biosynthesis protein queC OS=Mycobacterium indicus pranii (strain DSM 45239 / MTCC 9506) OX=1232724 GN=MIP_00107 PE=4 SV=1
MEWPSRPKGATSTVISDLAWNLVPLPATTARVADLVHVTAGAYMADRNTARGVRFSRDLALRVAVLDPDAWSDDVLDVVADLLGWLTGDVWDVTITPAPRIVLPDRWPSESNDRPVSLLSGGLDSFMGAVQLMQSGPTPSLTGHKDSATAVRAAQRRTWLWLARSFSPPPSYTRVALTQAGQRIEASSRSRALMFMSLGVAVATGLGARTVVIPENGYTSINLPLRPNRGGALSTRSTHPETLHRFAGILRTLNIDVAVENPYEWMTKGEMMAALAGSAPPDGWQTAAAHTLSCSKLDGRWFGAPPSFNCGLCVPCMVRRATFLKADVPDGTTYVFDNIAQDQRHKLIEARRGDIEAVKYAIASGVDPDAIDAGTWPPGYDLDRAEHLVQRGLDELAMLALP

SEQ ID NO: 39967 - protein, 431 aa, Mycobacterium palustre
  REGION 1..431: note = tr|A0A1X1YY82|A0A1X1YY82_9MYCO Uncharacterized protein OS=Mycobacterium palustre OX=153971 GN=AWC19_23085; PE = 4 SV=1
MPDFTLRLSVPAEPKPAELRENFYWTADGPSSFEGPYGPRLGKLGPVRTENTDFVRLALLVFAADRTTPRSGGGSNWSQRGFRLRVPVGNPEQWLAARAELEHLLNFLTGDAWTLDFYRARPPKEPVAKQLPLVAPKRVVLLSGGADSAVGALLSRSQLAADEGHLLLSHVGAKNLAPIQREVATIAEKLIPGLSQAHLQIGLRRSSKQIDGSSFTNEPSSRSRSLLFLSLGLAAASIDRVPLWIPENGFASLNPPLDPNRRGSLSTRTTHPAFLEGLAHVLAGVGAHGEIHNPFTEMTKGEMFAKAAELVGSDEAAAYLSATHSCGLTGQRAFGVPVTKQCGVCFGCVVRRASFKAAGLQDATAYIDLDTSTRVKGWLTKNSVERSMQGFLRRGVRTRDLATMSLPPSYPTSAAAELCRRACAELENYFT

SEQ ID NO: 39968 - protein, 229 aa, Mycobacterium scrofulaceum
  REGION 1..229: note = tr|A0A1A2UDN2|A0A1A2UDN2_MYCSC 7-cyano-7-deazaguanine synthase OS=Mycobacterium scrofulaceum OX=1783 GN=queC PE=3 SV=1
MNTPAVVLLSGGLDSTTVLALAKDRGYVPYALSFRYGQRHAIELAAARRVAQAQGVARHVVADIDLRVFGGSALTSDVAVPKHDTVDALTDEIPSTYVPARNTIFLSFALAYAETVGARDIFIGVNALDYSGYPDCRPEYIAAFQTMANLATKAGVGGSSVTIHTPLIEMTKAEIVRTGLGLGVDYSLTSSCYDPDVEGKPCGHCDSCLLRRKGFAEAGEVDPLTYQAA

SEQ ID NO: 39969 - protein, 134 aa, Mycobacterium sp.
  REGION 1..134: note = tr|A0A554TVS2|A0A554TVS2_9MYCO Uncharacterized protein OS=Mycobacterium sp. KBS0706 OX=2578109; GN = FFK22_041730 PE=4 SV=1
MQRAGLHLVHRGRCRQTLRGRRLLRFERRRLFLLRRRFDLKNDKGALVVFSDVQDSTTCHAWALNRFEHLEAVSFDCGQRHRVELECRGRACHVVERGRDEAGILRAQAATPAASRHAANASARKRRCVRAVVR

SEQ ID NO: 39970 - protein, 241 aa, Mycobacterium sp.
  REGION 1..241: note = tr|A0A554U8X3|A0A554U8X3_9MYCO 7-cyano-7-deazaguanine synthase OS=Mycobacterium sp. KBS0706 OX=2578109 GN=queC PE=3 SV=1
MAGDQGERGAAEGALVLFSGGQDSATCLAWALERFGRVETVGFDYGQRHRVELDVRPGILDAMRRRFPEWAGRLGDDHVLDLSVLGQVSDTALTRDVEIAMQDNGLPNTFVPGRNLVFVTFAAALAYRRGLRHLVAGVCETDYSGYPDCRDDTMKAMQLALNLGMETRFVLHTPLMWIDKAETWRLAESLGGEALVDLVRDQTHSCYRGDRSRRHDWGHGCGECPACALRAEGWRRFRAAP

SEQ ID NO: 39971 - protein, 229 aa, Mycobacterium szulgai
  REGION 1..229: note = tr|A0A1X2F3M4|A0A1X2F3M4_MYCSZ 7-cyano-7-deazaguanine synthase OS=Mycobacterium szulgai; OX = 1787 GN=queC PE=3 SV=1
MEKPAVILLSGGLDSTTLLAIAKHEGYTPYALSFRYGQRHAVELDAARRVAQAQGVARHVVADIDLRVFGGSALTADLDVPKHASVEELTADIPSTYVPARNTIFLSFALAYAETVGAQDVFIGVNALDYSGYPDCRPEYIAAFQELARLATKAAITDAALTIHTPLIHMTKAQIISTGLKLAVDYGCTSSCYDPDDAGKPCRHCDSCLLRAKGFADAGAVDPLLDRVA

SEQ ID NO: 39972 - protein, 431 aa, unidentified
  source 1..431: note = Mycobacteroides abscessus
  REGION 1..431: note = tr|A0A1N0MPI0|A0A1N0MPI0_9MYCO Queuosine biosynthesis protein queC OS=Mycobacteroides abscessus subsp. bolletii OX=319705 GN=SAMEA2259698_03369 PE=4 SV=1
MPDFTLRLSAPMEPKPAELRENFYWTADGPTSFEGPYGPRLGKLGPVRPENVDFVRLALLVFAADRTTPRSGGGSNWSQREFRLRVPVRTPEPWLAAKAELERLLDFLTGDAWTLDFYRARPPKEPVAKRLPLVAPKRAVLLSGGADSAVGAVLSRSQLAADQGHLLLSHVGAKNLAPIQRDVSATAEKLIPGPSQVHLQIGLRRNTKQIDGSPFTDEPSSRSRSLLFLSLGLAAASVDEVPLWIPENGFASLNPPLDPNRRGSLSTRTTHPAFLAGLAQVLTGAGAHGEIHNPFTEMTKGEMFAKAAELVGRDEAAAYLSATHSCGLTGQRTFGLPVTEQCGVCFGCVVRRASFQAAGLQDSTRYIDPDVSTRVKGWLTKNSVERSMQGFLRRGVRSLDLATMSLPPSYPTSVAADLCRRACTELGNYFA

SEQ ID NO: 39973 - protein, 431 aa, unidentified; identical to SEQ ID NO: 39972
  source 1..431: note = Mycobacteroides abscessus
  REGION 1..431: note = tr|A0A1T8V157|A0A1T8V157_9MYCO Queuosine biosynthesis protein queC OS=Mycobacteroides abscessus subsp. massiliense OX=1962118 GN=EXM25_12550 PE=4 SV=1

SEQ ID NO: 39974 - protein, 362 aa, unidentified
  source 1..362: note = Mycolicibacter arupensis
  REGION 1..362: note = tr|A0A5B1M5H3|A0A5B1M5H3_9MYCO Queuosine biosynthesis protein queC (Fragment) OS=Mycolicibacter arupensis OX=342002 GN=F0402_20390 PE=4 SV=1
MEWPTRPKGATSTVTSDLAWNLAPLAATTPRVADLLHIAAGAYMADRKTARGVRFSRDLTLRVAVLDSEAWTDEVLDAVAELLGWLTGDVWDVTTTPAPAVDLPDHWPSEDHCGPVSLLSGGLDSFMGAVQLLQSGPTPSLTAHKDSAMAIRNAQRRTWVWLARNFTPPPSYTRAALTQAGPRIEASSRSRALMFMSLGVAVAIARRARTLVIPENGYTSINLPLRPNRGGALSTRSTHPETLHRFASILEELGIDVSVENPYEWMTKGEVMSSLVGGEPPEGWRAAAAHTLSCSKLDGRWFGAKPTFNCGLCVPCMVRRATFLSAGVPDDTTYVFNNVAEDQRRKLIEARRGDIEAVKYAV

SEQ ID NO: 39975 - protein, 41 aa, unidentified
  source 1..41: note = Mycolicibacter arupensis
  REGION 1..41: note = tr|A0A5B1M375|A0A5B1M375_9MYCO Queuosine biosynthesis protein queC (Fragment) OS=Mycolicibacter arupensis OX=342002 GN=F0402_20585 PE=4 SV=1
VAGGVDANAIDAGTWPPGYDLDRAENLVQRGLDELAMLTLP

SEQ ID NO: 39976 - protein, 421 aa, unidentified
  source 1..421: note = Mycolicibacterium hodleri
  REGION 1..421: note = tr|A0A544W6Y3|A0A544W6Y3_9MYCO Uncharacterized protein OS=Mycolicibacterium hodleri OX=49897; GN = D8S82_02715 PE=4 SV=1
MNLEIRPSGSSPVHGDFAQVRWGNPGTPDSDVNSTVDAWLSELGDVSDRVVDLVRLASSAYIADRLRARGAGFSRTMRVHVHLTDSVAWTPLLGDVERILGWVSGDKWELSVSCETGTRTSNGQQRFVLDDDPPDAVSLLSGGLDSLSGAVLRRRPSLFLSHTDNPTVTGAQRRTWKWLTNNGVDGTCVRISISEASRKRESTTRTRALLFYALAVALADACHIGRVEVPENGFTGLNLSFGNDRGGVLSTRSTHPWTMHLVQNLLDDAGIEVKLLNPYEWLTKGELVRAALEVSAEFDLGLVTSLSCAKLDGRTYKGGNQNWNCGLCVACLTRRAAIRMAGIQDKTPYLATSLTGPALIQLQARRGLDVRAVTSRIDVELDEFTLLEGGPYPGEFDLGAAVELCRRGFVELAALMPELNL

SEQ ID NO: 39977 - protein, 436 aa, unidentified
  source 1..436: note = Mycolicibacterium rhodesiae
  REGION 1..436: note = tr|G4I7W5|G4I7W5_MYCRH Uncharacterized protein; OS = Mycolicibacterium rhodesiae JS60 OX=931627; GN = MycrhDRAFT_6178 PE=4 SV=1
MRKFAVVVNDCAAPPITGILPIRSRNTGEQGERERNFNLNFDELVAGLPDRLSDLHMDWMEILGFLFATDLVCERGEGDVEWAREIELWLPVRDPEFWELRRPLIERIWTDLTNDGLRMHFEQENEPDPPPRQGREPHPTHDCVALVSGGQDSYVGALDLIKDGREPLLVSHSASGAVNSAQNAVEANLQEVEPSIMRLKLSAGKARGAVAAGEEPSQRSRTLLFVGAAALVASLGGSREVFLNENGIMAIHVPLTAARMGSLSTHTASPPILDRMATLANDVFDIPISVENRLVHLTKPEVVGRAVDLGFGHHMINTVSCWQIGRTSRHCGICSPCIMRRISNEYNNVADISYDADIFDDSAAVDEPKARDNLTHFISLVDDLRELPDVELEFEYPELLRAAPAMTLTEAIALHRRWADQAASVLFAHPVPAGLR

SEQ ID NO: 39978 - protein, 200 aa, unidentified
  source 1..200: note = Mycolicibacterium sp.
  REGION 1..200: note = tr|A0A1E7YG48|A0A1E7YG48_9MYCO 7-cyano-7-deazaguanine synthase OS=Mycolicibacterium sp. (ex Dasyatis americana) OX=1866905 GN=BA059_05100 PE=3 SV=1
MKRVVLLSGGIDSAALTAWIRPEQCLHVNYGQRPAVAEARAARQIALELGLPFEQVVVPAAAIGAGLMAEGADETSLPEVSPEWWPYRNQLLITIAAAWGVRRGFDAVLIGTVASDSARHADGGAEFRTHMDALLALQEGGMRLHAPAAHLSAPELIAESGISDAVLGWTHSCHRANLPCAHCPGCLKHIEALHAAGRLQ

SEQ ID NO: 39979 - protein, 425 aa, unidentified
  source 1..425: note = Mycolicibacterium sp.
  REGION 1..425: note = tr|A0A5A7ZFX8|A0A5A7ZFX8_9MYCO 7-cyano-7-deazaguanine synthase OS=Mycolicibacterium sp. P9-22 OX=2024613 GN=CIW51_18900 PE=3 SV=1
MRYSSGPSSALRKLDESTVPIVLFEHAISDQTPTAGWSAAETVRRRSLQPDPAAWDLLSIALSVVVADGETRRSASPDGWTREFQLNVALHDATRWEALADPFSLALAFLTTDRWSMTFTDGGSVPTAPSKPRYPQTNAVALLSGGLDSLVGAIDLTSQGRNLFAVSQTVRGDAEKQTRFAELIGSGLDHLQINHNASTRRGQKETSQRSRSLIFLAFGVLAATATQRYIDGETVPLYVCENGFIAINPPLTGARIGSLSTRTAHPEFLGRMQNLLDQAGLRIRIENPYAEKTKGEMMRECLNQTLLTHEASVSTSCGRFQKFNYNHCGRCVPCQIRRAAFIASGYDDNTDYIYEDLGKSDEYHAAFDDVRSVAVARLTVKDDGLDRWLGPALSSSLITNRPALREMLRRGLDELGLLHAKYGLA

SEQ ID NO: 39980 - protein, 199 aa, unidentified
  source 1..199: note = Myroides indicus
  REGION 1..199: note = tr|A0A4R7EQ76|A0A4R7EQ76_9FLAO 7-cyano-7-deazaguanine synthase OS=Myroides indicus; OX = 1323422 GN=C8P70_1318 PE=3 SV=1
MESLKRAILLSGGIDSISLAYNLKPEIAYTINYGQTVAEREIYVSEYICKVLNIKHKVISVDCSSLGSGTLANKKNLKSSPSEEWWPFRNQLLITLSAMQAINDGVSEIYLASVKSDKFHTDGTKKFYDLINETVVFQEGNIKILCPTLELYSHELVQNFNVPLELISIAHSCHISNLACGKCSGCTKQLRVKYEIGLE

SEQ ID NO: 39981 - protein, 21 aa, unidentified
  source 1..21: note = Myxococcaceae bacterium
  REGION 1..21: note = tr|A0A4Q5ZCL9|A0A4Q5ZCL9_9DELT Uncharacterized protein (Fragment) OS=Myxococcaceae bacterium OX=2484252; GN = EOO71_41055 PE=4 SV=1
MAKRAVVLLSGGLDSTTCLAM

SEQ ID NO: 39982 - protein, 113 aa, unidentified
  source 1..113: note = Myxococcaceae bacterium
  REGION 1..113: note = tr|A0A4V2ASQ3|A0A4V2ASQ3_9DELT 7-cyano-7-deazaguanine synthase (Fragment); OS = Myxococcaceae bacterium OX=2484252 GN=EOO71_24160 PE=3; SV = 1
TDLYIGVNAVDYSGYPDCRPEFIRSFEAMAQLATKAGVEGARFQVHAPLSGLTKAQIIQAGVKLGVDYGMTHSCYDPDAQGRACGRCDSCLLRSKGFQEAGVPDPTTYVDGVR

SEQ ID NO: 39983 - protein, 229 aa, unidentified
  source 1..229: note = Myxococcales bacterium
  REGION 1..229: note = tr|A0A3A4K5E3|A0A3A4K5E3_9DELT 7-cyano-7-deazaguanine synthase OS=Myxococcales bacterium; OX = 2026763 GN=C4523_18840 PE=3 SV=1
MERMVVLMSGGLNGVVAASRMLANVELHFLHVDYGQAAAKSERLAVARISTALAGKLHVADLPRFDRNGMPGPGGAVDAKRPTSNERVLETRPSGVMLAILALAQQLAAQVGAEDIVCGASEACSRSDAEAGFCSPAADGRRAFFHACSIALEMGSPSAKRMSLELPFIDVSREDIIRTGLRLGAPLPMTWSCHAGGEAPCGSCAGCRSRAAAFEMLGLDDPALAAATR

SEQ ID NO: 39984 - protein, 287 aa, unidentified
  source 1..287: note = Myxococcales bacterium
  REGION 1..287: note = tr|A0A2E8S4A9|A0A2E8S4A9_9DELT Uncharacterized protein OS=Myxococcales bacterium OX=2026763; GN = CMH54_14940 PE=4 SV=1
MNRTQTDIIDQEVATRPNLAPGVYPEVKEKEIALMFSGGVDSTATAIMLAEHYDKVHLVTYKNGYGHYYHHRTRKRVDELNKALGDKFIYTLMSTKEYFDQIVVNSVLKDYAKYKSGFIWFMGCKMAMHMRSAIYCMENGLRYMTDGSNEDTNEMVEQMLISLTLIRFFYGNYGIHFGTPVYDIERDESRQLIKKLGLKMGVQVMDRHLCIQPTCIAGELYYMPYLLFNKKVRHDEDTVARFIDEKQKICDTITRSYFDKIHVDLDALVADRQAQIEALDAQKVGTG

SEQ ID NO: 39985 - protein, 229 aa, Myxococcus fulvus
  REGION 1..229: note = tr|F8CEC9|F8CEC9_MYXFH 7-cyano-7-deazaguanine synthase OS=Myxococcus fulvus (strain ATCC BAA-855 / HW-1); OX = 483219 GN=queC PE=3 SV=1
MKRAVVLISGGLDSTTCLAMAKAKGFEPVCLAVAYGQRHAVELEQAKQVAAAMGVTDFRVVSIDLRQVGGSALTADIEVPKDRPADELSHGIPVTYVPARNALFLSLALGLAEVVGSTDLYIGVNAVDYSGYPDCRPEFIRAFESMANLATKAGVEGARFTVHAPLSGLTKADIIREGVKLGVDYGLTHSCYDPDAQGRACGRCDSCVLRKKGFEEAGVPDPTRYTESA

SEQ ID NO: 39986 - protein, 232 aa, Myxococcus fulvus
  REGION 1..232: note = tr|A0A511SZB6|A0A511SZB6_MYXFU 7-cyano-7-deazaguanine synthase OS=Myxococcus fulvus OX=33; GN = queC PE=3 SV=1
MTKRAVVLTSGGLDSTTCVAMAKAKGFEPVCLAVAYGQRHAVELERAREVATALGVKDFRVVGIDLRQVGGSALTADIDVPKDRPADEMSHGVPVTYVPARNALFLSLALGLAEVVGATDIYIGVNAVDYSGYPDCRPEFIRSFEAMANLATKAGVEGARFTVHAPLSGLTKADIIREGVRLGVDYGITHSCYDPDTQGRACGRCDSCLLRKKGFEEAGVPDPTRYTVEAGA

SEQ ID NO: 39987 - protein, 231 aa, unidentified
  source 1..231: note = Myxococcus hansupus
  REGION 1..231: note = tr|A0A0H4X6T0|A0A0H4X6T0_9DELT 7-cyano-7-deazaguanine synthase OS=Myxococcus hansupus; OX = 1297742 GN=queC PE=3 SV=1
MMVKRAVVLISGGLDSTTCLAMAKAKGFEPVCLAVAYGQRHAVELEQAKKVCAAMGVSDFRVVSIDLRQVGGSALTADIEVPKDRPADEMSHGIPVTYVPARNALFLSLALGLAEVVGSTDIYIGVNAVDYSGYPDCRPEFIRAFESMANLATKAGAEGARFTVHAPLSGLTKADIIREGVKLGVDYGLTHSCYDPDAQGRACGRCDSCVLRKKGFEDAGVPDPTRYTESA

SEQ ID NO: 39988 - protein, 230 aa, unidentified
  source 1..230: note = Myxococcus macrosporus
  REGION 1..230: note = tr|A0A250K2Z2|A0A250K2Z2_9DELT 7-cyano-7-deazaguanine synthase OS=Myxococcus macrosporus DSM 14697 OX=1189310 GN=queC PE=3 SV=1
MVKRAVVLISGGLDSTTCLAMAKAKGFEPVCLAVAYGQRHAVELEQAKQVAAAMGVTDFRVVSIDLRQVGGSALTADIEVPKDRPADELSHGIPVTYVPARNALFLSLALGLAEVVGSTDLYIGVNAVDYSGYPDCRPEFIRAFESMANLATKAGVEGARFTVHAPLSGLTKADIIREGVKLGVDYGLTHSCYDPDAQGRACGRCDSCVLRKKGFEEAGVPDPTRYTESA

SEQ ID NO: 39989 - protein, 230 aa, Myxococcus sp.
  REGION 1..230: note = tr|A0A540X293|A0A540X293_9DELT 7-cyano-7-deazaguanine synthase OS=Myxococcus sp. AM401; OX = 2590453 GN=queC PE=3 SV=1
MAKRAVVLISGGLDSTTCVAMAKAKGFEPVCLAVAYGQRHVVELERARDVASAMGVKDFRVVSIDLRQIGGSALTADIDVPKDRPADEMSHGIPVTYVPARNALFLSLALGLAEVVGSTDIYIGVNAVDYSGYPDCRPEFIRSFEAMANLATKAGVEGASFTVHAPLSGLTKADIIREGTRLGVDYGMTHSCYDPDAQGLACGRCDSCLLRKKGFEEAGVPDPTRYTVGA

SEQ ID NO: 39990 - protein, 232 aa, Myxococcus stipitatus
  REGION 1..232: note = tr|L7UH29|L7UH29_MYXSD 7-cyano-7-deazaguanine synthase OS=Myxococcus stipitatus (strain DSM 14675 / JCM 12634 / Mx s8) OX=1278073 GN=queC PE=3 SV=1
MTKRAVVLFSGGLDSTTCVAMAKAQGFEPVCLAVSYGQRHSVELEKAREVARALGVKDFRVVGIDLRQIGGSALTADIDVPKDRPADEMSHGVPVTYVPARNALFLSLALGLAEVVEATDLYIGVNAVDYSGYPDCRPEFIRSFEAMANLATKAGAEGARFTVHAPLSGMSKADIIREGTRLGVDYGMTHSCYDPDEQGGACGRCDSCMLRKKGFEEAGVPDPTHYAAGARG

SEQ ID NO: 39991 - protein, 230 aa, Myxococcus virescens
  REGION 1..230: note = tr|A0A511H9S7|A0A511H9S7_9DELT 7-cyano-7-deazaguanine synthase OS=Myxococcus virescens; OX = 83456 GN=queC PE=3 SV=1
MVKRAVVLISGGLDSTTCLAMAKAKGFEPVCLAVAYGQRHAVELEQARKVAAAMGVTDFRVVSIDLRQVGGSALTADIEVPKDRPSDEMSHGIPVTYVPARNALFLSLALGLAEVVGSTDIYIGVNAVDYSGYPDCRPEFIRSFESMANLATKAGVEGARFTVHAPLSGLTKADIIREGVKLGVDYGLTHSCYDPDAQGRACGRCDSCVLRKKGFEEAGVPDPTRYAESA

SEQ ID NO: 39992 - protein, 230 aa, Myxococcus xanthus
  REGION 1..230: note = sp|Q1CYI2|QUEC_MYXXD 7-cyano-7-deazaguanine synthase; OS = Myxococcus xanthus (strain DK 1622) OX=246197 GN=queC; PE = 3 SV=1
MVKRAVVLISGGLDSTTCLAMAKAKGFEPVCLAVAYGQRHAVELEQARKVAAAMGVTDFRVVSIDLRQVGGSALTADIEVPKDRPSDEMSHGIPVTYVPARNALFLSLALGLAEVVGSTDIYIGVNAVDYSGYPDCRPEFIRSFESMANLATKAGVEGAHFTVHAPLSGLTKADIIREGVKLGVDYGLTHSCYDPDAQGRACGRCDSCVLRKKGFEEAGVPDPTRYTESA

SEQ ID NO: 39993 - protein, 230 aa, Myxococcus xanthus
  REGION 1..230: note = tr|A0A4Y6DQX4|A0A4Y6DQX4_MYXXA 7-cyano-7-deazaguanine synthase OS=Myxococcus xanthus; OX = 34 GN=queC PE=3 SV=1
MVKRAVVLISGGLDSTTCLAMAKAKGFEPVCLAVAYGQRHAVELEQAKKVAAAMGVTDFRVVSIDLRQVGGSALTADIEVPKDRPSDEMSHGIPVTYVPARNALFLSLALGLAEVVGSTDIYIGVNAVDYSGYPDCRPEFIRSFESMANLATKAGVEGARFTVHAPLSGLTKADIIREGVKLGVDYGLTHSCYDPDTQGRACGRCDSCVLRKKGFEEAGVPDPTRYTESA

SEQ ID NO: 39994 - protein, 433 aa, unidentified
  source 1..433: note = Nakamurella silvestris
  REGION 1..433: note = tr|A0A399UR45|A0A399UR45_9ACTN Uncharacterized protein OS=Nakamurella silvestris OX=1645681; GN = D1871_18465 PE=4 SV=1
MTRCFLAISEQDADAAITGGTFDEVFLWSRSAKSSFTGSLSPYLESLGPVNPRNVDLVRIALGVLASDRSVLREGGGASWNTRDLDLTVQVDDPAAWLGVAGELATLVGFLSGDRWTFTFTQAPTDSIEALPLEEAVYQRAVLLSGGADSAAGALISARQLGDGGSQALASQYSSTALSPLQQDLVKAIGGHAPRVTQVHHQFHLNRGSRRLDGTAFRDEPSTRSRSLLFLALGLAVAERANAPLWIAENGFASLNPPLGADRRGALSTHTTHPRFLHDLQTLVQRVGGHGQIQNPFESLTKGEMFALVAKEIGTDAASEYLSFTNSCSHTDARYSGAQPGSSCGVCFGCLVRRAAFVAAGIPDRTDYLCDDTTGRFTSFVQQKSIVEPMRDFAMRGIRARDIMAMSLPTRYSAADALDLCWRGTDELRGLLS

SEQ ID NO: 39995 - protein, 247 aa, Nannocystis exedens
  REGION 1..247: note = tr|A0A1I2GHH2|A0A1I2GHH2_9DELT 7-cyano-7-deazaguanine synthase OS=Nannocystis exedens; OX = 54 GN=queC PE=3 SV=1
MTARVRHSSEVAMTEPMRAVVLLSGGLDSTTVLALAAAEGRETYALSFRYGQRHEVELASAARQAARFGARAHEVVDLAHLGRLVAAGTSLLRASSEAVPKDSEPAAGAIPSTYVPARNTLFLAYALGWAEVLGAAEIWVGVNAVDYSGYPDCRPQFLAAFERLAAEATRAGVEGKPLRVRAPLISWSKSQIVQAGLAAGVDYADTVSCYDPAVEGDRPRACGRCDSCRLRRDGFAAAGVPDPTRYA

SEQ ID NO: 39996 - protein, 218 aa, Natranaerobius trueperi
  REGION 1..218: note = tr|A0A226BVL1|A0A226BVL1_9FIRM 7-cyano-7-deazaguanine synthase OS=Natranaerobius trueperi; OX = 759412 GN=queC PE=3 SV=1
MKKALVVLSGGQDSTTCLFWALENFDEIKAVSFDYGQRNEIELEFAKQICEQHNISHQIVNMDLLSELTNNSLTKHYIEIEEKEGGVPNTFVDGRNMLFLTFAAIVAKNNDIRHVVTGVSQEDFSGYPDCRNVFIKSLNTTLNLAMDYEFELETPLIFLNKEETWKLAYDLGVFDIIKENTVTCYEGKPGAGCGECPACKLRSEGLKKFLERKEKNHE

SEQ ID NO: 39997 - protein, 217 aa, Natranaerovirga hydrolytica
  REGION 1..217: note = tr|A0A4R1MLS9|A0A4R1MLS9_9FIRM 7-cyano-7-deazaguanine synthase OS=Natranaerovirga hydrolytica OX=680378 GN=queC PE=3 SV=1
MNKKKAVVVFSGGQDSTTCLFWAKEKFDEVIAVTFDYNQKHSLEIECAKEICEKYGIEQHILDLSLLNQLAPNALTRDEIKVDENAPTEGTPNTFVDGRNMIFLTYAAVIAKQKGINNIVTGVSQSDFSGYPDCRDVFIKSLNVTLNLAMGYEFDIHTPLMWIDKAQTWHLAYDLGVLDIIEAETLTCYNGIKGEGCKACPACELRNKGYETFKKSL

SEQ ID NO: 39998 - protein, 221 aa, Natranaerovirga pectinivora
  REGION 1..221: note = tr|A0A4V2V0D1|A0A4V2V0D1_9FIRM 7-cyano-7-deazaguanine synthase OS=Natranaerovirga pectinivora OX=682400 GN=queC PE=3 SV=1
MTTERAVVVFSGGQDSTTCLFWAKERFKEVVAVTFDYNQKHSLEIDCAKDICKKYNVEHHILDLSLLNQLAPNALTRDDIQVDKDAPIEGTPNTFVDGRNMIFLTYAAVIAKQKGINNIVTGVSQSDFSGYPDCRDVFIKSLNVTLNLAMGYEFNIHTPLMWIDKAETWKLADDLGVLEVIENETLTCYNGIKGTGCKECPACELRNKGFLNFMALKRNLY

SEQ ID NO: 39999 - protein, 220 aa, Natribacillus halophilus
  REGION 1..220: note = tr|A0A1G8PCT5|A0A1G8PCT5_9BACI 7-cyano-7-deazaguanine synthase OS=Natribacillus halophilus OX=549003 GN=queC PE=3 SV=1
MKQGSAVVVFSGGQDSTTCLFWALERFEKVYAVTFAYGQRHDKEIEVAREIAHDVGVEHTVLDMSLLNQLAPNALTRDDIEVSEGEDGELPSTFVPGRNLLFLSFASIFGEQRGAYHIVTGVCETDYSGYPDCRDGFVKSLNVTLNLSMDDTFVLHTPLMWLDKAETWRLADDLGQLKYVRERTLTCYHGVIGAGCGECPACQLRRQGLETYLTSKDRDA

SEQ ID NO: 40000 - protein, 201 aa, Natribacillus halophilus
  REGION 1..201: note = tr|A0A1G8KF92|A0A1G8KF92_9BACI Queuosine biosynthesis protein QueC OS=Natribacillus halophilus; OX = 549003 GN=SAMN04488123_10268 PE=4 SV=1
MDKIKDLINEKNQGAENNILETKYITKEDIPLNGEITKKYNKLAAKSHLGGQYDWLARFSYAEGIYDLELSIHVDDKAQGFIKEDVEKIEKHNDSYFKMKQEPSVQELDIFLYYHFPLLDMSKIDMEKKAKESGFDDIMEQTWFCFFPRKDGTPCGLCNPCKYTREEGMGRRVPDPTIKDKTEFFLRKVNQKVKSVVGGRK

SEQ ID NO: 40001 - protein, 228 aa, Natronoflexus pectinivorans
  REGION 1..228: note = tr|A0A4R2GDT2|A0A4R2GDT2_9BACT 7-cyano-7-deazaguanine synthase OS=Natronoflexus pectinivorans OX=682526 GN=queC PE=3 SV=1
MKRAVILLSGGLDSAVTLWLAKSEGYELHTLSFDYGQRHKRELEAAAKIAEVAGVKEHRLVTINMDQWGGSSLTDKNMEVEDGDVNRTDIPVTYVPARNMVFLSIAASYAEAIDAQNIFIGVSQVDYSGYVDCRESFIKAMENAINQGTVMAAEKNRPITIHAPFIYKTKTEEIQIGAKLGVPFGLTWSCYRGGEKPCGTCDSCLLRAKAFQEAGVVDEGGTEIGNRK

SEQ ID NO: 40002 - protein, 222 aa, unidentified
  source 1..222: note = Natronospirillum operossus
  REGION 1..222: note = tr|A0A4Z0WGZ8|A0A4Z0WGZ8_9BACT 7-cyano-7-deazaguanine synthase OS=Natronospirillum operossus OX=2562806 GN=queC PE=3 SV=1
MSSAIVLLSGGLDSATAVAIAAQRHDKVYGLSFRYGQRHSAELLAAQRVAARQNLAEHRIIDIDLAQLGGSSLTDGSLSVPETPTEGIPNTYVPARNTVFLSYGLAYAEVTGAQAIYLGINAVDYSGYPDCRPEFVAAYQNLVNVATRATVTGSTIQIEAPLIDLSKADIIRWGVELGVDYGITVSCYQADEAGTACGVCDSCRLRHQGFVDAGVEDPTPYR

SEQ ID NO: 40003 - protein, 222 aa, Nautilia profundicola
  REGION 1..222: note = sp|B9L986|QUEC_NAUPA 7-cyano-7-deazaguanine synthase; OS = Nautilia profundicola (strain ATCC BAA-1463 / DSM 18972 / AmH) OX=598659 GN=queC PE=3 SV=1
MKKAVVILSGGMDSTTAAFIAKSEGYEIIPVHFNYSQRTEKRELKAFNDICDYLNLDNRYIIDIPFFKQIGASALVDENIDVPVDGVKPGIPVTYVPFRNGIFLSIAAAVAEKEGAEAIYIGVVEEDSSGYPDCTEDFIQNMQKAVNSGTKPETNIEIKTPLVHLKKEDIVKTAVKYNVPLHLTWSCYKNEDEACGVCDSCRLRLKGFEKAGIEDRIPYKQK

SEQ ID NO: 40004 - protein, 222 aa, Nautilia sp.
  REGION 1..222: note = tr|A0A3T0L1L4|A0A3T0L1L4_9PROT 7-cyano-7-deazaguanine synthase OS=Nautilia sp. PV-1; OX = 2579250 GN=queC PE=3 SV=1
MKKAVVILSGGMDSTTAAFIAKSEGYEIIPVHFNYGQRTEKRELKAFNDICDYLNLDNRYIIDIPFFKQIGASALVDENIDVPVDGVKPGIPVTYVPFRNGIFLSIAAAIAEKEGADAIYIGVVEEDSSGYPDCREDFIQNMQNAINSGTKPETKIEIKTPLVHLKKEDIVKTAIEYGVPLNLTWSCYKYEDEACGVCDSCRLRLKGFEKAGSKDPIPYKTK

SEQ ID NO: 40005 - protein, 217 aa, Neisseria animalis
  REGION 1..217: note = tr|A0A3N3EHJ4|A0A3N3EHJ4_NEIAN 7-cyano-7-deazaguanine synthase OS=Neisseria animalis; OX = 492 GN=queC PE=3 SV=1
MHNQKALVIFSGGQDSTTCLLQAIETYGRGNVQAITFQYGQRHAVELERACWIAQDLGIPQTVLDLSLMQHITRNALMSDGAEIQTAENGIPNTFVDGRNALFLLYAAIFAKGQGIRHIIAGVCETDFSGYPDCRDIFVKSMNVTLNLAMDYDFQIHTPLMYLTKAQTWKLADDLGRLNYVREHTHTCYNGVIGGCGECPSCILRERGLAEYLAEKP

SEQ ID NO: 40006 - protein, 216 aa, Neisseria animaloris
  REGION 1..216: note = tr|A0A3S4YRQ5|A0A3S4YRQ5_9NEIS 7-cyano-7-deazaguanine synthase OS=Neisseria animaloris; OX = 326522 GN=queC PE=3 SV=1
MHNEKALVVFSGGQDSTTCLIQAVQTYGRENVQAITFQYGQRHAIELERARWIAEDLGIAQTVLDLSLMQQITHNALIDGTAEIQTGINGVPNTFVDGRNALFLLYAAIYAKSQNIKHIIVGVCETDFSGYPDCRDVFVKSMNVTLNLAMDYAFQIHTPLMYLTKAQTWALADRLGCLDYIREHTHTCYHGVEGGCGECPSCVLRERGLAEYLASR

SEQ ID NO: 40007 - protein, 218 aa, unidentified
  source 1..218: note = Neisseria arctica
  REGION 1..218: note = tr|A0A0J0YS37|A0A0J0YS37_9NEIS 7-cyano-7-deazaguanine synthase OS=Neisseria arctica; OX = 1470200 GN=queC PE=3 SV=1
MTTEKALVIFSGGQDSTTCLIQAIRQYGRENVEAITFQYGQRHNIELEKARSIAADLGIPQTLLDLTLMQQVTRNALMDETAAIQTGENGLPNTFVDGRNALFLLYAAIYAKSRGIRHIITGVCETDFSGYPDCRDVFIKSMNVTLNLAMDYAFQIHTPLMYLTKAQTWALADEMGVLDYIRTHTHTCYLGTEGGCGECPSCVLRERGLAEYLAGKSR

SEQ ID NO: 40008 - protein, 384 aa, Neisseria bacilliformis
  REGION 1..384: note = tr|F2BCV8|F2BCV8_9NEIS 7-cyano-7-deazaguanine synthase OS=Neisseria bacilliformis ATCC BAA-1200; OX = 888742 GN=exsB PE=3 SV=1
MNSEKALVIFSGGQDSTTCLIQAIQTYGRENVQTISFQYGQRHAVELERARSIAQDWGVKQTILDLSLIKHITQNALTDNTAAIQTAANGLPNTFVDGRNALFLLYAAICAKGQNIRHIITGVCETDFSGYPDCRDVFVKSMNVTLNLAMDYPFQIHTPLMYLTKAQTWELADKLGCLDYIRDHTHTCYNGVIGGCHQCPACQLRERGLAQYLQNKAAAPAFYDCEKNLTEHDLAQAEHTLAATLPDSFKAHYLKYNGGTPARTLFDAGGSGCDNIEISDFIPIRYAQAFADDPDFTLEGRAAAEWARNEIPPALIPFALDWGGNYICLEKDSGKITYYVRDVWSDKLSREANFKSNTRPLADTFPAFLARLRDNPDDVDSDDE

SEQ ID NO: 40009 - protein, 216 aa, Neisseria canis
  REGION 1..216: note = tr|A0A1X3CYG6|A0A1X3CYG6_9NEIS 7-cyano-7-deazaguanine synthase OS=Neisseria canis OX=493; GN = queC PE=3 SV=1
MQNEKALVVFSGGQDSTTCLIQAVQTYGRENVQAITFQYGQRHAIELERARRIAEDLGIAQTVLDLSLMQQITHNALMDDTAEIQTASNGMPNTFVDGRNALFLLYAAIYAKSQNIKHIIVGVCETDFSGYPDCRDVFVKSMNVTLNLAMDYAFQIHTPLMYLTKAQTWALADRLGCLDYIREHTHTCYHGVEGGCGECPSCVLRERGLAEYLASR

SEQ ID NO: 40010 - protein, 219 aa, Neisseria cinerea
  REGION 1..219: note = tr|D0W2U0|D0W2U0_NEICI 7-cyano-7-deazaguanine synthase OS=Neisseria cinerea ATCC 14685 OX=546262 GN=queC; PE = 3 SV=1
MSNQQALVIFSGGQDSTTCLIQAIQTYRRENVQAITFQYGQRHVVELERARWIAQDLGVKQTVLDLSLMRQITHNALMDEAAAIETADNGVPNTFVDGRNALFLLYAAIYAKGQGIRHIIAGVCETDFSGYPDCRDVFVKSMNVTLNLAMDYDFQIHTPLMYLTKAQTWALADEMGVLDYIREQTHTCYNGIVGGCHECPSCVLRERGLAEYLESKKAV

SEQ ID NO: 40011 - protein, 219 aa, Neisseria cinerea
  REGION 1..219: note = tr|A0A2X4BFA5|A0A2X4BFA5_NEICI 7-cyano-7-deazaguanine synthase OS=Neisseria cinerea; OX = 483 GN=queC PE=3 SV=1
MSNQQALVIFSGGQDSTTCLIQAIQTYRRENVQAITFQYGQRHAVELERACWIAQDLGIKQTVLDLSLMRQITHNALMDEAAAIETAKNGVPNTFVDGRNALFLLYAAIYAKGQGIRHIIAGVCETDFSGYPDCRDVFVKSMNVTLNLAMDYDFQIHTPLMYLTKAQTWAFADEMGALDYIREQTHTCYNGIVGGCHECPSCVLRERGLAEYLESKKAV

SEQ ID NO: 40012 - protein, 218 aa, Neisseria dentiae
  REGION 1..218: note = tr|A0A1X3DFR7|A0A1X3DFR7_9NEIS 7-cyano-7-deazaguanine synthase OS=Neisseria dentiae; OX = 194197 GN=queC PE=3 SV=1
MNPQKAVVVFSGGQDSTTCLIQAIRRYGNDNVEAITFRYGQRHAIELERARRIAQDLGVRQTVLDLSLMQQITHNALMDETAEIQAPAGGVPNTFVDGRNALFLLYAAIYAKSRNARHLITGVCETDFSGYPDCRDIFIKSMNVTLNLAMDYDFQIHTPLMYLTKAQTWALADELGCLDYIREHTHTCYHGVAGGCGECPSCVLRERGLTEYLAGKTA

SEQ ID NO: 40013 - protein, 216 aa, unidentified
  source 1..216: note = Neisseria dumasiana
  REGION 1..216: note = tr|A0A1X3DJQ3|A0A1X3DJQ3_9NEIS 7-cyano-7-deazaguanine synthase OS=Neisseria dumasiana; OX = 1931275 GN=queC PE=3 SV=1
MHNEKALVVFSGGQDSTTCLIQAVQTYGRENVQAITFQYGQRHAIELERARWIVEDLGIAQTVLDLSLMQQITHNALMDDTAEIQTASNGVPNTFVDGRNALFLLYAAIYAKSQNIKHIIVGVCETDFSGYPDCRDVFVKSMNVTLNLAMDYAFQIHTPLMYLTKAQTWALADRLGCLDYIRQHTHTCYHGVEGGCGECPSCVLRERGLTEYLASR

SEQ ID NO: 40014 - protein, 438 aa, Neisseria elongata
  REGION 1..438: note = tr|A0A378TZG8|A0A378TZG8_NEIEL 7-cyano-7-deazaguanine synthase OS=Neisseria elongata; OX = 495 GN=NCTC10660_00995 PE=3 SV=1
MTQLFFHHDINQLNNLQNGTIPVHLYGMGNKNLQIAHIGNMVLDRVRRLGIRLNNQVMDFLTIAMAVTAADTFVLRKDTANGWCRSFSITLPLCQPAIWQANKVHLEHILHFLSGDIWQFDFQENGQNPPQPYSQNGRTKLVDLRNKDCVCLFSGGLDSSIGAIDLLEQGHSPVLVSHSYKGDKSRQQAIIQQLNQNGYINQFSQFNAIAQPHLNNGRATEITMRTRSLNFLAFAIISAYALQEFVQEEIDVFVPENGVISINAPLTVRRVGTLSTRTTHPYFIQEIQRLFTAVNIPFTLRNPYQFKTKGQMIAECENLPLLQQIIPDTVSCSHWKRKNQQCGVCVPCLIRRASLHYAGITNDAQYEFNDIRQILTNQDRRDDLFALISAIRQKSHRNINQWVSQSGPLPTQQLNQFANVFRSGLDEVEQLLIVNQIL

SEQ ID NO: 40015 - protein, 219 aa, Neisseria elongata
  REGION 1..219: note = tr|A0A378TW94|A0A378TW94_NEIEL 7-cyano-7-deazaguanine synthase OS=Neisseria elongata; OX = 495 GN=queC PE=3 SV=1
MQNPQALVIFSGGQDSTTCLIQAIQTYGRENVQAITFQYGQRHAVELERARWIAQDLGVKQTVLDLSLMQQITHNALMDDTAAIETASDGLPNTFVDGRNALFLLYAAIYAKGQGIKHIIAGVCETDFSGYPDCRDVFVKSMNVTLNLAMDYAFQIHTPLMYLTKAQTWALADEMGALDYIREQTHTCYNGIVGGCHECPSCVLRERGLAEYLESQKAV

SEQ ID NO: 40016 - protein, 219 aa, Neisseria flavescens
  REGION 1..219: note = tr|A0A154TYR9|A0A154TYR9_NEIFL 7-cyano-7-deazaguanine synthase OS=Neisseria flavescens; OX = 484 GN=queC PE=3 SV=1
MEKQQSLVIFSGGQDSTTCLIQAIQTYGRENVQAITFQYGQRHAIELERARWIAQDLGVKQTVLDLSLMQQITHNALMDDTASIETASDGLPNTFVDGRNALFLLYAAIYAKGQGIRHIIAGVCETDFSGYPDCRDVFVKSMNVTLNLAMDYAFQIHTPLMYLTKAQTWALADEMGALDYIRKHTHTCYNGVVGGCHECPSCILRERGLSEYLESKKAV

SEQ ID NO: 40017 - protein, 219 aa, Neisseria flavescens
  REGION 1..219: note = tr|C0ENR7|C0ENR7_NEIFL 7-cyano-7-deazaguanine synthase OS=Neisseria flavescens NRL30031/H210 OX=546264; GN = queC PE=3 SV=1
MEKQQALVIFSGGQDSTTCLIQAIQTYGRENVQAITFQYGQRHAIELERARWIAQDLGVKQRVLDLSLMQQITHNALMDDTASIETASDGLPNTFVDGRNALFLLYAAIYAKGQGIRHIIAGVCETDFSGYPDCRDVFVKSMNVTLNLAMDYAFQIHTPLMYLTKAQTWALADEMGALDYICEHTHTCYNGVVGGCHECPSCILRERGLSEYLESKKAV

SEQ ID NO: 40018 - protein, 219 aa, Neisseria gonorrhoeae
  REGION 1..219: note = tr|A0A0M3GWJ2|A0A0M3GWJ2_NEIGO 7-cyano-7-deazaguanine synthase OS=Neisseria gonorrhoeae MIA_2011_03-10 OX=1351790 GN=queC PE=3 SV=1
MSNQKALVIFSGGQDSTTCLIQAIQTYGRENVQAITFRYGQRHAVELERAEWIAQDLGVKQTVLDLSLMRQITHNALMDETAAIETADNGVPNTFVDGRNALFLLYAAIFAKGQGIRHIIAGVCETDFSGYPDCRGVFVKSMNVTLNLAMDYDFQIQTPLMYLTKAQTWALADEMGVLDYIREQTHTCYKGIVGGCRECPSCILRERGLAECLESKKAV

SEQ ID NO: 40019 - protein, 224 aa, Neisseria gonorrhoeae
  REGION 1..224: note = sp|Q5FA99|QUEC_NEIG1 7-cyano-7-deazaguanine synthase; OS = Neisseria gonorrhoeae (strain ATCC 700825 / FA 1090); OX = 242231 GN=queC PE=3 SV=1
MSNQKALVIFSGGQDSTTCLIQAIQTYGRENVQAITFRYGQRHAVELERAEWIAQDLGVSQTVLDLSLMRQITHNALMDETAAIETAAIETADNGVPNTFVDGRNALFLLYAAIFAKGQGIRHIIAGVCETDFSGYPDCRGVFVKSMNVTLNLAMDYDFQIHTPLMYLTKAQTWALADEMGVLDYIREQTHTCYKGIVGGCRECPSCILRERGLAECLESKKAV

SEQ ID NO: 40020 - protein, 219 aa, Neisseria iguanae
  REGION 1..219: note = tr|A0A2P7TYT0|A0A2P7TYT0_9NEIS 7-cyano-7-deazaguanine synthase OS=Neisseria iguanae; OX = 90242 GN=queC PE=3 SV=1
MHNQKALVIFSGGQDSTTCLLQAIQTYGRDNVQAMTFHYGQRHSIELECAHWIAQDLGIRQTVLDLSLIQQITRNALMEEGAAIQTASNGLPNTFVDGRNALFLLYAGIYAKGQNIKHIIVGVCETDFSGYPDCRDVFVKSMNVTLNLAMDYDFQIHTPLMYLTKAQTWALADELGYLDYIREQTHTCYNGVAGGCSECPSCVLRERGLREYLSARQAV

SEQ ID NO: 40021 - protein, 219 aa, Neisseria lactamica
  REGION 1..219: note = tr|E4ZEY4|E4ZEY4_NEIL0 7-cyano-7-deazaguanine synthase OS=Neisseria lactamica (strain 020-06) OX=489653; GN = queC PE=3 SV=1
MSNQQALVIFSGGQDSTTCLIQAVQTYGRENVRAITFQYGQRHAVELERAAWIAQDLGVPQTLVDLNLMKTITHNALMDEAASIETAGNGVPNTFVDGRNALFLLYAAIYAKGQGIRHIIAGVCETDFSGYPDCRDVFVKSMNVTLNLAMDYDFQIHTPLMYLTKAQTWALADEMGALDYIREQTHTCYNGIVGGCHECPSCILRERGLAEYLESKKTV

SEQ ID NO: 40022 - protein, 218 aa, Neisseria lactamica
  REGION 1..218: note = tr|D0WB79|D0WB79_NEILA 7-cyano-7-deazaguanine synthase OS=Neisseria lactamica ATCC 23970 OX=546265; GN = queC PE=3 SV=1
MSNQQALVIFSGGQDSTTCLIQAVQTYGRENVRAITFQYGQRHAVELERAAWIAQDLGVPQTLVDLNLMKTITHNALMDEAAAIETVDNGVPNTFVDGRNALFLLYAAIHAKGQGIRHIIAGVCETDFSGYPDCRDVFVKSMNVTLNLAMDYDFQIHTPLMYLTKAQTWALADEMGALDYIREQTHTCYNGIVGGCHECPSCILRERGLAEYLESIVD

SEQ ID NO: 40023 - protein, 219 aa, Neisseria macacae
  REGION 1..219: note = tr|F9EUQ2|F9EUQ2_9NEIS 7-cyano-7-deazaguanine synthase OS=Neisseria macacae ATCC 33926 OX=997348 GN=exsB; PE = 3 SV=1
MQNQQALVIFSGGQDSTTCLIQAIQTYGRENVQAITFQYGQRHAVELERARWIAQDLGVKQTVLDLSLMQQITHNALMDDTAAIETASDGLPNTFVDGRNALFLLYAAIYAKGQGIRHIIAGVCETDFSGYPDCRDVFVKSMNVTLNLAMDYAFQIHTPLMYLTKAQTWALADEMGALDYIREQTHTCYNGIVGGCHECPSCVLRERGLTEYLESKKAV

SEQ ID NO: 40024 - protein, 88 aa, Neisseria macacae
  REGION 1..88: note = tr|F9EWY4|F9EWY4_9NEIS Queuosine biosynthesis protein QueC (Fragment) OS=Neisseria macacae ATCC 33926; OX = 997348 GN=HMPREF9418_1661 PE=4 SV=1
GESVFYDFEDSLTCDPLMDINDNFYTSFLKIKYDNNHNSKISSIVFLSSYIFNLNKNLLEDYRERSKFGKDFQKERDRNRLVNYNINS

SEQ ID NO: 40025 - protein, 219 aa, Neisseria meningitidis
  REGION 1..219: note = sp|Q9K0Q9|QUEC_NEIMB 7-cyano-7-deazaguanine synthase; OS = Neisseria meningitidis serogroup B (strain MC58); OX = 122586 GN=queC PE=3 SV=1
MSNQQALVIFSGGQDSTTCLIQAIQTYGRENVQAITFQYGQRHAVELERARWIAQDLGVKQTVLDLSLMRQITHNALMDDTAAIETAENGVPNTFVDGRNALFLLYAAIYAKGQGIRHIIAGVCETDFSGYPDCRDVFVKSMNVTLNLAMDYDFQIHTPLMYLTKAQTWALADEMGVLDYIREQTHTCYNGIVGGCRECPSCILRERGLAEYLESKKAV

SEQ ID NO: 40026 - protein, 220 aa, Neisseria meningitidis
  REGION 1..220: note = sp|A9M1Y9|QUEC_NEIM0 7-cyano-7-deazaguanine synthase; OS = Neisseria meningitidis serogroup C (strain 053442); OX = 374833 GN=queC PE=3 SV=1
MSNQQALVIFSGGQDSTTCLIQAIQTYGRENVQAITFQYGQRHAVELERARWIAQDLGIKQTVLDLSLMRQITHNALMDDTAAIETAENGVPNTFVDGRNALFLLYAAIYAKGQGIRHIIAGVCETDFSGYPDCRDVFVKSMNVTLNLAMDYDFQIHTPLMYLTKAQTWALADEMGALDYIREQTHTCYNGIVGGGCRECPSCILRERGLAEYLESKKAV

SEQ ID NO: 40027 - protein, 255 aa, Neisseria mucosa
  REGION 1..255: note = tr|D2ZU77|D2ZU77_NEIMU 7-cyano-7-deazaguanine synthase OS=Neisseria mucosa ATCC 25996 OX=546266 GN=queC; PE = 3 SV=1
MFFQAAYIRTKSAIIRTIFSIFAVRKPPALPKLGFTMQHPQALVIFSGGQDSTTCLIQAIQTYGRENVQAITFQYGQRHAVELERARWIAQDLGVKQTVLDLSLMQQITHNALMDDTAAIETASDGLPNTFVDGRNALFLLYAAIYAKGQGIRHIIAGVCETDFSGYPDCRDVFVKSMNVTLNLAMDYAFQIHTPLMYLTKAQTWALADKMGALDYIREQTHTCYNGIVGGCHECPSCVLRERGLAEYLESKRVV

SEQ ID NO: 40028 - protein, 219 aa, Neisseria mucosa
  REGION 1..219: note = tr|A0A2R4AW71|A0A2R4AW71_NEIMU 7-cyano-7-deazaguanine synthase OS=Neisseria mucosa OX=488; GN = queC PE=3 SV=1
MQNQQALVIFSGGQDSTTCLIQAIQTYGRENVQAITFQYGQRHAVELERARWIAQDLGVKQTVLDLSLMQQITHNALMDDTAAIETASDGLPNTFVDGRNALFLLYAAIYAKGQGIRHIIAGVCETDFSGYPDCRDVFVKSMNVTLNLAMDYAFQIHTPLMYLTKAQTWALADEMGALDYIREQTHTCYNGIVGGCHECPSCVLRERGLAEYLESKRVV

SEQ ID NO: 40029 - protein, 219 aa, Neisseria perflava
  REGION 1..219: note = tr|A0A2I1QVL5|A0A2I1QVL5_NEIPE 7-cyano-7-deazaguanine synthase OS=Neisseria perflava; OX = 33053 GN=queC PE=3 SV=1
MEKQQALVIFSGGQDSTTCLIQAIQTYGRENVQAITFQYGQRHAIELERARWIAQDLGVKQTVLDLSLMQQITHNALMDDTASIETASDGLPNTFVDGRNALFLLYAAIYAKGQGIRHIIAGVCETDFSGYPDCRDVFVKSMNVTLNLAMDYAFQIHTPLMYLTKAQTWALADEMGVLDYICEHTHTCYNGVVGGCHECPSCILRERGLSEYLESKKAV

SEQ ID NO: 40030 - protein, 219 aa, Neisseria polysaccharea
  REGION 1..219: note = tr|E2PI34|E2PI34_NEIPO 7-cyano-7-deazaguanine synthase OS=Neisseria polysaccharea ATCC 43768 OX=546267; GN = queC PE=3 SV=1
MSNQQALVIFSGGQDSTTCLIQAIQTYGRENVQAITFQYGQRHDVELERARWIAQDLGVKQTVLDLSLMRQITHNALMDEAAAIETAENGVPNTFVDGRNALFLLYAAIYAKGQGIRHIIAGVCETDFSGYPDCRDVFVKSMNVTLNLAMDYDFQIHTPLMYLTKAQTWALADEMGALDYIREQTHTCYNGIVGGCHECPSCVLRERGLAEYLESKKAI

SEQ ID NO: 40031 - protein, 222 aa, Neisseria shayeganii
  REGION 1..222: note = tr|G4CF32|G4CF32_9NEIS 7-cyano-7-deazaguanine synthase OS=Neisseria shayeganii 871 OX=1032488 GN=exsB; PE = 3 SV=1
MSQTQALVIFSGGQDSTTCLLQAIARYGRPAVHALTFQYGQRHAIELERARWIAQDLGVAHTEFTLPPLNTLSRNALTDASLPIEQATPDAVPNTLVDGRNALFLLYAAIFAKSKNIRHLILGVCETDFSGYPDCRDIFVRSMNTTLNLAMDYPFEIHTPLMWLTKAQTWALADELGYLNYVREHTHTCYQGVAGGCGQCPACLLRERGLAEYLAQKAERQP

SEQ ID NO: 40032 - protein, 219 aa, Neisseria sicca
  REGION 1..219: note = tr|C6M0K7|C6M0K7_NEISI 7-cyano-7-deazaguanine synthase OS=Neisseria sicca ATCC 29256 OX=547045 GN=queC; PE = 3 SV=1
MQNQQALVIFSGGQDSTTCLIQAIQTYGRENVQAITFQYGQRHAVELERARWIAQDLGVKQTVLDLSLMQQITHNALMDDTAAIETASDGLPNTFVDGRNALFLLYAAIYAKGQGIRHIIAGVCETDFSGYPDCRDVFVKSMNVTLNLAMDYAFQIHTPLMYLTKAQTWALADEMGALDYIREQTHTCYNSIVGGCHECPSCVLRERGLAEYLESKKAV

SEQ ID NO: 40033 - protein, 219 aa, Neisseria sicca; identical to SEQ ID NO: 40028
  REGION 1..219: note = tr|A0A1V0HAH0|A0A1V0HAH0_NEISI 7-cyano-7-deazaguanine synthase OS=Neisseria sicca OX=490; GN = queC PE=3 SV=1

SEQ ID NO: 40034 - protein, 219 aa, Neisseria sp.
  REGION 1..219: note = tr|A0A1F1HVM2|A0A1F1HVM2_9NEIS 7-cyano-7-deazaguanine synthase OS=Neisseria sp. HMSC073G10 OX=1739369 GN=queC PE=3 SV=1
MEKQQALVIFSGGQDSTTCLIQAIQTYGRENVQAITFQYGQRHAIELERARWIAKDLGVKQTVLDLSLMQQITHNALMDDTASIETASDGLPNTFVDGRNALFLLYAAIYAKGQGIRHIIAGVCETDFSGYPDCRDVFVKSMNVTLNLAMDYAFQIHTPLMYLTKAQTWALADEMGVLDYIREQTHTCYNGVVGGCHECPSCILRERSLSEYLESKKAV

SEQ ID NO: 40035 - protein, 219 aa, Neisseria sp.
  REGION 1..219: note = tr|A0A2H9X015|A0A2H9X015_9NEIS 7-cyano-7-deazaguanine synthase OS=Neisseria sp. N95_16; OX = 2024408 GN=queC PE=3 SV=1
MHNQKALVIFSGGQDSTTCLLQAIQTYGRDNVQAITFHYGQRHSIELERAHWIAQDLGIAQTVLDLSLIRQITHNALMEEGADIQTAANGMPNTFVDGRNALFLMYAAIYAKGQNIKHIIVGVCETDFSGYPDCRDVFVKSMNVTLNLAMDYDFQIHTPLMYLTKAQTWALADELGYLDYVREQTHTCYNGVVGGCGECPSCVLRERGLQEYLESKQAI

SEQ ID NO: 40036 - protein, 219 aa, Neisseria subflava
  REGION 1..219: note = tr|A0A4D7WJS1|A0A4D7WJS1_NEISU 7-cyano-7-deazaguanine synthase OS=Neisseria subflava; OX = 28449 GN=queC PE=3 SV=1
MEKQQALVIFSGGQDSTTCLIQAIQTYGCENVQAITFQYGQRHAIELERARWIAQDLGVKQTVLDLSLMQQITHNALMDDTAYIETAPDGLPNTFVDGRNALFLLYAAIYAKGQGIRHIIAGVCETDFSGYPDCRDVFVKSMNVTLNLAMDYAFQIHTPLMYLTKAQTWALADEMGVLDYICEHTHTCYNGVVGGCHECPSCILRERGLSEYLESKKVV

SEQ ID NO: 40037 - protein, 219 aa, Neisseria subflava
  REGION 1..219: note = tr|D3A3Y2|D3A3Y2_NEISU 7-cyano-7-deazaguanine synthase OS=Neisseria subflava NJ9703 OX=546268 GN=queC; PE = 3 SV=1
MEKQQALVIFSGGQDSTTCLIQAIQTYGRENVQAITFQYGQRHAIELERARWIAQDLGVKQTVLDLSLMQQITHNALMDDTVSIETASDGLPNTFVDGRNALFLLYAAIYAKGQGIRHIIAGVCETDFSGYPDCRDVFVKSMNVTLNLAMDYAFQIHTPLMYLTKAQTWALADEMGVLDYIREHTHTCYNGVVGGCHECPSCILRERGLSEYLKSKKAV

SEQ ID NO: 40038 - protein, 220 aa, Neisseria wadsworthii
  REGION 1..220: note = tr|G4CSP9|G4CSP9_9NEIS 7-cyano-7-deazaguanine synthase OS=Neisseria wadsworthii 9715 OX=1030841 GN=exsB; PE = 3 SV=1
MQNEKALVIFSGGQDSTTCLIQAIQTYGRENVQAITFQYGQRHAIELDCARRIAEDLGIAQTVLDLSLMQQITHNALMDGTAEIQTGNNGVPNTFVDGRNALFLLYAAIYAKSQNIKHIITGVCETDFSGYPDCRDVFVKSMNVTLNLAMDYAFQIHTPLMYLTKAQTWALADRLGCFDYIREHTHTCYHGVEGGCGECPSCVLRERGLADYLAVRKSDR

SEQ ID NO: 40039 - protein, 218 aa, Neisseria weaveri
  REGION 1..218: note = tr|A0A3S5A916|A0A3S5A916_9NEIS 7-cyano-7-deazaguanine synthase OS=Neisseria weaveri; OX = 28091 GN=queC PE=3 SV=1
MQNEQALVIFSGGQDSTTCLIQAIHTYGRENVHAVTFQYGQRHAVELDCARRIAEDLGIAQTVLDLSLMQQITHNALMDDTAEIQTASNGVPNTFVDGRNALFLLYAAIYAKSQNIKHIITGVCETDFSGYPDCRDVFVKSMNVTLNLAMDYAFQIHTPLMYLTKAQTWALADRLGCLDYIREHTHTCYHGVTGGCGECPSCVLRERGLAEYLADQRP

SEQ ID NO: 40040 - protein, 221 aa, unidentified
  source 1..221: note = Neisseria zalophi
  REGION 1..221: note = tr|A0A5J6PTJ0|A0A5J6PTJ0_9NEIS 7-cyano-7-deazaguanine synthase QueC OS=Neisseria zalophi; OX = 640030 GN=queC PE=4 SV=1
MLSQKALVIFSGGQDSTTCLLQAIHAYGRENVQAITFEYGQRHAIELERARWIAADLGVPQTVLNLNLIQQITHNALMDDTTDIQTATDGMPNTFVDGRNALFLLYAAIYARSQNIKNIIIGVCETDFSGYPDCRDIFVKSMNVTLNLAMNDSFQIHTPLMYLTKAQTWALADEMGYLDYIREKTHTCYYGVEGGCGECPSCILRERGLAEYLASKNHVSV

SEQ ID NO: 40041 - protein, 216 aa, Neisseria zoodegmatis
  REGION 1..216: note = tr|A0A1X3CQ55|A0A1X3CQ55_9NEIS 7-cyano-7-deazaguanine synthase OS=Neisseria zoodegmatis; OX = 326523 GN=queC PE=3 SV=1
MHNEKALVVFSGGQDSTTCLIQAVQTYGRENVQAITFQYGQRHAIELERARWIAEDLGIAQTVLDLSLMQQITHNALMDDTAEIQTASNGVPNTFVDGRNALFLIYAAIYAKSQNIKHIIVGVCETDFSGYPDCRDVFVKSMNVTLNLAMDYAFQIHTPLMYLTKAQTWALADRLGCFDYIREHTHTCYHGVEGGCGECPSCVLRERGLAEYLASR

SEQ ID NO: 40042 - protein, 216 aa, Neisseria zoodegmatis
  REGION 1..216: note = tr|A0A378WVK7|A0A378WVK7_9NEIS 7-cyano-7-deazaguanine synthase OS=Neisseria zoodegmatis; OX = 326523 GN=queC PE=3 SV=1
MNNEKALVIFSGGQDSTTCLIQAIQTYGRENVQAITFQYGQRHAVELDCARRIAEDLGIAQTVLDLSLMQQITHNALMDDTAEIQTASNGVPNTFVDGRNALFLLYAAIYAKSQNIKHIIVGVCETDFSGYPDCRDVFVKSMNVTLNLAMDYAFQIHTPLMYLTKAQTWALADRLGCLDYIREHTHTCYHGVEGGCGECPSCVLRERGLAEYLASR

SEQ ID NO: 40043 - protein, 225 aa, unidentified
  source 1..225: note = Neisseriaceae bacterium
  REGION 1..225: note = tr|A0A2I7N315|A0A2I7N315_9NEIS 7-cyano-7-deazaguanine synthase OS=Neisseriaceae bacterium DSM 100970 OX=2052837 GN=queC PE=3 SV=1
MTKKAVVILSGGLDSSTLAYYLADKGYQLICVSYNYGQKHIKELESAAKIAANLGAKHHVIDIRFMNGFLQSSSLVNQDLDNPKEDYARENMLVTVVPNRNTMMLSLAWTIACAENAELLAFGPHKGDNYVYADCRPDYFNALNLALRLGTIDSRHEDLELSAPFINFTKTDIVKTGAKLDVPFADTWSCYDGREQHCGLCGTCRQRRQSFIDAGISDPTSYEVS

SEQ ID NO: 40044 - protein, 224 aa, unidentified
  source 1..224: note = Neisseriaceae bacterium
  REGION 1..224: note = tr|A0A431ITT1|A0A431ITT1_9NEIS 7-cyano-7-deazaguanine synthase OS=Neisseriaceae bacterium; OX = 2014784 GN=queC PE=3 SV=1
MKKKAVVILSGGLDSSTLSYHLASEGYDLICVSFDYGQKHIKELQSAAFIAKELNAPHHIINLSFMHQFLQQSSLVNPDLANPKQDYARENMLVTVVPNRNTMMLSLAWTIACAQNAEVLAFGPHKGDNYVYADCRPDYFLAMNLSLRLGTIDSRHEDLNLSAPFLNWSKTDIIRRGAELNVPFAKTWSCYDGLEEHCGVCGTCRQRKEAFIAANITDPTKYRE

SEQ ID NO: 40045 - protein, 227 aa, unidentified
  source 1..227: note = Neisseriales bacterium
  REGION 1..227: note = tr|A0A5C8B472|A0A5C8B472_9NEIS 7-cyano-7-deazaguanine synthase OS=Neisseriales bacterium; OX = 2053582 GN=queC PE=3 SV=1
MSMTKKAVVILSGGLDSSTLAYYLADKGYKLICVSYNYGQKHIKELESAAKIAHNLGAKHHIIDIRFMNGFLQSSSLVNQDLDNPKEDYARENMLVTVVPNRNTMMLSLAWTIACAENAELLAFGPHKGDNYVYADCRPDYFNALNLALRLGTIDSRHEDLELSAPFINFTKTDIVTTGAKLGVPFADTWSCYDGREKHCGLCGTCRQRRQSFIDAGISDPTSYEVS

SEQ ID NO: 40046 - protein, 234 aa, Neoasaia chiangmaiensis
  REGION 1..234: note = tr|A0A1U9KM97|A0A1U9KM97_9PROT 7-cyano-7-deazaguanine synthase OS=Neoasaia chiangmaiensis; OX = 320497 GN=queC PE=3 SV=1
MALSNDTALVLFSGGQDSATCLAWALARFRHVETLGFDYGQRHAVELECRETLRRDMASISAEWAARLGPDHMLDLGVLGALSETALTREAEISLTESGLPSTFVPGRNLIFLNFAAALAVRRQARHIVTGVCETDYSGYPDCRDDTIKALQVALNLGMAQRFVLHTPLMWRDKAQTWSLAEELGGADLVEAINRHSHSCYLGDRTHAHAWGYGCGTCPACELRAKGWAAYVER

SEQ ID NO: 40047 - protein, 229 aa, Neochlamydia sp.
  REGION 1..229: note = tr|A0A3Q9XV48|A0A3Q9XV48_9BACT 7-cyano-7-deazaguanine synthase OS=Neochlamydia sp. S13; OX = 1353976 GN=NCS13_1_0736 PE=3 SV=1
MRKKKAVVIHSGGMDSSICLALAMQELGKDAVTSLSFYYGQRHASEIIQAEKICKDWNVAHATLNLSCLSQVTTNALINPAVAIEKDPPTTPNTLVVGRNGLMARLGAIYADYLGASFIYLGVIGVEGNYSGYRDCSREYFDLKQKILRIDLANPHFKILTPLVSLTKKETLEIAHRLGILEYLLNTTITCYEGISQAGCQQCPACRLRNKGLQEFKEANPGVLLNVEP

SEQ ID NO: 40048 - protein, 219 aa, Neochlamydia sp.
  REGION 1..219: note = tr|A0A3T1C8I7|A0A3T1C8I7_9BACT 7-cyano-7-deazaguanine synthase OS=Neochlamydia sp. S13; OX = 1353976 GN=queC PE=3 SV=1
MKRAIVLLSGGLDSTVILALALAQGRECYALSFDYGQRHRIELTHASKIATYYQVKHCIVQIDSRVFKSSSLVSDLAVPKNRSKEDIGSGKTPNTYVPARNTLFLAYAMGQAEILDAQEIYLGANALDAPSYPDCTLSYIQAFQQVLNVGTKQAAEGNAPQLLTPLIHWDKAEIIRQGIALDVPMHMTFSCYDPTPQQKPCGQCDACILRAHGFVAAKG

SEQ ID NO: 40049 - protein, 270 aa, Neokomagataea sp.
  REGION 1..270: note = tr|A0A506UKH0|A0A506UKH0_9PROT 7-cyano-7-deazaguanine synthase OS=Neokomagataea sp. Jb2; OX = 2558904 GN=queC PE=3 SV=1
MTDDIPSLHHSHDLARPSWALSGALPLGVARGAALVLFSGGQDSATCLAWALTAFERVETVGFHYGQRHAVELDCRATLRDQIAALNPLWGARLGADHMIDLPALGKLSETALTREAEITYERDGLPNTFVPGRNIIFMNFAAALAYRRNLRHLVTGVCETDYSGYPDCRDDTMKSLQVTLNLGLGTTPESGGRFVIHTPLMWLDKAQTWRLCEILGGPSLVETIRRDSHSCYQGDRDQEHDWGYGCGHCPACTLRANGWAEYQARKEAR

SEQ ID NO: 40050 - protein, 237 aa, Neokomagataea tanensis
  REGION 1..237: note = tr|A0A4Y6V588|A0A4Y6V588_9PROT 7-cyano-7-deazaguanine synthase OS=Neokomagataea tanensis; OX = 661191 GN=queC PE=3 SV=1
MTVHANESALVLFSGGQDSATCLAWALTHYKRVETMGFDYGQRHSVELSCRETLREQMASLKPEWKDRLGADHMLDLRSLGTLSDTALTREAEISMTESGLPNTFVPGRNLLFLTYAAALAYRRSIKHIVTGVCETDYSGYPDCRDDTIKALQVALNLGMEQRFVLHTPLMWINKAQTWSLTETLGGNALVELINTESHSCYKGDRDHHHAWGFGCGECPACDLRAEGWQQYRETTV

SEQ ID NO: 40051 - protein, 236 aa, unidentified
  source 1..236: note = Neorhizobium alkalisoli
  REGION 1..236: note = tr|A0A561QXK0|A0A561QXK0_9RHIZ 7-cyano-7-deazaguanine synthase OS=Neorhizobium alkalisoli; OX = 528178 GN=queC PE=3 SV=1
MKTIVVCSGGLDSVSLAQRIASQGNLFGLISFDYGQRHRKELDFAAACAKRLGVFHQIIDMTAVGAQLTGSALTDDVEVPDGHYAEETMRVTVVPNRNAIMLTIAFGVAAARQADAVAIAVHGGDHFIYPDCRPGFIDAFQVMQNHALDGYAKVELLAPYVNGSKADIVTDGAKHDTPFAETWSCYKGGARHCGRCGTCVERREAFHLAGVADPTDYEDPDFWKAATAGFSAEEVR

SEQ ID NO: 40052 - protein, 464 aa, unidentified
  source 1..464: note = Neorhizobium galegae
  REGION 1..464: note = tr|A0A0T7G624|A0A0T7G624_RHIGA Putative PP-loop superfamily ATPase OS=Neorhizobium galegae bv. officinalis; OX = 323656 GN=NGAL_HAMBI1146_54990 PE=4 SV=1
MDQMTTEAPTEVHHEKHLFAVERGRGAQRPELDKATVAEIGKHIQFVPDILDTFDVKGFAAKHYDLMVLAAAIEFADRRWRRPASWLRNLHVTIPVIDHACWSRPEVQSSLRSAMNFLTGDSWRFTFVKAAEASPIGWRQVPLMFEQPKTFAIAYSNGLDSRAVSALSGPPSEALCIRVASTRQRRMEGDSHFTQIPFRVKGFKGKESSFRSRGFQFAAMATIASHLSNISRIIVPESGQGALGPVLVPLYGIYTDYRNFPAFFRKMERFTRVLLDCSIKFEQPRLWSTKGETMKAFLGLPGKKQQHLTNTRSCWQTRRIVNAEHRRQCGLCAACLLRRMSLHAAEIVEPGDAYVVSDLSAAEVDSALASITDDADRDIMVEYGSVGARHLDHLATMSELPDAKLRPFASQIAAATGEAYEQTLRNLRIMLMTHTREWRTFLSAQGEKSFLKNWMDGGRYDCSE

SEQ ID NO: 40053 - protein, 236 aa, unidentified
  source 1..236: note = Neorhizobium galegae
  REGION 1..236: note = tr|A0A0T7G319|A0A0T7G319_RHIGA 7-cyano-7-deazaguanine synthase OS=Neorhizobium galegae bv. officinalis OX=323656 GN=queC PE=3 SV=1
MKTIVVCSGGLDSVSLAHRIAEEQQLLGLISFDYGQRHRKELDFAAACAIRLGVFHEIIDMRGIGSRLTGSALTDDMDVPDGHYAQETMRVTVVPNRNAIMLSIAFGVAAARNADAVAIAVHGGDHFIYPDCRPGFIDAFQAMQDHALDGYASVRLLAPYVHGSKADIVTDGARHATPFAETWSCYKGGALHCGRCGTCVERREAFHLAGIEDPTEYEDPDFWRAATEEFRAEETR
